(19) United States
(12) Patent Application Publication
(10) Pub. No.: US 2012/0017338 A1
(43) Pub. Date: Jan. 19, 2012

(54) ISOLATED NOVEL NUCLEIC ACID AND PROTEIN MOLECULES FROM CORN AND METHODS OF USING THOSE MOLECULES TO GENERATE TRANSGENIC PLANT WITH ENHANCED AGRONOMIC TRAITS

(76) Inventors: Wei Wu, Chesterfield, MO (US); Jack Tabaska, O' Fallon, MO (US); David Kovalic, Clayton, MO (US); Bo-Xing Qiu, Chesterfield, MO (US)

(21) Appl. No.: 12/812,263

(22) PCT Filed: Jan. 9, 2009
(86) PCT No.: PCT/US09/00153

§ 371 Date: Jul. 9, 2010

Related U.S. Application Data
(60) Provisional application No. 61/011,138, filed on Jan. 15, 2008.

(51) Int. Cl. A01H 5/00; C12N 15/82; A01H 5/10; A01D 46/00; A01D 45/10; A01D 45/22; A01D 46/08; A01D 45/00; A01D 45/04; C12N 15/29; A01D 45/02

(52) U.S. Cl. 800/300; 536/23.6; 435/320.1; 800/298; 800/320.1; 800/312; 800/314; 800/306; 800/320.3; 800/320.2; 56/1

(57) ABSTRACT

This disclosure provides purified nucleic acids and polypeptides. Also provided are transgenic plants, seeds, and plant cells containing DNA for expression of the proteins that are useful for imparting enhanced agronomic trait(s) to transgenic crop plants, methods of making such plants and methods of making agricultural commodity including seeds and hybrid seeds from such plants.

### CROSS REFERENCE TO RELATED APPLICATIONS

[0001] This patent application claims priority (as a U.S. National Phase Application filed under 35 U.S.C. §371) to International Patent Application No. PCT/US2009/000153 (filed Jan. 9, 2009), which in turn claims priority to U.S. Application No. 61/011,138 (filed Jan. 15, 2008). The entire text of each of these priority patent applications is incorporated by reference into this patent.

### FIELD OF THE INVENTION

[0002] Disclosed herein are inventions in the field of plant genetics and developmental biology. More specifically, this invention provides novel compositions of corn DNA and peptide molecules. Also disclosed are plants comprising recombinant DNA providing one or more enhanced traits in a transgenic plant, including cells, seed, and pollen derived from such a plant, as well as methods of making and using such plant.

### INCORPORATION-BY-REFERENCE OF MATERIALS FILED ON COMPACT DISC

[0003] A sequence listing having the file name “38-21(55305)B-0001_SeqListing.txt” which has 133,889,462 bytes (measured in MS-WINDOWS) was created on Jul. 9, 2010 and has 83558 sequences is enclosed herewith in computer readable format and is herein incorporated by reference.

### SUMMARY OF THE INVENTION

[0004] Certain embodiments of the disclosed invention provide recombinant DNA constructs having polynucleotides characterized by reference to SEQ ID NO:1-41779 and the cognate proteins with amino acid sequences having reference to SEQ ID NO:41780-83558. The recombinant DNA constructs are used in aspects of the various embodiments of the invention to provide enhanced traits when stably integrated into the chromosomes and expressed in the nuclei of transgenic plants cells. In many aspects of these embodiments, the recombinant DNA constructs, when expressed in a plant cell, provide for expression of cognate proteins. In particular aspects of the invention the recombinant DNA constructs for expressing cognate proteins are characterized by cognate amino acid sequence that have at least 95% identity over at least 95% of the length of a reference sequence selected from the group consisting of SEQ ID NOs: 41780-83558 when the amino acid sequence is aligned to the reference sequence. In some aspects of the invention, the recombinant DNA constructs are characterized as being constructed with sense-oriented and/or anti-sense-oriented polynucleotides from the group consisting of SEQ ID NOs: 1-41779 which, when expressed in a plant cell, provide for the suppression of cognate proteins having amino acid sequences that have at least 95% identity over at least 95% of the length of a reference sequence selected from the group consisting of SEQ ID NOs: 41780-83558.

[0005] In certain aspects of this invention the recombinant DNA constructs of the invention are stably integrated into the chromosome of a plant cell nucleus.

[0006] Certain aspects of this embodiment of the invention provide transgenic plant cells having stably integrated recombinant DNA constructs, transgenic plants and seeds comprising a plurality of such transgenic plant cells and transgenic pollen of such plants. Such transgenic plants can be selected from a population of transgenic plants regenerated from plant cells transformed with recombinant DNA constructs by screening transgenic plants for an enhanced trait as compared to control plants. The enhanced trait provided may include, but is not limited to, enhanced water use efficiency, enhanced cold tolerance, increased yield, enhanced nitrogen use efficiency, altered seed protein composition, altered seed oil composition, or any combinations thereof.

[0007] Other embodiments of the invention provide for plant cells, plants, seeds, and pollen that can further comprise DNA expressing a protein that provides tolerance from exposure to an herbicide applied at levels that are lethal to a wild type plant cell.

[0008] Embodiments of the invention also provide methods for manufacturing non-natural, transgenic seed that can be used to produce a crop of transgenic plants with an enhanced trait resulting from expression of a stably-integrated recombinant DNA construct. The methods may comprise one or more of the following steps: (a) screening a population of plants for an enhanced trait and a recombinant DNA construct, where individual plants in the population can exhibit the trait at a level less than, essentially the same as or greater than the level that the trait is exhibited in control plants, (b) selecting from the population one or more plants that exhibit the trait at a level greater than the level that said trait is exhibited in control plants, (c) collecting seed from a selected plant, (d) verifying that the recombinant DNA is stably integrated in said selected plants, (e) analyzing tissue of a selected plant to determine the production or suppression of a protein having the function of a protein encoded by nucleotides in at least one sequence selected from SEQ ID NOs:1-41779. In certain embodiments of the invention, the plants in the population further include DNA expressing a protein that provides tolerance to exposure to a herbicide applied at levels that are lethal to wild type plant cells and the selecting is affected by treating the population with the herbicide, e.g. a glyphosate, dicamba, or glufosinate compound. In another embodiment of the invention, the plants are selected by identifying plants with the enhanced trait. The methods can be used for the manufacturing corn, soybean, cotton, canola, alfalfa, wheat, rice, sugarcane or sugar beet seed. In other embodiments of the present invention, the methods can also be used for manufacture transgenic plants including, but are not limited to, millet, barley, peanut, pigeon pea, sorghum, vegetables (including but not limited to Broccoli, Cauliflower, Cabbage, Radish, Chinese cabbage, Melons, Watermelons, Cucumber, Gourds, Pumpkin, Squash, Pepper, Tomato, Eggplant, Onion, Carrot, Garden Bean, Sweet Corn, Pea, Dry Bean, Okra, Spinach, Leek, Lettuce, and Fennel), grape, berries (including blue, black, raspberry, mullberry, boisenberry, etc), cherry and related fruit trees (including but not limited to plum, peach, apricot, kiwi, pomegranate, mango, fig), fruit trees (including but not limited to orange, lemon, lime, blood orange, grapefruit, and the like), and nut trees (including but not limited to coconut, walnut (English and black), pecan, almond, hazelnut, brazil nut, hickory nut, acorn, and the like) and sunflower, other oilseed producing plants or any combinations thereof.

[0009] Other embodiments of the invention provide a methods for producing hybrid corn seed by acquiring hybrid corn seed from a herbicide tolerant corn plant which also has stably-integrated, recombinant DNA construct having a promoter that is (a) functional in plant cells and (b) is operably linked to DNA that encodes or suppresses a protein having the function of a protein encoded by nucleotides in at least one sequence selected from the group consisting of SEQ ID NOs:1-41779. The methods of these embodiments may further include producing corn plants from said hybrid corn seed, wherein a fraction of the plants produced from said hybrid corn seed is homozygous for said recombinant DNA, a fraction of the plants produced from said hybrid corn seed is hemizygous for said recombinant DNA, and a fraction of the plants produced from said hybrid corn seed has none of said recombinant DNA; selecting corn plants which are homozygous and hemizygous for said recombinant DNA by treating with an herbicide; collecting seed from herbicide-treated-surviving corn plants and planting said seed to produce further progeny corn plants; repeating the selecting and collecting steps at least once to produce an inbred corn line; and crossing the inbred corn line with a second corn line to produce hybrid seed.

[0010] Other embodiments of the invention provide methods for selecting a plant comprising plant cells of the invention by using an immunoreactive antibody to detect the presence or absence of protein expressed or suppressed by recombinant DNA in seed or plant tissue. Another embodiment of the invention provides anti-counterfeit milled seed having, as an indication of origin, plant cells of this invention.

[0011] Still other embodiments of this invention provide for transgenic plants with enhanced water use efficiency or enhanced nitrogen use efficiency. For example, this invention provides methods of growing a corn, cotton, soybean, or canola crop without irrigation water by planting seed having plant cells of the invention which are selected for enhanced water use efficiency. Alternatively embodiments of these methods include applying reduced irrigation water, e.g. providing up to 300 millimeters of ground water during the production of a corn crop. This invention also provides methods of growing a corn, cotton, soybean or canola crop without added nitrogen fertilizer by planting seed having plant cells of the invention which are selected for enhanced nitrogen use efficiency.

[0012] Other embodiments of the invention provide mixtures comprising plants cells and an antibody to a protein produced in the cells where the protein has an amino acid sequence that has at least 95% identity over at least 95% of the length of a reference sequence selected from the group consisting of SEQ ID NO: 41780-83558 when the sequence is aligned to the reference sequence.

### ILLUSTRATIVE EMBODIMENTS OF THE INVENTION

[0013] While the making and using of various embodiments of the present invention are discussed in detail below, it should be appreciated that the present invention provides many applicable inventive concepts that can be embodied in a wide variety of specific contexts. The specific embodiments discussed herein are merely illustrative of specific ways to make and use the invention and do not delimit the scope of the invention.

[0014] To facilitate the understanding of this invention, a number of terms are defined below. Terms defined herein have meanings as commonly understood by a person of ordinary skill in the areas relevant to the present invention. Terms such as “a”, “an” and “the” are not intended to refer to only a singular entity, but include the general class of which a specific example may be used for illustration. The terminology herein is used to describe specific embodiments of the invention, but their usage does not delimit the invention, except as outlined in the claims.

[0015] In the attached sequence listing:

[0016] SEQ ID NO:1-41779 are nucleotide sequences of the coding strand of DNA for “genes” used in the recombinant DNA imparting an enhanced trait in plant cells, e.g. each comprises a coding sequence for a protein;

[0017] SEQ ID NO: 41780-83558 are amino acid sequences of the cognate protein of the “genes” with nucleotide coding sequences provided by SEQ ID NO: 1-41779;

[0018] As used herein, a “plant cell” means a plant cell that is transformed with stably-integrated, non-natural, recombinant DNA, e.g. by Agrobacterium-mediated transformation or by bombardment using microparticles coated with recombinant DNA or other means. A plant cell of this invention can be an originally-transformed plant cell that exists as a microorganism or as a progeny plant cell that is duplicated by regeneration into differentiated tissue, e.g. into a transgenic plant with stably-integrated, non-natural recombinant DNA, or seed or pollen derived from a progeny transgenic plant.

[0019] As used herein, a “transgenic plant” means a plant whose genome has been altered by the stable integration of recombinant DNA. A transgenic plant includes a plant regenerated from an originally-transformed plant cell and progeny transgenic plants from later generations or crosses of a transformed plant.

[0020] A “consensus amino acid sequence” means an artificial, amino acid sequence indicating conserved amino acids in the sequence of homologous proteins as determined by statistical analysis of an optimal alignment, e.g. CLUSTALW, of amino acid sequence of homolog proteins. The consensus sequences listed in the sequence listing were created by identifying the most frequent amino acid at each position in a set of aligned protein sequences. When there was 100% identity in an alignment the amino acid is indicated by a capital letter. When the occurrence of an amino acid is at least about 70% in an alignment, the amino acid is indicated by a lower case letter. When there is no amino acid occurrence of at least about 70%, e.g. due to diversity or gaps, the amino acid is indicated by an “x”. When used to defined embodiments of the invention, a consensus amino acid sequence will be aligned with a query protein amino acid sequence in an optimal alignment, e.g. CLUSTALW. An embodiment of the invention will have identity to the conserved amino acids indicated in the consensus amino acid sequence.

[0021] As used herein, “control plant” means a plant that does not contain the recombinant DNA that expressed a protein which imparts an enhanced trait. A control plant is to identify and select a transgenic plant that has an enhance trait. A suitable control plant can be a non-transgenic plant of the parental line used to generate a transgenic plant, e.g., devoid of recombinant DNA. A suitable control plant can in some cases be a progeny of a hemizygous transgenic plant line that is does not contain the recombinant DNA, known as a negative segregant.

[0022] As used herein, an “enhanced trait” means a characteristic of a transgenic plant that includes, but is not limited to, an enhance agronomic trait characterized by enhanced plant morphology, physiology, growth and development, yield, nutritional enhancement, disease or pest resistance, or environmental or chemical tolerance. In more specific aspects of this invention enhanced trait is selected from group of enhanced traits consisting of enhanced water use efficiency, enhanced cold tolerance, increased yield, enhanced nitrogen use efficiency, enhanced seed protein and enhanced seed oil. In an important aspect of the invention the enhanced trait is enhanced yield including increased yield under non-stress conditions and increased yield under environmental stress conditions. Stress conditions can include, for example, drought, shade, fungal disease, viral disease, bacterial disease, insect infestation, nematode infestation, cold temperature exposure, heat exposure, osmotic stress, reduced nitrogen nutrient availability, reduced phosphorus nutrient availability and high plant density. “Yield” can be affected by many properties including without limitation, plant height, pod number, pod position on the plant, number of internodes, incidence of pod shatter, grain size, efficiency of nodulation and nitrogen fixation, efficiency of nutrient assimilation, resistance to biotic and abiotic stress, carbon assimilation, plant architecture, resistance to lodging, percent seed germination, seedling vigor, and juvenile traits. Yield can also be affected by efficiency of germination (including germination in stressed conditions), growth rate (including growth rate in stressed conditions), ear number, seed number per ear, seed size, composition of seed (starch, oil, protein) and characteristics of seed fill.

[0023] Increased yield of a transgenic plant of the present invention can be measured in a number of ways, including test weight, seed number per plant, seed weight, seed number per unit area (e.g., seeds, or weight of seeds, per acre), bushels per acre, tonnes per acre, tons per acre, kilo per hectare. For example, maize yield can be measured as production of shelled corn kernels per unit of production area in bushels per acre or metric tons per hectare, often reported on a moisture adjusted basis at about 15.5 percent moisture. Increased yield can result from improved utilization of key biochemical compounds such as nitrogen, phosphorous and carbohydrate, or from improved responses to environmental stresses, such as cold, heat, drought, salt, and attack by pests or pathogens. Recombinant DNA used in this invention can also be used to provide plants having improved growth and development, and ultimately increased yield, as the result of modified expression of plant growth regulators or modification of cell cycle or photosynthesis pathways. Also of interest is the generation of transgenic plants that demonstrate enhanced yield with respect to a seed component that can correspond to an increase in overall plant yield. Such properties include enhancements in seed oil, seed molecules such as tocopherol, protein and starch, or oil, particular oil components as can be manifest by alterations in the ratios of seed components.

[0024] Seed according to the present invention may be planted, grown and harvested to produce a crop or terminal crop. As used herein, a “crop” is a plant or plant product that is grown and harvested, such plant or plant product including but not limited to plants or plant parts such as leaf, root, shoot, fruit, seed, grain, or the like. A “terminal crop” is a crop grown for uses other than for use as planting seed to produce subsequent generations of plants. In some crop plants, such as grain produced from hybrid corn, the crop is not very suitable for planting because it does not breed true and the crop can then be conveniently referred to as “hybrid grain.” In other crop plants, where the crop does breed true, such as soybean, whether a crop is planting seed or a terminal crop will depend on the uses and marketing channels of the crop. If used or marketed for planting, it will be a crop of planting seed; if used or marketed for other purposes it will be a terminal crop.

[0025] As used herein, “exogenous promoter region” refers to a sequence, capable of promoting mRNA transcription, that does not naturally occur in the plant at the same site and/or linked to the nucleic acids. The promoter can be from a different plant species or it can be from the same plant species, but naturally found in a different location in a non-genetically modified plant. Moreover, the promoter region can be found in the same genetic locus as is present a native plant, but linked to different sequence(s), than are native.

[0026] As used herein, “promoter” means regulatory DNA for initializing transcription. A “plant promoter” is a promoter capable of initiating transcription in plant cells whether or not its origin is a plant cell, e.g. is it well known that Agrobacterium promoters are functional in plant cells. Thus, plant promoters include promoter DNA obtained from plants, plant viruses and bacteria such as Agrobacterium and Bradyrhizobium bacteria. Examples of promoters under developmental control include promoters that preferentially initiate transcription in certain tissues, such as leaves, roots, or seeds. Such promoters are referred to as “tissue preferred”. Promoters that initiate transcription only in certain tissues are referred to as “tissue specific”. A “cell type” specific promoter primarily drives expression in certain cell types in one or more organs, for example, vascular cells in roots or leaves. An “inducible” or “repressible” promoter is a promoter which is under environmental control. Examples of environmental conditions that can effect transcription by inducible promoters include anaerobic conditions, or certain chemicals, or the presence of light. Tissue specific, tissue preferred, cell-type specific, and inducible promoters constitute the class of “non-constitutive” promoters. A “constitutive” promoter is a promoter which is active under most conditions.

[0027] As used herein, “expressed” means produced, e.g. a protein is expressed in a plant cell when its cognate DNA is transcribed to mRNA that is translated to the protein.

[0028] As used herein, an “expression cassette of a DNA construct” is capable of integrating in a plant genome, expressing a functional polypeptide and providing a transgenic plant expressing polypeptides of the invention.

[0029] As used herein, “suppressed” means decreased, e.g. a protein is suppressed in a plant cell when there is a decrease in the amount and/or activity of the protein in the plant cell. The presence or activity of the protein can be decreased by any amount up to and including a total loss of protein expression and/or activity.

[0030] As used herein, a “functional fragment” refers to a portion of a polypeptide provided herein which retains full or partial molecular, physiological or biochemical function of the full length polypeptide. A functional fragment often contains the domain(s), such as Pfam domain, identified in the polypeptide provided in the sequence listing.

[0031] As used herein, a “homolog” means a protein in a group of proteins that perform the same biological function, e.g. proteins that belong to the same Pfam protein family and that provide a common enhanced trait in transgenic plants of this invention. Homologs are expressed by homologous genes. With reference to homologous genes, homologs include orthologs, e.g., genes expressed in different species that evolved from a common ancestral genes by speciation and encode proteins retain the same function, but do not include paralogs, e.g., genes that are related by duplication but have evolved to encode proteins with different functions. Homologous genes include naturally occurring alleles and artificially-created variants. Degeneracy of the genetic code provides the possibility to substitute at least one base of the protein encoding sequence of a gene with a different base without causing the amino acid sequence of the polypeptide produced from the gene to be changed. When optimally aligned, homolog proteins have typically at least about 60% identity, in some instances at least about 70%, for example about 80% and even at least about 90% identity over the full length of a protein identified as being associated with imparting an enhanced trait when expressed in plant cells. In one aspect of the invention homolog proteins have an amino acid sequence that has at least 90% identity to a consensus amino acid sequence of proteins and homologs disclosed herein.

[0032] Homologs are identified by comparison of amino acid sequence, e.g. manually or by use of a computer-based tool using known homology-based search algorithms such as those commonly known and referred to as BLAST, FASTA, and Smith-Waterman. A local sequence alignment program, e.g. BLAST, can be used to search a database of sequences to find similar sequences, and the summary Expectation value (E-value) used to measure the sequence base similarity. Because a protein hit with the best E-value for a particular organism may not necessarily be an ortholog, e.g., have the same function, or be the only ortholog, a reciprocal query is used to filter hit sequences with significant E-values for ortholog identification. The reciprocal query entails search of the significant hits against a database of amino acid sequences from the base organism that are similar to the sequence of the query protein. A hit can be identified as an ortholog, when the reciprocal query's best hit is the query protein itself or a protein encoded by a duplicated gene after speciation. A further aspect of the homologs encoded by DNA useful in the transgenic plants of the invention are those proteins that differ from a disclosed protein as the result of deletion or insertion of one or more amino acids in a native sequence.

[0033] Other functional homolog proteins differ in one or more amino acids from those of a trait-improving protein disclosed herein as the result of one or more of the well-known conservative amino acid substitutions, e.g., valine is a conservative substitute for alanine and threonine is a conservative substitute for serine. Conservative substitutions for an amino acid within the native sequence can be selected from other members of a class to which the naturally occurring amino acid belongs. Representative amino acids within these various classes include, but are not limited to: (1) acidic (negatively charged) amino acids such as aspartic acid and glutamic acid; (2) basic (positively charged) amino acids such as arginine, histidine, and lysine; (3) neutral polar amino acids such as glycine, serine, threonine, cysteine, tyrosine, asparagine, and glutamine; and (4) neutral nonpolar (hydrophobic) amino acids such as alanine, leucine, isoleucine, valine, proline, phenylalanine, tryptophan, and methionine. Conserved substitutes for an amino acid within a native amino acid sequence can be selected from other members of the group to which the naturally occurring amino acid belongs. For example, a group of amino acids having aliphatic side chains is glycine, alanine, valine, leucine, and isoleucine; a group of amino acids having aliphatic-hydroxyl side chains is serine and threonine; a group of amino acids having amide-containing side chains is asparagine and glutamine; a group of amino acids having aromatic side chains is phenylalanine, tyrosine, and tryptophan; a group of amino acids having basic side chains is lysine, arginine, and histidine; and a group of amino acids having sulfur-containing side chains is cysteine and methionine. Naturally conservative amino acids substitution groups are: valine-leucine, valine-isoleucine, phenylalanine-tyrosine, lysine-arginine, alanine-valine, aspartic acid-glutamic acid, and asparagine-glutamine. A further aspect of the invention includes proteins that differ in one or more amino acids from those of a described protein sequence as the result of deletion or insertion of one or more amino acids in a native sequence.

[0034] Genes that are homologous to each other can be grouped into families and included in multiple sequence alignments. Then a consensus sequence for each group can be derived. This analysis enables the derivation of conserved and class-(family) specific residues or motifs that are functionally important. These conserved residues and motifs can be further validated with 3D protein structure if available. The consensus sequence can be used to define the full scope of the invention, e.g., to identify proteins with a homolog relationship. Thus, the present invention contemplates that protein homologs include proteins with an amino acid sequence that has at least 90% identity to such a consensus amino acid sequence sequences.

[0035] As used herein, “operably linked” refers to the association of two or more nucleic acid elements in a recombinant DNA construct, e.g. as when a promoter is operably linked with DNA that is transcribed to RNA whether for expressing or suppressing a protein. Recombinant DNA constructs can be designed to express a protein which can be an endogenous protein, an exogenous homologue of an endogenous protein or an exogenous protein with no native homologue. Alternatively, recombinant DNA constructs can be designed to suppress the level of an endogenous protein, e.g. by suppression of the native gene. Such gene suppression can be effectively employed through a native RNA interference (RNAi) mechanism in which recombinant DNA comprises both sense and anti-sense oriented DNA matched to the gene targeted for suppression where the recombinant DNA is transcribed into RNA that can form a double-strand to initiate an RNAi mechanism. Gene suppression can also be effected by recombinant DNA that comprises anti-sense oriented DNA matched to the gene targeted for suppression. Gene suppression can also be effected by recombinant DNA that comprises DNA that is transcribed to a microRNA matched to the gene targeted for suppression. In the examples illustrating the invention recombinant DNA for effecting gene suppression that imparts is identified by the term “antisense”. It will be understood by a person of ordinary skill in the art that any of the ways of effecting gene suppression are contemplated and enabled by a showing of one approach to gene suppression.

[0036] As used herein, “percent identity” means the extent to which two optimally aligned DNA or protein segments are invariant throughout a window of alignment of components, for example nucleotide sequence or amino acid sequence. An “identity fraction” for aligned segments of a test sequence and a reference sequence is the number of identical components that are shared by sequences of the two aligned segments divided by the total number of sequence components in the reference segment over a window of alignment which is the smaller of the full test sequence or the full reference sequence. “Percent identity” (“% identity”) is the identity fraction times 100. Such optimal alignment is understood to be deemed as local alignment of DNA sequences. For protein alignment, a local alignment of protein sequences should allow introduction of gaps to achieve optimal alignment. Percent identity is calculated over the aligned length not including the gaps introduced by the alignment per se.

[0037] As used herein, a “plant by-product” includes any product that is made from a plant or plant product, for example, by dehulling, crushing, milling, extraction, hydrogenation, and other processes. A plant by-products in accordance with the invention, therefore, will include such as, for example, dehulled soybeans, crushed corn, soybean meal, soy milk, paper made from corn stalks, and a wide range of other useful products of processing based on plant vitamins, minerals, lipids, proteins and carbohydrates and their constituents that can be characterized as being produced from crops or terminal crops in accordance with the invention.

[0038] As used herein, a “plant cell” means a plant cell that is transformed with stably-integrated, recombinant DNA, e.g. by Agrobacterium-mediated transformation or by bombardment using microparticles coated with recombinant DNA or other means. A plant cell of this invention can be an originally-transformed plant cell that exists as a microorganism or as a progeny plant cell that is regenerated into differentiated tissue, e.g. into a transgenic plant with stably-integrated, non-natural recombinant DNA, or seed or pollen derived from a progeny transgenic plant.

[0039] As used herein, the term “polypeptide” or “polypeptide molecule” means a chain of amino acids. Polypeptide is also commonly referred as “protein”.

[0040] As used herein, “polyadenylated ribonucleotides” refers to the series of adenosines at the 3′ end of a polyribonucleotide commonly referred to as a “poly-A tail”.

[0041] As used herein, “recombinant DNA” means DNA which has been a genetically engineered and constructed outside of a cell including DNA containing naturally occurring DNA or cDNA or synthetic DNA.

[0042] As used herein, the term “structural nucleic acid molecule” refers to a molecule having sequence that encodes a protein, functional peptide fragment, or any other molecule that has biological activity (including, but not limited to, mRNA and bioactive RNA molecules, including antisense RNA).

[0043] As used herein, the term “substantially purified nucleic acid” or polypeptide means nucleic acid or protein separated from substantially all other molecules normally associated with it in its native state. A substantially purified nucleic acid can be greater than about 60% free from the other molecules (exclusive of solvent) present in the natural mixture. The term “substantially purified” is not intended to encompass molecules present in their native state.

[0044] “Pfam” database is a large collection of multiple sequence alignments and hidden Markov models covering many common protein families, e.g. Pfam version 19.0 (December 2005) contains alignments and models for 8183 protein families and is based on the Swissprot 47.0 and SP-TrEMBL 30.0 protein sequence databases. See S. R. Eddy, “Profile Hidden Markov Models”, Bioinformatics 14:755-763, 1998. The Pfam database is currently maintained and updated by the Pfam Consortium. The alignments represent some evolutionary conserved structure that has implications for the protein's function. Profile hidden Markov models (profile HMMs) built from the protein family alignments are useful for automatically recognizing that a new protein belongs to an existing protein family even if the homology by alignment appears to be low.

### Recombinant DNA Constructs

[0045] Recombinant DNA constructs are assembled using methods well known to persons of ordinary skill in the art and typically comprise a promoter operably linked to DNA, the expression of which provides the enhanced agronomic trait. Other construct components can include additional regulatory elements, such as 5′ leaders and introns for enhancing transcription, 3′ untranslated regions (such as polyadenylation signals and sites), DNA for transit or signal peptides.

[0046] Numerous promoters that are active in plant cells have been described in the literature. These include promoters present in plant genomes as well as promoters from other sources, including nopaline synthase (NOS) promoter and octopine synthase (OCS) promoters carried on tumor-inducing plasmids of Agrobacterium tumefaciens and the CaMV35S promoters from the cauliflower mosaic virus as disclosed in U.S. Pat. Nos. 5,164,316 and 5,322,938. Useful promoters derived from plant genes are found in U.S. Pat. No. 5,641,876 which discloses a rice actin promoter, U.S. Pat. No. 7,151,204 which discloses a maize chloroplast aldolase promoter and a maize aldolase (FDA) promoter, and US Patent Application Publication 2003/0131377 A1 which discloses a maize nicotianamine synthase promoter. These and numerous other promoters that function in plant cells are known to those skilled in the art and available for use in recombinant polynucleotides of the present invention to provide for expression of desired genes in transgenic plant cells.

[0047] Furthermore, the promoters can be altered to contain multiple “enhancer sequences” to assist in elevating gene expression. Such enhancers are known in the art. By including an enhancer sequence with such constructs, the expression of the selected protein can be enhanced. These enhancers often are found 5′ to the start of transcription in a promoter that functions in eukaryotic cells, but can often be inserted upstream (5′) or downstream (3′) to the coding sequence. In some instances, these 5′ enhancing elements are introns. Particularly useful as enhancers are the 5′ introns of the rice actin 1 (see U.S. Pat. No. 5,641,876) and rice actin 2 genes, the maize alcohol dehydrogenase gene intron, the maize heat shock protein 70 gene intron (U.S. Pat. No. 5,593,874) and the maize shrunken 1 gene. See also US Patent Application Publication 2002/0192813A1 which discloses 5′, 3′ and intron elements useful in the design of effective plant expression vectors.

[0048] In other aspects of the invention, sufficient expression in plant seed tissues is desired to affect improvements in seed composition. Exemplary promoters for use for seed composition modification include promoters from seed genes such as napin as disclosed in U.S. Pat. No. 5,420,034, maize L3 oleosin as disclosed in U.S. Pat. No. 6,433,252), zein Z27 as disclosed by Russell et al. (1997) Transgenic Res. 6(2):157-166), globulin 1 as disclosed by Belanger et at (1991) Genetics 129:863-872), glutelin 1 as disclosed by Russell (1997) supra), and peroxiredoxin antioxidant (Per1) as disclosed by Stacy et al. (1996) Plant Mol. Biol. 31(6):1205-1216.

[0049] Recombinant DNA constructs in this invention will generally include a 3′ element that typically contains a polyadenylation signal and site. Well-known 3′ elements include those from Agrobacterium tumefaciens genes such as nos 3′, tml 3′, tmr 3′, tms 3, ocs 3′, tr7 3′, for example disclosed in U.S. Pat. No. 6,090,627; 3′ elements from plant genes such as wheat (Triticum aesevitum) heat shock protein 17 (Hspl 7 3), a wheat ubiquitin gene, a wheat fructose-1,6-biphosphatase gene, a rice glutelin gene, a rice lactate dehydrogenase gene and a rice beta-tubulin gene, all of which are disclosed in US Patent Application Publication Number 2002/0192813 A1; and the pea (Pisum sativum) ribulose biphosphate carboxylase gene (rbs 3′), and 3′ elements from the genes within the host plant.

[0050] Constructs and vectors can also include a transit peptide for targeting of a gene to a plant organelle, particularly to a chloroplast, leucoplast or other plastid organelle. For descriptions of the use of chloroplast transit peptides see U.S. Pat. No. 5,188,642 and U.S. Pat. No. 5,728,925. For description of the transit peptide region of an Arabidopsis EPSPS gene useful in the present invention, see Klee, H. J. et at (MGG (1987) 210:437-442).

[0051] Recombinant DNA constructs for gene suppression can be designed for any of a number the well-known methods for suppressing transcription of a gene, the accumulation of the mRNA corresponding to that gene or preventing translation of the transcript into protein. Posttranscriptional gene suppression can be practically effected by transcription of RNA that forms double-stranded RNA (dsRNA) having homology to mRNA produced from a gene targeted for suppression.

[0052] Gene suppression can also be achieved by insertion mutations created by transposable elements can also prevent gene function. For example, in many dicot plants, transformation with the T-DNA of Agrobacterium can be readily achieved and large numbers of transformants can be rapidly obtained. Also, some species have lines with active transposable elements that can efficiently be used for the generation of large numbers of insertion mutations, while some other species lack such options. Mutant plants produced by Agrobacterium or transposon mutagenesis and having altered expression of a polypeptide of interest can be identified using the polynucleotides of the present invention. For example, a large population of mutated plants can be screened with polynucleotides encoding the polypeptide of interest to detect mutated plants having an insertion in the gene encoding the polypeptide of interest.

[0053] Transgenic plants comprising or derived from plant cells of this invention transformed with recombinant DNA can be further enhanced with stacked traits, e.g. a crop plant having an enhanced trait resulting from expression of DNA disclosed herein in combination with herbicide and/or pest resistance traits. For example, genes of the current invention can be stacked with other traits of agronomic interest, such as a trait providing herbicide resistance, or insect resistance, such as using a gene from Bacillus thuringensis to provide resistance against lepidopteran, coliopteran, homopteran, hemiopteran, and other insects. Herbicides for which transgenic plant tolerance has been demonstrated and the method of the present invention can be applied include, but are not limited to, glyphosate, dicamba, glufosinate, sulfonylurea, bromoxynil and norflurazon herbicides. Polynucleotide molecules encoding proteins involved in herbicide tolerance are well-known in the art and include, but are not limited to, a polynucleotide molecule encoding 5-enolpyruvylshikimate-3-phosphate synthase (EPSPS) disclosed in U.S. Pat. Nos. 5,094,945; 5,627,061; 5,633,435 and 6,040,497 for imparting glyphosate tolerance; polynucleotide molecules encoding a glyphosate oxidoreductase (GOX) disclosed in U.S. Pat. No. 5,463,175 and a glyphosate-N-acetyl transferase (GAT) disclosed in U.S. Patent Application Publication Number 2003/0083480 A1 also for imparting glyphosate tolerance; dicamba monooxygenase disclosed in U.S. Patent Application Publication Number 2003/0135879 A1 for imparting dicamba tolerance; a polynucleotide molecule encoding bromoxynil nitrilase (Bxn) disclosed in U.S. Pat. No. 4,810,648 for imparting bromoxynil tolerance; a polynucleotide molecule encoding phytoene desaturase (crtl) described in Misawa et al, (1993) Plant J. 4:833-840 and in Misawa et al, (1994) Plant J. 6:481-489 for norflurazon tolerance; a polynucleotide molecule encoding acetohydroxyacid synthase (AHAS, aka ALS) described in Sathasiivan et al. (1990) Nucl. Acids Res. 18:2188-2193 for imparting tolerance to sulfonylurea herbicides; polynucleotide molecules known as bar genes disclosed in DeBlock, et al. (1987) EMBO J. 6:2513-2519 for imparting glufosinate and bialaphos tolerance; polynucleotide molecules disclosed in U.S. Patent Application Publication Number 2003/010609 A1 for imparting N-amino methyl phosphonic acid tolerance; polynucleotide molecules disclosed in U.S. Pat. No. 6,107,549 for imparting pyridine herbicide resistance; molecules and methods for imparting tolerance to multiple herbicides such as glyphosate, atrazine, ALS inhibitors, isoxoflutole and glufosinate herbicides are disclosed in U.S. Pat. No. 6,376,754 and U.S. Patent Application Publication Number 2002/0112260. Molecules and methods for imparting insect/nematode/virus resistance are disclosed in U.S. Pat. Nos. 5,250,515; 5,880,275; 6,506,599; 5,986,175 and U.S. Patent Application Publication Number 2003/0150017 A1.

[0054] Embodiments of the invention provide molecules of that include “fragments” of the disclosed recombinant DNA molecules; including oligonucleotides of at least 15, at least 16 or 17, at least 18 or 19, and at least 20, 21, 22, 23, 24, 25, 26, 27, 28, 29, 30 or more, consecutive nucleotides of any of the sequences provided. Such oligonucleotides are fragments of the larger molecules having a sequence selected from the group consisting of SEQ ID NO: 1 through SEQ ID NO: 41779, and find use, for example as probes and primers for detection of the polynucleotides of the present invention.

[0055] Aspects of the various embodiments of the invention also provide for nucleic acid fragments of SEQ ID NO: 1 through SEQ ID NO: 41779 that are at least about 50, 100, 150, 200, 400, 500 or more nucleotides in length. Some aspects of these embodiments provide for nucleic acid molecules that encode functional fragments of any of the polypeptide sequences provided in SEQ ID NO: 41780 to SEQ ID NO: 83558.

[0056] Other embodiments of the present invention provide for one or more polypeptides having at least about 10 contiguous peptide residues of one or more of the peptide sequences provided in SEQ ID NO: 41780 to SEQ ID NO: 83558. In other aspects of these embodiment, the polypeptide(s) comprises at least 15, 20, 25, 30, 35, 50, 75, 100 or more contiguous peptide residues from one or more of the sequences provided in SEQ ID NO: 41780 to SEQ ID NO: 83558. In particularly aspects, these embodiments the poly peptide includes a functional fragment of one or more of the polypeptides provided in the Sequence Listing.

[0057] Other aspects of the various embodiments of the invention includes, transgenic plants, transgenic plant seeds, transgenic crops, plant products and byproducts having any of the nucleic acid or protein fragments described above. The invention also provides for various methods that use such fragments.

[0058] Embodiments of the present invention also contemplate that the trait-improving recombinant DNA provided herein can be used in combination with other recombinant DNA to create plants with multiple desired traits or a further enhanced trait. The combinations generated can include multiple copies of any one or more of the recombinant DNA constructs. These stacked combinations can be created by any method, including but not limited to cross breeding of transgenic plants, or multiple genetic transformation.

### Plant Cell Transformation Methods

[0059] Numerous methods for transforming chromosomes in a plant cell nucleus with recombinant DNA are known in the art and are used in methods of preparing a transgenic plant cell nucleus cell, and plant. Two effective methods for such transformation are Agrobacterium-mediated transformation and microprojectile bombardment. Microprojectile bombardment methods are illustrated in U.S. Pat. Nos. 5,015,580 (soybean); 5,550,318 (corn); 5,538,880 (corn); 5,914,451 (soybean); 6,160,208 (corn); 6,399,861 (corn); 6,153,812 (wheat) and 6,365,807 (rice) and Agrobacterium-mediated transformation is described in U.S. Pat. Nos. 5,159,135 (cotton); 5,824,877 (soybean); 5,463,174 (canola); 5,591,616 (corn); 5,846,797 (cotton); 6,384,301 (soybean), 7,026,528 (wheat) and 6,329,571 (rice), US Patent Application Publication 2004/0087030 A1 (cotton), and US Patent Application Publication 2001/0042257 A1 (sugar beet), all of which are incorporated herein by reference for enabling the production of transgenic plants. Transformation of plant material is practiced in tissue culture on a nutrient media, e.g., a mixture of nutrients that will allow cells to grow in vitro. Recipient cell targets include, but are not limited to, meristem cells, hypocotyls, calli, immature embryos and gametic cells such as microspores, pollen, sperm and egg cells. Callus can be initiated from tissue sources including, but not limited to, immature embryos, hypocotyls, seedling apical meristems, microspores and the like. Cells containing a transgenic nucleus are grown into transgenic plants.

[0060] In addition to direct transformation of a plant material with a recombinant DNA, a transgenic plant cell nucleus can be prepared by crossing a first plant having cells with a transgenic nucleus with recombinant DNA with a second plant lacking the transgenic nucleus. For example, recombinant DNA can be introduced into a nucleus from a first plant line that is amenable to transformation to transgenic nucleus in cells that are grown into a transgenic plant which can be crossed with a second plant line to introgress the recombinant DNA into the second plant line. A transgenic plant with recombinant DNA providing an enhanced trait, e.g. enhanced yield, can be crossed with transgenic plant line having other recombinant DNA that confers another trait, for example herbicide resistance or pest resistance, to produce progeny plants having recombinant DNA that confers both traits. Typically, in such breeding for combining traits the transgenic plant donating the additional trait is a male line and the transgenic plant carrying the base traits is the female line. The progeny of this cross will segregate such that some of the plants will carry the DNA for both parental traits and some will carry DNA for one parental trait; such plants can be identified by markers associated with parental recombinant DNA, e.g. marker identification by analysis for recombinant DNA or, in the case where a selectable marker is linked to the recombinant, by application of the selecting agent such as a herbicide for use with a herbicide tolerance marker, or by selection for the enhanced trait. Progeny plants carrying DNA for both parental traits can be crossed back into the female parent line multiple times, for example usually 6 to 8 generations, to produce a progeny plant with substantially the same genotype as one original transgenic parental line but for the recombinant DNA of the other transgenic parental line.

[0061] In certain embodiments of the invention the recombinant DNA insertion is “targeted” in order to achieve site-specific integration, for example to replace an existing gene in the genome, to use an existing promoter in the plant genome, or to insert a recombinant polynucleotide at a predetermined site known to be active for gene expression. Several site specific recombination systems exist which are known to function implants include cre-lox as disclosed in U.S. Pat. No. 4,959,317 and FLP-FRT as disclosed in U.S. Pat. No. 5,527,695, both incorporated herein by reference.

[0062] Transformation methods of this invention can be practiced in tissue culture on media and in a controlled environment. “Media” refers to the numerous nutrient mixtures that are used to grow cells in vitro, that is, outside of the intact living organism. Recipient cell targets include, but are not limited to, meristem cells, callus, immature embryos and gametic cells such as microspores, pollen, sperm and egg cells. It is contemplated that any cell from which a fertile plant can be regenerated is useful as a recipient cell. Callus can be initiated from tissue sources including, but not limited to, immature embryos, seedling apical meristems, microspores and the like. Cells capable of proliferating as callus are also recipient cells for genetic transformation. Practical transformation methods and materials for making transgenic plants of this invention, for example, various media and recipient target cells, transformation of immature embryo cells and subsequent regeneration of fertile transgenic plants are disclosed in U.S. Pat. Nos. 6,194,636 and 6,232,526, which are incorporated herein by reference.

[0063] The seeds of transgenic plants can be harvested from fertile transgenic plants and be used to grow progeny generations of transformed plants of this invention including hybrid plants line for selection of plants having an enhanced trait. In addition to direct transformation of a plant with a recombinant DNA, transgenic plants can be prepared by crossing a first plant having a recombinant DNA with a second plant lacking the DNA. For example, recombinant DNA can be introduced into first plant line that is amenable to transformation to produce a transgenic plant which can be crossed with a second plant line to introgress the recombinant DNA into the second plant line. A transgenic plant with recombinant DNA providing an enhanced trait, e.g. enhanced yield, can be crossed with transgenic plant line having other recombinant DNA that confers another trait, for example herbicide resistance or pest resistance, to produce progeny plants having recombinant DNA that confers both traits. Typically, in such breeding for combining traits the transgenic plant donating the additional trait is a male line and the transgenic plant carrying the base traits is the female line. The progeny of this cross will segregate such that some of the plants will carry the DNA for both parental traits and some will carry DNA for one parental trait; such plants can be identified by markers associated with parental recombinant DNA, e.g. marker identification by analysis for recombinant DNA or, in the case where a selectable marker is linked to the recombinant, by application of the selecting agent such as a herbicide for use with a herbicide tolerance marker, or by selection for the enhanced trait. Progeny plants carrying DNA for both parental traits can be crossed back into the female parent line multiple times, for example usually 6 to 8 generations, to produce a progeny plant with substantially the same genotype as one original transgenic parental line but for the recombinant DNA of the other transgenic parental line.

[0064] Descriptions of commonly used breeding terms such as “crossing”, “hybrids” and methods for crossing and producing hybrid that are used to describe present invention can be found in one of several reference books (Allard, “Principles of Plant Breeding,” John Wiley & Sons, NY, U. of CA, Davis, Calif., 50-98, 1960; Simmonds, “Principles of crop improvement,” Longman, Inc., NY, 369-399, 1979; Sneep and Hendriksen, “Plant breeding perspectives,” Wageningen (ed), Center for Agricultural Publishing and Documentation, 1979; Fehr, In: Soybeans: Improvement, Production and Uses, 2nd Edition, Monograph., 16:249, 1987; Fehr, “Principles of variety development,” Theory and Technique, (Vol. 1) and Crop Species Soybean (Vol. 2), Iowa State Univ., Macmillan Pub. Co., NY, 360-376, 1987).

[0065] In some embodiments of the invention, during transformation, DNA is introduced into only a small percentage of target plant cells in any one transformation. Marker genes are used to provide an efficient system for identification of those cells that are stably transformed by receiving and integrating a transgenic DNA construct into their genomes. Marker genes provide selective markers which confer resistance to a selective agent, such as an antibiotic or herbicide. Any of the herbicides to which plants of this invention can be resistant are useful agents for selective markers. Potentially transformed cells are exposed to the selective agent. In the population of surviving cells will be those cells where, generally, the resistance-conferring gene is integrated and expressed at sufficient levels to permit cell survival. Cells can be tested further to confirm stable integration of the exogenous DNA. Commonly used selective marker genes include those conferring resistance to antibiotics such as kanamycin and paromomycin (nptII), hygromycin B (aph IV) and gentamycin (aac3 and aacC4) or resistance to herbicides such as glufosinate (bar or pat) and glyphosate (aroA or EPSPS). Examples of such selectable are illustrated in U.S. Pat. Nos. 5,550,318; 5,633,435; 5,780,708 and 6,118,047, all of which are incorporated herein by reference. Selectable markers which provide an ability to visually identify transformants can also be employed, for example, a gene expressing a colored or fluorescent protein such as a luciferase or green fluorescent protein (GFP) or a gene expressing a beta glucuronidase or uidA gene (GUS) for which various chromogenic substrates are known.

[0066] Plant cells that survive exposure to the selective agent, or plant cells that have been scored positive in a screening assay, can be cultured in regeneration media and allowed to mature into plants. Developing plantlets regenerated from transformed plant cells can be transferred to plant growth mix, and hardened off, for example, in an environmentally controlled chamber at about 85% relative humidity, 600 ppm CO₂, and 25-250 microeinsteins m⁻²s⁻¹ of light, prior to transfer to a greenhouse or growth chamber for maturation. Plants are regenerated from about 6 weeks to 10 months after a transformant is identified, depending on the initial tissue. Plants can be pollinated using conventional plant breeding methods known to those of skill in the art and seed produced. The regenerated transformed plant or its progeny seed or plants can be tested for expression of the recombinant DNA and selected for the presence of enhanced agronomic trait.

[0067] Progeny can be recovered from transformed plants and tested for expression of the exogenous recombinant polynucleotide. Useful assays include, for example, “molecular biological” assays, such as Southern and Northern blotting and PCR; “biochemical” assays, such as detecting the presence of RNA, e.g., double stranded RNA, or a protein product, e.g., by immunological means (ELISAs and Western blots) or by enzymatic function; plant part assays, such as leaf or root assays; and also, by analyzing the phenotype of the whole regenerated plant.

### Transgenic Plants and Seeds

[0068] Transgenic plants derived from the plant cells of this invention are grown to generate transgenic plants having an enhanced trait as compared to a control plant and produce transgenic seed and haploid pollen of this invention. Such plants with enhanced traits are identified by selection of transformed plants or progeny seed for the enhanced trait. For efficiency a selection method is designed to evaluate multiple transgenic plants (events) including the recombinant DNA, for example multiple plants from 2 to 20 or more transgenic events. Transgenic plants grown from transgenic seed provided herein demonstrate improved agronomic traits that contribute to increased yield or other trait that provides increased plant value, including, for example, improved seed quality. Of particular interest are plants having enhanced water use efficiency, enhanced cold tolerance, increased yield, enhanced nitrogen use efficiency, enhanced seed protein and enhanced seed oil. Transgenic plants of the present invention include, but are not limited to, corn, soybean, cotton, canola, alfalfa, wheat, rice, sugarcane, sugar beet seed, millet, barley, peanut, pigeon pea, sorghum, vegetables (including but not limited to Broccoli, Cauliflower, Cabbage, Radish, Chinese cabbage, Melons, Watermelons, Cucumber, Gourds, Pumpkin, Squash, Pepper, Tomato, Eggplant, Onion, Carrot, Garden Bean, Sweet Corn, Pea, Dry Bean, Okra, Spinach, Leek, Lettuce, and Fennel), grape, berries (including blue, black, raspberry, mullberry, boysenberry. etc), cherry and related fruit trees (including but not limited to plum, peach, apricot, kiwi, pomegranate, mango, fig), fruit trees (including but not limited to orange, lemon, lime, blood orange, grapefruit, and the like), nut trees (including but not limited to coconut, walnut (English and black), pecan, almond, hazelnut, brazil nut, hickory nut, acorn, and the like), sunflower, other oilseed producing plants or any combinations thereof.

Selection Methods for Transgenic Plants with Enhanced Agronomic Trait

[0069] Within a population of transgenic plants each regenerated from a plant cell having a nucleus with recombinant DNA many plants that survive to fertile transgenic plants that produce seeds and progeny plants may not exhibit an enhanced agronomic trait. Selection from such population is necessary to identify one or more transgenic plant cells having a transgenic nucleus that can provide plants with the enhanced trait. Transgenic plants having enhanced traits are selected from populations of plants regenerated or derived from plant cells transformed as described herein by evaluating the plants in a variety of assays to detect an enhanced trait. These assays also can take many forms including, but not limited to, direct screening for the trait in a greenhouse or field trial or by screening for a surrogate trait. Such analyses can be directed to detecting changes in the chemical composition, biomass, physiological properties, morphology of the plant. Changes in chemical compositions such as nutritional composition of grain can be detected by analysis of the seed composition and content of protein, free amino acids, oil, free fatty acids, starch or tocopherols. Changes in biomass characteristics can be made on greenhouse or field grown plants and can include plant height, stem diameter, root and shoot dry weights; and, for corn plants, ear length and diameter. Changes in physiological properties can be identified by evaluating responses to stress conditions, for example assays using imposed stress conditions such as water deficit, nitrogen deficiency, cold growing conditions, pathogen or insect attack or light deficiency, or increased plant density. Changes in morphology can be measured by visual observation of tendency of a transformed plant with an enhanced agronomic trait to also appear to be a normal plant as compared to changes toward bushy, taller, thicker, narrower leaves, striped leaves, knotted trait, chlorosis, albino, anthocyanin production, or altered tassels, ears or roots. Other selection properties include days to pollen shed, days to silking, leaf extension rate, chlorophyll content, leaf temperature, stand, seedling vigor, internode length, plant height, leaf number, leaf area, tillering, brace roots, stay green, stalk lodging, root lodging, plant health, barreness/prolificacy, green snap, and pest resistance. In addition, phenotypic characteristics of harvested grain can be evaluated, including number of kernels per row on the ear, number of rows of kernels on the ear, kernel abortion, kernel weight, kernel size, kernel density and physical grain quality.

[0070] Assays for screening for a desired trait are readily designed by those practicing in the art. The following illustrates screening assays for corn traits using hybrid corn plants. The assays can be readily adapted for screening other plants such as canola, cotton and soybean either as hybrids or inbreds.

[0071] In certain embodiments of the invention transgenic corn plants having nitrogen use efficiency can be identified by screening in fields with three levels of nitrogen (N) fertilizer being applied, e.g. low level (0 N), medium level (80 lb/ac) and high level (180 lb/ac). Plants with enhanced nitrogen use efficiency provide higher yield as compared to control plants.

[0072] In other embodiments, transgenic corn plants having enhanced yield can be identified by screening using progeny of the transgenic plants over multiple locations with plants grown under optimal production management practices and maximum weed and pest control. A useful target for improved yield is a 5% to 10% increase in yield as compared to yield produced by plants grown from seed for a control plant. Selection methods can be applied in multiple and diverse geographic locations, for example up to 16 or more locations, over one or more planting seasons, for example at least two planting seasons, to statistically distinguish yield improvement from natural environmental effects.

[0073] In other embodiments, transgenic corn plants having enhanced water use efficiency can be identified by screening plants in an assay where water is withheld for a period to induce stress followed by watering to revive the plants. For example, a useful selection process imposes 3 drought/re-water cycles on plants over a total period of 15 days after an initial stress free growth period of 11 days. Each cycle consists of 5 days, with no water being applied for the first four days and a water quenching on the 5th day of the cycle. The primary phenotypes analyzed by the selection method are the changes in plant growth rate as determined by height and biomass during a vegetative drought treatment.

[0074] In other embodiments, transgenic corn plants having enhanced cold tolerance can be identified by screening plants in a cold germination assay and/or a cold tolerance field trial. In a cold germination assay trays of transgenic and control seeds are placed in a growth chamber at 9.7° C. for 24 days (no light). For example, seeds having higher germination rates as compared to the control can be identified as having enhanced cold tolerance. In a cold tolerance field trial plants with enhanced cold tolerance can be identified from field planting at an earlier date than conventional Spring planting for the field location. For example, seeds are planted into the ground around two weeks before local farmers begin to plant corn so that a significant cold stress is exerted onto the crop, named as cold treatment. Seeds can be planted under local optimal planting conditions such that the crop has little or no exposure to cold condition, named as normal treatment. At each location, seeds may be can be planted under both cold and normal conditions preferably with multiple repetitions per treatment.

[0075] In other embodiments, transgenic corn plants having seeds with increased protein and/or oil levels can be identified by analyzing progeny seed for protein and/or oil. Near-infrared transmittance spectrometry is a non-destructive, high-throughput method that is useful to determine the composition of a bulk seed sample for properties listed in table 1.

TABLE 1

| | |
|---|---|
| Typical sample(s): | Whole grain corn and soybean seeds |
| Typical analytical range: | Corn - moisture 5-15%, oil 5-20%, |
| | protein 5-30%, starch 50-75%, and density |
| | 1.0-1.3%. |
| | Soybean - moisture 5-15%, oil 15-25%, |
| | and protein 35-50%. |

[0076] Although the plant cells and methods of this invention can be applied to any plant cell, plant, seed or pollen, e.g. any fruit, vegetable, grass, tree or ornamental plant, the various aspects of the invention are preferably applied to corn, soybean, cotton, canola, alfalfa, wheat, rice, sugarcane, and sugar beet plants. In many cases the invention is applied to corn plants that are inherently resistant to disease from the Mal de Rio Cuarto virus or the Puccina sorghi fungus or both.

### Homolog Identification

[0077] In certain embodiment, the present invention also includes identification of homologs of proteins encoded by the DNA identified in the sequence listing which is used to provide transgenic seed and plants having enhanced agronomic traits. From the sequence of the homologs, homologous DNA sequence are identified for preparing additional transgenic seeds and plants of this invention with enhanced agronomic traits.

[0078] An “All Protein Database” are constructed of known protein sequences using a proprietary sequence database and the National Center for Biotechnology Information (NCBI) non-redundant amino acid database (nr.aa). For each organism from which a polynucleotide sequence provided herein can be obtained, an “Organism Protein Database” are constructed of known protein sequences of the organism; it is a subset of the All Protein Database based on the NCBI taxonomy ID for the organism.

[0079] The All Protein Database are queried using amino acid sequences provided herein as SEQ ID NO: 41780 through SEQ ID NO: 83558 using NCBI “blastp” program with E-value cutoff of 1e⁻⁸. Up to 1000 top hits are kept, and separated by organism names. For each organism other than that of the query sequence, a list is kept for hits from the query organism itself with a more significant E-value than the best hit of the organism. The list contain likely duplicated genes of the polynucleotides provided herein, and is referred to as the Core List. Another list is kept for all the hits from each organism, sorted by E-value, and referred to as the Hit List.

[0080] The Organism Protein Database are queried using polypeptide sequences provided herein as SEQ ID NO: 41780 through SEQ ID NO: 83558 using NCBI “blastp” program with E-value cutoff of 1e⁻⁴. Up to 1000 top hits are kept. A BLAST searchable database is constructed based on these hits, and are referred to as “SubDB”. SubDB are queried with each sequence in the Hit List using NCBI “blastp” program with E-value cutoff of 1e⁻⁸. The hit with the best E-value are compared with the Core List from the corresponding organism. The hit is deemed a likely ortholog if it belongs to the Core List, otherwise it is deemed not a likely ortholog and there is no further search of sequences in the Hit List for the same organism. Homologs from a large number of distinct organisms are identified and reported.

[0081] Recombinant DNA constructs can be prepared using the DNA encoding each of the identified homologs and the constructs can be used to prepare multiple events of transgenic corn, soybean, canola, cotton and other transgenic plants mentioned. Plants can be regenerated from the transformed plant cells and used to produce progeny plants and seed that are screened for enhanced water use efficiency, enhanced cold tolerance, increased yield, enhanced nitrogen use efficiency, enhanced seed protein and enhanced seed oil. From each group of multiple events of transgenic plants with a specific recombinant DNA for a homolog the event that produces the greatest enhancement in yield, water use efficiency, nitrogen use efficiency, enhanced cold tolerance, enhanced seed protein and enhanced seed oil is identified and progeny seed can be selected for commercial development.

### Pfam Module Annotation

[0082] The amino acid sequence of the expressed proteins shown to be associated with an enhanced trait are analyzed for Pfam protein family against the current Pfam collection of multiple sequence alignments and hidden Markov models using the HMMER software in the appended computer listing. The Pfam domain modules and individual protein domain for the proteins shown in the sequence listing. The Hidden Markov model databases for the identified patent families are known to a skilled artisan allowing identification of other homologous proteins and their cognate encoding DNA to enable the full breadth of the invention for a person of ordinary skill in the art. Certain proteins are identified by a single Pfam domain and others by multiple Pfam domains.

[0083] In one aspect, the present invention includes recombinant DNA constructs having a polynucleotide encoding a protein that has an amino acid sequence having at least 95% identity over at least 95% of the length of a reference sequence selected from the group consisting of SEQ ID NO: 41780-83558 when said amino acid sequence is aligned with said reference sequence.

[0084] In another aspect, the present invention includes a mixture having plant cells, and an antibody to a protein produced in said cells wherein said protein has an amino acid sequence that has at least 95% identity over at least 95% of the length of a reference sequence selected from the group consisting of SEQ ID NO: 41780-83558 when said amino acid sequence is aligned to said reference sequence.

[0085] Yet another aspect of the present invention includes recombinant DNA constructs having a promoter that is functional in a plant cell and that is operably linked to a polynucleotide that: (a) encodes a protein having an amino acid sequence having at least 95% identity over at least 95% of the length of a reference sequence selected from the group consisting of SEQ ID NO: 41780-83558, when said amino acid sequence is aligned to said reference sequence; or is transcribed into an RNA molecule that suppresses the level of an endogenous protein that has an amino acid sequence that is at least 95% identical over at least 95% of the length of a reference sequence of SEQ ID NO: 41780-83558, when said amino acid sequence is aligned to said reference sequence; and wherein said construct is stably integrated into a chromosome in a plant cell nucleus. In some aspect, this invention includes a transgenic plant cell having the recombinant DNA construct wherein said DNA construct provides for an enhanced trait as compared to control plants; and wherein said enhanced trait is enhanced water use efficiency, enhanced cold tolerance, increased yield, enhanced nitrogen use efficiency, enhanced seed protein or enhanced seed oil. The DNA construct further can express a protein that provides tolerance from exposure to an herbicide (e.g., a glyphosate, dicamba, or glufosinate compound) having an agent applied at levels that are lethal to a wild type of said plant cell nucleus.

[0086] In some aspects, this invention provides transgenic plants (e.g., corn, soybean, cotton, canola, alfalfa, wheat, rice, sugarcane, or sugar beet plant), that is homozygous for said recombinant DNA and have a plurality of plant cells.

[0087] Yet in another aspect, this inventions includes transgenic pollen grains having a haploid derivative of a plant cell nucleus having a chromosome comprising the recombinant DNA construct.

[0088] In one aspect, this inventions provides a method for manufacturing non-natural, transgenic seed (e.g., corn, soybean, cotton, canola, alfalfa, wheat, rice, sugarcane, or sugar beet seed) that can be used to produce a crop of transgenic plants with an enhanced trait resulting from expression of a stably-integrated, recombinant DNA construct, said method includes (a) screening a population of plants for said enhanced trait and said recombinant DNA, wherein individual plants in said population exhibit said trait at a level less than, essentially the same as or greater than the level that said trait is exhibited in control plants which do not contain said recombinant DNA, wherein said enhanced trait is selected from the group of enhanced traits consisting of enhanced water use efficiency, enhanced cold tolerance, increased yield, enhanced nitrogen use efficiency, enhanced seed protein and enhanced seed oil; (b) selecting from said population one or more plants that exhibit said trait at a level greater than the level that said trait is exhibited in control plants, and (c) collecting seed from selected plant from step b.

[0089] Yet in another aspect, the method of this invention further includes: (a) verifying that said recombinant DNA is stably integrated in said selected plants, and (b) analyzing tissue of said selected plant to determine the expression or suppression of a protein having the function of a protein having an amino acid sequence selected from the group consisting of one of SEQ ID NOs: 41780-83558.

[0090] In one aspect, this invention provides a method of producing hybrid corn seed including: (a) acquiring hybrid corn seed from an herbicide tolerant corn plant which also has a stably-integrated, recombinant DNA construct; (b) producing corn plants from said hybrid corn seed, wherein a fraction of the plants produced from said hybrid corn seed is homozygous for said recombinant DNA, a fraction of the plants produced from said hybrid corn seed is hemizygous for said recombinant DNA, and a fraction of the plants produced from said hybrid corn seed has none of said recombinant DNA; (c) selecting corn plants which are homozygous and hemizygous for said recombinant DNA by treating with an herbicide; (d) collecting seed from herbicide-treated-surviving corn plants and planting said seed to produce further progeny corn plants; (e) repeating steps (c) and (d) at least once to produce an inbred corn line; and (f) crossing said inbred corn line with a second corn line to produce hybrid seed.

[0091] In some aspect, this invention provides substantially purified nucleic acid molecule having a nucleic acid sequence wherein said nucleic acid sequence exhibits 95% or greater identity to a nucleic acid sequence selected from the group consisting of SEQ ID NO: 1 through SEQ ID NO: 41779 and sequences complementary to SEQ ID NO: 1 through SEQ ID NO: 41779.

[0092] It is contemplated that any embodiment discussed in this specification can be implemented with respect to any method, kit, reagent, or composition of the invention, and vice versa. Furthermore, compositions of the invention can be used to achieve methods of the invention.

[0093] It will be understood that particular embodiments described herein are shown by way of illustration and not as limitations of the invention. The principal features of this invention can be employed in various embodiments without departing from the scope of the invention. Those skilled in the art will recognize, or be able to ascertain using no more than routine experimentation, numerous equivalents to the specific procedures described herein. Such equivalents are considered to be within the scope of this invention and are covered by the claims.

[0094] All publications and patent applications mentioned in the specification are indicative of the level of skill of those skilled in the art to which this invention pertains. All publications and patent applications are herein incorporated by reference to the same extent as if each individual publication or patent application was specifically and individually indicated to be incorporated by reference.

[0095] The use of the word “a” or “an” when used in conjunction with the term “comprising” in the claims and/or the specification may mean “one,” but it is also consistent with the meaning of “one or more,” “at least one,” and “one or more than one.” The use of the term “or” in the claims is used to mean “and/or” unless explicitly indicated to refer to alternatives only or the alternatives are mutually exclusive, although the disclosure supports a definition that refers to only alternatives and “and/or.” Throughout this application, the term “about” is used to indicate that a value includes the inherent variation of error for the device, the method being employed to determine the value, or the variation that exists among the study subjects.

[0096] As used in this specification and claim(s), the words “comprising” (and any form of comprising, such as “comprise” and “comprises”), “having” (and any form of having, such as “have” and “has”), “including” (and any form of including, such as “includes” and “include”) or “containing” (and any form of containing, such as “contains” and “contain”) are inclusive or open-ended and do not exclude additional, unrecited elements or method steps.

[0097] The term “or combinations thereof” as used herein refers to all permutations and combinations of the listed items preceding the term. For example, “A, B, C, or combinations thereof” is intended to include at least one of: A, B, C, AB, AC, BC, or ABC, and if order is important in a particular context, also BA, CA, CB, CBA, BCA, ACB, BAC, or CAB. Continuing with this example, expressly included are combinations that contain repeats of one or more item or term, such as BB, AAA, AB, BBC, AAABCCCC, CBBAAA, CABABB, and so forth. The skilled artisan will understand that typically there is no limit on the number of items or terms in any combination, unless otherwise apparent from the context.

[0098] All of the compositions and/or methods disclosed and claimed herein can be made and executed without undue experimentation in light of the present disclosure. While the compositions and methods of this invention have been described in terms of preferred embodiments, it will be apparent to those of skill in the art that variations may be applied to the compositions and/or methods and in the steps or in the sequence of steps of the method described herein without departing from the concept, spirit and scope of the invention. All such similar substitutes and modifications apparent to those skilled in the art are deemed to be within the spirit, scope and concept of the invention as defined by the appended claims.

The application's sequence listing, which the Patent Office published only in electronic form, follows.

SEQUENCE LISTING (83558 sequences)

SEQ ID NO: 1 - DNA, 195 bp, Zea mays
  Peptide Sequence Number=SeqID_41780
atgcctacagggcaaggatatcatgatttgaacaagcaggggaaagtcaagaagcaagctggccttcccgagtacgagtatgggttcgttggatcattctattctatgtcaattggaagttgcatttcagactctggaagccccgttccttctccttttaaggaaactcgaaatctcgaactagaaatctcgtaa

SEQ ID NO: 2 - DNA, 528 bp, Zea mays
  Peptide Sequence Number=SeqID_41781
atggatcctaatgcaagcaagccggaactcttccacataattttcaaggcgacgcttggggccttccatgttatagtcagccaactctattttctcaggtacctgagaaagaggttgtgggagtatgcatgggggcagtctgttggtgacaacctgttgaactcagtttatgctatgggtaagtgtgtgcaagactttatggcggatgagaagattcacaagcctacgctgcttgggccgcattttgctttgctggtttggctgtatgagcatactcaagtgaggaagactgtcttctcggggaagacaggctttcgaggacaaaaggaaagatacatgaaaaaatcccaacttaaagtagtggaattgccaagcctatcgggatacgagccaatccctagcctagaagcgaggagagagggtatttcaaattcacaaagccaaactgacaagcgagagccggtgagtaaggtggaggcagaaaggaagttgtatgaatctctttttcccggaaaagtatacttgtga

SEQ ID NO: 3 - DNA, 306 bp, Zea mays
  Peptide Sequence Number=SeqID_41782
atgggactggattcgattagtattgcgctcgtaaaaggaataggaaggaataaacctcagatgaaaaggaatatctctactctagcgctcactacgttctctagcgttattattggcgaaagaagggtcagatacttcttgggcttgagcaacaggagaggactcgttttccttcttagcaacaggccgtggttttccaagaaagggtctggatcgcatccgttgggaaaggtcgaactaccggtattaagcactgccttctctaccggagaatcacccgcggaagagatatcagctccggtctaa

SEQ ID NO: 4 - DNA, 438 bp, Zea mays
  Peptide Sequence Number=SeqID_41783
atggctagtgcgtgggtcaagcccgacgaacacgtttatgccaccacaatcacaggtttgggcaggctacatgatgcagatcgggcacttcaggtactgggaaagatgagggaggcatgggtcgagctgtgggagttaacatacaattctatggtgggtgtacttgtgaaggtgggaaggatggatgaggtattgcagctgaaggatcggatgatgctggctacggggaagatggatgtgattctcgcgagaatgttgatgcacatgtactatttgagtggagaagttgggaaaacattagaattgtttgatgtggttgccagtgatggtgtgacactgtccaatgtggcatatgggttgatgaacaaaggttgtgagacttcatatcctcagaaggcttccaagaatggtgagacttcatatcctcagaaggcataa

SEQ ID NO: 5 - DNA, 411 bp, Zea mays
  Peptide Sequence Number=SeqID_41784
atggatcgctgcggcgccagcgtgccgctcatcggccgtggaacctttggacccgccgcctcgacgcgtcaggcgggatcggacgatgcggcagaggctgcggagcacgcgcctgtgccgacgacggaggcgaagaagcgggcgtcctccgtcgcgctgtccaaggaggagatcgtggacgacttcgcggcgatccgtgggacacgccccccgcgccggcccaagaagcgatctcgcacggtgcagcgacagctcgacttgttgtacccgggattgtgcttagcagatgtggcgcccggctcctacaagatcgaggaggttgccaagttcttggaaggccttcagtactgcttgaacaaaaattgtttggacctggtgttccagcacctaaatcttctgggtgaaagataa

SEQ ID NO: 6 - DNA, 414 bp, Zea mays
  Peptide Sequence Number=SeqID_41785
atggcgagagtagcgtgtaccctctatggcaagaggctggacggtggtgtatctgtgctctcggttggcgtgaacctgatctgttgcttccgcttaatcgttcctccgatgtgttgtaatatctacatgacgagtgaaacgctcttgggaaaggaaggtaagggtgatatcgagaaaaagctaagacttgcaacgcgacagaggaaaagcgaatggacaagagcgagatgggcaagacatcactctttgaatgaaatgggagaggcggctttaaaatgcagacaaaaattgcaaggcatcgaagaagggggaataatcgatgatgaaatagatgaggcactatccccgaacatggatggaaaagaggaggcttcaaagggtaggttcaaggttagcagaaaggcaagggcatag

SEQ ID NO: 7 - DNA, 504 bp, Zea mays
  Peptide Sequence Number=SeqID_41786
atgctgccgagggcaggggccatgcgcagggaccaggacggccgcgtgcagggggccgggaatgaccgcgccgaggggcgcccggaacagccacgcgcagggggccagggcggccgcgccgaggggcgccgggacgaccgcgcgcagggggccgagaacggtcgcgctgaggggcagggcggcgcgccgaggggcgccgggaacagccgcttgcagggggccagggcggccgcgacgtggggcgccgggacgaccgcgcacagggggccagggggccgcgccgctaggacgcgtgcgcgtgggggtggggggaagagcagggacgcgcgcggtgggaagagaaagggaagggagagggaaagagagggagagagagggggaggggaggctcaccttgggatccaaaatccagcaataaccgtcaccggatcacacctagggcacgaggtgggagagaggtggaagagagggagagggagttgctgtgcgggaaaaatcaaatga

SEQ ID NO: 8 - DNA, 360 bp, Zea mays
  Peptide Sequence Number=SeqID_41787
atggtgcgcggcggattccacggcggtgatggactacgtcgagcaattgaggcagcgtccggtgatcctagagctcaagacgcttccgagcatttcccccaaggcctccgctgcgtcgagctagtcttcggggttggaacgacggtcgaggcgagaaccgactgcgatggtgtgagcttcttcccctccccaatggcggtgcacgacgatgttggggagccgggtcagttcgtgaacgggagaagccgccgcggctctacttataccccaatggcgagggaatctcaccagaattggctggtcgagaccccgcgatgtccggcgaaggatcgcaacgacacagggtggagtcggacttga

SEQ ID NO: 9 - DNA, 258 bp, Zea mays
  Peptide Sequence Number=SeqID_41788
atgccatcagaaccgagaaaaggagcgaagctgatccaagctaccccaatcgacatatatcactctgacaagagcgatggattacccaaggaggagcgggaatgggagatgagattgcagggttggaagaatacatacctagatctagatcacgtcgcagagaggctacgcggcggagttggtatggaacatgtgagacgacgaggtggcagatcggataggcaaggtgatggcacatgtgggaccgtggaaccctag

SEQ ID NO: 10 - DNA, 768 bp, Zea mays
  Peptide Sequence Number=SeqID_41789
atggctaccaagatattagccctccttgcgcttcttgccctttttgtgagcgcaacaaatgcgttcattattccacaatgctcacttgctcctagtgccattattccacagttcctcccaccagttacttcaatgggcttcgaacacctagctgtgcaagcctacatgctacaacaagcgcttgcggcgagcgtcttacaacaaccaattgaccaattgcaacaacaatccttggcacatctaaccatacaaaccatcgcaacgcaacagcaacaacagttcctaccagcactgagccaactagctgtgatgcttgcatccaacccacttgctctggcaaatgtagctacataccaacaacaacaattgcaacagtttctaccagcgcttagtcaactagccatggtgaaccctgccgcctacctacaacagcaacaactgctttcatctagccctctcgctatggttaatgcacctacatacctgcaacaacagttgttgcaacagattgtaccagctctgactcagctagctgtggcaaaccctgctgcctacttgcaacagctgcttccattcaaccaactgactgtgtcgaactctgctgcgtacctacaacagcgacaaccattacttaatccactggcagtggctaatccattggtcgttgccttcctacagcagcaacaattgctgccatacaaccagttctctttgatgaaccctgccttatcgtggcagcaacccatcgttggaggtgccatcttttag

SEQ ID NO: 11 - DNA, 528 bp, Zea mays
  Peptide Sequence Number=SeqID_41790
atggcgctccctgttgacgtggcggacccgcgcccgaggccgggcgacgtgggggttcctccgaagctgaggtcgagtgtgtcttctgttgccgaggccgagcccgagcccctgggttgggcgaggcggaggtcgttcggcagaggccagagcggagtccgagccctggggtcgggcgaggcggagttcgtcgtcttccggcccgagtctgagccctgggtcgggcggagcggagttcgccgtcttccggggcttagcccgagtccgagccctgggtcgggcggagcggagttcgccgtcttccggggcctagcccgagtccgagccctgggtcgggcggagcggagcttcctatggagccttttggcaaggcctgactgcccgtcagactcactctgtcgagtggcactgcagccggagtggcgcaggcagcgctgtccttctgttagaccgctttatgctgatgggggttaccagctgagaattaggcgtcttgagggtacccctaattatggtccccgacagtag

SEQ ID NO: 12 - DNA, 291 bp, Zea mays
  Peptide Sequence Number=SeqID_41791
atggatttaccgagtgtggacctgtaccgagtgtcctacgctcgaaacgcaccaagaattattcctgttgatcaaaacttatacaaattagagaagcaatccggcttgaaacagttccggttgatagctctaaaggagatagaaaaggacaaacttgcagttgccaaggcctacaataagaagggtcacttcggggaggtgggatctaggtacagtccgctgcgaatagtctgcctgccaaccgcggacagtagtccgaccactagggccgaacagtccatcagctcgtag

SEQ ID NO: 13 - DNA, 699 bp, Zea mays
  Peptide Sequence Number=SeqID_41792
atggagttcaccactcccccgcccgcgacccggtcgggcggcggagaggagagggcggctgctgagcacaaccagcaccaccagcagcagcatgcgacggtggagaaggagcacatgttcgacaaggtggtgacgccgagcgacgtcgggaagctgaaccggctggtgatcccgaagcagcacgcggagaagtacttcccgctggacgcggcggcgaacgagaagggcctcctgctcagcttcgaggaccgcacggggaagccctggcgctaccgctactcctactggaacagtagccagagctacgtgatgaccaagggctggagccgcttcgtcaaggagaagcgcctcgacgccggggacacggactccttcggccgcggcatcagcgaggcggcgcgcggcaggcttttcatcgactggcggtgccgacccgacccgcccgtcgtgcaccaccagtaccaccaccgcctccctctcccctccgccgtcgtcccctacgcgccgttccttgagaaagatgtcgcactggaccctaccaaccgcagccacggcgaacggccgacgttccttgagaaagatgtcgcactggacgctgcccgggtggctgcagaaggggcaggatcggacctggaggtggacgacgacctggaccgccgttgggaaggccggatcagcgagctggctagcctaatctag

SEQ ID NO: 14 - DNA, 369 bp, Zea mays
  Peptide Sequence Number=SeqID_41793
atggcaataatggctatccaaggtccgatgggtcaaaaccccattcgatatgatatgagtgggtatgagtatatggtaatttgtaccatgataggtacgggaatgaggtttcttgtgcccttgtgcttggcactggtgtttcacccttgtcgtgatgcaacgggtgcctccctttggcgcctctgctccgtcagtgctctccttgttaactggaacacgaaaatcttatgctgggtcagtgaatatccgcatctaccgccattcccccacgaggatttcccctctcgcatggcgttggatggtggcaagcggagcccggatgcgctgtcgagtgattctgtttgctcgaatggaggtcgtcatttgtag

SEQ ID NO: 15 - DNA, 1119 bp, Zea mays
  Peptide Sequence Number=SeqID_41794
atgaagtcaacagtgttttcaacagctgttgtttctattgggtatgcattgcttggatgggattttgcagcattatcagaagctaatcatcatatggaaaaagaatttgaattgttgaatggaccttctattgaagagtcacctaggtggcttgcaagtgatggaaagattagtgaggccagagtttctctgcagtggcttagaggaaagaaacatgatgtttcaggagagatagctgctattgtggaaggtgtggacatcatatcggactccactgttggcgctgctcgtgctcagagtttctctggaaccagtgctagccacacttggccccgtaagcatgaacatatgaatgaacacagggatggtaacagtgatcaacagactagggagacttattatgctggagaagctaataatggagatggtttaagggcttctctgctttctcaggcagcaagtgttgaagtaaatgatacaaatacctcttttacttctgaagggagctcttcatatttaagaaggcatggaacatcagtgcttgcacaagagtttatggcgtctatacatgattatgacattgaagaagaagaagaagaaatccatgggtttgcattgcctcaccagtctgcacctcgtgatatggaaagcaccgggagacatccattcagacatcaaatagtccgggttattgtgctggccactactcctgtcctgatactatcattgagtgttatgtctatgtccaccctggtgaatatgggaccgttcgaaagtgccgtcctcttccacttcgcattaaccatttgcttctggtcctatgtcattggtttgggaccgataccaaacattctctgctccgagatattcccaaccaaggcccgtgcgacatgtgcaagtttctgttcgctttccttctggtttgggggcctgctttcagcgtactgcttcccggtgatgttgagcaccatcgggcttggcggagcgtgtgggatctatgcacttgtgtgctgcgctccgctttttctcgtctactatcgaataccagagacgaagatgcttaacctggagctcattgcggagctgttcaagctttcaaggcaggagcatgtacagtag

SEQ ID NO: 16 - DNA, 470 bp, Zea mays
  Peptide Sequence Number=SeqID_41795
atggccacccacgccgtggatgttactgcagcctgctgctactttccaccactgccgaagcagcaggcaggcagaggttggattggattggacggagaaagaagaagtgccatcatgtccccgagtcccacgtcgacggcggaggtcgaggtcgtcgtgggccgtcggggtcggggcacgacctcaccaggcctcctgctcctccatggactggggccaccaacggtgatggtagtattacgtgggcccgccccgcctccgagcgcatcggccgtcgtgccagcgcagagcacggccatccaagacgcctcgggcgcaacagggagttccgcctcgcctgaccccagcttcggccttggaaggaatcgtcgccacgcccgacccaggtctcggcctcagcctcggcctcggaaggaggtcttcgcctcgcccgacctaggcctcggcctcagcctcggcctcgggaggag

SEQ ID NO: 17 - DNA, 1500 bp, Zea mays
  Peptide Sequence Number=SeqID_41796
atggctttcatcgtgctccttgctgctgcagcagcggcaatagccttggttctccaccacctcctcagtgcccaaaaaaagcgcagcagcaggtctgcaggctcgacgtcctacagcctaccgcccggcgacctcggcgtccccgtcatcggccagaccttctccctcctccacgcgctgcgcagcaacacggacgaccagtggttcagggcgcggatcaagaggtacggcccggtgtccaagatgtcggtgctgggctcgccgacggtgctgctggccgggacggaggccaaccacttcatattcaccaaccagggcctcatcctcacgcagacgcgcgcgctccgctccctcctccgccgctccatcctcacgctcaccggcgacgacctgaagcaggtgcgcagcgcgctgcagggctacttgcggcctgagatggtccgggggtacgtggggaagatggacgccgaggtcaggaggcagctcaagctcaactgggttggtcgcagcactgtcaacgtcctgccgatggcgaggagccttacactaggggtcatctgctccgtcgtcttcggcgaggaagcagccgccatagtagacgccctagctaccgacttccagcagctaggtgacgcgatcctgtcgttcccagtcaacatccccttcaccaggttcggcaagggcatgcggtcgagcgccaagatcagggaggccatcacgaagttcgccaggaagaaggaggaggagtactccttgctgctgtcgcaggacgaagggtgcaccaccgccactgctactgctacgacttcagccgccaccgacttcgtcacctacatgctcctcctgcgctccaggggcgcgcactccctctcgctggcggacatcgtcgacaacgtgatgggcatcgtcatcggcgcgcacggcaccacctcgacgctcatcaccttcatggtgcgccacctcgccaacgagccagacgtcctcgccaagatcacccaagaacaagatgagatcgctggtagaaacggaagagacggtgctctaacatgggaagacgtttcgagcatgaagtacacatggagggcggcgctggagacgctgcgcacggtgccgccggtgttcgggagcttcaggactgccaccaaggacatcgaataccagggctacctcatccccaagggctggaaagtcttcgcatcccaaagcatcacgcacatggatcccaggttcttcgccgaacccaccaagttcgatccgtcccgcttcgagaagcgctcgtcgatcccgccgtacagcttcctgccgttcgggggagggccaaggatgtgccctggaaccgagttctccagggtggaaaccatggtggccatgcactatctagtgacgcggttcaggtggaagctgcgcttcgaagacgaagcctacaacaaggatcccaaacctacgcctgttttcggatgtccagtggaactggagctgagaaaaacccctgcaatataa

SEQ ID NO: 18 - DNA, 480 bp, Zea mays
  Peptide Sequence Number=SeqID_41797
atggcgagggaacacaccggatgcttcgctcagctacctctcttgtgtaggggttacatttacaaggccaccacaccattaagagctaggctgcatgcttacgagcatgattacgaaaaagagatgcaatatctctctgcttcatattttagtcactacaaaaataatggtagtaaatcaacaatcaataaaacaaaaatcctaaatcctaaaccagtaggcagcaactcgtaccaatcaccagcaggcagccgccaggaacaggcagtaccgcagtggcagtctgggcgttcagccacagtggcggatagccgcgcagcggcggcagcgggcagcgcgcactcaccactccactactccggctgccaggaagccagccgccaggaactcttctcgcagtggccaggtctccaaccgccaggacgccaggaacagtcgaacaaccgcaaaaatcagagaactagagtctggagaagttga

SEQ ID NO: 19 - DNA, 675 bp, Zea mays
  Peptide Sequence Number=SeqID_41798
atgccgggcttcgctcagcgtctcgcgggcatcccgtggcggagcatcgcgaggcaaggcctctcccgcgtgttcctggtggcgaaggcctactgcgtgatccacgtcgtcaacgaccacctctgctcggtgaccttagtgcggggcgccagcatgctgccgtccctgaacctggcgggcgacgcggtggcggtggacagggtcagcgtgaggctcggccgggtcgcgccgggggacatcgtgctgatgatctcccctgaggacccgcgcaaatcggtcgtcaagcgcgtcgtcgggatgcagggggactccgtcacctaccttgtcgaccccggcaaaagcgactcctccagaaccgtcgtgatcctcaatgaattagaactatgtgctggtaaaaccttgcactatgctaccctcggtatatttaccccgccagaccagaaggtaccgcaagatcatgtctgggtgcagggtgacaatatctttgcttctaacgattcgaggcaatttggagctgtgccttatgggctgattacagggaagatcttttgccggctgcgacgagtactgacagtggctctgttggatgttaggtttggccgccagagagttttggcgcaattgatgacgcaacgaagcagtcttaacgctgaggaggagccgaggaggtactga

SEQ ID NO: 20 - DNA, 702 bp, Zea mays
  Peptide Sequence Number=SeqID_41799
atggcgcttcctgttgacgtggcgggtctgtgccctaggcagggtgacgtgggggctcctccgaagccgaggttgagtctgtcctctgttgccgaggccgagcccgagccatggggtcgggcgaggcggaagtcgttcggccgaggccagggcggagtccgagccctggggtcgggcgaggcggagtttcgtcgtcttccggcccgagtccgagccctagggtcgggcggagcggagttcgccgtcttccgggtcttagcccgagtccgagccctggggtcgggcggagcggagttcgccgtcttccgggtcttagcccgagtccgagccctggggtcgggcggagcggagttcgccgtcttccgggtcttagcccgagtccgagccctggggtcgggcggagcggagttcgccgtcttccgggtcttagcccgagtccgagccctggggtcgggcggagcggagttcgccgtcttccgggtcttagcccgagtccgagccctggggtcgggcggagcggagttcgccgtggcgcttttggcaaggcctgactgcctgtcagactcactctgtcgagtggcaccgcagtcggagtggcgcaggcggcgctgtccttctgtcagactgctttatgctgatgggggttaccagctgagaattaggcgtcttgagggtacccctaattatggtccccaacagtag

SEQ ID NO: 21 - DNA, 531 bp, Zea mays
  Peptide Sequence Number=SeqID_41800
atggctaccaagatattagccctccttgcgctcctttcccttttattcctcccatcaattacatcaatgggcatcgaacaccctgttgtgcaagcctataggctacaacaagcgcttgcggcgaacgtcttacaacaaccgtttgcccaattacaacaacaatccttggcacatctaaccatacaaaacatcgcaatgcaacaacaacaacattttgtgccagcactgagccaactagccacggtgaaccctgccgcctacttgcaacagcaactgcttgcatccaacccacttgctctggcaaacatagctgcttaccagcaacaactacagttgcaacagtttctgccagctctcagtcaactagccatggtgaaccctgccacatacctgcaacagcaacaactgctttcatctagcccactcgctgtgggcaatgtggctacatacctgcaacaacagctgctacaacagatcgtaccagctctcagtcagctagctgtggcgaaccctgctgcctacttgcagtag

SEQ ID NO: 22 - DNA, 306 bp, Zea mays
  Peptide Sequence Number=SeqID_41801
atgtcgcgcgcgttcgacgattactatatcgagaattgtggcgtcatcttggcgccggaggtgacgcagaggaggatcgacaacagtgaccagttcgtcatcatcgccaccgtcagggtagcttttgtgccgggaatgcgtgatggctccatccctatccagaggagaaaaagaattatccgttcctgttctcgtcccatgaacaattacggaggacctatctctatctctgcccccacacggagtaagagaagtcagtacgtgctgaacgaggatgtgaatggctctccatccccttctccataa

SEQ ID NO: 23 - DNA, 1581 bp, Zea mays
  Peptide Sequence Number=SeqID_41802
atggggtcgttcaaggggcacgtgctcccgggcacgctgttcctggcggtggggctgtggcgggtgtggtcgtcggcggcgcggcacgccgcggacccgtcgtcgttccgggtgcgcgcgtggagccccgcgccggcgcccgggccggcgcggctgctggagctctacgtcgtggcgggcggcgcgctggcggacatgtgcgtggaggtgctctactccacgcacctccggatattcgccggcggcgaggtcaacccggcgcacctcaacgacctcgagcacggcggcatgctgctcatgttcttcctcttcggcgcgctcgctctcgcgtcccagctctggcccaggcacttcccgctgacggacggagcgctgtgcctggtggcggcgacggcgttcacggcggagctggtgctcttctacttccactccacgacgcacatggggctggagggctactaccactacctgctggtgctgctggtgggcctgtgcgtggccgccgccgtcctcggcgcgctcctgccggacagcttcccggccgacctggcctcgggcgtcctcgtcgcgctgcaggggctctggttctaccagacggcgctggcgctgtacgggcccatgctgcccgcgggctgcgcccgcgacgccgacgcccacgtcgagtgccgctcgcgcgccgcgcaggagcgcgccgagcagctcgccatctcccagctcttcgccctcgtgctcctcgccttcctctacgcgctcgggtgctacgccgtcgctgccgccaggtacgggcaacccccggagctggccgtggtcctaaatgccaccaaggaatcagcaccgaccgccggcaacactactgaggaaaagaaagaagataacgcgaagaaaaggaaggagattgcacctagatcagaagtatggtctcactttgtcaagatttgtgttgatggacacttgaagaaagggaaatgcaagtattgcagccgtgagatcaagtgtgacccaaatttgaatggtacatctgccctacgtgctcattttaatatttgcaagtgcaatcctcataaaaatagagacccaaatcaaagcaatttacaattatctcatggtgaaaacgttgcaatctataagtttgatcctaaagcaattagaaaagcattttgtgaaatggtcattgaagatgagcaaccatttgcatgtgctgaaaaggcagactttagaaagttcatgtcaattgcttgcccatgttggaatgtgccatctagaagaaccatcactagagacactgtgtctacatactttgaagagaaagcaaagctcaaaaccttttttaagcaacaatgtgaaagagtttgtcttacaactgatgcttggacttctcaacaacaagatagttatatggctgtaacagcacattttatagattctgattggaaattgcacaagaagggtaagttgagtgatggaaaagtggtggcagtgaagcagctctctcggtcctctaaccagggaaagatgcagtttgcggcagaaatcgaaaccatttcccgagtgcagcaccgtaacagttccaggatggactaa

SEQ ID NO: 24 - DNA, 693 bp, Zea mays
  Peptide Sequence Number=SeqID_41803
atgcacccccagtacgtagtccactctagagcagtatacgacagatacgcccagtacctccagaaatgttctgatccagatttagttggtatatctagaactgaaccctcagcagacattgcattggaatattccccattaaatccagtatgtgatattatggatccatccctgaactgccgaagtatcccaacaaacaaatgtgaaagtagagctctggtagagaagtcagaacattgtccgaatgattataatttggaaatgaaggggaaaagaaacgatggtacaaaatgtacagttgttctaaatagcggttctaaagtagagggattgttatgtcttttggagcaagccattcacagtggcagggcacttgttctgagtgaagatgaacttgctgattcagatctggtctatgaaaagtctgttgcttttagaaagtcaattctgcgaagactggtttttgagaatactcgaaggaagtccagtgccaggagaaatgtgccagacaatcatgcaagaactaaaacacatattatagcaaataaaatgttgagcagtcctgttgaaaataaatttatcgttaatggaggatctgcaatgcagacaattgaccatggacaagagtgtctttctggtgttgttcatcaaggtaccttaagagtagatgaactagcaaagttactagcttga

SEQ ID NO: 25 - DNA, 105 bp, Zea mays
  Peptide Sequence Number=SeqID_41804
atggaggtcctgggtcgtacccggaggtccgagtcatgtatgctggggtccgacactttcccatgggggtccggattcactgacgatatcacgggttggcgttag

SEQ ID NO: 26 - DNA, 177 bp, Zea mays
  Peptide Sequence Number=SeqID_41805
atggcacctccaacgatgggttgctgcctcgacaagacagggttcatcaaagagaactggttgtatggcagcaattgttgctgctgtaggaaggcagcgaccaatggggtagccactgctagtggattaaagttcgacacaatcagttggttgaatggaagcagctgttgcaagtag

SEQ ID NO: 27 - DNA, 387 bp, Zea mays
  Peptide Sequence Number=SeqID_41806
atgaaatgggataagccttcgtggcgaagtcacttatgtgtaacgggtgataaccaacggggtcgtggtgtagtgattgcgaggattcgttcgctcggagccttggatcatcagtcgaaatctccgcccaatcaagttatcatacctcacggaagatcgtgcctcatcctctatcaggagaggctagggacgacgtttgagggggccaggtcagtagcagcgagtgaagttgctagggctgcggcttccgctgcccgggaggtggccaggccgtcgccggcagtagccacgcctgggctggtcggggcgacagttagggtggcaacgcccacggccagggccgcgtcggcgttcgggcctgtgggagaaggggaagggctggcatga

SEQ ID NO: 28 - DNA, 291 bp, Zea mays
  Peptide Sequence Number=SeqID_41807
atgaagaagatcttcggcgccaagaaggacaaggggccgcccccctccatccaggacgccaccgagcgaataaacaagcggggtgagacggtggacgagaagatcaagaagctggacgaggagctagccaggtacaaggagcagatccgcaagacccgccccggcccgtcccaggaagccatcaaggcacgcgccatccgactcctcaagcacaagcgcatgtccgtaccctactctgtctccctgtttcggcctgaaagagtgggtaatcacgttgatgtatttccttga

SEQ ID NO: 29 - DNA, 3726 bp, Zea mays
  Peptide Sequence Number=SeqID_41808
atggacgaagaggacgacgaccagcgcctgctgcacagcctcggcgtccaaactgaaccgaagcgcgatgacgagccaggagcagccgtcgatgaccccagcgggagtagtgttgcgcctgagtttgatgcgcaggccaatctgcaccagaagctgcgttccgtgcaactcgagatcgatgccgtagcttccaccattaaaagagctaagaacgccagcgttgatggacaagataaaaagaagcagaaacaagccaatcacacttctcaggatgaacctcatggaggagcgctccagcaggctcttgccactgagcgccttaaaagcctcaagaaagctaaagctcagattcagaaagagatattgcagtcggacccctacccatctggctcggacaacaggaaagataaaatgctagccatgctggttgaagaggagccaaggcgtaagaagaagtcgctaatgccggctcgagggcctaagaaaacgtcagctcctagactgaaaaccatgagttatgatgacgacgatgacttcgatgcagtgcttgatggggcttctgcaggatttatggaaacagaaagggaagaactaatcaggaagggcttgctgacaccatttcacaaattgaagggctttgagaagcgtgttgaattacctggaccttctcataggcaaaatgatccctccgaacaagctgaagaagcaattgaagcttccaggattgctagagtcgctcagtcaatgcagcaaattgcacaaagtcgccctacaacaaaattgcttgatccagaatctttacctaggctggacgcacctactgctccatttcaaaggcttggaagacccctaaaacgccctgtacctcctagttcagaaggacgggaaaggaagagacaaaggaataagaccaagaggcctttgcctgacaagaaatggagaaaagccaattcaaggaaggaatcactattggaaactgatggtgaggatgttggggactttgcgacatcagtttctgaggatgatgatcaagcagcagaaggtggattatctcctgttattcttgaaggtggtttgagaattcctggcacaatttatgaacagctatttgattaccaaaaagtgggagtgcagtggctgtgggagttacactgtcaaagagccggtggaattattggagacgaaatgggcctgggaaaaactgtgcaagttctatcatttcttggttctttgcataacagcggcatgtacaagcccagcatcgttgtttgtcctgtaacacttcttcaacagtggcaaagggaggccagtaggtggtatccaaaattcaaggtggaaatcttacatgattctgcaaatggttcgagtaaaaagagcaaggcatatagtgattctgacagcgaaggttcttgggatagtgatcaggaagaggttagacgtgcaaagcctgcaaagaagtgggatgacttgatttcacgggtagtaaattcgggatcaggtttgcttttaaccacatatgagcagctaagaatcttaggggagaagttgcttgatatagaatggggatatgctgtgttggatgagggtcatcgtataaggaaccctaacgctgagataacgctggtgtgcaagcaactgcaaactgtgcacaggataatcatgacaggtgcacctattcaaaataaactttctgagctctggtctcttttcgatttcgtgttcccagggaaactaggtgtgctgcctgtatttgagactgaattttctgtgccaattactgttggtggttatgctaatgcgacaccattgcaagtgtcaacagcatacagatgcgctattgttcttcgtgatcttatcatgccatatcttcttagacggatgaaagttgatgtcaatgcacagctccccaagaaaacagagcatgttcttttttgtagtctaactgcagggcagcgttctacttatcgtgcttttcttgctagttcagaggtggaacaaatatttgatggcaatagaaattcactgtatggtatagatgtcctaaggaaaatatgcaatcatcctgatctactcgagagagaacatgctgctcagaatcctgactatgggaatcctgaaagaagtggaaagatgaaagtagttgagcaagttctcaaagtctggaaggaccaaggtcaccgagttcttctgttcactcaaactcaacaaatgcttgacattttagagaacttcctgacggcctgtgactaccaataccgaagaatggatggactaacacctgcaaaacaaaggatggcactaattgacgagttcaataacacagatgaaatctttgttttcattctgaccacaaaagttggtggtttgggtacaaacttgactggcgcaaacaggattattatttatgaccccgactggaacccttcaacagacatgcaggccagagaacgtgcatggcgaattgggcaaactagagatgtaatggtttacagactgatcacacgtgggacaatagaggagaaagtctatcatcgacagatatacaagcatttccttaccaacaaagtactgaaaaaccctcagcagaggagattctttaaagccagagacatgaaggatttattcacactacaagatgatgaagggaatggttcaactgaaacgtcaaatattttcggccaattgtccaaagatgtgaacgttggagttccaaatgatggtcaacagcatcaggtacatattgcttcggctttgtcaagcaccagtgaagctgaaccatctaatggtgggaacagtaaagtggatgataactctgaccaagcagacgaagaatcgagcattttgaagagtctttttggtgctcaaggcattcatagtgcgatcaatcatgatgccataatggatgctaacgatgaccagaaagtgcgcttagaagcagaagcttcacaagtggcacaaagggcagctgaagctttacgtcaatcgcgaatgctcagaagccatgacagttttgctgttcccacatggaccggaagatctggtgctgctggggcaccctcctctgttcgcaggaagtttgggtccacagttaacagccagttgatcccttcctcacagccatcagaaacgtccagcagcaggaatcgaagtcttccagtgggtgctctgagtggcaaggcactgtcatctgctgaacttctggctaagattcgtggaacccgagaggcatctgcttcagatgcattggagcatcaactcaacgtaggatcatcttccaatcttgtatcaagtccatctgggaatggtggccgtgcatctaaccctcctaacagaagcatgatcgtgcaacctgaagtcctgatccgccagttgtgcaccttcattcaacataacggtgggtctgccacctccacgagcataacggaacacttcaagagtcgcattcagtccaaggatatgcttctcttcaagaacctgctgaaggagatagcaactttgcaaagaggcgcggaaggagacttaacacgaagaaatcttaggcgatgtgttggtgttgtgaatacaagaataggaatcccaacatgctatgatcttggagaaaggatagcagattctttgcaggccacaaagggtagcgccgctgtgggaagaaaattaggaacagatctacatcttcctcgtgcattcattgctgacaagagggttatgttggccgtccgaatttga

SEQ ID NO: 30 - DNA, 2544 bp, Zea mays
  Peptide Sequence Number=SeqID_41809
atggcggcggcggcgctgtgggcaccggcggctcgccgccaggtcctcgtcgcacccacccttctccgcatccggcgttacctctccacaaaaccacccccaccgcaccaccccaacactctcgccaccgagcttctccgcctcctctccgccgcaccctcctggacgcccgaccttgccggcgccgtctcttcctccctttccactgcctccgcctccgccggcgatgccgttataaccgtcctacggtccctcaagaacccctctctcgccgctcccttcttccttgcctcctcctccgcctccccgcacccgctccccgccgacgcatacaacgccgtcctcccgttcctcttccacgacctcgcagccatggaagaagttctcgaggaaatgagcgtccttgggtacggcgttcccaaccccacctgcgccgaccttgtcgcggcactagtgcgcacccaccgccttgacgacgccgagcgcatgattgggacaatgaggcggctcaagttccgcccagcgttctcggcgtacaccgtgctgatcggcgcaatggcggaggccaggcggcctgaacgcgcgctggaactgctgcggcagatgcaggaagtcgggtacgaggtgggcgtgccgctgttcacgacgctggtgcgggctttggcccgtgaggggcgcgttgagggagccctggcactagtggacgaggtgaaggggaactgcctcgagcctgacattgtgctgtacaatgtgtgtattgattgtttcgggaaggctgggaatgtggacatggcctggaagttcttccatgagttgaagtcgcaagggttcaagccagatgatgtatcgtacacgagcatgatttgggtgttgtgcaaggcagggaagctaagtgaggctgaggagctgtttggtcagatggagacagaaagagctgtgccttgtgcgtatgcgtataatacaatgatcatgggttatgggtcagcaggccagtttgagaatgcctataagcttcttgatcagttaaaggataggggttgtattccatctgttgtgtcatttaattcgattctcacttgccttgggaagaagtgtgaagttgatcaagcactgatcttgtttgaggcaatgaaaaaggatgcagagccaaattcctctacatataacatcatcattggtatgctttgcatggctggaagggttgaggaggcctatgtgatacgggatgagatggaacgtgttggtttgttccctaacttgttgacagtgaatataatggttgataggctctgcaaagcaaagaagtttgaggaggcctatgagatgtttgaaactgcaagtcagagaggttgcaatcctaattctgtgacttattgttctcttattgatggattaggaaagaaaggaaatgttgatgatgcttataggttatttgaaaacatgctagatacaggccacaatgctaatcctgttgtttatacatccttgataaggaatttcttcatgcatgggaggaaggaagatggacacaaaatcttcaaagagatgaatcgtcgaggatgccagcctgatcttactctactgaatacatacatggattgtgttttcaaagctggtgacgttgaaaagggaagggcaatatttgaggatatcaaaggttatggtttccttccggatgtacgaagttattccattttgattcatggtctcacaaaagctggccaagctagggaaacttccagcattttccatgccatgaagcagcgaggttttgctcttgatgctcgggcttataatgctgttgttgatgggttctgcaaatctggaaaggtggacaaggcctatgaagctcttgaagagatgaaggtgaaacatgtacctcctacggttgctacatatgggtcaattattgatggtttagctaagattgataggttagatgaagcttacatgctttttgaggaagcaaaatcaaaaggaatagaattgaatgttattgtgtatagctctctcatcgatgggtttggaaaggttggtaggatagatgaagcttatttgatattagaagagatgatgaagaagggtttggcaccaaatgtttacacatggaacagccttatggatgctttagtgaaagctgaagaaatcaatgaagcacttatttgtttccagtcaatgaaggaaatgaaatgttccccaaacacttacacatatagtattcttataaatggactttgccgcgtacagaagtacaataaggcttttgtgttctggcaagaaatgcagaaacagggattggtccctaatgttgtgacttacacaaccatgatttctgggctcgcaaaggtagggaacataaccgatgcttgcagtctctttgagaggtttaaagccaacggtggaatccctgacgctgcaagtttcaatgctcttatagaggggatgagccatgcaaatagagctattgaagcatatcatgctgctgttgtaggtgcagttttgagagagattgccaagtcccatcatgcttctagatcattgtaa

SEQ ID NO: 31 - DNA, 297 bp, Zea mays
  Peptide Sequence Number=SeqID_41810
atggcagttgtaaaaattgttggccagatcaaaccgcagtaccatggcagttgtaaagcatggttttttagaccaaaagcgaaggctgtcaccaccatcagacaggccatcatgcctattccagatgcagtcattagcctctttcaagggcttctattcgatcctgatgtctttgatgctgtctatttgctcaacagtctcatggagagggagtttgcgaaggctcattgtgatttgaccaaactttcatttatcaagtgcaccgtttcatttatcaaggacccaatctttttctaa

SEQ ID NO: 32 - DNA, 261 bp, Zea mays
  Peptide Sequence Number=SeqID_41811
atgacgacaatcatagggaaaatctcaccagaaatcgcgcagttgaataccatggccacgacacacggcggttccaggccgaaaaaagtgctctggcgagggattgtcgttgttccgcatggtcccgagcccgaagccccaaccgttccgcatccatacagctccgcgaagctccctggtgacgtgtacatcaagtacgtggaggacaagaccattgcccattttgctggtggcaaaaatgccccaacgttcttcggctaa

SEQ ID NO: 33 - DNA, 291 bp, Zea mays
  Peptide Sequence Number=SeqID_41812
atgcctcactggagttcctccgatctgcccaagaccctctcctcgccgttctcccctctttgcccgcggattcatggcctcttccccgccattgagttcgccgtggcgttctctccctctctgcccaacttcggcgaccccggagccaccctagctcgcgcctgcctcaactccggcgacttcaccaccgcggagaggagcagcgccgcccgctgccattcacccctccccggaggtgatgctggcaacatggaagatttcgaggagtttcaggactacgacgagttctag

SEQ ID NO: 34 - DNA, 330 bp, Zea mays
  Peptide Sequence Number=SeqID_41813
atggtcgacgccaatggggcaagggttatcaaggggctagagacagtggctatcggttccggggtggtcgctggcaggaagctggagagacgggaaggcgaagggttggaagtcggcgagacaatggctgccagctccggggtggtcgccggtaggaagttggagagatgggaaggcaaagggttggaggtcagcgagatagtggctgccggctccggggtggtcgccggcaggaagctggagagacgggaaggcgagaggatggaggtcggcgtcgcctcgggggagagggaggcgggagccatccgaagcaacctcctagggctttag

SEQ ID NO: 35 - DNA, 861 bp, Zea mays
  Peptide Sequence Number=SeqID_41814
atggaggcccaggcccacgcgtcatgcaaccggcttgccggttgctacgtgcgagcaactgcaccgccactcgcgccactaccgcgcctcctcgactgcgaagccaataccgcgactcgaggcaaccctgcatgcggtgcctcaggcgggaaaagcaagcgatgcttcgccttcgccataatgaccgcgtcgaaaaagggaccgggaaagggggataccccgaaaaggatccttctccgtgaaggaaacaggccccgagcctccctactgatcaaaggttcgaaggctggcccctctgaggggttcaacggccgcctcagagcgattgggttccgcgcccactactggtcagaggttcgatggccggcccctcggaaaggttcaacggccgcctcaggccactcaggctccgcgcccactactgatcagggaatcccatcagagggaggcatcgagccctcggaccccgtcaaaggggaccgggtccggcagatcacccgcagcgccgcctgcgccgctccgacttctgagccactcgacaaagtgaggctgacagcagccaagtccggtctcaggcgtcataggaaactgcactccgcccgaccccagggctcagacttgggctcagccccggaagacggcgaactccgctccgcccgaccccagggctcggactcgggctcagccccggaagacgacgaactccgctccgcccgaccccagggctcggactcaggctcggccccggaagacgacgaactctgcctcgcccgaccccagggctcagactcgggcttggccccggaagacgacgaactccgcctcgcccgaccccagggctcggactcaaccctggcctaa

SEQ ID NO: 36 - DNA, 417 bp, Zea mays
  Peptide Sequence Number=SeqID_41815
atggttgaccactcatgctcccatccctcaccaacgccgtgctccaccagctgcacctcctcccagccatggcgtagggcctgttcctcttcggcttcccctcatcgttggctcgccttgggccgtcgtgaggacaccagcaagctccatatccgaacactcgtgctccaactccagccggtcaccatcctctacaccgagatcttcccggcgcgcggatccttggccaccacctctaggcgccgctgccccaagtccgacggcacccgactcttcctcgtcggagtatccgtatccgcggtctctcctgcgtccgtgctagatcttgttgtgccaccggaattcctgcgccgagtgatggaggagatccgttggatctcgctgcgggtgttcctggcacatctccggctgccgtga

SEQ ID NO: 37 - DNA, 489 bp, Zea mays
  Peptide Sequence Number=SeqID_41816
atgaccccatttgactttgcacatcctgatgaatttgacctcatttgtgatgttgttgcttgctggagcgatactgcatccgctaaggaggatgacaatgtggtgaagtgctgcctagaatacgcatgcagtgtgggcactactgttagggtggagtatggtgacgccgcaattgcagctgacctgtcatgcgctcatgtgatcagccatgcgttccctcacacctatgggcagccccttgcacatttcctcaggaagatcgctgttgtagtcagttacagcaccttgctaaggtcatatctgaacacccgatggtcaggtggatcagatggtttgctagcgcagagaaccttggatatcactaatgaagttcttgcttcatataaaaatcaaggtggatatgacatgcttggtcggacaaaggatcagattttgtttatcacccttgtctctctgttcctgcagaggctcccatggaaattagagtaa

SEQ ID NO: 38 - DNA, 417 bp, Zea mays
  Peptide Sequence Number=SeqID_41817
atgagaaaagccaccatctttctcatggcgctcgccctcacgctcatcccccatgagcaaacggtggcgacgccgccgcagcctcttcccctgcagctgaggagaagtcgcttccttgctgccaacaacgtcaacttctcgccgccgccgccgccgtcgttctacgactgcagcaagaagcctccatccatctgcctctcgcccgggagccccggcgcgacgtgctgcaggggcacatgcgtcgacaccgagtacagctcgcagcactgcggcaactgcaacaagatgtgcaagctcgcgcaggcctgctgccaggggaattgcgtcaacaccctcaccgacgagaagaactgcggcggatgcggcgtcaagtgcagaaccaagtgcaccaacggctactgcgactacgcggcgtga

SEQ ID NO: 39 - DNA, 273 bp, Zea mays
  Peptide Sequence Number=SeqID_41818
atggcggtcgcgacctccgatgaccaactccgaccaggaattggcggagttccaccggcgcaccgcggtgtttccggacgtaatccccatcgcaagcactgggctaacttcccacgtccaccagagggccccaaatcggcactagcgcctgaatttcaatggcggcgaggagctcagccgcccgggcattgttctttccgcagtcgactcaaggaggttgcgagggaagggagatgtaggaaggagaggcttcggccgcgttttcttaaatag

SEQ ID NO: 40 - DNA, 156 bp, Zea mays
  Peptide Sequence Number=SeqID_41819
atggcgaaggtaaagatcatgcgggttcgtgtcgatgggccgggagcgcagctagtatatgtgaggggctgtaaaagagaccttttacatccgaagctggctaaaaagctaagtgtttggcagtccgcagcagcttttggtggccagaagctgtga

SEQ ID NO: 41 - DNA, 276 bp, Zea mays
  Peptide Sequence Number=SeqID_41820
atggtgtttgagatgccacgaaagatgggtcaagaggagtcaacttcttcgaggccatatgcttttgcacgtgatgaaaagaagaaaggcaagaaaaaggctcctagttcaagctccttaagtgaagaagaggaagaggaagaagaaagtgatgatgaagatgatcgagcctccacatcatcctctgaggacgaagatacggtccaatgcgtcggaaagcgctctcgtgtgcttgtgatgctcgtcggctcgaccaatttggatatacagcgctag

SEQ ID NO: 42 - DNA, 936 bp, Zea mays
  Peptide Sequence Number=SeqID_41821
atgacgcagccgcagcagcggaggatatcggccgcgagctcctggtgcggagacgctgcagcaggggacgcggcccggagcaggtccaccactctacgccgcggactgctgccccagggtcatcagctccaggaccacggcggccagggtgtccagcgtcatgcctggcgctcgaagcttgttgcggcgatgcgtctgctcgtctgccgatgcgccgatgcgcctgctcgaagggtcgctcgttcggtggcggtgtggccaggtcaggtctgcctctgtggcctgcgggctgaaccgccgagtgccgacgagacgggagtaagatacagaggcagtgagcttgccgcaatctccaatatttctaagagcatcaccaacagactggctaaacagactgtgcttggtaaagaaatggatttcctgtcctataagtctgacaggtgctttatctataacttttattcagttcttttcttgttactcacttatttctcaacatcgcagtttatgtcactgaagaatttggtcactgaatacagatctgttattgggaaaagtggggctaatgttaggcgggtagagcagcagactggtgctcgcattaaagttcaagagattgacaaagatgcttctggagaaaggctgatcattgtttcatctaacgagataccaactgaaccaatatccccaacaattgaggcactcattttgctccatgataaagttgtagggcctccagctattgcaagaggagccctcacagagattgcttcaaggcttagaactaggactttgagagatacaagtactgccaataatcctccaccttttgccccttccgatgatcctcctggaattctgaacacagtgtatatgaatattctgctcgcctctcctctcctaaaggccattttaaaggacgcgactgcagtatag

SEQ ID NO: 43 - DNA, 1479 bp, Zea mays
  Peptide Sequence Number=SeqID_41822
atggaggccgacgacgtccccgccgttccaggcaacaagggccgtaggtccatcgaggtggacttcttctccgacgacaaggacaagaagagcgctgccgctgcagctaacgacaagaaggaagacctgacgaccattaaccttcttcccggcagcaacgccaacgacgacgacgacgacgaggcggcgacccggctccggctgccgaacgaccaagacaggcagaacaggaacaccaacgagctttcggccatgcaatcagagcttgcgcgcatgaacgacgagaaccagcggctgcgcgggatgctcacccaggtcaccaccagctaccaggcgctccagatgcatctcgtggcgctcatgcaggcgcgggccgacggccagccgatgatgcctcctgcagtggcccagacactgccggtgaccgacgccgctgctgtcatgccatcgccgagacagttcctcggcctaggaccagcggcggctgccgaggagacgtcaaactcgtccacggaggtgggcagcccgcggccgtcgtcgtccgcaggcaggcggcaggaccaacagcaacaggcggcggagcgcggcgacagcccggacccggcggatccgtcgacaacagcaaggcagctagcgcagcagcaggaggccagcatgaggaaggcgcgcgtctcgatcgccgacggctgccagtggcgcaagtacgggcagaagatggccaagggcaacccatgcccgcgagcctactaccggtgcaccatggccaacggctgccccgtgcggaagcaggttcagcgctgcgccgacgaccgctccatcctcatcactacctacgagggcacccacaaccacccgctcccgcccgccgccgtggccatggcctccaccacctccgccgccgcctccatgctgctgtccggctccatgcccagcggggacaacttcctggcgcgggccgtgctgccgtgctcctccggcatggccaccatctccgcctccgcgccattccccaccgtcacgctcgacctcaccaacggcccgcccggtgctcctcctcccgcgcgaccgccgccgcacctgcaggcggccgcgctctacagcgccacccaccaggcttcgtccaagttctccggcctgcacatgtcatcgtcatcgacatcggataatattaacaatgttggcactactaccagagtcgtcgcgcctgacgcgccgccgcacatgaacaccgtcaccgctgcggcggcggcggccatcgcctcggaccccaacttcacggtggcgctggcggcggccatcacctccatcataggcggcggaggccatccagttccgattccaattcatcatggcgggcaggggcaaggacgacagcagcagggcctgaccccgacgagtaacagcaacgccaacaacaacaatgcggtggtcacgagcagcagcaacaacactgccaccagcaacagtgagacccagtga

SEQ ID NO: 44 - DNA, 162 bp, Zea mays
  Peptide Sequence Number=SeqID_41823
atggcgccgccacgcagttcaaccgcgccaccgcgtctgggcacgggttgggaagatgggatgtgggccgtcgatctagacgagcaagtgaccgaggacccaggtgttcagcaggaggaaattgctgagcaggagctcattgaaggcaagttgtgcccttaa

SEQ ID NO: 45 - DNA, 348 bp, Zea mays
  Peptide Sequence Number=SeqID_41824
atggccacacgatcgcagccacatgagctcctgcattgtggccaaacaccaaacggcaacctgggccacaaaggggaagacacacataacagagaatggagggagaggaagtcggccagcagggatctcgccggctatggagactgcgcctcgggagaggccaggctcgcctgcgcgcctcctgaccgcgccttgggggtttgtcacgggggcctcaaccatggttgtcatggctacggcatggccgcgcgccgcgagcagggcccaaggtcggtcacgcgcgcagaggagaagacaaggggtgaggacaccgtagctagggaaggtagagggaagggcgtcgggtag

SEQ ID NO: 46 - DNA, 414 bp, Zea mays
  Peptide Sequence Number=SeqID_41825
atgggcaagaataagaaaggtcgaggttcgtcgcaccactccggcgataagcggaagcgcgagccaagtcctccctcggaggactttggtgactccgagtactcggaggaggagttttcctctgagtctgaggggtctccggccatcgagcgctccgggctcaagagctcggatgagtcggaggtctcctcggacgaggagaagtcttccgactcatccgaggaggagagcggcggtaacggcgacgacgagggcgacgacggcgatggcggtgacggcggcgatgacgacgacgacgacggcaagggcgacgaaggcggcggcggcaagggcgacggaggcaacggcggcaagggcgacggcaagggcagcggcgacagtagcaaggccagtggcaaagcgccactggtttaa

SEQ ID NO: 47 - DNA, 195 bp, Zea mays
  Peptide Sequence Number=SeqID_41826
atggccgcgtcggccatgggaggagagagacgacgcacacaacgtgtagggcgaagcgctcgctccatagagagcgatgggaaaaaggctaagggagagagggaggtagtagagaatttcttacttggggagaaggctagtcggaggaaggcgctcgcggaaaaagagaaggagagcaaagaactgagagagtaa

SEQ ID NO: 48 - DNA, 792 bp, Zea mays
  Peptide Sequence Number=SeqID_41827
atggcgcactgcctcatcctcctggcagcgggcgccgcccatgcctccgatccatcgccggcgctgctgccgtcgtccacggcaccacaccagagccaggcgccgcccccgagggccgagaggtacaccagccgcaagtacacggaggcggccgccacgccggacggcgtcagggccggcttctacgtctacgagtgcaagacatgcaacaagtgcttccccaccttccaggcgctcggcggccaccgcgccagccacaagaagccgcgcctcgccgccgtcaacgtcgacggcaccaccaccaccaccacagcaacgacgatgaccgcgtcgccgtccccaccgcctcccctagctattgctgttcagccgccgcctccgcctcgccagacgacgccgatcgaattcccggacgtggccgtggccaccgcgctcagcctcagcagcagcagcagcgtcgcagccgccgcgagcggcaagccgagggcgcacgagtgctccatatgcggcgccgagttcgcgtcggggcaggcgctgggcggccacatgcggcgccaccgcccgctcaacgcgccggaccgcgcggtcaccgtcgccaccggtaacagtaacagtaagaaggaaggcatcaacctggagctggacctcaacctgccggcgccgtccgacgaggaagccgtcgtgtcgcttcttccgccgccggccgtcatgctcggtctcggccagttcaacgacggcagcaaggctgggcatatgctgacagcctcagcactggtggattgccattattga

SEQ ID NO: 49 - DNA, 582 bp, Zea mays
  Peptide Sequence Number=SeqID_41828
atgccgaccgaccgtatcgcaggagcatttaatccaagtctggcctcaggcgccataggaagctccgcctcgcccgaccccagggctcggactcagcctcggctccggaagacaacgaactccgcctcgcctgatcccagggctcggactcagcctcggctccagaagacgacgaactctgcctcgcccgaccccagggctcgggctcagcctcggctctggaagacgacgaactccgcctcgcccgaccctagggctcggactcagcctcggctctggaagacgttgaactccgcctcgcccgaccccagggctcggactcagcctcggctccgaaagacgacgaactctgcctcacccaagcccagggctcggactcagcctcggccccggaagacgacgaactccgcctcgcgcgagcctagggctcggactcagccttggcctcggacgacggtctccgcctcgcccgacccggggcttagacttgacctcgacctcggaggagcctccgcctcgcccgacccagggctcggaccgaccacgtcacaggggggccatcattaccctacccctagctag

SEQ ID NO: 50 - DNA, 276 bp, Zea mays
  Peptide Sequence Number=SeqID_41829
atggtgatcgttggtgcagttctccgtcttcaggtcaggatgccgtgcacgaagaatgtgtcggcgctcgggggagaagatgatgaggaccctactcgcccctttaggcaggtcaaggggaagactgtctacttggagcagcaggaaggccgcaagaagcagcgtttggatagagcaacccgagcagctctagcagatgtccgagaggatgctttctctatttcagactattcaggacaggcaggacactctgtagcagcattttttggcagatag

SEQ ID NO: 51 - DNA, 186 bp, Zea mays
  Peptide Sequence Number=SeqID_41830
atgtcagtgaccggccgacagatagatggtgctgaaaagaaacgtaaaggtggccaatttaaggtcggcaagaaaaagggtaatcaagctctagttataggttttggtgataacgactatgatgttagagaactaatgagatttatggagctaaatgaaaaagagaaaaatacatgtgatttttga

SEQ ID NO: 52 - DNA, 2331 bp, Zea mays
  Peptide Sequence Number=SeqID_41831
atgggcgaccccctcgccgccctccttcgcagcggcggcaatcctcactccgtacacggcgtggccatcaagcttggctgcattgtctccacctttctttgcaacaatcttctatatgcctacctgaggcgccaggtccccgcggacgcccgcaggctgttcgatgaaatgccccgccgcaacctggtgtcctggtccgtcgtcatatccggctccgcccaccatggcgtcctcgcggaagcgttcgcgttgttctcccacatgcttcacggcgcggggcacggaagctgggaccgcccggactcgttcacgctaggggccttggtcgccgggtgctcccgtgccagagatgtcgacgctggcatgcaggtgcacgcttgcgtggccaagttcggcgtcgacgaggatgatagcgtcgcggcggcgttggtggacatgtatgccaaatgcggttgggtggactcatcgtggcgggccttcacgctcgcaccacagcggagcgtcctaagctggacgagcatgattgcctgtctggtcaaccaaggttcgtcaggttactatgacacatcacttctgctgttcaagaaaatgctggcattaaaggtttggcctaccaatgcgacgtattcttgcatcctgaaggtgtttgatacgcccgatttgctatccgttggaatgcaacttcatggctgcttgctgaagatgggaacggaggttgacactgctttggggactgccttgatgacgatgtatggcaggtgtggtggagttgatgagatacctaggttggcttgtcgtataaggcatgatgcgctttcgaggactgccctgcttggcgcttatgcacgtactggatacaatgcagaggcaattggtgttttcaaggagatgatcatgaaaaatatggcaattgaccagtcagctatgactggtatgctgcaggtttgttcatcctttggacaactgagaatggttcggcaggtacattgttatgctttaaaaaccttcttcaagttggataccttactattgaatgccaccatcactgtttatggcagatgtggtgatatcaatagtgctgaaactgtattttatctaatggaggaaaatgacatcatatcatggacggcattgttaacttgctacactcagaatggtcttgatgaagaggtactcttattctttaggaaaatgctccggaaagggttgggatctccagtattttgcatcactagtgtgctacgagccagttctagcatctcaaatcttgctgttgggttgcaaatccattcgaggactctgaagctaggtattgatgatgataattctgtacagaatgcactcgtaaccttgtatgctaattgtggaagtgttcaggttgcattgaagatatttaactcaatgagtaatagagacatcgtcacatggaatgcattactcacaagtttttcacagcatggcagtgaggtggcagccattcagctttttgatctgatgcaagaagaggggatctgcccagatgcttacacttttgttggcctgctatcatcttgcagcagaatgggccttgtaaaagaaggctgtgagtacttcaatgaaatgaaggaaaaatacaacttggaacccaagatggttcattatacctgcatggttgatctacttgctcgtgctggaagattttgtgatgcaatggacttcattgatgcaatgccttatgaaccagatcaaatattgtgggaagctttgctagcttcatgtaaggttcacggaaatttggggttaggaagaatagcagctaagaagattctggaaattacaccacatgattattctgcatacattatattatcaagcattcatgcttcagttgacatgtgggatgagaaatactggaatcgcactgtattcgacacccagcgtgcaagaaaggatactggaaggagttggattgatgcacaagaattatcagagaatatattcgatgcattacaaattggagtgacacgttcctcgtcttcctccgcgccatctacacaacccaccaccaccgctgtgcccctgaaccgacaccctctccaacgcaccgcaactgctgcacccgtaccccgcccaccaacatcaccaccaccagtcgacgccacttcagttccttcagccatgtcggcaccaactactgctgatgtggccaagatgatcgaggacctgtccaacacggtgacgaacctgcagatgaccatggtcacgttgcagaaggagaagtcatcttcttcgtcgactaccaacgggggcatcgacggccaacaccacaatgatcgtcccccgcggttctag

SEQ ID NO: 53 - DNA, 138 bp, Zea mays
  Peptide Sequence Number=SeqID_41832
atggatggcatgtacctgtcgtcattatcgcctgatcttccatcgataactacgaccttccaagacgttgctggcagtgcgcaggcgggtagcagatacccgatgagtagaggaatgaatatagatccatactcataa

SEQ ID NO: 54 - DNA, 504 bp, Zea mays
  Peptide Sequence Number=SeqID_41833
atggtggcttcaaaaattctaaatctaacatgtagttcctcagcttgtgagagaaattggtccgtatttgaacaggttcatacaaaaaggagaaacaggctacttcatgataggatgagagaccttgtgtttgttaaatttaactccaagctaaggggaaagaaggagagaatagacaaagatcctttagagagggaagtagatgatgttgttggtgatgatgacaatgaattcattactggtattgtacctcttccgaatgatgttgttgaaccagcgcaagatggaagatcacagggagaacaaacatcacaagcacaagttcaagtacaagcaaaaagaaagaggtctatgaagcctagaaagaagttaagaagcctccagtctctgatgcgtgatgttcaagttcaagtgcagcagtcctcatcagattcagaagatggtgacattgcaatggaatcctctgaatctgataagtctccacatgcctttgattctgattga

SEQ ID NO: 55 - DNA, 312 bp, Zea mays
  Peptide Sequence Number=SeqID_41834
atggagatcgctatggtacagtacctacaaaagatcgctggtgcactgaacctcgccgccgaaaacaaagaagaagtagttgaagaggaagttgcaccaccgactgaaattccacctgtcgaggacaatttctactttgacatttatggaacagatcccaagtcccctacgacacaaggcaagccctggcgcatttactctttccttgttgttttaaattctttatcacttgaaatgatgcatttggtgataggaattgagtgctacacagttgctgcatttcctaccttgaaattgattaccactccttga

SEQ ID NO: 56 - DNA, 147 bp, Zea mays
  Peptide Sequence Number=SeqID_41835
atggagagtcttgatctccgggcagaaaggaaatcacggcttgtgggtggtgatgagaatgttggttttgacattgactctggtaatggagaagatgaagtcgtggaaggagacttccaggagtttcaagattacgacgagttctag

SEQ ID NO: 57 - DNA, 228 bp, Zea mays
  Peptide Sequence Number=SeqID_41836
atggtgacgaccatggattctcagacgccaacgaattcagatgaggaggcgggcaacatgaggatggtgggcgctgagcaatgcgatggcatcagggacaacatgtgcccggacatctccaagtcgtttctcatctgcgtacactcgggcgactgcaacaaatgctgccaagaacagggctacgtccacggctactgctcctttctcagctgcaaatgctgcagatag

SEQ ID NO: 58 - DNA, 322 bp, Zea mays
  Peptide Sequence Number=SeqID_41837
atgacgcccaaaaagctccgtccgcgggcgtcccgacgctttgccacggctttcacccgcgcccaatggcagcgtaaagaccaccggaaaggagcagcactagcaatgccgccggacgggcgggggctttcacctggcacgagcaaaagtcgccggtgcggggcgcaacgcaaagcagcaccggtaccagcgcagcgcaacgcgagtgcaagtggtcgtgtcatacagccggcggctcccaggaggagggagaagacgccggaaccggaaaagagggttggctgggtggtgaaagagaaagcgaccacaaagcatccggccg

SEQ ID NO: 59 - DNA, 162 bp, Zea mays
  Peptide Sequence Number=SeqID_41838
atggacattgcaaaattatgggttgtcaaccgcactggcactggcaggcgcccccagagctgccggtgccgcccgagggacatcgggatccgcggccacggatttctttataacagaaaccggccaattccgatgcgcccgtgggtggggcctctcagctag

SEQ ID NO: 60 - DNA, 1242 bp, Zea mays
  Peptide Sequence Number=SeqID_41839
atgccggccacggacctccagggctcctccccgtcgacgcacgcccactcgtccccgttcccctcgttcggccgcacgctcctctccctccgccgcgacgccccggcggccgcgatgccgccgccgcgcggcgccggcccggagctcggggacttccacgcccatgtcgctgtgcgccttgcgggcctgagcgcgcccggcggggaggagttcatgtccgtcgcgtgggtccggcgcctgctggaggcgttcctgctgtgccaggaggagttccgggcggcggtggccgaggcgcggcgccgcggcggcggggtcacggcccccgcggacgcggagaagctggtggcggaggtcggcgagcgcgccgtcagggcgctcgacgtctgcaacgcggcgcgcgacggcgtggaccaggcccgccgctgggagcgcctcgcggggctggcggcctccgcactgctggcgcccgccgaggggcaggtgcacgagggccagctctggcgcgcgcggaaggcgctctcggacctttccctgctcctcgccgacgatgccgccgccgcctccgcgggcgccggcggcgggctcgcctcgttcctcgcgtcccaccgcaaccgctccttcggccgcgcgcgggcgtcgccgtcccgcgcctcgccctccgcgcacttacgctcgctgtcgtggagcgtgtcccgcacctggtcggcggcgcgccagctgcaggccatcggagccggcctggccgcgccgcgcgccaccgaggcctcctgcggcttcgccgcgccggcctacgccatgggctgcctgctccacctcgccgcctgggcgctcgttgccgccgtgccgtgcccggaccgcgccgccgcgctgcaggcgcaccacctcccggccgcgccgccgcgcgccgcgttcccctgggcgccgccgctcctcgcgctccaggaacgcctcgccgaggaggggaggcgcaaggaccgccgcagctcgtgcggcctgctcagggaaatccacgcgctggacaagtgcgcgcagcggctcgcggaggccatcgacgccgcgccggtcccgcttaccggcgagcgggaggccgagctgcgtgaggctgcagcggaactcgccgcggcgtgctccgccatcaaggacgggctggacccgctggagagacaggtgcgggagctcttccaccgcatcgtgcgcagccgaatggcgggcctcgatccaccgatggccaatgcagattga

SEQ ID NO: 61 - DNA, 234 bp, Zea mays
  Peptide Sequence Number=SeqID_41840
atgggcatggtcactggggtcgtcgtccacgtccacccatgcacatccatcctgttgccttgcctctggcagcaagcgaacaagccgcagcggaatggcggcgtcccaactaaacttgagaacagagccaacttgctgtcgaagctgctcaggcagatggcgaggaccaggaaggctgacacagcgggactagctgcattatgtggtgtgctgctggctgagtatcgtatataa

SEQ ID NO: 62 - DNA, 729 bp, Zea mays
  Peptide Sequence Number=SeqID_41841
atggtcaaggtccgcaaggaagagcagggagcaaggagcaggtccgtgaccgcggcggacgcgggaggggtcgtccaagggagtaacgggctagtacacgcgcacgcgacgcggagggcgttcccaccagcaccgcgggcgcgcgagcttagcttacggcgctgcccctcgcctggtgcggcggcgtcggcggccgaccgggggcagtttggggagtcctggaggcgcgggcgagcgcggtgggccacgcggacacggacacgcggctggggaatggggatggtggtctggtcgctcccgctactcgtctcgtggttggccttgaccccagtggggcccgggctcggcgattgccactgggaaacgctcggggaggggagaccgtccgcaggtgggtgggtcccggttcccaggcatgcagtggacgagtgtgggttcagacttcagagtccagactccagggagggagggagggaggtgagaccggacggacgggtggcacgtgccgtcggccgcgcgtacggacccgatcccgaccccagccgttcacttgaagtggggcccgcccgtacaagggctgctttcttccggctccaggcgaaagcacagtgccgcagccggcgtacgtacggcacacacgcgtcactgctcgcagaatcaccgacactaccctacgtagcgtcggcacacgcatccggcgaccacagcgacgtgttgaagtatatctag

SEQ ID NO: 63 - DNA, 636 bp, Zea mays
  Peptide Sequence Number=SeqID_41842
atgcgcgaggcagttccagtggagctgggcgaggcgaggcgtgcgggagaggtggactcggttgcgccgcaggttgcgacggattccctgcaaggaatatcatccatggaagtgacaaaagaatttgatccacaaaatctcttggagctgttctccatctttgctatcaatttgagtagtccaaccaaggatgttcagattttaacattgaggattctatcatattttgtgaagatggatcaacgtctaataacggatgaggagcgaccacacaagaggcagagaacagaagtttctggagaggaagctgttgctaaatacgctaatctatttttgactgcttcaacgggggcgatgtcggtgaggccgaggcgggagaggccaagtcctgccgggccgcacccggacccgagctccacggcccgagttcccgggaagcggggcacgtcggcaaaggggagggccgggtcgcggatgcagcgctcgacgaacttgacgaggaccagggacgagggccacacagaggtgcccacctcgaaggagtcgttgtcctgcttgaacatcagcaccacgccgccgaccggaagctccaccaccggagacgctgtgaaccgcatctccgcaggcggcccgtga

SEQ ID NO: 64 - DNA, 396 bp, Zea mays
  Peptide Sequence Number=SeqID_41843
atgggcgatgacaacaccgcagctgcttttcctctaaaccccgagttagatgattgcacaaacgtggatgctatggcaattcttcctgctccacagaagattaatcatctagaggttttggcaatgtctggaatacaatctgtgtgtgacaagtttgtgaaggggctcattcctgtgcatggttcaaatctgaaggagttagcatttgctggttgcttggaacttacctcaacttccatcaagactgttggggaatattgtcaagaattaacttcattggatctccgcaacttgaataggctgtgtgacccagcactgtggcatcttcgtggttgtaggctactaaggaaactaaggcttcaaagaaacgcattcagcttctttctggcattctaa

SEQ ID NO: 65 - DNA, 216 bp, Zea mays
  Peptide Sequence Number=SeqID_41844
atggacacgacctgggtgtccaaggtcgcttgcagggcgttgttgttgtccctcatggtgtcgatgcggggcggggatgaaggcgcgacggatgatgtagcagctggcgggggcgacgaggaacaagacgaactggatcacctggatcgtgataccaggttgtcaagggcgtcagacggtagagttgcggttgagcttctggaagagagctggtag

SEQ ID NO: 66 - DNA, 414 bp, Zea mays
  Peptide Sequence Number=SeqID_41845
atggctgctggaacaagcactccacgtgaccacacaccaccactcctctccgaatgcttggatggcatccgcagtaggggcttgagggaggtcgacgatgctgccaagggccgtggccatgactggggcagggagcttggcatgggcgggctcacagcgcgtgaggatagagtttcttccctgcgtcttggagcaggaagttctcaccggaatctcaggaagatgtgggagagcaggtgcatcgtgtacactgcacagttggagaatggggtggtgaacgagtggacgagatgcttatggttctgggcgtccgttgaggagtactgtgctgcaggtggggcattagcgattgaaagagtcaaagaggcaaacaaccagctagcaactgagcaacaaccaacatgtgcattttga

SEQ ID NO: 67 - DNA, 252 bp, Zea mays
  Peptide Sequence Number=SeqID_41846
atggagacaactgatcaagccaaggatggaagcaagaagagctttgaggtaccgagtgcatgggagaaggtcaaggaagtcgaggaacccaaagccagagatgaagaagaagacttggagcgtcgaagaggagctggaagcagagcaccattgcgtgtggagaaggcccacagctctctatggagttactcgaccgtggtgcttggccctcgcgtgggcttccttttgcgtagagacaccaacgaggattaa

SEQ ID NO: 68 - DNA, 339 bp, Zea mays
  Peptide Sequence Number=SeqID_41847
atggccgaactatccgggtacaaccccaaacaattcggccaggtcgtggaccatccgacccctcatgcgtggaccatttgggtatggaactacgcaggcaacgccatatatggccagacagtccagatacacactcggaccgttcgtcctagtcgcggactgttcggcccttatgtcggaccatccggcctgaaccagtataacacatttgtatcagatccacctttgagcacccatagctcaccattcagtgtgagccgcgctaacacccctgccgaggacgtggcagagcgcgtcatgttgctgacacagttgagaactggtgggacacgtgtctag

SEQ ID NO: 69 - DNA, 285 bp, Zea mays
  Peptide Sequence Number=SeqID_41848
atgaatatactacaagcgattgagcaaacccctcctccagcttcgatagacaaagctgccaaactgactaatgccgaagctaccgttgccgccgaagacgaaaacctcacaatcactctgtccaaaattaacagacttatatcaaatgtggttgcggagaaagaggtggctgcagtagattcagacaagggaaaaagattgatgaaacctcttcagaaggagcgaaattcgacctacggtacttgggcgaccaacagctctctgaagaggacatatcgaagttga

SEQ ID NO: 70 - DNA, 222 bp, Zea mays
  Peptide Sequence Number=SeqID_41849
atggtggctagcgcaacagatgttggcgagtgggaggtgctcgggtctgatggagggggaaggaggggtacagaacttcggcttgtatgcaccatggcgaagtccgtgaggtggaaaccaaacaacgagcactgcggcgattatccgcagatcacggacggtttaaattttcaaaattttaagttatatgcacaaacaaactctaacatgatgcagatgtaa

SEQ ID NO: 71 - DNA, 222 bp, Zea mays
  Peptide Sequence Number=SeqID_41850
atggtgaacaccttcttcctcttctgcgggtgcgtggaccaggccagcgtggcggtggtggagaagtggggccgcttcctccgcctcgccgacccgggcctccacttcttcaaccccctcgccggggagtgcgtcgcgggctccctcaccacacgcgtccagtccctcgacgtccgcgtcgagaccaagaccaaggttgtgtgcctccattcattcgtataa

SEQ ID NO: 72 - DNA, 720 bp, Zea mays
  Peptide Sequence Number=SeqID_41851
atgcaggcggcatgcaaccgtgccaagtgggcgcgctccttcgactccaacgagcccagcatggaggtccaggcccacgcgtcatgcaaccggcgcgccggttgctacgtgggaagcgagcgacgcttcgccttcgccataatgaccgcgtcaaaaaagggaccgggaaagggggataccccgaaagggacccttccccgtgaaggaaacaagctccaagcctccctactgatcagaggttcgaaggccggcccctcggaggggttcaacggccgcctcagatcgattgggttctgcgcccactactggtcagagccaaggccgtcctcgggcgtcataggaaactccgcctcgcccgaccccagggctcggactcgggctcagccccggaagacggcgaactccgctccgcctgacccagggctcggacatgggctcagccccggaagacggcgaactccgctccgccgacctagggctcggatatgggctcaaccccgaaagacgatgaactccgcctcgcccgaccccagggctcggacttgggctcagccccaggagacgacggactccgcttcgcccgaccccagggctcggactcagccctggcctcagccgatggtctccgcctcgcccgacccaggggctcggactcgaccacggccacggaagacagactcgacctcgacctcggaggagcctccacatcgcccaacctag

SEQ ID NO: 73 - DNA, 408 bp, Zea mays
  Peptide Sequence Number=SeqID_41852
atggcgcaatgctcagcttcagccatcctctttggtaagccttacacttcacgtggaccggggactccgtcgacgcgcaccaccgaaataggtgaggataggtccctgctggtcgaccctcgtgctcgtcgtcgacgaggcctctgtgtcaactctgggtacttcgcctcatcaccgggagtgtgcccgtggccaagtcaaggtggtacaacagtcgtggcgaccccaattgctcgtcggagctcggcggacgtctctggattgcactgtgccgtgattgggttgccactacccatctcgcgcatcaccattggtggggcctcaacgggtgtctctggggggtcgtttcggtgcactggtggtctgcatgggcgaattgggggctgtggccgagcggggctcagctaa

SEQ ID NO: 74 - DNA, 441 bp, Zea mays
  Peptide Sequence Number=SeqID_41853
atggcgccgacacctggggcccactggtcggcctcttctctcgcgcccgctctcactatctcactggattgcgggcccgctcgacagttgcctcgtgccgcacgcggtataacccaggcgtctgctggtggacccgcaccgtcaatcgcactggtgcgcggctactctgttggtcactggcactggagcccattgggcaggcgtcatctccctcgcaatcgcctggccaaaaagctcgccaccaccgcggagttctcgctggctggccccactagccctgggcgtgcatataggggaggactaggccctatccttcccctctatcgtgccctcacatccacaaacgccaccctatcgtgcgccgagtggcaccaccgtaaaaaagagaccgtcgttgtgctgccgccgtggtgccacgtccccatcggtgttatgacctag

SEQ ID NO: 75 - DNA, 3960 bp, Zea mays
  Peptide Sequence Number=SeqID_41854
atgaagggcaagaggagagaaaagaagagatactacaagaagaagggcggcgaagcccatgtatgccacgagtggaactccgacgagagctccaccgactcatcctccaacgaggacgccgccaacatcgccgtcaccaaaggactccttttccccaacgtcggccacaagtgcctcatggcaaaggacggtaaaaggaagaaggtaaaatcaaaatcctccactaaatatgcaacctctagtgatgaggataattctagtgatgaggaggataatttgctcaccctttttgccaacctaaacatgcaacaaaaagaaaagttgaatgaattaattagtgctattcatgagaaggatgaactcttggacacccaagaggacttcctaattaaggaaaacaagaagcatgttaaggttaaaaatgcttatgctctagaagtagaaaaatgtgaaaaattatctagtgagctaagcacttgccatgatgttattgccaaccttagaaatgagaatgctagattaattgctaaggttgattcaaatgtatgtgatgattcaatttccaatcttagagatgataaagcaagtttacttgctaagattgaaaaattgaatgcttctcttgctagccttaagattgaaaatgaaaaattgattgctaaggctaaagacttagatgtttgcaatacttccatttccaatcttagaagtgaaaatgacattttatatgctaagatggttgaactaaaatcttgcaaaccctctacatctaccgttgagcatgttagatgtagagatgttaacattgatgctattcatgatcacatggccttgattaaacaacaaaataatcatatagcaaaattagatgctaaaattgccgagcatgagctagataatgaaaaatttaaatttgctcgtagtatgctttatagtcggagatgccctggcatcaaggatggcattggcttccaaaagggagacaatgtcaaacttaatgtccctcctaaaagattgtctaactttgttaagggcaaggctcccatggctcaggataacgagggttacattttataccctgccggttatcccgagcacaagattaggagaattcaatctaggaagtctcactctggatctaaccatgcttttatgtataagagtgaggcatctagttctaggcaatcaacccgtgctaaattggctaagaagaaaactcctatcgcagcaaatgatcataacatttcatttaaaacttttgatgcatcttatgttttgactaacaaatctggcaaagtagttgtcaagtttatgcatccggaggctcaagttggatcatcgatagcggggaagcaagttggtgttcatcatccacacaagaacatcatgacgaccgacaggctgcttgagctactccacatggacctattcggcccgatcgcttacatgagcatcggcgggagtaagtattgtcttgtaattgtggatgattattctcgcttcacttgggtattctttttgcaggaaaaatctcacacccaagaaactttgaaaggattcttgagacgggctcaaaatgagttcggcttgaggatcaagaagataagaagcgacaacgggacagagttcaagaactctcaaattgaaagctttcttgaggaggagggcatcaagcatgggttctcttctccctacaccccacaacaaaatggtgtagtggagaggaagaatagaactctattggacatggcaaggaccatgcttggtgagtacaagacttcagatcggttttgggcggaggcggtcaacaccgcgtgctacgccatcaaccggttgtatctacaccgaatcctcaagaagacatcgtatgaactcctaaccaataaaaaacccagtgtttcatattttagagtctttggtagcaaatgctttattcttgttaaaagaggtagaaaatccaaatttgctcctaaggctgtagaaggctttttactaggatatgattcaaacacaagggcatatagagtctttaacaagtcctctagactagttgatgtttcttgtgacattgtgtttgatgagactaacggctctcaagtagagcaagttgatcttgatgagctagatgatgaagaggctccgtgcgtcacgctaaggaacatgtccattggggatgtgtgtcctaaggaatccgaagagcctccacaagcacaagatcaaccatcttcctccatacaagcatctccacccactcaagatgaggatgaggctcaagatgatgtaggagaaaatcaagaagatgagccacctcaagaagagagcaatgatcaagggggagatgcccatgatcaagatgacgaagatgaacaagttccaagaccgccacacccaagagtccaccaagcaattcaacgagatcaccccgtgaacaccatcctcggcaatattcaaaagggggtaactactcgatctcgtgttgcccatttttgtgaaaattactcttttgtttcctctattgagccacacagggtagaggaagcacttcaagattcggattgggtggtggcaatgcaagaggagctcaacaatttcacaaggaatgaggtatggcatttagttccacgtcctaatcaaaatgttgtaggaaccaagtgggtcttccgcaataagcaagatgagcatggtgtggtgacaaggaacaaagcccgacttgtggccaagggatattcacaagtcgaaggtttggatttcggtgaaacctatgcacccgtagctaggcttgagtcaattcgcattttacttgcctatgctacttaccatggcttcaagctttaccaaatggacgtgaagagtgccttcctcaatggaccaatcaaggaggaggtctatgttgagcaacctcccggctttgaagatagtgagtatcataatcacatatataaactctctaaggcgctttatgggctcaagcaagccccaagagcatggtatgaatgcctaagagatttccttatcactaatggcttcaaagtcagaaaggccgatcctacactctttactaaaacacttgaaaatgatttgtttgtatgccaaatttatgtcgatgatatcatatttgggtccatgatgggggagttgaagtacttcttaggatttcaagtgaagcaactccacgagggcaccttcattagccaaacgaagtatattcaagacattctaaacaagtttgggatgaaggatgccaagcccatcaagacacccatgggaaccaatgggcatctcgacctcgacacgggaggtaaatccgtagatcaaaagatcggtttagcagttgcaactcctgatttggcgacatggctccaagagagggaaatggtgtccaatctgccatatgttcaatcatctgtgactaccagagcaaatcagaagttggccttcaggttttttggaccatacatagtgcttcaacgtgtcagccccgtggcatacaaattacagctgccagcatcctcccagatccacccactattccatgtgtcccagcttaaggctgccctcggccgtcagcaagtggccgtccagaatctacaatcgacaacagattcaatgcaggtgcccatgcagatcctgcagcgccggatgattcaacgtggaggactgacggtggcgcaagtgaaagtcacctggtccgacctggatccggctctggccacctgggaggacacaaccgcattgaaggagcgtttcccgtgcgcgccggcttggggacaagcagcgcctcaagggagggggaatgtcaaaccagcacttcaagaggaggcagcaggtcgggaagagaagcaagccaagcaagcatcgatgtcaaccacgcaggaacatggagaagacgacggccaggcgcgaccccgtcatgaaaggcgagaaaacacccgtgtcattgggcccgattgggtcatgtaa

SEQ ID NO: 76 - DNA, 465 bp, Zea mays
  Peptide Sequence Number=SeqID_41855
atggcgcttcctgtcgacgtggttagtctgcgccctaggttgggcgatgtggaggctcctccgaggtcgaggtcgagtctgtcttccgtggccgtggtcgagtccgagcccctgggtcgggcgaggcggagaccgtcggctgaggccagggctgagtccgagccctggggtcgggcgaagcggagttcgtcgtcttctggggctgagcccaagtccgagccctgggtcgggcggagtggagggatcaacgtcggtggcgatgcgagaggaggggttgacatcctcaggagtggagggattgacgacggtggcgatgcgagaggaggggttgacgacgatggcgttggcgcgagtgagggggagggcggcagggacgcaggggagggggaggatggggacgacagggtcgcgggggagggagaggggaaggatgagggtgatagattgttcattgtatttaagtaa

SEQ ID NO: 77 - DNA, 465 bp, Zea mays
  Peptide Sequence Number=SeqID_41856
atgacggcgaacggcatgggcacggttgccggggtgctgcatgggcgagcttcacggactccaggacggacggaggtgctgctgcgcgcgcgcgggcagggattccgggcgtggtcgtcggtgagcgttctgactgtggggtacaagctccggcgaggcacgacgggaacgaacaacgcgacgtcggttcctgcggggtgtcggggcgtctggcggctcggcttcctggcccatggcgtgggcgtcgcgcagggcgctgtcgcggcgtcctggcagggtcggctggccgcggtgtggccatggcgcgggacgcggagcggcggctgcgagttggtcctgcggctgctcgggggagaggagagaggaatggaagggaggagagagaaggagggagcaggcggcggcggctatccggcaacatacgaactgaagaaggagatgaacaggcatggtagtggggcctag

SEQ ID NO: 78 - DNA, 2208 bp, Zea mays
  Peptide Sequence Number=SeqID_41857
atggagccgaggtcggcatcgtatcacggctacaatgataaatcccccaccgctctccacaatgcaccgccggagccggacacttcacagttcacacttctcatctcccatcccatcggctctgcttgccagttccgcggtgagagcccaccacttctgcgtctcaaggggcagaggttgtacggatcgctctggccttcgccgccggttggctcatcaaccaccgcgcgggcacgggcgcacgacgcaggtgccattccggtctccggctctctcctccggaagcgctctctcccagaacagaacgcctacctagttacctactctctcggcaacggtaagaacaagggcgcttacgccaagaaggctagcggcaatgattgccccaaggtgaagccggtggaattcatggacatggtggtggcggacgctgttgtcgacgacgtcagcaggtgccgagacagcgttccagcgtctgcatgcagcagtaggcttgtcgctcacgcagccgccgagctggcacgccatgccactggcgagaacggcgacaaggccgcagctaagagggactcgtcctccgccgctggctcctcctcctccggttacagcagcgacggaacaggcgacgatgccaagagcgccgagccggacgacggcgaaccctgcagcctcggccgcatgtcgccgacggcggcatcgccaaagctgatgcgctcctgctccaacatcgagacgacgagatctgtcctgacagggtccgacctgccggcgaagtcacgctcctacgacgacctgaagacgctgccctcccacggaagctcgagcgcccgcagcggcggcgcggtgcgcgcgagcccgacgccggcgtcctccaggacctcgtgctccgctgaccgcgtcatgctgaagaagcggtcgtcgaggcaggtgctcccgtcgcggagccggaagctgtggtggcagctgttcctctggagccaccgcaacgtgcaccgtcgtcggggcgcgagcgcgcccacgcccacgacgctgctgtggccatcgccggggagagaaggcggcggcgccgcgcaccggcgcgacgggtacgcgtccgacacgctgggcacggccactgcggacgacgccaaggagaagggcgtcgccgtggaggaggagggcccccgcgtcccgacccagtgggtggcgttctccgccgaggcctcgccgctggaccgggtcagcgcgtgggtgaacagcctcgggaacggctcgttccacgccgtcgacgaggacggtggcgccacggggcacggcggcgacggcgcctcgcgcctgcgcccgcgaccgcgtcgctctgagattgtggagctgccaacgtcggcggccggcggcaggaggcatccgcagccgcaggcgaggcggcgcgcggcggcggcggcggccgaggctggccaggcgagcggcatcatcgtgcagacgctcaacaccttctcctccgtcgcgcacatcgccggcatggggctccaggccgtcccggcgatcgcggccttctcgaccctccgggccgtcaatctgtctggaaacgtgatcgttcgaatcaccgctggatcgttgcctaagggcctgcactcgctggacctgtcgaggaacaagatcgcaatcatcgaggggctgcgggacctgacgaggttgcgggtgctcaacctcagctacaaccggatctcacggatcgggcacggcctgtccagctgcacggcgatcagggagctgtacctggccgggaacaagatcggcgacgtggaggggctgcaccgcctgctcaagctggccgtcctggacgtgagcttcaacaagatcggcacggccaagtccctgggccagctcgtggccaactacggctcgctgcgggcgatcaacctgctgggcaacccggtgcaggccaacgccggcgacgacacgctgcgcagggccgtgtcgggcctgctcccgcggatcgagtacctcaacaagcaggccgtcaagccgcagcgcgcgcgggaggtggccaaggacagcgtcgcgcaggcggcgctcgggaacgccgccggcgccaactcgcgcaggcggccggcgcggcgcctcggccagagccccgccgggtcgtcggccgccaagggccgcaggggcagcaggggcaggtctgtcaccaggccccagagctccagcttgccattgccaaggagatga

SEQ ID NO: 79 - DNA, 204 bp, Zea mays
  Peptide Sequence Number=SeqID_41858
atgactagctcggcctcaccgaccatgctcccgcccactcctacacacaacatgcgccacatccaatcacccttaaagacaaccgatcaagccaatgatggaggcaagaagagcttcgaggcaccgagggtacgggagaaggtcaaggagaccaggaacccaaaagccaggggtgaagaagaagacttgcaaagtcaaggttga

SEQ ID NO: 80 - DNA, 855 bp, Zea mays
  Peptide Sequence Number=SeqID_41859
atgccgctcgccggcattgccctcacgcccctcctcgtctcacctctcgcgccttccccgcgccgtagccgtgtagccacttccgccgcgagaaggccaagggctctccagcgagctcggtgctcggctacagccgcttccggtgaagccggtgagctgtcgcacgcgacactgctatggagggcggcgaagctacccatctactccgtagcgctaataccactcacagtagggagcgcttctgcttattatcatgcaggcttattctttaccaagcgctattttgttctcctgacagcagcagtcctcgtgatcacttggctcaatctcagcaatgatgtttatgactcggatacaggggctgatagggacaagaaagaatctgttgtcagcattactggcagccgagcaatgacacaaaatgcggcgaacttttcccttttcctcggctttgcagggctactttgggcctttgcagaagccaaggatatcagattcattttattggtgatctctgcaatcttctgtggttatgtttaccagtgtcctccattccgattaagctaccaaggactaggcgagccgttgtgtttcgctgcatttggtcctttggcaaccacagccttttacttctcaaacagcagcttaaatacttcgagcggaggagcggctcttctccctctcactaaaacagttatagcttcatctgttctcgtcgggctgacaactactctgatactcttctgcagccatttccatcaggtcctctgtgcccttactctgcccatgggcaaaacggtcgtggactacgtgctgaaacatcacgaggccgatgagaatggggcgcagtactga

SEQ ID NO: 81 - DNA, 630 bp, Zea mays
  Peptide Sequence Number=SeqID_41860
atgaagctacaggctatatgtactcttgggatgttagtgttctataagttgctttcctctaaaagaggctgcttccagtcatctttgttagaagggacgcagacagacttaaacaggaacagattagctgaagcaggccatcacggcatcaaccgaatcacctcgtatgcatacgcctgtgtgggtcgaagcgaagggtcgggaaatggaggcatggtagtctctgaaaccgaaatggaactgggtcggtggaggcggccggaaagagaccatccgaggcgagccaaagccatcagcgaggcgtctggtgtgtcctcggtgacggcgcgggagatgggagccggcggctcgacggcgaggacctttcttttaggtgtaaaacagcgggcaagagcgaagggcggcgccagattcgaccggggattcgtatggtccaacgcggagacgacgatgggagtgaagactcaccgcttttgccccatggaggccgtcgccctgtggaagccatcgcccaacagagttctggagacacggagctccaatgtggaagacaccggatattgcggaagcaaagaactttgggggaaaaatgggaagcatatgaatcggatgacgaaccctaaaccctaa

SEQ ID NO: 82 - DNA, 978 bp, Zea mays
  Peptide Sequence Number=SeqID_41861
atggaagtgagttcaccggaggtgggcgccaatgttgtttacttgttctcaaatactgtggatcaagaacaaggcaacataattgttaaagattggggaccttcatcctccgaaacattatctcctttcgagtataatgattcttggacgaaggaggtggagtctacgaggcatctctcccctgtgtccccgctggaggcaccccctgcaccaccacagggtgtcccggctataggaggagctgatggaggggatctcgacatagacgacgacggtggaagctcaagccacaacaccacgctttctgaggagcaggagtcggaagacccggactactgggaggctatctgcttggtccggttccaacaattggtatcgaagctcagacctgacgtcgttgatcagatcgcatcaggtagcataccattaccataccgcgcgggccgggccgggagaaacaaaactgacaaggacgatatggtgcgtagcctcgtcgcgctgctcctcgtcgccacggccgtagccgccgtggccagagccgcaccctcgccggggtttgtcgtaaccggccgcgtctactgcgacaactgccgcgccgggttcgagaccaacgtctcccacgccatcgaaggcgcgacggtggagatggagtgccgtcacttcgagtcgcaggaggtccacgacaaggcggaggcgacgacggacgccggcgggtggtacaggatggagatcagcggcgaccaccaggacgagatctgcgaggtgctgctgctcaagagccccgaggcggactgcgccgagatcgagcgcacccgcgaccgctgccgcgtcccgctcacccgcaacgacggcatcaggcagagcggcatccgatacgccaaccccatcgccttcttccgcaaggagcctctcagcaactgtggcgagctccttcgcgcttacgacctcttcaacgagacgtccgagaattccctatga

SEQ ID NO: 83 - DNA, 291 bp, Zea mays
  Peptide Sequence Number=SeqID_41862
atgaaggtacaagatgaacgaggaaacattgcgggcccttctccgtcctgctctgtcaattttttagagatactaaagagtttattgttgagtaaggctttaaagtttgagcaagaagctgaagatcagaagaatgaacttgttgtcagcaacctggagaaaagggtgaaggagtttgaagattctcttgaagagaaggatttgaaggataaagagcctgaaatagcacattcaaaattaaaggaagctaacaatcgttatgaagacaagggcaatgttgatgaaggctga

SEQ ID NO: 84 - DNA, 1260 bp, Zea mays
  Peptide Sequence Number=SeqID_41863
atggcacccatccatgccctgttcagaagcagtaccagtcggggtcgagcgagcctagagagccagccgaacatggacagatacagagcacccaaggccaggccagaccaagcagatgctgacgactccgacgagctcggtgtgtttgccgccgagcgctacttctacggagacgacgacgagctgtggccgtgcgagcgctcctcctcctcgctgtcgtccgcgttcaggacggggacgcacgagcccgaccggtccgtcccgacgccgacggccgtcactagctcgtcggaagcaagctggaacagccgctccactctgctgcccaatcccaatgggcaggccgagaagttgcacgctgctgccgccgccgccgccgccgccgccgccactccgatcatcgaatccaggccttccggggcagaaggccagcggcccggccgccggcccgcttcgtcgtctaacctgcggcggtggctgcgcggagtggcggcgtgcgcttgcgccggcggagcttctgaagatacagcgagcgccgacgaaataggaacgaacgagcggttcccggaaacagaggtccccgaggtcaccgcagcgagatcgagtctgacgcccgcgagtggcagatggctcctcggaggcgacaacacaacccttgccggaatggaggcgttttcttctcccaatcccattcagcccgcgggggatggccaccgtcgtgccaccgacctgggtgaattgtctacgcccatcttgcatccccaagcagcagccacctcccactccgacgagcggcggcgcatcaaaccattggaaacgttctggccggtgccgccggtgggcgaccatgggagctcgctcgggtcagagatgcagcgaagctctgcttctgcagtcgtcgctggaaatacggctctgggtggtgacgctcagcgcgcggccagcggtggcggagggagtccgggcgaggacgacgcggctccgagcgagcttgggtgccagtacccacctagcgaggccagcgttgtctggagcgtggtcaccgcggacggcgcggcgtccggcatcttctccagcggggcgtctgggtactactaccactactgcctcaacgacctcgaccatggtgcgatgcggggcgccggtgccaggaacactcggagaaggagaagcggaatcgtaagcagcagcagcctgctgtgcatgagcgagaaggcagtcgacgctgtcgggccaactcggtccgttcaccgacagtag

SEQ ID NO: 85 - DNA, 1950 bp, Zea mays
  Peptide Sequence Number=SeqID_41864
atggattacgactttggtggcacctcacccgatccctatgggggtggaagcatccacctagtgtgtgatcattgcggtaccagtgacaactacaccactgacgacgctgatgatggccaattcacgtgccgtacatgctctgccgtgcacactacacaggcaactgctgctgatcctcatgacttccccgccactggcaacatctctgtccgtcgtgttgccacccagcccacccccaagcttggtgcccgcacacccgcgccttacctgaggacccctcaggctgctcccgtgcctgctactgccgcttttgatgacttcacagagctgagtgagccgcgggactttgtgtctggatctggcacgtgtggggagcctgaggatctggcagtgcaggtccgctggcgctatgtacggggtctccaggtgatcctgcagcggcagctggaggtgctggtggagcggcaccaggtaggcgcgtttgtgtgtgctgttgccggcattgtctgggtgcggtgggttgctgcatccagggtgtttgatggaatctgggcccgccaggtgcttgaggaccacaaggccgtggggagacagaagtgttatgatgacaagaaacctgatgagatgaagtatgaatgggatgatgatatgtcgctccaacgaaaagacaggcacaagctggagtttgcctttttgcgttcgttgaggatgatgctgccggtttactcaacattggctgtttgtttcttggcctgtcatattgcccgtgaagccatcttgccaagtgacatttacaggtgggcaatggaggggaatatcccatatgtggctgcttttactgaagtagacaggttccttgggagctctttccaagactgccctttggatgcaaggcagctgttcaggccggtgcgagttatcggagcatggcaactggaagctgcagctggatccatagcacaaagagtagccttgaggcttccttcagttaacttctatgcaattgctcaacgttgtttgaaggacttgttactgcctatagatagaatcctcccccacgcatgccaaatttatgagtgggcaatgcctgcagaattatggttgtctagtaatcctgctagagtcccaacacgggtttgtgtgatggctatcctaattgtggccctacgacttctttataacatcaacggtcaagggatatgggagaagatttgtgaggaaggaagaaacccaagtgaatctcactatgatgcaaattcatctacttccaggaagcttgaggctagtaacagtgaggagtttggcacaagagaactgttgtgtgctatttcagttgcctatgataaaatcaatacgtcacatgactactcgagtgatctccgctcttatctcaaatactgcaaggaagttgtttttgctggaattacatcttcagatgaacagactcatctaatagagatcttttgggatatgtacaaagccagggaggatgataatatagaagatcatgtaaaatcccagtcccattctatggcagacattccaattacaaatggagtgaggaaacactaccgagatggagcttttgttaaagcaagttccttttctgcatcttcaggtcatgatgcaatgcaaatgctcaagtcagagatgcaagatcatggatttcattatatgccacctaggaaaccaaggaaatcagatggttatcttcgttataggcggcggcggctaagtggtggctttatttttgttgcacatgctgattattacttgttgctacgtgcttttgcaaagcttgcagaaattgatattcgtatcatgcatattagtgtgttgaaacttgagaagagactcgcatgtattgaggagcgaattgaaagaagcttgaacaccttacataacttttctactggaacagtagatgagctaagatctgtatctgactga

SEQ ID NO: 86 - DNA, 1890 bp, Zea mays
  Peptide Sequence Number=SeqID_41865
atgggtttgtcaatctcatatccaccagatgactatttgcctgaggatgatgatgatgatgatgatgatggtattgacaggctgtttgtgcggtctctaagctttgataatctcaacacacatgatacccttgaatcaccaacagcattgctcgatgcactgacctccaagaggctcatggtgagaggctctttaagattcgaaagaagggagggtgatccatttcaagttgaaacaacgttatcaatggtgagtcctaaacctgcaaagaagagttacaactacaagcctatagtcctgccaagatataagtccacagagaacctaccaccagattctccggtaattgggatggtcagcccagtgcaccaggctgcagcaataagagtgcagaaggtgtacaagagcttcagaacaaggcggcagcttggtgattgtgctgttcttgttgaacaacgctggtggaaactacttgattttgcattgctcaagcgcaattcagtgtcatttttcgatgtacaaaagcctgagtcggccctctcgaggtggtctcgtgccagaatgagagctgccaaggtaggaaaaggtctttccaaggatgaaatggctcagaagctcgcactgcaacactggcttgaagcaattgatcctcgacatcggtatggtcacaacctccactactactaccaatactggctacactgtgaaggaaaggaggttaatattgatgagcactgtccaagatggaagctgctgcagcaatgcatcaggtaccttggcccgaaagaaagggagtcctatgaggtcgtggttgaggatggaaagtttatgtacaaactgagccagaaaatcgtcgacacatctgaaggccccagggatgcaaaatggatcttcgtgctgagcacaacgagagctctatacatcggtacgaagagcaagggcacatttcagcactccagcttcctcgccggtggagccacatctgctgctggcagactgattgtagaggatggaattctaaaggctgtctggccacatagtgggcactaccgccccacggaggcaaactttcgtgagttcatgaactatctgaagaacaggaacgtggatcttacaaatgtcaagctgagcctgtcagaaggtgaggaggacgagtggttcaggcacagggccagtagcctctcccagcttaacaacacggagagcagccaccccacgagtgcagaagactccaagtcccactcccaccccgctggcgctgctgacaaaggcaatgacactacaccaggcacgccaccatccacgagccatgataaaacaacgaccagcgcagcgacatcaggcacgccggccatgaagaggtcctcgtcgggcagcaagctgcagcgcaagaggcctccacggctggcagtgagcaagagccggctgggcaagggcagcggggagcagggcgcgggcgcgttcggggactgcctaaacttctgcaaggagaacctgttccggggcggcgagggcgacggcgagggcggctgcgagggcgaggagatggtggtggtgccgcaggagaagatcctgcaccgcatcaactccaagatgagcctgcactcttaccagctcgggaaccagctctcgttccgctggaccaccggcgccgggcccaggatcgggtgcgtccgggactacccgccggagctgcagttccggtcgatggagcaggtcagcctgtcgccgcgcggtggcgccgagcaccctaggttcggcggcacgcctccccgccagagcccgtgcgcaccgctggtgccatcaacgcccggaggccccgtgtcgccgctgtacggtcacggtggggcggggacaccttcgccgcggctgcaacacggtgctgcctag

SEQ ID NO: 87 - DNA, 279 bp, Zea mays
  Peptide Sequence Number=SeqID_41866
atgggttgtaacgattccgggtgcaatccgacacaaacgaacaaggccgtagggatgcgtttggttacgggacagctaagtatggacacccaagtgaagcttgctgttgtggtgaaggtgatgggaaggaccggctccaggggtcaggttacccaggtcagagtgaagttcttggatgaccagaaccgtctcatcatgaggaacgtcaagggaccggttcgcgagggagacatcctcacactgctcgagtctgagagggaggctaggaggctgcgttga

SEQ ID NO: 88 - DNA, 1604 bp, Zea mays
  Peptide Sequence Number=SeqID_41867
atgacccaggtgaagcccgcccctgggggaaggatgctgaccgtgctgcgggtgcacctcccgtcggagatcccgatcgtcggctgtgagatcacgccgtatgtgctcctgcggcgccccgacggaggcgtcttcaccgacgacgtgtctgagaccgcgcccgtggatgggtacttcatgcgctacaagtggtaccgcatacaaagtgatcgtagagctgctatctgcagtgtacacccaacagaacaagcaacacttcagtgcatagggtgtctgaagtcaaaaatacctgttgctaagagctaccattgttcttctaagtgcttctccgatgcttggcaacaccacaaggttttgcatgaccgtgctataagtgctttaaatgaaaacggaaccgaagatgatgagttgtttggcagatttggtagcggcagttcgagctcaggggttattagtgctgcgttgtctggttcaacatcaaacctttcactgagctcaggtgttaataatggacctacacctgtgtatccaacaggcactgagaagagttctggtgaaacttggtttgaagtgggatggtcacgaacatatacggcaactactgatgatattggacatgtgctaagatttgaatgtatagttgtggatgtggaaacacgggggactgtgagagctcctacttcagtcatgacatcccgtgtaatcccagcaccgaccccgacaccacgccgcttgatccctgttaatgcagctgatgcaatggtccacttcgatttagatagccggacttcttcttttgggacatttactgtgctgtcctacaatattcttgctgatacatatgcaacaagtgatacatacagctattgtccaacttgggcacttacatgggcttatagaaggcaaaatttgttgcgtgaaattattggttaccatgctgatattatctgccttcaggaggtcgagttcaataaggctgcacagtctttaactgatgcaattattcctgccgctcaaaaaaagttagctctaaatcgtttggttaaggataatattgcgctaattgcagttttagaagctaaatttagtaaccatggaactgaaaaccctagtaaaaggcaacttctctgtgtggctaatacacatataaatatccaccatgaccttaaagatgtgaagctatggcagattcataccctcctaaaagggttggaaaaaatagctgttagtgcagacattccaatgttggtctgtggagattttaattcaactcctggaagtacgtcacatgggcttcttgcaaggggcaaagttgatcatttgcatccagatctagcaatagatcctcttggaattttgcgcccactaagcaagctgacacaccagcttcctctggtcagtgcatactcatcattcgtgagtatggctggtgttggctatgatttggatcaccagcgaaggaggatggaccctgggacaaatgagccattgttcacaaattgcacaagggattttaccgcggattcattgactgtagagtcattattggagctgttggatgaggatagcttgagaaaagacacggctcttccttctcctgaatg

SEQ ID NO: 89 - DNA, 426 bp, Zea mays
  Peptide Sequence Number=SeqID_41868
atgtggcgcaccggacactgcactgttcactatccgggggtgctccgggcgggtgaggtgtactttggcgagcaatcccgaccatggggaggggcgatcgagcgcaccgaggccgacgcgggctccagtgaggggtttaggacatccagggccaaaagttgggcacgaggcggagctgcatcagccgaacgtcgtggaggcacgacagaccgacgcgcagcggcaccagcgagctctaattcaccgcagaggagtggaatcgaggcaaacagagtgcggggtgtagttccttacctcgggacagtgcttggggaggctcagcacagcgtctggagctccgggcggctcggcacggtgggcaagcgtcaccaacaagctcggtcgacggtggctatgcgcgagaagggctgctggcgagagaaatga

SEQ ID NO: 90 - DNA, 495 bp, Zea mays
  Peptide Sequence Number=SeqID_41869
atgaacgcgcgcaacactccattaggcacagtcctgacgacatgtcatttgagcgtacacgtggcctacgaccaggcggcgtaccgtcgccgcggggacgcggcgcggctcaacttccctgacgacgcggcgtccagggcgacgctcgaccccgtcgtcaacgccaagctcgaggccatcagtgccaccatcgccaccgccgccgcgtcgtcgtccaagaatgccgccagggccaagagcaaggccgtgccaatcaacgcacccatcctggaagcggtggcgtctccgagcagcagctcctcctccgacgaaggctccgggtcagacgacgagatgtccatgtcctcgccctccccgacgccggtggtggcagaattggggcagcttgacttcggcgaggtgccgtgggacgaggccgagaacttcgtcgattggccgccatgcccggccgtcgcagatgagggtttaggcaatctgcaggccgccggcacctag

SEQ ID NO: 91 - DNA, 552 bp, Zea mays
  Peptide Sequence Number=SeqID_41870
atggatttgaatagcaaggggattccttccccattcgatatcatttgtatagccttgtgttcacagtactgtgattgtcatagccttgtgttcattatttcttctgaatttgagtttcaggacaaagaacatcaacatgtggaggaagttgaccagaagtcaagcagcaagcatgttgagatcagtgcacatgatatgaattcgagcaggaaccctgtcaaagccatcatgcaggaaatgatcaacatttgtttggataataaagatatggaggcctctgatggaagcaagctcggcatcaatggtccaggtatcatcctcagcaagcataatgatgagtgcggtggtggtgcccaagaggctgaatcgatggagaacacgccgacgacacagctgatgatgcatcaagaccaactctgtagcaatttctgcatcctgcatatcatccaccattgtgaacaaatgcttggcattaccactgacataactcctgacctaataaatcatgcaggtcttatagttagcaggctgaatgtccccaaggaattgtag

SEQ ID NO: 92 - DNA, 177 bp, Zea mays
  Peptide Sequence Number=SeqID_41871
atggacgcggagggacgagaagggcccagcgacgggggcggcgagatcgggatgggggcggcgcagggacaggggtcggagaagcaggagcaggggctgttcctctcgagtgactcgcggaggcgcaacgctgccatgtacactaacctcgaaaacgtatgtgtagctgacgactag

SEQ ID NO: 93 - DNA, 370 bp, Zea mays
  Peptide Sequence Number=SeqID_41872
atggaggtgaggcccgcgaccggccacaaggagggcgcgtgcatggcggccgatgtggagggtggaggcgggggtggcgtggagaggctgtgcggcggtggcggcggcgtggtaaaagtgaagaggacactcggcaaagaagcctctttgccgagtgtccggcgtctggcactcggcagagcttgctgtgccgagtgtcattgctggacactcgacaaagccaaaggcgttctcgttcagccggccacccggttcctccccatgatagagcagggctccaggcaccccaaggacacctgcgccgcatactcgctgcaggagcccaccgaggcaagtcctgtctccgcctcattcccggggcccggggccg

SEQ ID NO: 94 - DNA, 258 bp, Zea mays
  Peptide Sequence Number=SeqID_41873
atgacgaagcagggcgtggtggtgccacccaactctgcaccactgttccagtacccgctgccgcgggccgtgtcgggcgtctccgtgcgcaggaagtacctacagatgggtgcgagcaccgatcgtgttgtcggcggcgggtgggtggggtccttgcgcgcatcctcacccacgcacgccagggcgggcattgacgaggaccgatatgcacgcgtctgcccctacagaattattattgcttactgcactgtggagtag

SEQ ID NO: 95 - DNA, 375 bp, Zea mays
  Peptide Sequence Number=SeqID_41874
atggtcggaccacggccaaccggctttgctgcgcagggacgtgctcacgtcgggagagggcacacgagggcagggacggaggtgccgcacctgctgctggcctggcctatccacgcaggggattgggtgcggtgccgtgccgccgcacgcaaggaagcaaacgatgggatgagggaatcgtggctatggccccttggcgcgcatgccgggaatggagaggcacggcgaatcggctacccccaacgaggaagaaggcaaaatcgaaggttagggagagaagaagaagaatggagcccaccttggtggacgagcagtggcggcgcgggtccgacgaacgacggcgcaacaagcagcactagggaggtgagggtgtga

SEQ ID NO: 96 - DNA, 447 bp, Zea mays
  Peptide Sequence Number=SeqID_41875
atggctgaagtgaccactgatagggcttcgccgttgaaaatgaaagagttggaaaggacttcttcagaggatatagagttggacatacggcacctgggcgtccaaaaactctccgaagaatatatttctgagttaaaagaatttgccattgctggcggttacaagtttagatccatgctctttggcggcgtcgacaaagagattctaggattactgttgagtaaggctttgaagcttcaacaggaagatgaagataggaaaaatgagcttgttatcaataacttggaaaagagagtgaaggaacttgaaagttttccggcagaaaaagattcgaagatcaagactgccgaaacagacctagccaaagctcatctacaaattaaagatcaaattgctcgcatttctgatcaagataaacagcttaaggaagcacattcaaatctatag

SEQ ID NO: 97 - DNA, 933 bp, Zea mays
  Peptide Sequence Number=SeqID_41876
atggcgtttccaactacgatttgttcggaatccggaggcggcggcagcagctacgtcgtctacggtgccgcagcggctagccatgggagcagcacaagtgatgtcgagatccagttgccatggggaagcagcagcgtactccagcagcagcagaaagcgtcctctcctaggtcttcttccagaaccacagcgacgacgacctctcccggaagcaacatgctggagttctccaacaacagtagcagttcaccacgtgagtgcatcagtacagtatctggatcagctttcaagaaggctaggacccaagaaccctccccggctcaatctactgtgaaggtgaggaaggagaagctaggggatcgaataactgctctccaccagcttgtctccccgtttggaaagactgacacagcgtctgtactccttgaagccattgggtacatcagattcctccatagtcaaattgaggtggtattttttgggctaatcgttaatactcctagtttggtattcaacagtactttagaaccaaacatgtgtgctagtttcatgaaatactttggttttactgagctggctctgagctccccgtacgtgggcggcagcaatggaggtgggggcggctccaagcagaatcagcagctccacgaggctagtgcgcagagagaaagcaggcacagcatatttccagaagaccctggccagctcctgcatgacagcagcgcaataaagaaacgggccggactgcagcctgctgatggtgagcaggatgaagaaagctgtgatgaagagaagaagaaggatctgagaagcaggggcctgtgcctcgtcccggtgagctgcacgctggacgtgggtgtggacgtggtcgctggccccgcagactactgggcggcagctgcgccggctttcggcatggggttcggtgcgtag

SEQ ID NO: 98 - DNA, 285 bp, Zea mays
  Peptide Sequence Number=SeqID_41877
atgttgtatgtcatactagagcatgaggatttgttgaaatgcctaacaagacagagggatccagtagtggtctgtgaggtgctctgggttcattgccatttgaaccgtggctctggtgttaaccgcaaaagaaacaagctcatgttactgaggtactggagcgacattggctattgcatggccagccgcaacggtggcggcggtggcagggtcggacccctggtcactagggagtgggggcggctccatgggaaggggaggggtgaggccggcggcgccggctag

SEQ ID NO: 99 - DNA, 327 bp, Zea mays
  Peptide Sequence Number=SeqID_41878
atgagcctcatcatgtggtacctgttcttgtcctatgggggatgtgagacagcaagggcgatgagctggatggggcgcttacctatggtgatgagccgtgaagtcgaactacgggaagagtggagccacgacaattactccggcaagcgatttgggcgcacaccagatggcctgagccacggagatgtcgcgcaatcacgccctgcctttccccgatggttccccgaattcggtgaggcggcggcgagcagtaagcacgaggggttcgtgggagggggtccgcttttaacacctgaatgcgcggagttggtggggcgtcccagctag

SEQ ID NO: 100 - DNA, 1371 bp, Zea mays
  Peptide Sequence Number=SeqID_41879
atgtgcggccacaggaacaaaaggagcaagatcaaccttcttcctcaacaatggtgcaacccccaactcaagacgatggacaagttcatcaagaagaggcgtgtgatcaagggggagcacaagatgatcatgttatggaggaagaagcacctcaagcccctccaacccaagtccgagcgacgattcaaaggaatcatctcgtcgaccagatattggggtagaagaggcctttctagatccggactaggtgttggccatgcaggaggagctcaacaattcaagagaaatgaagtttggacattggtgccacgtcccaagcaaaacgttgtgggaaccaagtgggtgttccgcaacaaacaggacgagcacggggtggtgacaaggaacaaggcacgacttgtggcaaaaggttatgcccaagtcgcaggtttggactttgaggatacttttgctcctgtagctaggctagagtcaattcgcatattgttagcctatgccgctcaccattctttcaggttgttccaaatggatgtgaaaagcgcctttctcaatgggtcaatcaaggaggaggtgtacgtagagcaaccccctggctttgaggatgaacggtaccccaaccacgtgtgtaagctctctaaggcgctctatggacttaagcaagccccaagagcatggtatgaatgccttagagactttttaattgctaatgctttcaaggttgggaaagccaatccaactcttttcactaagacatgtgatggtgacttatttatgtgccaaatttatgtcgatgacataatatttggttctactaaccaaaagtcttgtgaagagtttagcagggtgatgacgcagaaattcgagatgtcgatgatgggcgagttggactacttccttgggttccaagagaagcaactcaaggacggcaccttcatctctcaaacgaaatacacgcaagacttgatcaagcggtttgggatgaaggacgccaagcccgcaaagactccaatgggaactgatggacatgtcgacctcaacaaaggagactccgattatgctggatgcaaggttgataggaagagtacatcagggacgtgccaattcttaggaaggtccctggtgtcttggagttctaagaaacaaacttctgttgccctatccaccgctgaggccgagtatgttgccgcaggacagtgttgcgcgcaactactttggatgaggcaaaccctccgggactttggctacaatctgagcaaagtcccactcctatgtgataatgagagtgctatccgcatggcgaataatcctgttgaacacagccgcactaagcacatagacatccgacatcactttttgagagaccaccagtaa

SEQ ID NO: 101 - DNA, 309 bp, Zea mays
  Peptide Sequence Number=SeqID_41880
atggcgcgagacgggagcgaaacacagaggctggccatgtgggcccgaccggcagtgtcgcacaaggctactgacatcacggccctaggtgtcagcgcagtggggtgcaaaaggaaaaggaaaaacagtgaacaggactgggctcattccagcccgaaccggcccacgaccaggaccaggtccccgaccatgggcggcagagcgactacaccggtgaacttgtatcggccgttataccctataatccctgctcgaatgtgttctacacctaattacaccattggcgctacactggggatcaacaattaa

SEQ ID NO: 102 - DNA, 1134 bp, Zea mays
  Peptide Sequence Number=SeqID_41881
atggagtactgtcttgcattggattctcctgcatcaggagcttactttgcgcagcatggggaaaagaaacgcttgaatgaagatgtcatcgattttgatctattggaagacttgatatgctatattgatgagaactgtcctcagggtgctattcttgtttttcttcctggagttgcagagattgacttgttgattgatagattatctgctttagttagatttggaggggcatcatctgattggatccttcctttacattcactgcttggaccctctgatcaaaggaaagtgttccagtctccaccagataacttccgcaaggttattattgccacagacatagcagagaccagcattacaattgatgatgtagtatatgtagttgatactggaaagcacaaggagaaccgttataatccacacaaggttggagcttttgaaggacatgaagagttgtcacctcttgggtatcatctggcgaaactgcctgttgatgttttgattggaaagttccctcccctagccacaaacaccatgagctcgctgccggccatcctccggccatggacgacgctgcctctcccttcctcatcctttcccctccccatcttgtcttgtagcttggcggctatggttgcgcccgtcgtcgcgccccctgctaccccaaccgcgctccacaccgcggcacccatcggtgtggctccccacccggctggcgcccctccttacgcgtccgtcgctgcgtctccagtcacggctggtaacattcttcgcgtgggcgtggctcccctcatggccggtgcccctcactgcgtgcccgtgcccgccgctgcgtcttccactgcgcccgctccccttccttacgcgctcgccgacattgctcttctagccgccgccacaccagtttttgccctggttgctggcacccctcccgcggccggcgcacacacacccgcctcctctacggctgcaccgttgcaccttacaactgccctccctcctaggccgcacatggcccccgggttggctctgacgcgcccaccctcttctctacaggtgtcgggcttgtccatgttcctacaccgtctgtcgcagacgacatcatgtggacctctgcttcattcccctctgtaa

SEQ ID NO: 103 - DNA, 1662 bp, Zea mays
  Peptide Sequence Number=SeqID_41882
atggcgccgaagaagaagcagccggactcgaagcagaggcagaagcccaagtcctcgtcctcctcatccgcagccaccgccgcgccgcgcctccagatctcgtcggagaacgagcgccgcctccgccgcctcctccttaactcctccgcaccatccccgtcacctgccaacgtctcggaagtccgcggcgagtcgagggagcagaaggcgcggcggctgcgtggcgtgtacgacaagctcgctctcgagggcttctcttccgcgcaaatcgagcaggcgctctccgcgatacccgattcggcgacgtttgaatcggcgttggactggctatgttttaatctgcctggcgatgagctccccctcaagttctccagcgctggcgacagcaccatgtcgtctctcacaggagctgaaggttctgttaaagtactgtccacagccaaggacaattgggtgccacagagtcgtgaacctgaggaggtgaaggtgagcaccgaggggttggaagttagaattggtgggcggagagatgagaatgtgtcactggatgatgggcgattgtcacaagctgcatggattcgtcaatacatggaacaacaagaggagtttttagttacatggccctgtggccctgacaactttttggaagtttacatagttgagatagtttaccgcgaactatcttatgattccctcccgcacttaacagctgcaaaaaagaattccaagcatggaaacttgaaggaacagataagctatcctaccaattctgtatcttcaaattctgaaactgcaaatgttgagggtgttcagaatgatttagaggcaagtgaggaaagatctgagagtctaggcaatattgatgaaggatctgatttgaaaaaggaaattcctaaggatattgataaaacttgtgcaaaggaggtagacgaagaggtgatagagcttgataacatgttctttgaagactcatctgcttgggaagcagtggctccagaaatcttgaaacagcaacaaatagagaaattatcacatgatggttatggccatcttattggaaacatagatgatatatggaagaagggagattctggtaaaatgccgaaagctgttctacaaaagttttgtcaaaaacttggttgggaagcaccaaagtataataaaatatctgagagagatggcaaatttgtatattctgttaatgtgttgcggggagctactggccgtggtgaattgtcatctacatcaagggtgctggttacggaggataggcgaagatctggctttgtagatatgttattgaatatagatgcagatacaattccttcatctgaaatagaaaattctgatactgatgtcatatctatggattctgggaatactgaaggcagcaaatctgtgaatgagaagagacagactaccatgacgagttgtatgggattgaaatcagcagagcgtgcagagagtgcaattttgaaaaagcagttggaagataaaaggaagctaccaaattacttgaaaatgctggaagcaagagcttctctaccaatagctagacagaggcaacacttcctacagttgctgaaagagaacgatgtagttgttgttagtggagaaactggatgtgggaaaacaactcagattgacttcctttcaaactag

SEQ ID NO: 104 - DNA, 630 bp, Zea mays
  Peptide Sequence Number=SeqID_41883
atgcccctcacagctggctctactgacgacgccctcctacggtgtcccactgcctttggcagcccctctaccacacttgtcgctggctctgcctcccctctcgctaccgtggacccctgccttggccccttggtcccgttggctggaggttgggaccaggcttccctcgccacctcgttcaacaccatagcactgactctgctccccacctctccagattgggtggtcaactcaggcatctcctaccacaccacacctgctatcggcacattatctcactctcatcctcatccctccctttcatctatcattgtggggaacggttccacccttctggtgccgcagtcttggtatagtcgctttgcctcctactttatccctcagattcgtcaaggccaagtcatacatgtccctgttcatccatcagtcttgacaggagtggttgttatagatggatggttgaggctgtctgctgctgcacagactgctgttttattcaagcaacttcggatgactcttgatgctgttctaaaagaactgacaagaaaaccagagatggcaacttttgttgacaacgaagtggtcaggtccatcattcatttattgttagaagaagacaaggctcgataa

SEQ ID NO: 105 - DNA, 210 bp, Zea mays
  Peptide Sequence Number=SeqID_41884
atgacgctccacctcgacaagctgcatggtgagggtagcagcgaagcactcacactctcacgcggtagccatggcggccttggccgtctgaaaggtcacgacgagggtgaactgggtcgcagcgacatcagtggaaggggggcagtcggcagagggaatcccgaggtgtgggaggggttccgagaattggagcagcagttctcaggctaa

SEQ ID NO: 106 - DNA, 270 bp, Zea mays
  Peptide Sequence Number=SeqID_41885
atggctggggtgcgatggagccttgggtcgacggtgacggggctccagctgcgcaagaaacgctccgagcgagagagagggcgagagggtttggctgagggcgcaagtgagcgggggaaggcgggtgagcagaacgcgaggctcaaaaggggtggggacgtgcggaggtggccggagatcgcgtggtcgtgggcgtccacggtgggggatcgtgggcgggaggttggggacgagctgacaggtggggtcgtgggcgcctctaagatctag

SEQ ID NO: 107 - DNA, 2136 bp, Zea mays
  Peptide Sequence Number=SeqID_41886
atgcccggcataccaagggatgtcgccgagcactcgctggatatccgggccggagcccgacccgtcaagcagcctctgcgccgattcgacgaggagaagcgcagagtgataggcgaggagatccacaagctaacggcagccgggttcatcaaagaggtattccatcccgaatggcttgccaaccctgttcttgtgagaaagaaaggggggaaatggcggatgtgtgtagactacactggtctcaacaaagcatgtccgaaggttccctaccctctgcctcgcatcgatcaaatcgtggattccactgctgggtgcgaaaccctgtctttcctcgacgcctactcagggtatcaccaaatcaggatgaaagagtccgaccagctcgcgacttctttcatcacgcccttcggcatgtactgctatgtcaccatgccgttcggtttgaggaatgcgggcgcgacgtatcagcggtgcatgaaccatgtgttcggcgaacacatcggtcgcacggtcgaggcctacgtcgatgacatcgtagtcaagacaaggaaagcttctgacctcctctccgaccttgaagtgaaattccgatgtcccaaagcgaaaggcgtcaagctcaatcccgagaagtgtgtcttcggggcgccctggggcatgctcttggggttcatcgtctccgagcgaggcatcgaagccaacccggagaagatcgcagccatcaccagcatggggcccatcaaggacttaaaaggcgtacagagggtcatgggatgtctcgcggccctgagccgcttcatctcacgcctcggcgaaagagacctgcctctgtaccgcctcttaaggaaggccgagtgcttcgcttggacccctgaggccgaggaagctctcgggaacctgaaggcgctcctcacaaaggcgcctatcttggtgcctccagctgacggagaagccctcttggtctacgtcgccgcgaccactcaggtggttagcgccgcgattgtggtcgagaggcaagaagaggggcatgcattgcctgttcagaggccggtttacttcgtcagcgaggtactgtccgagaccaagatccgctacccacaagtccagaagctgctgtatgcagtgatcctgacgaggcggaagttgcgacactacttcgagtctcatccggtaactgtggtgtcatccttccccctaggggagatcatccagtgccgagaggcctcgggcaggattgcaaagtgggcggtggaaatcatgggcgagacaatctcgttcgccccttggaaggccatcaagtcccaggtattggcggacttcgtagccgaatgggtcgacacccagctaccgacggctccgatccaaccggagctctggaccatgtttttcgacgggtcgctgatgaagacgggagccggcgcgggcctactcttcatctcgcccctcgggaaacacctacgctatgtgctacgcctccatttcccggcgtccaacaatgtggctgagtacgaggctctggtcaacgggttgcggatcgccatcgagctaggggtcaggcgcctcgacgcccgcggtgactcgcagctcgtcatcgaccaagtcatgaagaactcccactgccacgacccgaagatggaggcctattgcgatgaggttcggcgcctggaagacaagttctacgggctcgagcttaaccacatcgctcggcgctacaacgagactgcgaacgagctggcaaaaatagcctcggggcgaacaacggttcccccggacgtcttctcccgggatctgcatcaaccctccgtcaagatcgacgacgcgcccgagcctgaggcgacctcggtccagcccgaggtaccctcggcacagcccgaggcaccctcagctcggcccgaggggccctcggttcagcccgaggaaccctcagcctccgagggcgaggcactgcgcatcgaggaggagcggagcggggccacgcctgatcggaattggcagaccccgtacctacaatatctccgccaaggagagctacccctcgaccgagccgaggctcggcgggtagcgcgacgcgccaagtcgttcgtcttgctgggcgatgagaaggagctctaccaccgcagcccctcgggcatcctctag

SEQ ID NO: 108 - DNA, 897 bp, Zea mays
  Peptide Sequence Number=SeqID_41887
atgccaggagaggatgaggagtcggcgcgagcgaatagcggagtggagtggagtcgactcgggatcgtccaagcgagcgaggggacgcgcacgaaggcaagaagcgaggacagtggtgtgactgcactgatgaggttgagcaggtgtgattcccatcctataaatgtggcggaccaggaacatacgttatacgccggtgggctctccctagcgcgtcatcccagactattccattgctctctcccttcccgtgcaagcgacgttggcggcatcggcgagcggatcgcgtcgcccttggtccgggccgacaagaagctaggatccattccagcttcggcggctggcgggtgggtccggaggtggatcgctcgaggaacggggacagaggggaagaatccgtcgatggaagaaatcatcgtccgagaaggagggagtcatgcaggccatcgtggaagaatcgccatcggcaagcatctccatctacccggaccatcgaagaagaggactgggtgtaggtatctaaatcaatttatgttaattgtagcaatggctatggagaagaaattgcttcgaaaagccctggcttccttgcttcagacagttgaggagcattgtgcagccattgtagatgttgtgaaggcttcctttcacctagggagcatccccgagtttaatgactttaacaaggcttcagtagacatcgagtacctagccaacaacttggatcagatgtccattgaatgcaaatatgaagtcaccaagttggaggaacctaacgatgatgagctggtggatccaaataattgtcttccaatggatcatgaagagtcagacaagttggcagaatacaggaattgcaccttcttcatggaagacaacagtgactcttctgactga

SEQ ID NO: 109 - DNA, 1125 bp, Zea mays
  Peptide Sequence Number=SeqID_41888
atgggctaccaggatgcgccgggcggcggcgggaagctatcgctcgccagcgtgggcttcgccggcccgggcgcgggggcaggagggggcggctacaaggagctgctcgtcatggcgctgcctcaggacgacggcctcgacggcgccaaggtcgcggaggccatcggcgtcaggctaccggacgtcggaggggccgtgaggactgttttggagagcagagaggccagagaatttgctagtggagcactagctggtgctatgtcaaaggctattcttgctcctctagagactatcaggacaaggatggttgtaggagtagggtctaggcatatttttggtagtttggtggagatcattgaacaaaatgggtggcaagggctttgggcaggaaatacaatcaacatgctccgcattattccaacacaagcagttgaactcggaacatttgaatgtgccaagaggagcatgatagaagctcaagagaaatggaaagaagatggatacccaaagatacaacttggtaatatgaaaattgagcttccacttcacttcttatctccggttgctatcgctggtgctgctgctggaatagctggcacattggcatgccatcctctcgaagttatcaaggatcgcttgactatcaatcgagaggtttatccaagcattagccttgccttcagcaagatctatcagactgatggtttaggtggtctctatgctggcctctgtccaacactaattggcatgcttccttacagcacatgctactattttatgtatgattcggtcaagacctcttactgccgcttccataaaaagtcatctttgagtcgccctgagcttctacttattggggctctttcaggtctcactgcaagcacgatcagtttcccgctggaagtagcaaggaagcgactgatggtcggcgctctgcaggggaagtgcccgccgaacatgattgctgctttgtcagaggtgatccgggaggagggtttcctggggctttaccgtgggtggggggcgagctgcctgaaggtcatgccaaattccggcatgacctgggtgttctacgaggcatggaaggatattcttctgtctgacagggacaggcagcacgcttag

SEQ ID NO: 110 - DNA, 930 bp, Zea mays
  Peptide Sequence Number=SeqID_41889
atgaatagtacagattgcttttccaggtgtgtggagagacatgtgtattcctcctatgacgaattcctcaggctccatgaagatgagttccacgcatcaagaagtcaagattccaggaggcctaaaatagtgtatcaatttgtcttagtatttttattcgtggggatgcctgactcaaatgaactcatgttcaacactgagcaacctacttataattttggagcctataaaaattctaagctaagaaagaggagcaagaggaagaggatagaggaggcgccacctaaggagtcggcccgggagaagaagcgctctgagaaggagaggagggcgcagcttgattcaatccatgtcaagtcagaggctgctgcgaggtcctgcttagctttcaggtggatttatcttgcaaatggtatgtggatccgttccagaggcaatgagccttgcagccaggtgaattgcaaagaaatggtctgttcgcaactggtgctctcaggcgactccatcaccgagcagcccttcgccccggtggctgcggtgtcgcactggctgacacctgcttgcagtcgcattacaagttttactgactatgtattttcagtgtacctacactcagttggaaaacttcaaccacactgcaacaaggtttataaaaggtttgctatgaggaaaaacaaatttatgggctcaaacaaagttactatagctgtctgcatcgagactgttttgtgtcttgaactaagaaaaactctccatggtttgcagaaccaagacaagaaaacagatatcaactgtgacgccacactcagaagcttgtttggtgggagggacaaggttgggatgctggagatctccaagcttttgagtcgtgacttcccgaaaatctccaagcttttgtggtccatggagccagggatggctctttggtaa

SEQ ID NO: 111 - DNA, 189 bp, Zea mays
  Peptide Sequence Number=SeqID_41890
atggggcccgccagccaggcggctccttacccaaacgcctcgacgagaaaaagggggcaacatgcccccatgaaccgcctcgcgcccaacctccctctagcgccccactccctcacgcccttgccgtcgtctggggtcgtgctcgcccagaactcccatcggcaccgtcgttcgtcgtcgagtccatag

SEQ ID NO: 112 - DNA, 513 bp, Zea mays
  Peptide Sequence Number=SeqID_41891
atggctgaggcaagcaacagagaaaagcagcaacagctggagcctggagcagaggacgacggctgtgaggggcctcggcaacctggagaagcaaaggacgccagcgagctcggctgggactcgctgagggagaaccggccaggcgcggtcgagcagggaactgcgcgcgactatggcgaggagcaggagatgggacggcgcgctgactgggcgagctcagtagaggagcacggcgcgcgcagaaactccagggagatgggcgaccgacgcagcgacgctggggcagggagaatcgcgtggatgggcggaactccagctgggcgcgcagggaatgacgccgagcagggagctccgcggcgcgcagggagcctggccagcgcctgggagcataacacgatggagagagagaaaagatcaggcgtcagttacgtgaaggagaaggccaaagaaaaatttcagcggcgcagaggatatttccaatggagcatacgtagtaggcagtgggatatctga

SEQ ID NO: 113 - DNA, 189 bp, Zea mays
  Peptide Sequence Number=SeqID_41892
atggattactatagagttattagcaaatgtatgtccttcataaccttcgtccaagactcattatatcccgagggaggttcaagcaatagccaaagagccaagaagtcatcaacatatatatggagttccaagattaggaattcacaatgccacacatcaaagggctcgactggtgatttgaatctttga

SEQ ID NO: 114 - DNA, 345 bp, Zea mays
  Peptide Sequence Number=SeqID_41893
atgggaagagagctcttcgggaaggggaatgaggagatgatgacgaaccctagcaaggaaaacaaatggggggagaaggggaagagccgcctccgctcacttgtaccgtttgggcgctggtaccgggatccggagtccgaagcggtggcggctgtcaccggagtcacgggtgggctgggaagggtgggggtgggagggggttggggagggggaggcagcgcgctgacctgcacctttggagccctggtggagggatccgtagtccaaagcggttgtcgccagagccgcgggcgagtgggggagggtggggtttcgggggagtgttataactgtaatagggtttag

SEQ ID NO: 115 - DNA, 237 bp, Zea mays
  Peptide Sequence Number=SeqID_41894
atgtcctcctcgcatgagcccgtctcgggcgagaaggacaagacatgtggacatgtaaaagacaagggcgcagaccagccctcgggtgcaaactctgtctcgcccgactcagagctcgcccttgagacaaactccgcctcgcttgagcctggcctcggctacctgctcccccgtaaattccgcggaaggcactccttcaattgtggcggatgtcatcgaatctcaagatggatttag

SEQ ID NO: 116 - DNA, 426 bp, Zea mays
  Peptide Sequence Number=SeqID_41895
atgactaggcggctggattggaggctgcaaaaagctgcctatccatcccaggcgtccgatttgcctgaaagagcaaatctagagagtagagaatctcatgatgttcaggaaggagtaggcgacgggccgttgagctgccccgagtacaggaggcgctacccccacggtggcccaaacgggaatatcagagaagaggagaaggggtggggagcaagcgacattaccgcagcagatctcggggaggaggaggcgacggcgcggcgctcggggaggaggaggcgacggtgcggcgctcggggaggagacgaatcaggaggcgctcccaggcaatgtcgccttaaggtcgagaagctctgtggacgcctccggtccatcgaccaccgcccatgcccgctcctcgacgccattgacttcttcaatggctaa

SEQ ID NO: 117 - DNA, 171 bp, Zea mays
  Peptide Sequence Number=SeqID_41896
atgggcgccaccatgggctggcatgtcaccgtggccgtctgccgtaagttaacctcatccagtagtcggagcagtggaattcgggtggccggcgaagggctccgccgtgcggaggtgtccctgcgcggctccgactgggaggttgatgacgctggggcgtccgtagattag

SEQ ID NO: 118 - DNA, 852 bp, Zea mays
  Peptide Sequence Number=SeqID_41897
atgtcgaccaactcgaggtccaactccagggccaacttcaacaacgagatccatgacatcggcacggcgcagaactccagcatgccccccacgtactacgaccggtcgctggcggacatcttccctccgcacctcctcaagaagctggggcagtcggtcgccggcgggctcatcgtcaccgtcatgatctacgccgtcggacacatctcgggcgcgcacatgaaccccgccgtcacgctcgcgttcgccgtgttccgccatttcccctggatccaggtcccgttctactgggcggcgcagttcaccggcagcatctgcgcgtcgttcgtgctcaaggccgtgctgcaccccatcgccgtgctgggcaccaccacgccgacggggccgcactggcactcgctcgtcatcgagatcatcgtcaccttcaacatgatgttcgtcaccctcgccgtcgccacggacacgagagcggtgggtgagttggcggggttggcagttggttccgcggtttgcattacgtccatcttcgcaggggcagtgtcgggcggatcgatgaacccggcgaggacgctggggccggcgctggcgagcaacctctacaccggcctctggatctacttcctgggccccgtcctcggcacgctctccggggcctggacctacacctacatccgcttcgaggaggcgcccagccacaaggacatgtcgcagaagctctcctccttcaagctccgccgcctgcagagccagtccgtcgcggtcgacgacgacgagctcgaccacatccaagtccagtcgtactcgtacctctcctgctatcacttgttccaaaagctcttggtgcttacataa

SEQ ID NO: 119 - DNA, 1692 bp, Zea mays
  Peptide Sequence Number=SeqID_41898
atgacggccaacaaccatgagggggtgtggctcggtgaggagccgatgatggatgcaagaatcacaacgacacaagggtttcgtggagaggacgacagtcaacagacaacaggcctatggaaacaagagacaaaattaaaatggagtggggagaaaagagagcacacatgctccggtttccaaggagggagggaatgcgaggtgccgcgcatgccgacgcacgagaagaggagaaggaaacttgaagcggaagggaagaagaagaagaaaaaagtcttcaggagacaatttttttgtggctacttgttcactagacaatacttgaatcaaaaccatgtaaaggttgtcaagccaaataatccttgtttgaagcataagtactggctgtctgtagtcaagaaggtgagaaaaaagggtaccaatgaagagggaagtctgtccaaaaaggattttgggatcatgggagaatcaaagatcacaagattgttaatcccaagcgtgctgcagatacataccgcattgagattcgcacaatgggaccctacaagtgatgacatagagaagcaagatgaagttatgttacctggattcaggtttcatccaacagatgaagagcttgtcaggttttaccttaaaagaaaaatccagcagaagtctctccccattgagctcatcaggcagctagacatctacaaatatgatccatgggatctcccaaaactggcgagtactggagagaaggaatggtatttctactgtccaagggataggaagtatcggaacagcacaagaccaaacagggtaactggagcaggcttctggaaggctactggaactgacaggccaatctactcttctgatgggagcaagtgcataggcttgaagaaatctcttgtcttctacaaaggtagagcagccaaaggtgtcaaaaccgactggatgatgcatgaattcaggttgccatcactcactgacccaacactgctgcagaagaagccactggagaagaccattccaccaaatgattcctgggcgatctgcaggattttcaagaaaaccaattcaacagcacagagagctctctcacattcctgggtatctcctcctctatccagcacaaatgaaaactacattcgcctatcctcacaggctacacagagaagttatcacagctcagagaacacatcctctacgatgacagacatcatctcctccatccagttcactggtagtagttacatgccttcaatagtttcctcttgccgcaaccctctgagcatcattgacagcagcagcaggccggctgcgtccctaatgctcccctcatctggagcagaacatcacgccatgagtatcctctcagcaatcccacatgatcttccagctgggatggacattgcatcaatggtcctcaatgcatcacccactacactccagaacctagataggatccccacaaacattgagtttggtcaaccacaccaccccagcaacagcagcatggccaacagatgcacggctgatttgcttgacattggcaacagtgtcaccggtgctccccggtcaatcaacttcccgttcaacctgcaaggggcactgccagatgactggaggatgaccttgccttgggactctctcccttgcacaaccgaggtctcaacaaattacaagtcgaccaagtactatacttag

SEQ ID NO: 120 - DNA, 231 bp, Zea mays
  Peptide Sequence Number=SeqID_41899
atggacgataccaccgccgtcaaccgcgagttatggcaacaccctgtcctcagaagaccgcccaagagagtcacccatggattgcgtgatctgggcctaataattgaagaagttcttcatgagatacaagaacccatctcagagacagctcaaaatgagctctttatgaaattcaaagaacatattatgggtaaaattgatttaactgaagatcgtgttagctttagatag

SEQ ID NO: 121 - DNA, 393 bp, Zea mays
  Peptide Sequence Number=SeqID_41900
atgcccgtggtggactcctccctcgtcgagatccggatgaaggaggtccggccgccggggatcagccttgacgagtggttcgagttcacgcacatgaggaacgcatcgtcaatgccagtagcagcggctgcggtgcgcgtcatgacgaatgcgatgttgccgatgatcacgagaatccatgcgatggagacggtggtttatttcagcaaggaagagttcgtcgcgttcatggagagaatagctggaacattgcagttggccaagctccacaacaaaaggccatccatgctgtccaacgatgacctgatgaggttgctcagcttgttcatcaagcggcgggagacagacgaggctggctggccgatctatttatccggcttaccagccggctaa

SEQ ID NO: 122 - DNA, 600 bp, Zea mays
  Peptide Sequence Number=SeqID_41901
atgacacgattgggaattaaagccgagcgagccgagagggcgcgctggcgaacaggaaacaggacacgcggcttaatatttcctggagcagaggcaagggtgctgggagtttacagcggtgctccacgacggccatcaccggcgtcgagcaaggggcgatttagcgaggtcgacggcaaacaacgcgacgacgagctagaataccagggtgacccgagcgccgtagccaagcagtgggatgcagctgcgcgcagaggagtaacagaagtaacagaggccgagcagagaaacacaggggacacgcgcgggatgaaagaatcgagcccgcggcgcgcagagacttcacggcgctcggcgcggcgaggacgcacgcgcacgagaagatggagcagggagcgctgggcacagggagcttctttcactagagccgagcggcagcgggagttccggccgtgggagttgagggagatgaagctggacgtcgctgaaaaagaggtagcgccggctgaagacaagggcgcggcgcagaggagcaggggagcagagctccggtcgagcgctccatggagagaagcgcgcgcagaggtgagcagatgctag

SEQ ID NO: 123 - DNA, 600 bp, Zea mays
  Peptide Sequence Number=SeqID_41902
atgacacgattgggaattaaagccgagcgagccgagagggcgcgctggcgaacaggaaacaggacacgcggcttaatatttcctggagcagaggcaagggtgctgggagtttacagcggtgctccacgacggccatcaccggcgtcgagcaaggggcgatttagcgaggtcgacggcaaacaacgcgacgacgagctagaataccagggtgacccgagcgccgtagccaagcagtgggatgcagctgcgcgcagaggagtaacagaagtaacagaggccgagcagagaaacacaggggacacgcgcgggatgaaagaatcgagcccgcggcgcgcagagacttcacggcgctcggcgcggcgaggacgcacgcgcacgagaaggtggagcagggagcgctgggcacagggagcttctttcactagagccgagcggcagcgggagttccggccatgggagttgagggagatgaagctggacgtcgctgaaaaagaggtagcgccggctgaagacaagggcgcggcgcagaggagcaggggagcagagctccggtcgagcgctccatggagagaagcgcgcgcagaggtgagcagatgctag

SEQ ID NO: 124 - DNA, 1548 bp, Zea mays
  Peptide Sequence Number=SeqID_41903
atggcttccgctaccacctccatctcgtcgcaccccgccgccctccgcgacgtcaaaggtgacatgttttctttgttctggatgctctttcctttgtataatttttgctcggatccgacgtttcagctagtgaaatgcgctgctccgcaacaaaattcaccggaattcgaagcgcataccggcctaactcttctcatctctctcccttctgttcgcgcagctgcgaggattggcgggctgaggcagcagcaggcgagcgtggccccgtcggcggcggcagcgcgtggccagcgcgctcgggcggtgcgatcgctgcgcgcggcggagcctgcgaggcagccggtggcggcttccgcggccgcggcggcgccggccgcgcccgtggccgacgaggcggcggcccttgcggccgtggactacgaggccctggcgcgtgagctggagggcgcgtcgccgctggagatcatggatcgggcgctggccatgttcggctccgaaatcgccatcgccttcagcggcgcggaggacgtggcgctgatcgagtacgccaagctgacggggcgtccgttccgggtgttcagcctggacacggggcgtctgaacccggagacgtaccagctattcgacaaggtggagaagcactacggcatccgcatcgagtacatgttcccggacgcgagcgaggtgcaggagctggtgcgcaccaagggcctcttctccttctacgaggacggccaccaggagtgctgccgggtgcgcaaggtgcggcccctgcgcagggcgctcaaggggctcagggcgtggatcaccggccagaggaaggaccagtcccccggcaccagggccagcatcccccttgtccaggttgatccttccttcgaaggcctggatggcggggctggtagcttggtcaagtggaaccccgtggccaacgtcgacggcaaggacatctggactttcctgcggaccatggacgtacctgtcaacaccctgcatgctcagggctacgtgtccatcgggtgcgagccgtgcaccaggcccgtcctgccggggcagcacgagcgtgaaggccggtggtggtgggaggacgccaaggccaaggagtgcggcctccacaagggcaacatcgacaaggacgcccaggcggcggcccccaggtccgccaacggcaacggctcggcgggcgccccggacatcttcgagagccccgccgtggtgtccctcacccgcaccgggatcgagaacctgctgcgcctggagaaccgcgccgagccgtggctcgtggtgctgtacgcgccctggtgcccgttctgccaggccatggaggcctcctacgtggagctggccgagaagctggcggggtccggggtgaaggtggccaagttccgcgcggacggcgagcagaagccgttcgcgcaggccgagctgcagctgcagagctttcccaccgtgctcctgttcccgggccgcaccgccaggcccatcaagtacccgtcggagaagagggacgtcgactcgctcctcgccttcgtcaacagcctccggtga

SEQ ID NO: 125 - DNA, 1341 bp, Zea mays
  Peptide Sequence Number=SeqID_41904
atgcccggcataccgagggatgtcgccgagcactcgctggatatccgagctggagcccgacccgtgaagcagcctctccgtcgattcaacgaagaaaagcacagagccataggcgaggagatccacaagctaatggcggtagggttcatcaaagaggtattccatctcgaatggcttgccaaccctgtgcttgtgagaaagaaaggagggaaatggcggatgtgtgtagactacactggtctaaacaaagcatgtccgaaagttccctaccctctgcctcgcattgatcaaatcgtggattccactgccgggtgcgaaaccctgtctttcctcgatgcctactcagggtatcaccagatcaggatgaaagagtctgaccagctcgcgacttctttcatcacacccttcggcatgtactgctatgtcaccatgccgtttggtttgaggaatgcaggtgcaacgtaccaacagtgcatgaaccacgtgttcggcgaacacattggccgaacggtcgaggcctacgtcgatgacatcgtagtcaagacgaggaaagcctccgacctcctttccaaccttgaagcaacattccgatgtctcaaggcaaaaggcgtgaagctcaatcccgagaagtgtgtcttcgaggttccccgaggcatgctcctggggttcatcatctccgagcggggcatcgaggccaacccggagaagatcgcggccatcaccagcatgaggcccatcaaggacttgaaaggcgtacagagagtcacgggatgccttgcggctctgagccgtttcatctcgcgcctcggcgaaagaggcctgcctctgtaccgcctcttaaggaagatcgagtgcttcgcttggacccctgaggccgaggaagccctcgggaacctgaaggcgctcctcacgaacgcgcccatcttggtgccccccgctgccggagaagccctcttgatctacgtcgccgcgaccactcaggtggttagcgccgcgatcgtagttgagagacgagaagaggggcatgcattgcccgtccagaggccagtctacttcatcagcgaggtactgtccgagaccaagatccgctacccacaaattcagaagctgctgtacgcggtgatcctgacacggcggaagttgcgacactactttgagtctcacccggtaacaatggtgtcatccttccccctgggggggatcatccagtgccgagaggcctcaggtagaatttcaaagtgggcggtggaaatcatgggcgaaacaatctcgttcgccccttggaaggccatcaagtcccaggtcttggcggactttgtggccgaatgggtcgacacctag

SEQ ID NO: 126 - DNA, 297 bp, Zea mays
  Peptide Sequence Number=SeqID_41905
atggaacttggtgaggacacagtgggcaccgaaagtaagagcatcggcaaggagtctacatctgaggtaccacttcccgtcaatgaacttgccactgaggagcgatcgggactcactggaaaggccaccccagcggagtcgctgaccaaagacccgttgacctcgcagtacctgcacagcaagatgcggcacacggttaagaaagcaacgagcacgtcggcgagcgccaacgggatgctgcggccgcagtgggccgatagcaacgccgccgttcgcctcattgccctcgtcgtgtag

SEQ ID NO: 127 - DNA, 576 bp, Zea mays
  Peptide Sequence Number=SeqID_41906
atggagaacaacagcaacctccgagacttcttatcccaagctgccagatcttcctcctcggctaggatctcccatggtcgcgaagctcccgaagaagatctaggcgtcttctaccagacgcagttatcttggccaccgtctatcagtgccccagccactcgtctacacattgaagatctggatctcaattcccttggtaatgacttcccaaatttatcctcctaccaagaagtactccagtctgatggtgctacaccctacctagggttgcctcccttaggtcgtggaattagaacagggcgcacaccctgtcaatttcctcgatctagtgcgggagccatgagatccagaggtggctcacaagtttttcgtggtcgaggtggatctagaggatgtcgtggaggtcgaggaagggccacagttactcgtggtggacgctctggtgtcaacccaaccactgaccatgcccttgttcaagatctggaatatgaagaagaaaatgaattggacgctcgatctccagtgataaggaaatgcatattaatttttgtgtttactaactgccactatgtttaa

SEQ ID NO: 128 - DNA, 588 bp, Zea mays
  Peptide Sequence Number=SeqID_41907
atgaacgagccaccagccaggcatccaccaggtgaggggaagccagggggacgtgaagtggagccgtggaggaccctatcggaggctggagcctggagcgatatgatgctggccgtgacagtgagccaggtcgtggcgctgctctcatcggctctctccggcaccgagggtggcagcggtgtggcggttgcggtcggtacggcaaaggcggtgggagccgagcagggcgagcgctggcggcggcgctgcggcgggcacgacgaccacccggcgtcggcggcggggtactgctgcgtgtgcatatcggcgtgccgcgacggggacgacgtccggagcctgccctgcggacacgccttccaccgggactgcgtcgaccgctggctggcgctttgccggcggacgtgcccgctctgccgtctccacgtcggcggacctgccgtcggtttggccgagcagcagcagcagctcagcgaggacctcgtcatctggttctcttcgctctttgtcgctggcttggagggcgaaggtcgacagcggcgcctggatctcgctctcgggagggaccccgtcgaggaggagatatcctag

SEQ ID NO: 129 - DNA, 424 bp, Zea mays
  Peptide Sequence Number=SeqID_41908
tctggaaaactcctcacttggggttctgctgatgacatgggccaaagttatgtgactgctgggaagcacgaggagactccagaggcttttccacttcctagaggcgtcgcaatagtgcgggcagatgctggatgggctcactgtgttgcaataacagatgaaggtgatgtttatacatggggttggaaagagtgtgttccaactggaagggttattggagaccaatcttcagttggaaccaaggagaaggatgaaagacaaatggcaatggccactgaccaaggtggtcgcaggtgtctaggacaagcagcggggcagcatctggtccttctgaaagcagaggcactgatgatagcacaaagcgacgaaggagtgaaaatagtgtctgtagctgctggtggtcgtcatacattagcactgtcag

SEQ ID NO: 130 - DNA, 306 bp, Zea mays
  Peptide Sequence Number=SeqID_41909
atggaggaggacggcgtccccggctgcgcgaaaggggcgggcgcggggaataaggagcgggtggtgctgatgtgggggtacctgcccggcgtgtcgccgcagcgctcgccgctgctcggaccggtccccgtgaggctgcccccggcagcggcggccgccgccggtgatgggtggagagacgtgtgcggcggagggtgcggcttcgctatggccatctctggtgacgtatccttttttttcttcctcattgttcccgtgcttattcgctgctttcagctcgttggttcttcgcttgggatgtggtag

SEQ ID NO: 131 - DNA, 1132 bp, Zea mays
  Peptide Sequence Number=SeqID_41910
atgaaggccctgggcgcgcacgtcgtagacctgctccgcggcccgcacctcctccgcgccgccgtcctagctttcgccgttgcggtcgccttcctcgtcggctaccactggcccaacgcctacccgcgccttgtcttcttctcgtccgcctcctcctcgttggcgtccaggtcctcccgctctcctgccgtcgcgctctcccccaactccaacatctccttcgaaccgtctctgatccctacccccaccaccccgcctgcttctcctgctcccaatgcctgccccccgccctcgctaccaccaccgactccggcgccgccgcctcccctcctgccccctccaccaccagcgcgcctcggcatcgtcggcgaggacggcgctatgcaggacgacttcgacatcgggagcgtcggcgccaacgacaccgatctggccagcgacgagaccgcgccgcaggagcctagcaacggaggcgccagcggcggaccacccagggttcggattgggaggttcctggtctgtcccgagagcatgagggagtacataccctgcctcgacaacgaggaggagatcaagcggttgccctcgacggagcgcggggagcggtttgagcggcactgccctgcccaggacaagggtctcagctgcctcgtgccggtgcccaagggctacaaggctcccataccctggcctcagagcagagacgaggtctggtttagcaatgtgcctcacacaagattggttgatgacaaaggaggacagaattggatcaccaaggtcaaagataaattcagatttcctggaggcggaactcaattcattcatggagcaaatcgatacctagaccagatttcccagatggtaccaaatgttgcatttggatctcatactagagttgtcctggatgttggttgtggagtagcaagttttggtgcctatttactttcacgtgatgtcctgacattgtcaatagctccaaaagatgttcatgaaaatcagatacagtttgctcttgagcgtgatggtatcctgctcctggaggttaatagattacttagagctggaggctactttgcttgggcagcacaacctgtttataagcatgaacaggcccaacaagaggcatggaaag

SEQ ID NO: 132 - DNA, 360 bp, Zea mays
  Peptide Sequence Number=SeqID_41911
atggcgagggagctcgtgctatggatggagtgtcgccgagctgaggatggtggtcgggccgggacgttggcgagctcaaccccggctagatggaggagcatggtgcaagctaagcgccgagaggaaggagcagggaattggctaggagttggagaatggcgtggggaggctgcaggggagctcgagaactttaaagggcgcggcctgccacggctattggctcacatgggcggtgtggcgcattggcctagaggcgtggtggtcgtggagtggctggccatggccggtggccaatgccacacgactggccgcctgctattcacgcttcctcactacaccaaactgtcgaacacgtggtga

SEQ ID NO: 133 - DNA, 354 bp, Zea mays
  Peptide Sequence Number=SeqID_41912
atgatcaaggaaggtaatcaaattcaaggaagatttctaaagcttgctagaattagaaaaagaaaaacaatgaacagacttgggccgaaaccagcccaggtgaagtcaagctccaagggctgggcagttttagtaacagtaacaccaggggtgttgcattcttttattaacttatactgcaatgatgaagtatttgagaacaagtccccaacattggcgtccacctctggtgaaccctttttcgaccaccttcggcaaggactgaacttcgtcatgccaccgaagaaagcttcagcgccagggtctgctgcactgcagccactggacccgaaccaggagactctttctctttga

SEQ ID NO: 134 - DNA, 381 bp, Zea mays
  Peptide Sequence Number=SeqID_41913
atgggaggggctatccatggcaacaagagagggggctggcgtccacaccatgggaaggagcagggagggcgctggacagagggcaggggcgagctccagggagtggcgtcggccaccaggaaacagaagcaggggtgcgcgctgggatggatgctgagcagatcttggaagccatggaaggagaggccgtcggccatggggagagatgagggagggacggccatgggggaggagcagaagatgaccggcaagctggagcacctcgtgcgcagagacagggaaaaggggcagcgcgccaggctgaggaatcgagggcgccgacatgccgcagtagggggagggcgcgacgtgaggagctcgccatgggtcggcagtggctga

SEQ ID NO: 135 - DNA, 468 bp, Zea mays
  Peptide Sequence Number=SeqID_41914
atgggcaagagcaagaaaggtggtagttcttcgcatcactccggcgataagcggaagcgtgagccgactcctccctcggaggacttcggcaactcagagtactcagaggaggagttctcctccgagtcaaagggctcaccggtccatgcctctcccccagcgtcgtctaatgactcagacgactcccaggggctcgccgcagaggtgtggacctacattcgggccgtcgagcgcgccgggctcgagggctcggatgagtcggagtactcctcggacgaggagaactcctcggactcgtccgaggagggcggcggcgacggcgacggcgatggcggtgacgacgacgacgacggaggcgatggtgacggcggcggtgacggcgccgaaagcgacggcaagggcggcgaaggcgacgacgagggcgacagcaagggcagcggcaagggcagcaacaaggccagtggctag

SEQ ID NO: 136 - DNA, 255 bp, Zea mays
  Peptide Sequence Number=SeqID_41915
atggctgatgaagcgataagaaaaaatgaaaaagaatctcacgacgctcaagaagaagccaagcgagctgaagaagctgctgagcgcgcaaggcttatagctgaactttcacttccaccggagccatataaccttgaagctgacccggccatgaaggaagcgttagatatgataagaatcactaatgaagctattgacgaagccgtcaatagactgctaaatgaagctgatgaaaaagtgctgaaggaagactaa

SEQ ID NO: 137 - DNA, 840 bp, Zea mays
  Peptide Sequence Number=SeqID_41916
atgtacaaccggctcaaaaccttggtgaaccaagtgcgcaacctcgggagcaccaaatgggatgaccatgaaatggtcaaggttatgcttagatcactcgtttttcttaaccccactcaagttcaattaattcgtggtgatccaagatacaaactaatgtctcccgaggaagtgataggaaagtttgtgagcttcgagctaatgatcaaaggctccaaacaaattatcgagcgaggcgccacctcaacacccaaggtacaacccgtcgcattcaaagcgacggaagagaagaaagaagagtctacatcaagtaggctccccatcgacgcctccaagctcgacaatgaggagatggctttaatcatcaaaagcttttgccaaatcctcaagcaaaggaaggggaagactacaaaccccgttccaagaagtgacaggggcaacgacaagagagataagaagaaggagaagaagaggtactacaagaagaagggcggcgatgcccatgtttgccgggagtgggactccgacgagagctccactgactcctcctccgatgaggacgccgccaacatcgccgtcaacaagggtctcctcttccccaacgtcggccacaagtgtctcatggcaaaggacggcaagaagaagaaggtaaaatctagatcctccactaagtatgcaacttctagtgatgaggaaaattctagtgatgatgaggagaacttgttcaccctttttgccaacttaaacatgcaacaaaaggaaaaactaaatgaattgattagtgccatttatgagaaggatgaactcttggatagccaagaggacttccttattaaataa

SEQ ID NO: 138 - DNA, 444 bp, Zea mays
  Peptide Sequence Number=SeqID_41917
atgcggatcaagaggggatctcggtcgagaccacataccggcgtttggaacagtgacgacgcgcagtccacggtgaggttgaatttgcggtacaacaagcgccccgtcgagaaattccggcgactccggagcaaaattccccaacccgagaggatcattccggcgcgtggtggtgtaagcgggacacggcggcgcgaaagggtgtccagcggtgctaggggcacagccgtgtgtcaacggtggggcgagtgggtagaggaaagagagggtcgcgcacagggctcctttataacagccaaggcgatgtggaggaggtcgtcagggatcgcattgtccgcgcagctcggcgtcagttgcgcacggaccgaatccagcgctgaggtgggagaagaagctgccgacaagtggggcccgtggatcggcgaccgagtcacgggggagtag

SEQ ID NO: 139 - DNA, 1842 bp, Zea mays
  Peptide Sequence Number=SeqID_41918
atgagccacgacaccggcgccggcgtggagtccctctcgctggacctgctggcccacgcgctggcggccgtgcgcgacccgcgggaccgcaagtcgtgccgcctcgccagccgcgccttcgcgcgcgccgaggccgcgtcccgccgcgccgcgcgggtgctgcgccgggacgcgctgccgcgggcgctgcgcgccttcccggcgctgtcctcgctcgacctctccgcgtgcgcggggctcgacgacgcctccctcgccgccgcgctgcccgaggagccgctgcccgtccgccgggtgcgcctcgcgcgggccagcggcgtcggctggcgcggcctcgacgcgctcgtggcggcgtgcccgagcctcgaggccgtcgacctctcgcactgcgtcgccgccggcgacagggagatggccgcgctcgccgccgccgccgggctcagggacctcgtcatggacaagtgcctcggcgtcaccgacgtcgggctcgccaaggtcgccgtcggatgcccgggcctccagagcctcagcctcaagtggtgccgcgagatctccgacatcggcgtcgacctgctcgccaagaagtgcccccaactgcgcagcctcgatatctcctacctcaaggtgaccaatgaatcccttagatcactctccacccttgagaagctagaggacatagcaatggtcagctgcttgtttgtagacgatgatggcctacagatgctaagtatgtgcagctcgctgcaggagatagaggcttgtgttctgagcaagttatcaacaataggagaaaccttgactgttttaagactcgacggcctcgaaatcttcgcctcgaatctccaggcaattggttctacctgcaagaatctggtcgagattgggcttagcaaatgcaatggcgttacggatgatggtatcgtttcgctagttgctcgttgccgcgacttaaggactatcgacgtgacgtgctgccatcttcttacaaatgctgcccttgctgcaatcgccgagaactgtagaaagattgaatgccttcggcttgaatcctgccctttcgtaagcgagaagggactagagtcgatcgcaactctctgttccgaccttaaggagattgacctcaccgattgtcgtattaatgacgcagctttgcagcagttggcaagttgctcggaactgctgatcttgaagcttggcctatgctctagcatttccgacgaaggccttgtttacatcagtgcaaactgcggaaagcttgtagagctcgacctataccgctgcagcgctgtaactgatgacgggctggcagccgtagcgagcgggtgcaagaagatgaggatgctgaacctatgctactgcacccaaatcacggacggcggtctgaagcacgtaggcggtctggaagagctggcgaacctagagctgaggtgcctggtgcgcgtcacgggcgtcgggatcacgtccatcgccgtgggttgcagtagcctggtagagctggacctcaaacgctgttactccgtggatgatgccggcctgtgggctctctcaagatactcccagaaccttagacagcttactgtgtcctactgccaagtgactgggctggggctgtgccatctgctggggtcgctgaggtgcctccaggacgtgaagatggtgcacctctcctgggtctccatcgaagggttcgagatggcgctgcgggccgcgtgtgggaggctgaagaagctgaagctgctgggcgggctgaggtccgtgctctccaccgagctgctcctgacgctgcaggcctgcggctgccgcgtccgctgggtcgacaagccgctggtctacaagggatga

SEQ ID NO: 140 - DNA, 1572 bp, Zea mays
  Peptide Sequence Number=SeqID_41919
atgggcgcttttcaattcatgctcgccgtcgctcccaaccgaatggtatgcgcgtcgcgtggggcgcaggggcagggctcggtgattccagcgcctggcggcccggccgtgccggacttcgggatcttggtcgtcctggcattggtgctggccgccgcgctcggcccggccacggccccggccccggcgcgcgcccagctgcggcgggaccaccaggcgccgccgggcccgcgcccgcacagcgtcaccatcaccgagttcggcgccgtcggggacggcaggacgctcaacacggtccccttccagaacgccgtcttctacgtccgctccttcgccgacaagggcggcgcgcagctgtacgtgcccaggggccgctggctcaccggcagcttcaacctcaccagccacctcaccctctacctggaggaaggcgccgtcatcgtcggcgcaaagatatggttgttggatgtacctcaggaaggagtgattttgacatctgcgaggaggtggaacatagctattgctgccagggaggactcatcacaatggctgatcgttgaacctttgccatcttatggccaagggctagaccttcctggtcctagacatcaaagcttgatcagcggatacaacttaactgatgttgtcataactgggaacaatggagttattgatggccagggcttggtatggtggcagtggttgcgctcccatgagctgaaccatagccgacccaaccttctggagttcctgtattctgaagatattgtcatctcaaacttgacattcttaaattcaccagcctggagcatacacccggtgtactgcagtaatgtaaaggtccacaatgtgacgattaagacctcattggacgctccactgactgatggcatagttccagattcatgttcaaacttatgcattgaggacagcaccataagtgtcagccatgaagccatctccctgaaaagcgggtgggacaggtatggcatttccttcgggaggcctacctccgacattcgcatcagcagagtggacctgctatcatcttccggagccgctcttgcattcgggagtgagatgtctggtggtatctcagacattcatgttaaccacctccggatccacgactcctccaaaggtatttctttcaagacctcacccggccgtgggggttacatcgaggacgtggtcatctcggaggtacagatggaaaatgtgcatgtcggcatcgagttcaccggcaactgctcgacccacccagatgacagcttcgatccgtccgacctcccggcgatcgaccatgtcaccatgaagaacatggccggcacgaacatctcggtcgccggagttttgtcgggaatcgaaggagccccattcacagccatctgcctttccaaccttaacttctctatggctgccggttctggtccgagttcctggtcttgctccgacgtttccggctactccgaggcggtctttcctgaaccctgcacagagctccgtgatccgtcctccagctcttccgtctgctattccctggccagctacagcgccattgaaacagcataa

SEQ ID NO: 141 - DNA, 333 bp, Zea mays
  Peptide Sequence Number=SeqID_41920
atgccggacaagtgggagccgtcgtcgtcgcaaatgctggacaacgaggacatgtgggagccggatctgaggggtggcagcggcgggggtgataggcgagcgcgcgccgcagcaggtgttgtggaacgtgacgtagaggaagaggactccgactcgccgtcgtcggagatgtcggtggatgagcccaacggcggggcaggttcttggtttcttgatttgcagcacctagtttcttggggatcactaggtgcgaccacgcgcggccaacagtggcgctgggtcaccacgagcaggtggtccacgaccatgattatcgatgacggcgcagggtaa

SEQ ID NO: 142 - DNA, 1029 bp, Zea mays
  Peptide Sequence Number=SeqID_41921
atggggagggtgaagctgaagatcaagaggctggaaaacaacagcgggagacaggtgacgtactccaagcggcgatcgggcatcctcaagaaggctaaggagctctccatcctatgtgacatcgacctaatgcttataatgttctcgcccacggacaaacccaccatatgcattggcgatagaagtaccctcgaggaagttgtagcgaaatatacacagttaacccctcaggagagagctaaaagggttcagacagtcgaggagctatcagcagagcttgtctcgttgcagggtcaggtggcggagcttcaaaagcgtgtcagtgattggagcgatcctgagaaagttgacaatatcgacaatataagagcaatggagcaatctctcaaagaaactattaatcatatccaaatccataaggggaacttcggaaagcaacatctaatcgggctacagtatgctgctacccagttccagaccgacatgcagttgcctctaggactgcccggcgagtcaggcccttcgtcgtggttccaaaacggcggcgctgatgggcaacaagccatgatgctaacggacgagtccggcctgctccatcagagagacattgcgcagggctatccaagctacttcagcacggtcaagcaggatcccgacaccggtggtagcagcagtgatcacgggcaggtggtgcttcaccatccgcagccgcccgacttcagccagaccgagtgcctgacgtcgctgcacctgccgtcgcagcagttcccgtacccacccttcgaccaccacggcctttacagcgaccgaattttcaggccagacgcagttgagctgcacgccggcggcgtcgccagtatggactttctcagcggtcagtacgacttgccgaggcctggcgatgatgccagcttccataactgggcgtcagctgcagcatgtagtgcaaccatgttcgaccagcaacagcaacagcagcatcagcatcaccagcaaccacaatcttcacctgcacaagtgagtgcataa

SEQ ID NO: 143 - DNA, 966 bp, Zea mays
  Peptide Sequence Number=SeqID_41922
atggagaactacaactacggccaaccttcacaagcccctggagactatgtgccatgcacatacacagaaggcatagatttaacagaaatcgatgacgaaggcaacatgaactttgcctttactaagagcatgaacatggaagacagccagcactcaactccaactgcaactgaccctaagctcaagaaagtaacaacttggaggcttggaaactacactcaggccgaggatgagatactggtatctgcctacgtgaacgtgtccaaagatcctgcaattggaacgaatcagtcaggaaaggcttattggcgtcgcatcagcgactactacaatgaacacaagaagacagctaatgctaggacacagcactccttggagcacaggtggagcgacattcaaagggacactacgaagttttgtgctgcgtacgacaaagtgataaggttgaagcaaagtggcaaaagcgaagacgaccaggtaaaagatgcactacagatgtttgaaggcatgcacaagaaacagtttaggtttatgcattgttggtacatgcttcgccgagaggcgaagcagggggaagacaaatttggttcaccgtctaatacctttgtgcgaccaatgggtagggaccgtgcaaagaaggctcgtagtaccagcactttgagcaattcaactgcctgcatggcgctgctggagaagttccaagaggatagagcaaagttcgaagaaaaggctacaaagtatgaagatcaggccacagcatctacagaagaggatcgaagggatatgaagatgtacagggacagaaagatccagctttctgagaacatgttcaaactccaccaactagagcgagatgatcgcataatgaatatggacttggacaaggttgctccttatgcaagagactactatgtgtatatgcaaaaggacattttggcaaggcttcctccaccatcagacacatga

SEQ ID NO: 144 - DNA, 222 bp, Zea mays
  Peptide Sequence Number=SeqID_41923
atgtcgcttccaactaggggagccatagggatgcagctgtcaccgctcgtgcttaaggaagtccgctaccgctgcttccacatcaaatgtgtcaacatcatgcgcgtctcaagggaccgccgccgcgtgcgtagcaaccaggcgtttaagggcaccaataactgccttaaaaaaattacgccccgccctgccactcatcgcagtactgttgtaattcattaa

SEQ ID NO: 145 - DNA, 1809 bp, Zea mays
  Peptide Sequence Number=SeqID_41924
atggccgcggacgccaccgcttccccctcctcctcctacctcccgccaccgctcccgacctcgcgcctggacatccaggccgccgtcgccgaggccgccgagctgcgcgcgctccacgccgcgctcctccagggcggcggcgcctccaattccgggacctacgccagcgctagccggagccccgccgtcatccgcctgccgccggcgctcgccaggccggcccccctgcccacggccgccgaggactaccccgtgtttgccccgatgtatgatgaggagcccttgggcggaacgaactgcattcgtcaagataacaggagcctgtccgagaactggagcggcgtcggtttggaccatgatggcctagaggacgacgaggtggccttctcggatttcgacaaccacaacaccttctcttcgtcgaacagcgagctccatctctcttcgtcgaacgagcacctgcggaacagaagggcgtgcagaaaccatccgtccttccttcaacccaccgcccttgctgctgacggtttgatcaggtcaaccagcaggatgactgacttgactgaattcaaggtcgttacgacgtgcaatacctgcaagcctgcgacgatcaatcgtggggacgacgccaagtccttgaagaaccttgattgcaccgtgccgctgtcaaactaccaccccactgtcgccgcctttccccggacaaggcacaaaggaccacaacatatcctctcctggttgctaccaaagtcaaagaggaagccgaggccagatgtgtcgccgaccaccgtggaatgtgagaacatgtcgcagcttctcaaggactggggcgtgttctcgctggactccctgaagaaagaggttgtcgaggccaacgagcacagggacgccgccctgcaagaagtatcagagatgaaactatcactcggagaactgaccaccaagatagcgagcctggaagcgtactgttcggagctgaagaaggctctaaagcaagcgacaagcgcgaagagcatgcagtctcatcactcgaagagatcgtcgaccaggtcggttagcgggagtcccttgcccgtcagtcacgaggttatggtggaagggtttgtgcaggtcgtgtccgaggcccgcctctccgtaaaacagttctgcaaggcgttgatacagcaggtcgaagaagacgccgacaacgggctatcagagaagttaaatctactcctgcagccgtaccagatcacgctcggcgacaggcgcccgaagctggtgctgtaccacctggaggctctgatgaaccaggcgatgtaccaggacttcgagaactgcgcgttccagaagaacgggccgcgcaggtgcctcgaccctaggcaggagcggcaggagagcttcgcgtcgttcgtggcgctgcgcaacctgagctggagcgaggtcctgaggaagggcaccaggcaccactgcaaggagctcagccgcttctgcgaccagaagatgggctgcgtggcgtcggccctgatgaactggtcgcggccgtgttgggccgagccgctgctgcagtgcttcttcgtggcgtgcaagtgcgtctggctgctccacctgctggccttctccttcagcccgccgctggcgatcctgcgcgtcgaggagggcagggcgttcgagcagacgtacatggaggacgtgctgctcgacatgcagcggtcgcaggaccatgagccgccgccatcggcgcgggtgaaactcatggtggtgcctgggttctacgtccaggacaggctgctcaagtgcagggtgctctgcagttacatcagcggctag

SEQ ID NO: 146 - DNA, 1281 bp, Zea mays
  Peptide Sequence Number=SeqID_41925
atgaccccctacccctacacatgctccgccacctccccaaccacccagaaccggatcaccggcggagaactgccgtcgaactctggcgactgtccagccaaccccgtcgcccaccccaatctccacgcgtcgccgccgcttgccggcgagtctattcccctccgtcacgccgccgaggctacccggaccccgcagcgggttgtgtggggaggggttctggaagccttggccgcgatgggcgagtcagacgatgacgcccgcaccttcaaggtcgttttcaccaccaccggagaggagcagttccgggagctcgtgagggagaagctgcgcggattcaggaggggtctggacgacaccctcgtgaaggactcctcatcacgctccatgcttggtgatggtgcttcccgtcgtcttctacagtttgctgtccgagatgctgtaaaagctgtacagccaaccagtacctctgctgaaccagcatccaagcgcctgtgctctgtggtcgccactacttctacagagcacatgcgtgataggagatcagaaagatctcaggactacctgaacgatagaagatcagaaagatctcaagacaacttgagtgacagaagatcagaaagaactaggccaatgctacaggtacatggagctgctttagctcttagagctgcagcggaagctgctgcagattctgcaaaggttagatctactggaagtgttttcaagcgattgggtcaagggaatgttgtgaaacagccatctcgttctcgtgaagagaagagagattatgaagattttgagccagttacgatcgcagatgaacatgattctgatcaatatgttaataatgaggaatccgaagaggaatctggagagctaaccatggcagatagggtagctggaagtggaatgtatgttgattcgagctctgaagatgatatggaccgagatgagggtattacaagataccaaacttctctttcacatgacgatactttctcaccatttgcagagaagaaaactgtatcggcaccatgcagtgttgaactagagactaatgcaataagaccttcaagtgtgaatgacgaggaacaacctgttccttcaacaccaacagcaagtaaagctgtcgctatttctgttgatgtaaatatggtggagcctcccagttatgcaacaccaaaagatgttcatgttgtggagaagccttatgttgcacccatgaattcaaatgccgccagtattgctaccaatgccaaagtaagcagccgtgtatgttga

SEQ ID NO: 147 - DNA, 648 bp, Zea mays
  Peptide Sequence Number=SeqID_41926
atggcgcaccagacagtccgccctcaggtcaggatggtgcacacgaagaatgtgtcagcgcaagggagaggagatgacgaggaccctcctcgccccttcaggcaggtcaagggcaagaccatgtacttagagcagcaggaaggccgcaagaagcggcgtctcgatagagcagcccgagcagctcttgcagcggcagcagcagcagagcaggcaaagcgaggtggccagctgcagatctcgtcagaccatattgcatacagggttcgtcgactagcgtctcgaccttgctcctccgctccctctacacccgccacaactactactccacctcccacttcgccaactccagtcgctccagagccatccaccacttccgccatacccaccacctccaccactcccacttccactgttcctcctcctgctcccatttccgctccacccattccactagcctgcttccgggagcgagacgagaccgaggtgcgaccgttagctgccgatcctcgtctgattgatcttcagcgtgccactgcagcccgagtacataggttcagacacgtacccatggagtcttggctgccagctcagagggaccctgcagcggcagatctgttcagtaccgggattcaggaatcattcttctaa

SEQ ID NO: 148 - DNA, 648 bp, Zea mays
  Peptide Sequence Number=SeqID_41927
atggtgagggtcagtgtgctcaacgatgcgctcaagtccatgtacaacgctgagaagatcggcaagaggcaggtcatgatcaggccgtcgtccaaggtcatcatcaagttcctgacggtcatgcagcgccacggctacattggagagttcgagtacgttgatgaccaccgatcgggcaagatcgtggtcgaactcaacgggaggctgaacaagtgcggcgtcatcagccctcgctttgatatcggcgtgaaagacattgagggatggactgcaaggctgctcccgtccaggcagttcggatacatcgtcctcacaacttcggcaggcatcatggaccacgaggaggcccgccggaagagcgtaggaggcaaggatcacctattcactctctctaggtgctctcagagacaccagctggcaaggaaccggtctttagtctttacaagcagtctcaggttttttaactggcaatcaattttccacaagtcttctcacggtcttctcgtgaatgctaaggccacagtctcaagttttgcaagcagctggcaagcaattggtgagatatcagaactgtgcaacaccatccgatgccggagatataagcacagagacaaaacagagaaagggcaaaatagtctgctcgtgtga

SEQ ID NO: 149 - DNA, 483 bp, Zea mays
  Peptide Sequence Number=SeqID_41928
atgcaggctgaattcaagaggattacgtcacctttgaagctccagacaaggtgtcttgctgcatttcctgatcaacaaggttttttgaacggtgttgtaaagaattactatattcttaaggatattgggtctatagaaggacgagttggtgttcatcatgtggaagagtctcagcaaggaaaaaactttacattcaagtgtcaccgcgatggcaatgatatatacgctattagctcgttgaactttcatcctgctctgatggaagtttcaacttttgggataaggacagcttataataggtgtccatcccccatcacatgcagcgcattcaatcatgatggctctatatttgcttacgcggtatgttatgattggagcaaaggtgctgagaagcataatccttctactgcaaagacaaatatatttctacatagtgcacaggattctgacgtgaaaggaaaaccccgcgctggaaagaagtag

SEQ ID NO: 150 - DNA, 402 bp, Zea mays
  Peptide Sequence Number=SeqID_41929
atgggcaagggcaagagaggcaagggatggcctcgtcgcgctgatgggaagtgcaagcgtcctccgagtccacccccggaggacttcggtgagtcggagtactcgaaggaggaggcctcctcagaggaggtggaggactcctccgaccctgaggagtggagcggtggcgagggcgacgacaatgagggcgacggcagcagcggcggcgacgacgacggtgacggcgacgacgagggcgacgatgagggcaacggcaacgacaaaggcgacgacaagggcgatggaaagggcaacggcaatgacaaggacgacggtggcgacggcaagggcgacgacgacagcaagggcgacgacagcggcgagggcgacggcaaggccgacgacataatgctgctggcataa

SEQ ID NO: 151 - DNA, 390 bp, Zea mays
  Peptide Sequence Number=SeqID_41930
atggtgggcgcacgagggccgaccggccgaggggcgaggcgagccgcactgcagcggccagcggctggtgtggcgggcgctgggtgggcaaggggcgagggcgaggtgaccgcgcttgccgcttgggacaggaccgcgctggccgctgggagcctgagacgagacatcgagaccgcgcttgggcgctggccgacggcgctgggtgcagcgcaggacgccactggcctggccgctggtttgtccccaagcggcggcgctaggagcctgggacacaggacgcgaccgcgcttgggttgttggccattgggcgaggggcgcaacacaggacgcgtggccggtgactcggcgagggcagcggctggcggcggcgtcgtggcagctggcgggtag

SEQ ID NO: 152 - DNA, 450 bp, Zea mays
  Peptide Sequence Number=SeqID_41931
atggcgtctatgtcgctgagctcgtcgagggcgcagtggacggcgaagcagaacaagctgttcgagcaggcgttggcggtgtacgacagggacacgccggaccgctggcacaacatcgcgcgcgccgtgggtggcaagtcggcggacgaggtcaggcgctactacgagctgctggtgaaggacttggagcacatcgaggccggcaaggtggccttccccgcgtacaggtgccccggcggctacgacgacgccgacagcgacaggtttcaaacgatgatgaaccgcatccccgaagtcaccgaagcggctgtgattgaagacttctatcggggatccaacgacacggtttttgtccgggacatacttcaaaaggcaccggccacctccgaacatttattcagagaggcagacatctacatcaccgtggatgagcaggtgaaagtcgcctag

SEQ ID NO: 153 - DNA, 429 bp, Zea mays
  Peptide Sequence Number=SeqID_41932
atgtcgtcggcgtccaactcggccaagggctcgtcgccgtcatcgtcgacgtcgtcccagtggacgaagccgcagaacaagctgttcgagcgcgccctggcggtgtacgacacggacaccccagaccggtggcacaacgtggcgcgctacatggggggcaccacgtctgtggaggaagtgcgccgccgctaccagcagctcgccgtggacgtcgcgcagatcgagtccggcgaagtgcccttccactactggtacgccgccgccccgccgctgcatccagcgacattagttatgagcatgtgtgatctaagcacaatatatatggtgttccgctcgatgtcgtacagtaaggttgcagtgttaatcaccatcactaaggaccaaccgtcgaaaagtagcaggaagaagtcgcaaccgtgggttttttaa

SEQ ID NO: 154 - DNA, 246 bp, Zea mays
  Peptide Sequence Number=SeqID_41933
atggaggactacccagaggagctgcggacaccgtcggtgtcgctcgtgtccaacgtgggcgttaagccccgtgacccagcgcgcgcggaatcgccgcggcataccgccatggaggactacccagaggagctgcggacgccgccggtgtcgctcgtgtacatcgtggggtgcccagagcttcacccctcgatctcgacgacactcagctcccaacagcctcccatgaacacactggccctcccgtga

SEQ ID NO: 155 - DNA, 342 bp, Zea mays
  Peptide Sequence Number=SeqID_41934
atggaaactctggtgggtcaagcaaagggtggatcaatggggcaagagcgatccgatggggatggtggtcgacatgggactgctggctttagtggtcagggttttagggatgttcgtggtcaaggattttggcaggcacatgacgttgggatgtttgggcacccttttggaagagaggaatatcaagctcatggtaatggctctagagataactctttttgggatacatctgaagtggagaagaagaggatatctgatcaggatgcacctaataatgacaaaagcaagaagcataaagaagtgatttgctatgagatttgtgaggaagctcatactcaatag

SEQ ID NO: 156 - DNA, 390 bp, Zea mays
  Peptide Sequence Number=SeqID_41935
atgacgaatgctacaatggaagatactaaaatgtatgaggtgtcctctaacaatgacaggaaggcacaagacattttggaagaggtgaactgtgaacaacttgatgctgctgccgaagaggggtgttttgaattgataagggttgctgagatagaaaggaaaattcaatcaatggcaaacaaaattatggacagagcagtggcaacaatggtggaagagattgtcgatcgtgtcttggacgaagatgttaacaatctggctttcgagaaggcatatgcggggatggaaaccactatggttggccacaatgttgcccctactgctattgtaggaggggaccagaatggctatttttacctcacacagacagagaataatggagctatctag

SEQ ID NO: 157 - DNA, 222 bp, Zea mays
  Peptide Sequence Number=SeqID_41936
atggcgttactccggtcgtgtcggctggctgttcgcgtggcggtcgcggtggtgctcctgcttctctgcggctacgctcttggcgcggcggagggcgccaggcctctgccaggcggccacgggggcgccagcggcgggttctccacggcgaacttgccggtctactacttcttctgctgtttcattggttctttgcctgttctaaggatgctcagcccatag

SEQ ID NO: 158 - DNA, 1497 bp, Zea mays
  Peptide Sequence Number=SeqID_41937
atgccctttttggatgatcggatggtgcaaagccctaccttcgccattgatctgcgagggcgggatgcggccgccttcattagggaagttgagtcggaggctgttaaaattattgctgatgctggggacaaccgagggaaaaaggtgaagacccagtctgaagagggcacctcgaagggaaaggtcatgattgcagcgactcgaaagaggaagatagaggcaaaagggagctactccggctgcagtgatgcccctcctgtggcatcagtagctctcgagaaggtgtcttcgccaccgcgcgctattgaagcagcggtgtcggagactggagggactggccaggagttgtctgttgacgactatctggtgggaggcgtcgccatgtttgacgcccagaggcctctcccaagtgggccgtgctaccgtcgagcgtggctcaagcccaaaacgcactcgattcgcgccatcgcgttgtcgggccaccagctcacggccgcgggccgccgccgccaagcgaaacggcacgcaggggctctgtcgcctcgcctgtcgcctccaacgtgcaacggctaccgttccctgccccccgactccccgaggcaccccctcctccctcctcggcgaaacgacaaccaccccgccggggagggtaatccaagcgagggcgagccatcaccgtgctgttcctcgtttgctgtcgcctcgaagagcctcctccgttccctctccctcgaccgatcggccggtctcacggggcatttcgcggggctggtcgatctctccccgctcattctgtcaagggattggtcggttgccgattccgtgcggccggataactcggatttattcagtttttcgggttcgctacatgcgtgtgcgatgccggccagctccctcccggcgtcccccgacgccaccggcgacattggcgccgcgctcgagctcgatctcgaggatctcgccgccggcggcggcacggactgcatcggcgcgctcgcctgcggcaggagcagcttctcctaccgccgcctcccggagccccgcctccgcctcaccgttcagaagcttgacgactccttcttcgaggagcctttaacaagccagccttatcatttattgaggattgagcttcattttgcccagcatctgtctgttgactacagcccatgcagggatcctcccaaaaaccagaaggaagcgtctcacactcacagaaggccagtgagcatgctggatgatctcagcgaagatgatgatgagaagtttacacacagcaggtgctctacgagtgtcttagaagatccgtgtctttacgagtacatcgaggagcgcgtggaagaagaaactcccaagaaaggaagtctgttccaaagatggttctgctcctctaaactaaggagcaacaggaggacacatgcagaggacactgtgccactatctggtgagaagaagaatgctcatccaaagctggggaagtggctgaccttcaaattctga

SEQ ID NO: 159 - DNA, 438 bp, Zea mays
  Peptide Sequence Number=SeqID_41938
atggcactggcgctcgcctgcgtgctgctcgtgaggtccgccgacgctgctgccgaggcgtccccgactccaggcggctccacctacgggtgcaacccggccacggacaagtcgtgcaagcccgagggcgtgggggtggtgctgccgggcggcggcatcgacctcgacggcgacgagggctacgctcctctctacatggcgacgcatcgtccactagctcggggcatttggatcgttcgcgtgtgcgcagaggtcattatagtgtggttaagtacaacccgtacggacacaccatcaatcataccctatgatgtggcttacaagtggggtcaggagccggcaaggccttcgcctgtcctggccggtccgggagctggcaaggccttcgcgtgtcctagtcagccccttcgtcccaaggccttcacttggttgaagtag

SEQ ID NO: 160 - DNA, 285 bp, Zea mays
  Peptide Sequence Number=SeqID_41939
atggctgttgagaaacccgaagaatcttctctttacggttctcgacctgttgctgaatggcttcgagattgtgaatcttataatcaatatcatattgataattatgagatgggagttgatagcttctctcttctgatttcatgcttcacgaagaggtgtgtcttcaacttgattctgatctatagtggtaagaatagaaccgggggttgtagacttcttcggaggcttgacgaagatgctctttgtcaaggtcgtgaattcaccgaaggtgtgcaccaatgttaa

SEQ ID NO: 161 - DNA, 2304 bp, Zea mays
  Peptide Sequence Number=SeqID_41940
atggaggccgaagaaggtccttttctggctaatgatgccaaggaatttgtagagcatttcatccttctgtatctaaactttccaccattttcccctttatcgaagcatcaagacccagaagcaagtctggcaatcacttcggaaactgtgcttttaaagtttgagaagtctagaagccagcttcaggagagtctaaggcgcattgaaagcatagtaactgaagatatcggctgtaagattgtggagattgttggtgaactggagcaaattgtttttacattggatagatcagagaaggaagctggtgatgagctgatcaatttgctacagagaaacaataaaacaaatggttctagtgataatggggaacttgaggtcttccatatttctgctcttaaattgggaattacatcttctagggcagcactcaccgaaagaagagcccttaagaagctaattgagaaggctcgttctgatgaagacaagcgtaaggagcttgttgtgtcatacttgtacaatctcatgaggaagtactcaaagttcttcagaagtgagactggtgatgatacagattctcagggatcgtctccatgctcgccaacagtattaggcgtggatgatatgtgtagtccatacatcaatggccgtgcatttggtagacagattttgagcagtcagtcgttcaattcaaggtttggatctttcaattctaggctcggatcattcaattgcagacgtgctgctggtggtggtccaaggtctgggaatatctcagtccctcctgaagaacttaggtgccctatttccttacaactcatgtatgatccagtcatcatttcatccgggcagacttatgagcgtatttgcatcgagaaatggttcaatgatggtcacagcacatgtcctaaaactcagcagcagcttgcccacctgtcattgactccaaactactgtgttaaggccctgattgccagctggtgcgagtcgaacgattttccacttcctgatggtccaccaggaacttttgatgtaaactggagacttgcttcctctgacactgaggctacaggttgtgtgtctgttgaaagctttgattgtaccagtgcaaagagcgtcaagattgtcctgatggaggatgctagaaaagaggagccagcaaacagcgtatctggaacgctggatgacggttcttgtaacgatttcgatctgaacgaaggctatgggagcctgctgctcttgcttcatgaaagaagtaacatggacaagcagtgcaggctggtggagcagataaggtatcttctgaaagacgacgaggaagcaaggatccagctaggctcaaatggctttgccgaggcactggttgagttcttgaggaatgctgtggatgatggaaatgagaaggcacaggaagtcggtgcaatggctcttttcaatctcgcagtcaacaataacagaaacaagggactcctgttatctgccggagtagccggtctacttgagcagatgatatcgaatccacgcctatctggtcctgccacagcactctaccttaacctttcctgccttcctgacgcaaaggccgccatcggttcaagccaggcggtgccattcctagtcgactgtctgtatatccaagacgccagcgacacaaacggcagctccagcaagcacgacgccctgtacacgctgtacaacctgtcgagccaccaggccagcgtgtcggcgcttctagccgcaggcatcgtggacgccctccaccgcctgctcgcggagtctgcagcgcctccggaggaggggcttggctggacagagaaggctctcgcggtgctcatcagcctggcggccaccgaggctggcaggaaggagatcgtgtccacccctggtctggtcagcacgctggcgacggttctggacacgggcgagccgacggagcaggagcaggccgtgtcgtgcctgctggtgatgtgcagcgccgacgacgagtgcgtcgcggcggtgctccgggaaggggtggtcccgtccctggtctccgtctcggcggccgggacggggcggggcagggagaaggcccagaagctcctcaagctgttcagggagcagaggcagcgggacaccgcgccggcgccgcaaccccagcagcagctgctgcagagccagctggcggagggcgggaatggtggcggtgctattatcgcgtgccaccaccgggagtcgaagccgttgttcaatgtcaagtccaggaagctgggcaggacgctgagctctctgtggaagaacaggggcttctcgctgtaccagtgctag

SEQ ID NO: 162 - DNA, 390 bp, Zea mays
  Peptide Sequence Number=SeqID_41941
atggagttgtcctgtggaagctgtgcattgatcaggcgagctttcttaattctcaagcagcatggttatgtcggtgacgacgaggctactgcagcaacagtggattcagaaggctggttgaaaaccggtgacctatgctacttcaacgaggatgggttactctacattgttgatcggttgaaagagttgataaagtacaagggatatcaggtacctcctgccgaactggagcatatcctgaattctcatcctgatatcatggacgcagcagttattccttatccagacgaagacgccgggcaactcccaatggcttttatagtgaggaaaccagggtcaaaccttaccgagcaacaagtcatggatttcgtggctaaacagaaaagctaa

SEQ ID NO: 163 - DNA, 1087 bp, Zea mays
  Peptide Sequence Number=SeqID_41942
cggctgcaacccgtggtgcgcgatgagttggcgcggtacgggtgagctcgtcggcgcctgctacaaggtgctggacgtggacccgtcgtcggcgcggtacatgtgctgcaaacacgccaaggagcgcgtgctcgaggaggccggcatggccggggcagggtacgaggtgacgcggtacatctacgcaacgccggacgtggccgggccgtccactagtggccgcggccacggccgcgccagctgggtcgggtacgtcgccgtgtccaccgacgagatgacccggcggctcggcaggcgcgacgtgctcgtctcgctgcgcggaacggtgacgcaggcagagtgggcggccaacctcatgagcgcgctggagccggcgcggctcgacgcgcgccgggacgtcaaggtcgaggccggcttcctcaacctctacacctcctctcccggcggcggcggcggcatggagagctgccgggaccagctcctccgcgaggtgtcccgcgtcatcaagtctttctccaaggacagaccccgcgaagacatgagcgtcaccctggccgggcacagcatggggagcgcactggcggtgctgctcgggtacgacctctcccagcttggcctcaaccgcgacgtgtcagggcgccgcgtccccgtcaccgtcttctccttcggcggaccgagggtggggaacgcggccttcaaggaccgctgcgatgagctcggcgtgaaggtgctgcgcgtcgctaacatccgcgacccggtgaccatgctcccgggcgccctcttcaacgagggcacgagagggttcatcgcctcctgggccgccggtgactgctacacgcacgtcggcgtggagctcgctctcgacttccttagcctccgcgacctggggagcgttcatgatgtcggagcgtacgtatcggcgatcaaggccgaagcctgtggcaaggtgtccaggtccgacaatgcggcggcggacagcagaggcgtcgccgttctcgcgaagaaggcgatggagttcatcgggagccatcgcaccgctgcttttgcatggccagagaccgttctcggcattggcggcgtggcttaa

SEQ ID NO: 164 - DNA, 393 bp, Zea mays
  Peptide Sequence Number=SeqID_41943
atggagcaattctaccgtcggattaggctgagatccagccaacaagtccaggagtcccctatccgagcgctcgaccactactgccctcacggacagcagctcctgccggtggaagatcatgtccttggagcacgtcagtcaattattaacctttttcaaatatcattggacctggagtatggatcatttcctgatgtcgacatatatggtgatccggggtttacatttcctgtctgcgatgcgatggagttccatgcccctccagcggcacatcccgtcatcatgttcgtgtgcggcgccgaggtgggcagcctcagccgtgacgagctgtggcgtaaagccttggggaggccagctacgagtctacgacctcaccaccgtgcttgtcgttag

SEQ ID NO: 165 - DNA, 246 bp, Zea mays
  Peptide Sequence Number=SeqID_41944
atggaaagactgatatcaatgatacccctatggatgaatctcaggcgcacttggatcttgttaattacgagaggtttctggacattaaacttactcgggacaataactaaccaccggaaagatctatcagtcttgcacaatgttcgaatctcagttcatcaaaacaagggtaaacagaagaacaatattgagttcatggcttatgacatggaacataaaaataacagtacagccattacagattaa

SEQ ID NO: 166 - DNA, 354 bp, Zea mays
  Peptide Sequence Number=SeqID_41945
atgcggctcccatacggtggaagaagcacgattgggtcgaagcagggaaatagtggcagccaacggcgaccatgccgcttcctgttcagatctggagaccgtgcgcagctgttgggtcgcctctctgttcagatctggagaccgtgcgcagccgtcgggtggtggtacgacgacgacgaccacgaggcggactgtgtcgtctgcccgctgcaagcctgcaaccgtacctgggtcctctcgatggtagggcccaccatagcagcgatggagcgtctccagtgcggtgggcgaaggtgtggtggctccggtgtggtggctccggtgcggcagctgaagcgcgatgggtcacagtga

SEQ ID NO: 167 - DNA, 480 bp, Zea mays
  Peptide Sequence Number=SeqID_41946
atggcattaaacctatgtgagatgatgtggctcaagcaactattgggggagttgaaagttctgaggaatggaactatgagactccattgtgacaatattgttgcaataaacaatacaaacaatgcagttcagtttgagcgtactaaacatgtgaagatcaacaaattctttatcaaggtgaagatagatagtggagtattaagggaccttattgcatataatcaatataaagtgacggttggtgtgtttggtcatacagtgcgtctaactgaacaagaattgctcctcaagagaaggcctaaggcgtcgcgtgcatttaatgccagggaaacactacctgctacttacgcgggcaagtatgtgtctcatctgtactcaatgatagcgggccctatgtcagaggcttttgttaggcaccgtccggtggcttatgctatggtcgtttggccacgtgttggtgccggagccctgcctgggtga

SEQ ID NO: 168 - DNA, 3141 bp, Zea mays
  Peptide Sequence Number=SeqID_41947
atggtggcggagggcgcgcggcggcgggtggtggtggaggtgtgcaacgcgcggaacctgatgcccaaggacggccagggcacggcgtgcgcctacgccgtcgtggacttcgacggccagcgccggcgcaccgccacgcgaccgcgggacctcaacccgcagtggggggagcgcctcgagttcctcgtccacgacccgggcgccatggcctccgaaacgctcgagctcaacctctacaacgacaagaaggccatcaccgccgccggcagcggccgccggggcggcaccttcctcggcaaggtcaaggtggccggcgcctccttcgctaaggccggggacgagacgctcgtctattacccgctcgagaagcggagcgtcttctcgcagatcaagggggagatcgggctcaagatctggttcgtcgatgacccgccgccgccccctgcaccggctgcggcggaagagaaggaagctgcggcagcggcggcgggcgaagggaaggatgtcaaggacaaggctccagacgctgccgccgcaccggctgctgaggagaagaagccggagacggcgccctccgaggagaagaaaccagcggaggccaaagcagaggagaagaaacccgagtccgcggagaagaaggacgacaagaagaagtcgccggagaaggggaagaaagacggcgacaagcccaaggaggaaggcaaggctgagaaagacaagaaggacgcggccgcgccgccgccctctccatccaagctggcgccgccgcgctcgccgtccaagaaggacctggcgatcgccggggtggctggcgacctggagatccgcccccagagcgccgccgagaagagcatggccgcgtcgggcgccagcgcctcgtacgatctggtggatcgcgtgccttacctgttcgtccgcctcctcaaggccaagcgccacggcggtggcgacggccagccactctacgcgcagctgtccatcggcacccacgccgtgcgcacgcgcgccgccacggccgccggcgagtgggacctggtgttcgccttccacaaggacagcctcaccgacacctcgctcgaggtcaccgtcctcgaggaggccaagaagccggccaaggagggggacccggttccgccggaggccaacctgggtttcgtctccttcgacctccaggaggtcccgaagcggtcgcctccggacagcgcgctcgcgccgcagtggtataccctcgagggacacggatccgaggacggcgccgcggtctgcgacgtcatgctctccgtgtgggtcggcacgcaggtcgacgaggcgttccaggaggcgtggcagtcagactccggagggtacctggtgcacacccgctccaaggcctacctctccccaaagctctggtacctccgtctcagcgtcatccaggcgcaggacctacgcttgccgtccccgccggacgccaaggcgaagcagtgcggtcccatcttcccggagctgtacgtcaaggcgcagcttggcgcccaggtgttcaagaccggccgcgtccagctcggcagcgcggcggccgggacggccaacccaagctggaacgaggacctgctgttcgtcgccgcggagccgttcgacccgttcctgaccgttgtcgtggaagacgtgttctccgggcaggcggtgggccaatcccgcgttcccctgtccacggtgcacaggcgatccgacgaccgggtggagccaccgtcccggtggctgaacctgtgcggcggcgaggcccggccgtacgccgggcgggtgcacgtgcgcgtgtgcctggagggcgggtaccacgtgctggacgaggcggcgaacgtggccagcgacgtgcgcgcggcgtcgaagcagctgtcgaagccgccggtggggatgctggaggtgggcgtccgcggcgcggccaacctggtgccgatgaagatcgccaaggacggcgcgagcgggtcgacggacgcgtacgtggtgctcaagtacgggcccaagtgggcgcgcacgcgcaccatcctggaccagttcaaccctcggtggaacgagcagtacgcgtgggacgtgttcgacccctgcaccgtgctcaccatcgccgtcttcgacaacgtccggtacaaggccgccgcagccgacgatccggggaagctgcccagggactcccgcatcgggaagctccggatccggctgtcgacgctggacaccaaccgggtgtacgccaacaccttcgcgctgacggcggtgcacccggtgggcgtgcgcaagatgggcgagctggagctggcgatccggttcacctgcccgtcgtggctgacgctgatgcaggcgtacggcagcccgctgctgccgcggatgcactacgtgaagccgctgggcgcggcgcagcaggacgtgctgcggcacacggcgatgcgcacagtgtcggggcggctggcgcggtcggagccgccgctggggccggaggtggtgcagtacctgctggacacggacacgcagtcgtggagcatgcggcggagcaaggccaactggttccgcgtggtggggtgcctgtcccacgtggcgacggcggtgcggtgggcgcaccgggtccgcacctgggcgcacccgccgacgaccgtgctggtgcacctgctgctggtggccgtggtgctgtgcccggagatgatcctgcccaccgtgtgcctgtacctgttcctggtgctgctgtggcggtaccgcgcgcgggcgcggcagccggcgggcatggacccgcggctgtcccacgtggacagcgtgagccccgacgagctggacgaggagttcgacgggctcccatcggggcgccccgccgacgtggtccggatgcggtacgaccggctgcgcgccgtggccgcgcgcgcgcagacgctgctgggggacgtggcggcgcagggggagcgcgtggaggcgctgctgtcgtggcgggacccgcgcgcgacggcggtgttcgcggtggtgtgcctgctggcggcgctggtgctgtacgcggtgccgttcaaggtgctgctgctggggatggggttctactacctccgccaccccaggttccgcggcgacatgccctccgccggcttcaacttcttccgccgcctgccgtcgctctccgaccgggtcttctag

SEQ ID NO: 169 - DNA, 780 bp, Zea mays
  Peptide Sequence Number=SeqID_41948
atgaaggcttacttcatcaaaatactcattcgagcgattaacttgtttgacaagtggacccgtaccctcgttggactggaacgtccctcccttccatcgggcctatgtctgatggcgcaggcgaacatgaggatgagtacaataaagacaagcacgacgaggaaggtggtgacgacggagctactagtgcgctggcagaagccatggaactacatgcagatgggcatccaattggcatgccagttgcccgagtgtgccacttacataatggccaccgcgacgcgcgctgacgccatctacaacactattaccaccatgtcgcatacgagcagctacaaccacacgctcatcgcctcactaggccagatgatgcccaccatggagaagggcagcgacaacactaggtaccctgcgacgacagtgttggctaccagcacggaggtgaaggcagggaagttgtcgaacatggactggaaggagttggtgaacatggaccgcctctcgtcgatagtgctcgtgaagagggcggtcacaacgtcgggcccaaagcggacaacctcggcaacaagtcgaccacgaccaggcagcgccggaacccctcggtgcccgagctcagtaggaatgggagaccactgccaccagtggtcgtcttgtgcagcaccgttaacagctaagactatctgtagtgcagattactccatatccttactctatattaccctttatagtctagtcatcaaaatgcaaaccaaccctccgtgcaaccgtgcaaacttctaa

SEQ ID NO: 170 - DNA, 285 bp, Zea mays
  Peptide Sequence Number=SeqID_41949
atggcggtggttggtgaggtgtggagccttgtgatccacagcagtgttgtactgctgtccgcacctgaagatggtctatgttttccatcatttgaaactagttacatgatgtatatgtctattacatcaacaaaaaatggtgattcgcagccccaaccattatatggtattgccgatgaactcatatccagggcaaataccaccaccgccatccctgcttggcaaatcggcgccctggacacggtcggaccatccgagtcttttcctggacaatctgatccttag

SEQ ID NO: 171 - DNA, 741 bp, Zea mays
  Peptide Sequence Number=SeqID_41950
atggagggccggcggccgggcgcgcccgtggcgggcctgcccatcggcttccgcttccgccccaccgacgaggagctgctgctgcactacctccgccgcaaggcgctggcctgcccgctccccgccggcgtcatccccgacgccgacctcgcgcgcctccacccgtgggacctcctccccgccgccgcaccagggggatccggagccgacgccgacggggagcgcttcttcttccaccgcccggcgacgcagtgctggcgcaagggcggcggcgcggccagggcggccggcaccggcgtctggaggccgtccggcaaggagaccctcgtcctgtccccgcgctgcaagcgccccgtcggcaccaagcggacgctcgtattctgcccccgccgcggccgcgcccgcacccactgggccatgcacgagtaccgcctcctccccgccggcctccacccctatggctgcgccgccggcgccggcgccaacgcgcctccgcccactaatgtgagctcccacggcggcgacgcggcggccgactgggtggtctgccgcattttcaggagggccaggccggcccaccgcgcccgccttggtggtggcgccagggaggaactagaagaggagcacgcggcggaggagagcccgtcgtcctgcgtcaccgacgcctccgagaccctcgaccaggaagaggatgacggcgacgaagggagcagcagcagcaccgtcgcctcctctaactga

SEQ ID NO: 172 - DNA, 549 bp, Zea mays
  Peptide Sequence Number=SeqID_41951
atggcacggcagctaggcggcgggcgcaagcaacaggccgggttggccgcccttggccacgggggcagctggcactggcatggacggacaggaacaggcgaacaggcaggcaggctcttgccttgcgaagacgagcaagcgtgcgcggatgtattggatggcagcagcatgttatgttgtgtcgtcgtcggtgagccccgcacgcaattgtgcgaccgggcggcggtgacggcagcacatcgccgtcgcgtatgggaatggggtggccagtggtcagtctctcaggcgtggatccggcacatgaacaacagcaacacgtcacgtatgcatgcagccagcaaggactggagagctatggctctctctgccagcaatcttgggtggctggtgcgagcatccatggatgatgcctgcccacacacgggccacagccacagacgctctcttttccgaggcgaaaggcggcctgctgcaagggttgcttgcgccctttcccaacgccaaatccgtccatcccatcacgggctcgtcgtcagccgtcccgtctga

SEQ ID NO: 173 - DNA, 369 bp, Zea mays
  Peptide Sequence Number=SeqID_41952
atggggcttcgagccagcccctgtgagctttacacgcgtggagggtggagcggcatgcctgcaagtgaccaagaaaaaagagaggtgaccgagggcaagaggtcggacgtcggagacagacagagagaaaagacgagacccggctttgccgacggcgacggcaccatggaccgatcggccacggagctgatgagccgccgctttggatgcccgccatgccatgcccactcacgatgtcgccttgtccgccggttgccaaagacactgctcgctacgaccagtggcagagggcaaaatagaccccgtttggatcagcttttatgccgcttatggtgggagacaattgtatttttgggacttcagatatga

SEQ ID NO: 174 - DNA, 1527 bp, Zea mays
  Peptide Sequence Number=SeqID_41953
atgaaggaggaggtgaagaaaatgttactggatgttggatcctctgatttgtctcataagttagactgcattgatacactagaacggcttggactggattaccactataccaaggagattgatgaattaatgtgcaatgtcttcgaagctagggatcaagatcttgatcttactacaacatcacagcttttctatttgcttaggaagcatggatatcatattttcttctggtggatgtctcacatgttgttagtgtcgaatgcagatgtatttttgaagttcagagatgataaaggagatatcgtaacaaatgatgcaaggtgtttactgaggatgtacgaagcggcacatgttagagtgaacggtgaagaaatacttgacaatattctcattcacaccaagagacaacttcaatgtattgtagatgatctcgaaccaacactgcaagaagaagttagatatgcattggagacacctcttttcagaagactcaacagagtacaggccaggcaattcatctcaacatacgagaaaagcactacgcgtatcaatatgctcctggagttctcaaaattagacttcaacatcttgctcaccctatactgtgaggagctaaaagatcttacgctgtggtggaaagagttccaagcacaggctaacacgacaatctatgcacgagataggatggtggagatgcatttctggatgatgggagtcttctttgagccccaatactcctattcacgaaagatgctcacgcagttgtttatgatcgtgtctgtactcgatgacttgtatgacagccattgcaccacagaggaaggcaacgccttcactgcagcattacaaaggtgggatgaagaaggcgtggagcaatgcccaacatacttgaggactctgtatacaaatatacgtgccaccataaaagccatcgaggaggacttgaattttcaaaacaacaaacatgcaaagttggtaaaaggactgataatcgacatggccatgtgctataatgccgagacagaatggcgtgacaagaaatatgtgccagccaccgttgatgaacatctgaaaatttcagcacgcagcagtggctgtatgcacttggtgagccaggggttcatttcgatgggagatgtggcaactagcgaggccctcgagtgggcctctacctatcccaaaatcgttcgagctgtctgtatcattgcacgcctcgctaatgatataatgtcgtacaagcgagaagcatcaaacaatactatggtgtctacagtgcaaacttgtgcaaaagaatacggcaccaccacagtagaacaggccatagaaaagatcagagagctgatcgaggaagcgtggatggacatcacccatgagtgcctcagacagccacagccgaaggctcttctagagagggcggtcaacctggctcgtacaatggattttctgtacaaagatgcggatggatacacagattcacggagtatcaaaggcatattggattcattgtatgtgcatctaatagactaa

SEQ ID NO: 175 - DNA, 204 bp, Zea mays
  Peptide Sequence Number=SeqID_41954
atgaacgtggccactggatcgagaatgtggccacagttggatgtggagaggcagagggaagaagaagataacagcattggagaaacgacttatctagagccagagccatttccctgtattaaagtgctagagccaaagccaaaaccggtgaagttactatttatggcttcttctccgcggtacaaaaatgactctaacttttag

SEQ ID NO: 176 - DNA, 267 bp, Zea mays
  Peptide Sequence Number=SeqID_41955
atgacggggatcatttccccgtgcgggaagcctaggggaaacttctgccagtgtcaaaatacgtgccacgacatctgccctaccatagctcaacctgtttcctcaggaattgacactagggccttagccttttgtagagcagccatcgctcgtgacagaacgacaacgagggccacgatggaggacggggcgatcgcacctagttgcagggcaaaggcacaccacgatgatgaatgccttccgctgcctagtttatggcagaggtag

SEQ ID NO: 177 - DNA, 213 bp, Zea mays
  Peptide Sequence Number=SeqID_41956
atggcgcaccggacagtccggtgcgccaccgggctcctcgtgttgggggagatgtgcggcacggaggcggcgtgcgcggtgcagacctgcgacaactacccggggaagcagctggaggggtgcgactaccggagcgcgcccaagaacggcgtcaactgcgtgctccacctcctgcgcaccgacgataggttgagctgcacgccgcacgcgtag

SEQ ID NO: 178 - DNA, 1629 bp, Zea mays
  Peptide Sequence Number=SeqID_41957
atgggtctgcgcgtggccgccaccgcgccagctccggccggcgtgcgcgtgctcggcaggggcgccgcgcgcgtgacgccgcgaccgtgggcggctgtcggcggcaggagacgcttctccgtgcggatgtccgtcgcgaccaccgaggccaccaccaccatcgccgtgggcgcctcggaggaccaggcgctggaggctaggaactccaagacggtggtggcggtcatcctcggcggtggcgccgggaccaggctcttcccgcttaccagacgcagggccaagcccgcggtgccaattggcggcgcgtacaggctcatcgacgtgccgatgagcaactgcataaacagcgggatcaacaaggtctacatcctcacgcagttcaactcgcaatccctcaatcgccacctctccagagcctacgatttcagcaatggcgtggccatcggagacggattcgtcgaggttctagcagcaacccagaggcctggaacggaggggaaaaggtggtttcagggtactgctgatgcagttcggcagttcgactggcttttcgatgatgcaaaatctaaagacattgaagatgtgctgattctttctggtgaccatctctaccgtatggactacatggactttgttcagagtcatcggcaaagaggtgcaggcatcagcatctgttgtttgccaattgatggcagccgggcatctgattttggcctaatgaagatagacgacactggaagggtaatttcattcagtgagaaaccaaaaggagacgaattaaaggcaatgcaagttgacaccacagtgcttggcttatcaaaggaggaagcagaaaacaaaccttatatagcttcaatggggatctatatttttaagaaagacatactcctaaaccttctaaggcaaaagggaattaggatcctccattttatgttcaaatattctattcagttaactgcacaattactcgtttaccttaagccggactatatcatcgttagcaaaagaaatcgatgtaaaggtacgtccgcttatcttttcaatgattactgggaagatattggaactattaagtccttctttgaggcaaaccttgctcttgctgaacagcctccaaggttcagtttctacgatgctgacaaaccaatgtatacatcacggagaaacctaccaccatctatggtcaacaatagtaagatcactgattcaatcatttcccacggatgtttcttggataactgcaggatagaacatagtgttgttggagttcgttctcggataggctccaatgtgcacctcaaggctagatctcttcctttgttgcctggagtatttcattacacagatatagagaaacaagatactgtaatgcttggcgctgattattatgaaactgccgtggaaagaggagagctgcttgcagaaggaaaagttcctattgggattggagagaatacaacgattcaaaagtgtatcatagacaagaatgcgaggatagggaagaaagtggtaatctccaactctgaaggtgtagatgaagctgatagaacttccgaaggcttctacattcgatctggcatcactgtcgtactgaagaacgcgataattgctgatggattggtcatatga

SEQ ID NO: 179 - DNA, 609 bp, Zea mays
  Peptide Sequence Number=SeqID_41958
atggccaagagaagcggcgatcgtcgatttgtcgtgaagtctccaagctccccgtgcgtttttaaactttccagcagcgcttggcagccgcatggagacggatcagcggaagaagggaagacaaaggcagcgacgcgtaaaaagctctcagctacacaaacccacgggttcgcttcactgagatgtggactctacacggagtgcggcggggctgtcagtgagtgcggggtaggcgtggagtctgtgggcggagggggacggggtcttctttcactggctcgccagtcggtacgctatccggcgcgaggcctgacgtccacacgtcgcctccgcctgccgttctcgcccgctgttggcttctttttgaagctcccgtgcctctcatggcagtccgcgggcccaccgcacccagggcttcggctcggccggtcggccccggtggcgattggcatattccagatctctgtgccggcattggacgcttgcacactgcagtgtcaccgctctcacggctcgaagtcgcggtcacccgagtggcgtgagctactgagccgtgagcggctttgggcagctcaggaaagggggcttcggagcttgctcgcccgataa

SEQ ID NO: 180 - DNA, 318 bp, Zea mays
  Peptide Sequence Number=SeqID_41959
atggcagcgccgccgcttctacggctgagaagtccggcgagttcccccaactcggcgttacgctactctgaatcactacggacagcgcacgaggagatcggccaaatccaaacatacgtgataactcgagcgtttgtggtgctcggcagtcggcaggtgctcgtccgttcacaggagccttccatgcgcatggctttggtccgcgtctgggaaggagaagatggatccgagcaccggggtccacctgtaggcgaaacagcaggagagacaagagagggggagactggcacacgggcccatctgtcggcgcgcaagtga

SEQ ID NO: 181 - DNA, 594 bp, Zea mays
  Peptide Sequence Number=SeqID_41960
atgacgtggtcggtccgagccctgggtcgggcgaggcagaggctcctccgaggtcgaggtcgagtctgtcttccgaggtcgaggtcgagtccgagccccgggttgggcgagcggagaccatcgtccgaggccaaggctgagtctgagccctgggctcgggcgaggcggagttcgttgtcttccggagccgaggctgagtccgagccctggggtcgggcgaggcggagttcgtcgtcttccggagccgaggctgagtccgagccctggggtcgggcgaggcggagtccatcgtccgaggccgagataggggccgaaccctggggtcgggcgaggcggagcttcctatggcgcccaaagccggacttggctgctgccatccttgcattaaatgctcctgcgatatggtcggttggcgtggcgatctggccaaggttgcttctctgcgaagactgggcctcgggcgagccgaagctttgtgctgatgggggttaccagctgagattaggagtcttggggacgaagactgttcttactcagttatgtgtacggaaggcgttgcaaccgcgacctgctgatatgactggtgataaatga

SEQ ID NO: 182 - DNA, 789 bp, Zea mays
  Peptide Sequence Number=SeqID_41961
atggcatcgggctccgtgatcactccaacgggcacgggatccaagcctccgcctgtagatgctactggaggagaagatccattgccgaccggcgacgacgaacatcaaccttgcaagaacacacatggaggtggtggaggagaaggagaaggcaagtctactatgccagacgctatcaccattgctgccaccataaacaacaacaacgaagggatgcagtcccatgtcgacgaacaaaggaatgcaggctcccagctggtcgatcacgatccagtgacttgtgctgtcctggatcggcgccgggagcatggaagtaagcgcgcgtctgagcgcaagcggaaaaagaacaccgatgcgatgcgggccgcgccacaggatctcgagggggatcgatcggatccgtccacgcccgcgcgcggcgccaccgtgcccgtgcccccgtggtcgagcgagctccggggaccgggaaagccgagcgaggcgaatcgactcgcacgttaccgcaatcatgaacggtgcgctttctcgtgctcgctcgtcgttccggcccgtcctcgccccgatggatcagctgttcttttccccccctcctctgggcgtctcagctcaggctctctggcggtctggctgatgcccgagaccttggcagccgtgtgcctttcgcgggaaatggcgagggcggaaaggcgctgtggaaaatgtggcgacggggggatcagggatcaacaaccctttcttgctcgcctagtcgcctttgccttccgtttgaatgcgaggctagttctgtag

SEQ ID NO: 183 - DNA, 1470 bp, Zea mays
  Peptide Sequence Number=SeqID_41962
atggcggcattcgcagccccttccttgtcctcgcgcatcctcctcgcctcgccccactccccgcccactctcctccgcctgcgccgcgcgggcggccgctctctggagctgtcgtcacggcgcggcgggagcgcgcgccttcgggtcgttcgacgagcggtgacggaggaggatagcgggaccgcgcgcggagacgaggaggtggaggaggccccggaggaaccagtggctggccgcgacctcatcacgctcgccgcctgcctcgtgggcctcctcaccggcgtctccatcgtgctcttcaacctctcgattgatgtctattcgtttggaattgtcatgtgggagttgcttactagggaagagccatactctgggggcattgtaaacgattccctacgtcctcaaattccttcatggtgtgatcctgagtggaaggggttgatggaaagctgttggtccagtgatccagctgagagaccgtccttcacggatatatctcaaaggttgaggaaaatggccgccgcaatgaatgtgaacatcgcagttgatgaccctactccaagtgataatttatcaagtgctgacttcatgggagaacatctatgtcatggagattccaaagcatgtttgatgttttcttttaatcctagagtaaaccggctaccatttgccttccgtcgaaaacaatgtgtggtgatgctagatcttgaatgtgatgattttataaatgatatgttccatcacttcttgaggactcttaattctgggcattcagaagccgtcatatgctgcatgaaaacaataataatgagattggtaattgaggagagtgaggatgtccaaccacagattgcttcatgtctaccccaaaatgttagaaaagaagaaaaggcgtccacatgcgtgtgttctgcctccataaatcttggtctgcaaactctccatctcgcacgccggagcggccacggcaacgacgtggactggtgggccttcggcgtcttcctctacgagctcgtctacggccgcacgcccttcaagggccacaccaaggaggccaccctcaagaacatcctctccaagcaggccacttaccctcagctggacggcgaggccgacgcctccgatcccagctgcgggacctcgtggggctgttgctggagcgcgacctgcgccgccgcatgggcgtcacgcgcggcgccaccgagatcaagcggcacccgttcttcgccagcgtggactgggcgctcatccggcgaccaagctcgggagctggagcagcatgagcagcaactgcggcagcaagaagcggaagagcagcagcagcagcttcgggaggagacccacatccacctgcgaggaaaggcagggggtcttccgcatgctcatgagctggaaccaggagagccggttcagcaacaagatcaagacgatgacaagcaaagaaagatgaatgaaacgaagtgttcttag

SEQ ID NO: 184 - DNA, 426 bp, Zea mays
  Peptide Sequence Number=SeqID_41963
atgactgtgtcaaccgtgcgggtcctgcggccggtcacactcgcatgctcttttggaccgtgtggaattccttcccacggagacggacggaggcacagcaacaccaacacaggcggaggccgagaggtttggcacggccatccccgtagtgccgtggcctcatgcggctccgactccgacaccggtgaccttttgctcggcgccatagccaatggcgccgaggtaacacagctcggcgccataggctatggcgccgaggagcgcgcaaggtgtggtgtcgacggtgacgtcgcgcggtgcacgcttttggagtggcacctgcggccgactgcgattgtgattgcaagtggccaatatggtaaacagaggcaaaccgccgacaagcttcggtgcgtggcaaactggtaccgcagcgggggcagataa

SEQ ID NO: 185 - DNA, 603 bp, Zea mays
  Peptide Sequence Number=SeqID_41964
atggcgcggggcaagggcaagctgcccaagaaggtctgggagctctccgtcctctgcgacccccacatcggacatcggcaccaccaggacccaaaccaagaaaccacggtgctgctacagcaaatcaaccggcctgcttcagaagggactgagatatggatgcatccatatgagctagcagcagcagcggggaacgggaagtggagcgcgagggaatcagggaattgggtcagccgttctaaagatgccgaatccgaaagcccggcgccgcttggtggcgacaaacgtcaacaggtccttgcgcagatcgccatgctccaggcgcaaatggtgcgcatcacaggcttcttggacgagcgctctgcttgcctgaccaaatccgccaaggacgccgactccgagttctacatgattgggcagaacgccatgaaagaacttgatgcggtcggtgaccaggtgagcgtctcttgcaatcaaaactcagcctactgctgtccactgtttgcaatcaaactgcggtgtctagtgaggaagatattggagaggctcggcaagatgaaggccttcgaggatacggctgaggtacagaggcaagagatatag

SEQ ID NO: 186 - DNA, 723 bp, Zea mays
  Peptide Sequence Number=SeqID_41965
atggctttccaagccttccaccttgccgaaacaggcacacgtggtttcagcgttgcgttcgaccccctcgacggctccagcattgtcgacaccaacttcaccgtcggaaccatcttcggagtctggcccggcgacaagctgaccggagtgaccggcggcgaccaggtcgctgccgcgatgggcatctacggccctcgcacgacctacattgtcgccctcaaggactgccctgggacgcacgagttcctcctcctcgacgaaggtaaatggcagcatgtgaaggacaccacgaccattggggaagggaagatgttctctcctggtaatctgagggcgacattcgataaccctgagtacgacaagctcatcaactactacgtcaaggagaagtacacattgcgctacactggaggaatggttcccgatgtcaaccagatcatagtgaaggagaagggcatcttcaccaacgtgacgtccccgacggccaaggccaagctgcggctcctcttcgaggtggcgcccctgggcttcttgatggagaaggccggcgggtacagcagcgacggcaagcagtcggtgctggacagggtgatcaacgagctcgacgagcggacccaggtggcctatgggtccaagaacgagatcatccggttcgaggagaccctctacggctcgtccaggctcgccgccagcgccaccgccaccgcccgcgcccttatctga

SEQ ID NO: 187 - DNA, 1257 bp, Zea mays
  Peptide Sequence Number=SeqID_41966
atgcaggcagctcgcgaccggacatccccagccggccatggaggtttctctggcttcaacagcgagtcccagtcagatcctgggttctcttggacttctacctatacacctcgttcccgtatggtcaacaggaaggccaggagctcaatatcattccgggaaagagtcgctgcaattttagggtcatgcgcaaactgcttcactcctcgacctgaagtcaagaaagcacatgagaatcctccgatcgaggcccacgatgtgtctgctagtcccagtaattttggcacggtgtataaggcgaaactcagggatggatccatcatagctgtaaagagggctactaagatgcatggtgggcatctatctgaagagttcagaagtgagatccagagcctgtcaaaggtcgagcatttgaacttggtaaagtttcttgggtatgtggaatacgaggatgaacgcttaattctggttgagtacgtcaataatggaacactccgtcaacacttggatggatcaaaaggggaaccattggaatttgcacagcgtctcaacattgctattgatatagttcatgccattgcctacttgcacggatatacagcatccttatgtctgacaaatattttcctacgatgggaagcagatcatccaatcatccaccgagacattaagtcgtccaacattctcctaacagagcacctgcgagcaaaggttgccgattttggcttcgcgcgcctagcccccgaaaaccctgaagcgacccacgtgtcaacgctagtaaagggaacggccggatacgtggaccctgagtacctgcgcacaagccagctcaccgaccgcagcgacgtctactccttcggcgtcctcctcgtcgagctcgtcaccggccgacgccctatcgagcgtggccgcggccgcgggcgccaccaacgcctcaccaccgaatgggcgctgcgcaagtgcagggagggcttcgcagtggtggtgatggacccccggatgcggcggaccagcgctgtcgtggcggcggtggagaaggtgatggtgctggcagccgagtgcacggctccggatcgcgccgcgcgtccagcaatgcggcgctgcgccgagttgctctggtccgtgagacgcgacttgcagcaggagcagcagcgcgcgtcggccgcgagcgcaggagcgaggcggcacgatggctccacgtacgcgccgccgtcggttacgagtctgaggcaggacaggttccagaacttgagatga

SEQ ID NO: 188 - DNA, 1077 bp, Zea mays
  Peptide Sequence Number=SeqID_41967
atggcggagagtctttttcttcgcaatagacctagatcttgcctcccgggaggaaacccgtcagggaggagagatcctagggtgtgtcttggcatcggcaagccacccaagatgcctctagtcgacgtagagccgaagagagatggagatttaagaagggtaaaaacttggtatgttctaatccccactggcgatgctatgaaaaatcccggtgccggcgcccgcgctggcgtggcacggcatgccgcgttcaaggtccacagggactcccacagtatacacaaggccacctcgccgctctcctactccttgtcctcgatcaactcgtccatgtcgtcttcgtccaacgccgtaatccccagcagcggccaccaccggccggccccggcactgcagccgccagcgcggaggcagatgcagcagccaccgcagcagcagaagcaccaaccggtaatcatctacacgcactcgcctaaggtgatccgcaccaacccgcgcgacttcatgtccatcgtgcagaagctgaccggcctcgacggccccggtcaccacgcccgtggtgctgctggtgctgcgcctgcgcccccggcgggtcgcatcaactcggggtcggtcgtcgtcccctccccgcaggacgagtcgtcttcgtcttcgtcctcgtccgagagctgcgccaacacccacgccgcagggccgcctccctacgcggacacgcggttgatgccgccggccccgccggccccttcgctggatgcgcacttcatggcgcccgacatcccgctgctgtttgcacccgacgccgcagcatcagacccgcagcacctctgcgcgccaaggggtctctacggccagttcccgcaggtggacgccgcggcgatcggtccagtgatgtcgacgaacatgaacagcgctgccaccaacggtggtgccgtgttctccccgtcgatggtggagaccgcctcaggcgatgatgcagcgatgcaggagccgttgttatgcgatgcgtgtgcaataaccggaggttcatttttgcttgatcttttttttcttgttatggttgataccgtgaatgtgtag

SEQ ID NO: 189 - DNA, 1032 bp, Zea mays
  Peptide Sequence Number=SeqID_41968
atgggcaccatgaccctgccgcccgggttccgcttccaccccaccgacgacgagctggtgagctactacctcaagaggaaggtggacaacctcaagatcgagctcgaggtcatccccgtcgtcgacctctacaagtccgagccatgggaactaccagacaagtcgttcctgccgaagcgcgacctggagtggttcttcttctgcccccgcgatcgcaagtaccccaacgggtcgcgcaccaaccgcgccacggcgacgggctactggaaggcgacgggcaaggaccggcgcgtggcgtgcgacggcggcgtctacggcctccgcaagacgctcgtcttctaccgcggccgcgcgccaggcggcgagcgcaccgactgggtcatgcacgagtaccgcctctgccaggacctcgtccacggcgcgtgcaacttcatcggcgcctacgcgctgtgccgcgtgatcaagcggcacgaggccgggctgctgctgccgccgcctgcgagcagggccaaagcggccggcagcgcgagagggcacatgatgagcgaggtctccagcggcgagcagctaagcgcgtcgtcgtcgccgtcgccgttcacgcccgccaactccagccccactcgtcccacgctggacgcggcgggagctgtaacgtgcgccatggctcctgaacccggcaacgcgttccagctggcgcacgacgcgagcgcggcccttccctccctcgcgctgcctccgccgcccctgctcctgccgtctccccacgaggacgacacgtttttcgtcagcgaaggcctccccgccgcggcggcggactggttcggcggagacatgggcggcgtctcggagtcggagcaggagctgaaatgggacgccttgttcccctgcacaggcacgttcccgagcgtaggtgtcgacacgtggaacgcggcggccgcgagcccgacgaccatgctgtgccggcaggcgagcgacggcatcgacgacctggccgccttcttcttctcggaggacaacaggatcgtcttctga

SEQ ID NO: 190 - DNA, 942 bp, Zea mays
  Peptide Sequence Number=SeqID_41969
atgaagaactcccactgccgcgacccgaagatggaagcgtactgcgatgaggttcggcgcctggaggacaagttctacgggcttgagctcaaccacatcgcccgacgatacaacgagactgcggacgagctggctaagatagcctcggggcggacaatggtccctctggacgtcttctcccgagacctacaccaaccctcagtcaagaccgacgacacgcccgagcccgagaaggtctcgaccctgcccgaggtgccctcggctcagcccgaggcaccctcggcccccgggggtgaggcactgcgtgtcgaggaagagcgggatggggtcccgccaaatcgaaactggcagacctcgtacctgcaatatctctaccgaggagagctacccctcgacagagccgaagctcggcgactggcgcagcgcgccaagtcgttcgtcttgctgggtgatggaaaggagctctaccaccgcagcccctcaggcatcctccagcgatgcatatccatcgccgaaggtcaggagctattacaagaaatacactcgggggcttgcggtcatcacgcagcacctcgagcccttattggaaacgccttccgacagggtttctactggccaaccgcggtggccgacgccactaggattgtacgcacctgccgagggtgtcaattctatgcaaagcagacccacctgcccgctcaggctctgcaaacaatacccatcacctggccgttcgctgtgtggggtctggacctcgtcggtcccttgcagaaggcacccaggggctacacgcacctgctggtcgccatcgataaattctccaagtggatcgaggtcagacccctaaacagcatcaggtccgagcaggcggtggtgttcttcaccaacatcatccatcgctttggggtcccgaactcaatcatcaccgacaacggcacctag

SEQ ID NO: 191 - DNA, 792 bp, Zea mays
  Peptide Sequence Number=SeqID_41970
atggtgaccctagaaaacctacgccgcatatatggccatgtagtggagagggcgaccctggcgcgcgacctcctggcccccgccgtcggccaactctccggcaatctgcacagccgttgtattctggcccagcaactcgacctgtccttccccgagaaagacgacgacttgcgtgccgatctggagaagttcggcgccattgaggcgatcgctttatgccgacacctgttcatggcggtgattgtcttcagggacgaagcgagcgtgccggtcgctttccggaggcaagaggaaatatcatctgggctgtacagcgccgtcccgcctccccaccttgcgctctccacgagttttattcatccaaacagtatcaaggttaatttgtactccaacacatcaactgcgtcgtctggagattcaactgcaaaacatagcacggagccaactactacagaggcagcaacaagcatcggacaatcaatgatgccgctatggatggaatcgaggccagcgactgtgttccaaaactaccttggcgatggcagtcggttcgtgccatcaaggaggtcacagatttatgggccaacactgggtgcagatggtcgcttgtggatggaaggcttcaacattgtccagtgtggaaattacgcacaatcagtacctacggccataccagttgctcagcttggctacatgagccaggctagcgagagtctggctccagagatgcaatcaatttgctcgcgactgcagagcctagtccagggtactttgagtattgtgagagtctga

SEQ ID NO: 192 - DNA, 351 bp, Zea mays
  Peptide Sequence Number=SeqID_41971
atggcgagcgccggcaacagcggcggtggggacgacgacgatgcgggagagaactcagagaagcttctagcggatcgctaccatgaggcccctaagccttgccgtcaacgcacttgcgccgctgcaagcgtcccacggtggtggtcgttccccgttgcgcgcgcggtccgccttgccggctcttcaacatcctctagcatcgcatccacgatggcgagctacttcggcgtctacgaatccaacgtctgctcccggttccgcctccagccgccgccaagcaatctgtattcaccaatggtcacgataatgcatcatctctggaagatgccaaagacgtcctgttcagactag

SEQ ID NO: 193 - DNA, 1860 bp, Zea mays
  Peptide Sequence Number=SeqID_41972
atggctcgccctcctcccgccggtgccatatcgtcgcgttggcgccccatcatcctatctggcctgtggcgttccagacagaagaaaggtcgggccttcagctacatgaggaatctaattgcagttcttcatgccatggaaccacaagtgttggaggatccccacttcctggagagatgcctgattctcgacggcgtcccagccagtgtcagttcgttggacttgtttcagagtatcgtgggtgtgcagacggccgttttggtgcgagacatccagactggcttcagggttgctctcctcgtcttcgatgcccttgacagtacgatccagacaccgcgggaaggcctctttgccacctgcactccggctacttggcacggcaaggaggtctcagtacgcacgtccatcctagacggcgttgcagaaggttccgcgagaagatgcacggcactggtgcttcggtcgcttgtaccgccacagtacatccttgctgaccaagaccgggacttccacctgagatgcattctcatcggagctcgcagtggaagcacaatcagccaaggagcccacggattgtgtgacatggcctggaaagtactatttgttcgggcctacgtggttgccgcaatcgtccgcagtgaccgagaagctggcgtcctcgtgtacgacgacaccgagagcacagagctggtggcccggagggcgcctccgttgatgtacaagttggggctgaagctgtacgattcgtccctgtttccgatgcgtgctgatcctacagatcgagatgcctgcatgctccggcggctgctgccaccgtgtgtcgcagatggcgaggagagttaccggcatcgcgtgttgctgttggttgggatggatactcagaagctcgacgctgcagagcttgcacacttcctgcagtttgaagcggatctcgtccacgccgccgaggcagtgatcatccaccggtcagagggacttgttgtcgtggtgctgggaagctcggaggacacgacgcgtctgcggcagacgcctgaggagacatggatacggttctttggacagaaacccagctgtgccaatgtctatggatttggaggaccagatatctcatctgagcagaagaagaaggagcagcagcaccagcctgtgatgacgatgggggacactgcagcatttcagcaggtgcgggaactcagggaaggtgacagtgacactatcgcgctcgtccactgtctcatcaggttttgtgctttggcaacccctgaatgtgttctcagaagtggcttcccggagagatgtttgcttctatcaggtgttgtccatggcactacattatttgatctctcggctaggctttctgcctttggtgaccatcatgtgtcactacacgatctggagcggaaggcgttggtcgtcttcgtgtgttgggatggtgcagccaggctgttaagggagccgcaggatacctggaaaggtttggggttcctcgagtgcacccgggtgcctggtgctgctgagcacgctggggtcatcgtccaagagggtggtgtccaacgagtgcatatcatagacgttattgttggtggaccattgtttctagaactattcaccatagacagttttggaatgatgatagccagttctgtgtcaaaaatacatgtttctattaacgaaatcgctggtggatattctaatatggacctcactgtacaaaacaagttaggaaaaatgaatacctcattttctggttttgttgttttgatggctgaaaatgagatactggttgggaagaggatgtccagtttgccatataactatttgaaggcaaaagaattatttgtttcaagtaaggctaagtaa

SEQ ID NO: 194 - DNA, 1665 bp, Zea mays
  Peptide Sequence Number=SeqID_41973
atgtacaccaatagctccccaacttccttacttctaggcatactcagcatactcttatcaacgcatccccatgtcatcgcgtcgcagtctccgcgcgacaatggcgtgcgcgccaggtccttgtcgacctgcctactggcctccggcgtccgtaacttctccatggccgggtctccgggctacgccaccatcttcgacttctccatccagaacctccgcttcgcagccccggggatccgcaagccggaggctgtcgtgctgcccacctccaggcgcggcctccagcgcgcggttctctgcgcgcgtagtgcgtcgctggccatccgcgtgcgcagcggcgggcacagctacgagggccagtcctacaccgtctccggcggcgtgctggacggtaaagccccctttgttgtgatcgacctcatgaacctgaacaaggtccgtgtccacgccgcgtcagccacggcgtgggcggagtccggcgcgacgctaggcgaggtctatcacgcggtggcgcactcgtcgccgtcgaaccggtcgtccctggcgctcaccgccgcgtcgtgctccacgatcggtttgggcggacacatctccggcggcggcttcggaccggtgtcccggaagttcatgctcgcggccgacaacgtgctagacgcgctgctcgtcgacgcggtgggcagagtcctggaccgcagagccatgggcgaggacgtgttctgggccatccgcggcggcggaggcggcagctggggagtcgtctacgcctggaagctccggctcgtccctgttcccgacaccgtgacggtgttcacgccgagaagggaaggttcggtggacgccatggcgggcctcgtgtacaggtggcagttcgtggggcctgctctgccggacgagttttacctctcggcctcgctcacgatcggtagctcgtcgtcgtcatcacaggaagaccgagatcttcgcaacgtggcattcacggggctggtgcttgggccaaaggagatggccatgtcggtgctgaacgagaggttcccagagctgggcctcgccgaggcggaggtgtcggagatgagctgggtcgagtcggcagcacggctcgccgggctgagctcggtggacgagctcaccagcagggtatccaagaccaagtactacggcaagaacaagtccgactacgtgcagcggcccatctcgagggattccctagccgccatcctacggtacctctccgacgggccgccggcggggtacgtgaccatggacccctacggtggcgccatggcacgcttgagcgccacggcgacgccgttcccgcaccgcgcgggcaacctgtacgcccttcagtacggcgtcacgtgggactcggacgccggcgaggccagcgtgagtgcacgcatacaatggctccggtcactgtacgcgtacatgacgccgcacgtgtcgtccaacccacgcgccgcgtacgtaaactacattgacatcgacctcatgggctttgacgagagcctcggcccggtcagattggcatcgtcggtgagccatgcgcgggcgacctggggcgcggcgtacttcaccgtggagaacttcgaccggctcgtccgggccaagacgcgaatagatcctgccaatgtcttttacaatgcccaaagcataccattgcattag

SEQ ID NO: 195 - DNA, 117 bp, Zea mays
  Peptide Sequence Number=SeqID_41974
atggtgggatggggcctgggagctttcatcccacttgcatacaaggtcggagacaaaactaagtggaattaccacaagtgcaccaatataataacttttggtgaccttatttactag

SEQ ID NO: 196 - DNA, 465 bp, Zea mays
  Peptide Sequence Number=SeqID_41975
atggcgcctcccgttgacgtggctggtctgcgccctaggctgggcgaggtggaagctcctccaaagctgaggtcgagtctgtcttccgtggccgaggccgagtccgagcccctggtcgggcgaggcggaggtcgtcgtctgaggccagggcggtgtccgagccctggggtcgggcggagcggagttcgccatcttccgggacttagcccgagtccgagccctgggtcgggcggagcggagttcgccgtcttccgggacttagcccgagtccgagccctgggtcgggcggagcggagtttcctgtggtgccttctgcaggacctgactgcctgtcagcctcactctgtcaagtggcactgcagtcggcgcggcgcaggcggcgctgtccttctgtcaggccggtcagtggagcggcgaagtgacggcggtcacttcggctctgccggggggcgcatgccaggataa

SEQ ID NO: 197 - DNA, 570 bp, Zea mays
  Peptide Sequence Number=SeqID_41976
atggcgtcccgcatgctctgtgacgacggcagctctcagcccccttacggaagcaagaggacgaaggaccagggccctcttagagagggttggccgcgcggggacgaggacgagacaggcgctctcttggggccgctcgcttccctctcccgcgtggacgcttgtaaccccctactgcaagcgcacccgacctgggcgcgggacgaacacgaaggccgcgggattcccacctctctcacgccggtctccggccgcctcgcttctccccccttcgcgctcgccctcgcgctcgacccatctgggctggggcacgcggcgacactcactcgtcggcccgagggaccccccggtctcgaaacgccgacaacagcctactcggttcgtaaccgaagagcggacgaggttagcaggaacactacagagcggcaggtgtgtgtgtgtaggatacagatacagcgggacacggagatgtgcaccgcggtacttcggactgctgcgtccaatgtcttcggctgccgtgctgtgaacggcagattggaggctggcaggacgagggcggcaggctactga

SEQ ID NO: 198 - DNA, 1587 bp, Zea mays
  Peptide Sequence Number=SeqID_41977
atggcgagcaagaaacctcctggccttaggctattcggaggtgccggttcgctgagaacctaccagacgctagtcctggtcctcacattcttcgcatacgcatgcttccacatgactcggaagatcacgagcatcgtcaagagcgcgctggacccccagacgaagatggggttctcccactggggacggctgcacctgcacacgagcgaggctccggctcttaacactggctggctgccgttcaacaccgctgacggctcagcgttgctcggcgagatagacgtcgcgttcctcgctgcgtattccatcgggatgttcttcgccggacacatcggggaccgcatagatctaaggatctttctgacgatcggcatggtcgggactgccgtgttcacggctctcttcggcgctggatactggctgaacgtccacagcttctactatttcctggtcgttcagatggtttccggcctgtttcagtcggttgggtggccgtcggttgtcgcggttgtcggtaactggttcgggaagagcaagagggggctgatcatgggcgtatggaacgcgcacacttctatcgggaacatagctggctcgctgcttgccgccttcctcctcgagttcgggtggggctggtcgttcgccgtccctagccttgtcatggctcttgttgggttggtggtgtatgtttccttgccggttagccctgaggtgatggagatagacattgctggcagtggtgaattgaactgtgagaaggacactggcactgtgaaggagccccttttggaaccaggccaacaagttaagcataaggcagtggggttcttggaggcatggaggattcctggagttgcgccattcgctctttgcctcttcttctctaaattggttgcatataccttcctgtactggctacccttctacatcagccatacacgcatcggtggcgtgtacctctccgatgcaatggccggcagcttatcgacgatcttcgacgtcggtggcgtgttgggaggagtcctcgccggccacatctccgaccgtctaaacgcgcgggcgatcacagctgccagcttcatgtactgcgcgatacccgccctcttcctgtaccgcgcgtacgggagcacgtcgatggcgtggaacgtctgcctcatgttcgtcaccggaatgttcgtgaacgggccgtacgccctgatcacgactgcggtgtcggccgacctcggcacccacagctccttgaacggcaactcccgggcgctggccaccgtgacggccataatcgacgggacggggtctattggagctgccattggaccgctgctgacagggtacatctcgtccaagagctggagcgctgtgttcaccatgctgatggcggcggctctccttgccgggctcctcttgaccaagcttgtgtgcgccgagctgcaagggaaaacacctaccagtgcgagcaaggacgttgctgatgcgcaagatcagggtagatcgaagggaggacgaacggccctgtcaagggcgtcagtgcgcaagacagcggggcctgtcttgcggggcctcgttcgtagtagcctcgaccgctaa

SEQ ID NO: 199 - DNA, 99 bp, Zea mays
  Peptide Sequence Number=SeqID_41978
atgaacaatagaaatgacattaaattacaagtgtaccttcggcttgaaagagagcaaaagtacaagtgtgacgcaaaagcaaatgccaagtcagcatga

SEQ ID NO: 200 - DNA, 339 bp, Zea mays
  Peptide Sequence Number=SeqID_41979
atggagaactacctggaaacctcacgtgagagagagagaatccaggcaggacaggagacgagctcacgggcagacaagatcattgaaatgacagaagaggtgagcacgcgaagaagatggaattgtggcactcggctcgaaatcaatggctataaaggggaatttgtgagaaacttgtgcctgggatatcggattggcgtgaaatttggcgaatatgttactggaggtatcatgaaggtgcctgaaaaatttgggatcgattggagcaaatttggctggtttggacattttatcgagcacctggcgtgtgagggtctaggtttcgagggaaatggctaa

SEQ ID NO: 201 - DNA, 336 bp, Zea mays
  Peptide Sequence Number=SeqID_41980
atggtgcgcacaaagaatgtgtcagtgcctaggggaggagacgacgaggaccctcctcgccccttcaggcaggtcaaggggaagaccgtgtacctagagcagcaggaaggccgcaagaagcgacgtttggatagagcagcccgagcagctcttgcagcggcagcagcagcagagcaggcagagagaggtggacagcttcagatatcatcatatcagattgcctaccggatccgtcatctcgcgtctcgaccccgctccttctacacccgccacagctaccactccacctcccacttcgccagtgttggtcacttgttctcaaatgctatgagttaa

SEQ ID NO: 202 - DNA, 225 bp, Zea mays
  Peptide Sequence Number=SeqID_41981
atggggaagcctgtcccatcactcctcgtgctcctcctcagccgagtgaccgcacttgtacccaccataaccggaatgggagaccacgtcttaggtcgcgtgaggggcaaagtctactgccaggttcaatcagacaacacatccccatggaccgttgtccacagaccacctttattacgatatcaaaatggatacaaccaattcctgacctcgtgcgagtgctag

SEQ ID NO: 203 - DNA, 291 bp, Zea mays
  Peptide Sequence Number=SeqID_41982
atggcacaagtagcgtatcaaatgcagctggtgcgagttcttatttatacgttcagcgcgctgcaaagtggagggctccatctgtcattgtttattgctattctagcaaagggaaggtaccttcggacttgggttaaaagcatatacaatgtgaagagcatggtcgtgacgaaggctggttttgctccgaagctacgcataagggagctttggctcgatggcggaaaaaggaaccgacttaaagggggaaaaggctatctagtccccattgggttgtctataagtcaatag

SEQ ID NO: 204 - DNA, 1140 bp, Zea mays
  Peptide Sequence Number=SeqID_41983
atggccgcctcaggctactcgggctccgcgcccattactgatcaggggttcgaaggctggcccccgaaggaaggacagcgccgcctgcaccactccgactgcagtgccactcgacagagtgagtttgacaggcagtcaggccttgccaaaggcgccacggcgaactccgctccgcccgaccccagggctcggactcgggctaagacccggaagacggcgaactccgctccgcccgaccccagggctcggactcgggctaagacccagaagacggcgaactccgctccgcccgaccccagggctcggactcgggctaagacccggaagacggcgaactccgctccgcccgaccccagggctcggactcgggctaagacccggaagacggcgaactccgctccgcccggccccagggctcggactcgggctaagacccggaagacggcgaactccgctccgcccgaccccagggctcggactcgggctaacacccggaagacgacgaaactccgcttcgcccgaccccagggctcggactccgccctggcctcggccgaacgacttccgcctcgcccgaccccttggctcgggctcggccacggcaacggaaggcatactcaacctcggcttcggaggaacccccacgtcgccctgcctagggcacagaccgccacgtcaacaggaagcgccatcatcatcctaccccgaatcgactcgggacgacgtcagcagggactcgaccgctccaacagttgtccctcctccaggctccgccgcacctccgacagccacgacatcacgccagcagggtgcccagatctctccggctgccacattggcatggccttcttagagaaggttggccgcgcgggaccgaggacgggacaggcgctctcttggggccgctcgcttccctcacccgcgtggacgcttgtaacccccctactgcaagcgcacctgacctgggcgcgggacgaacacgaaggccgcgggacttccacctctctcacactcgacaccggccacctcgcctctccccccttcgcgctcgcccacgcgctcgacccatctgggctggggcacgcagcacactcactcgtcggcttagggacccccctgtctcgaaacgccgacagatag

SEQ ID NO: 205 - DNA, 354 bp, Zea mays
  Peptide Sequence Number=SeqID_41984
atgtcggaagatcacaccaagagggagatcgtgcccagcgacaagcccacgatctcggggaggactctctcaagggagttcggcaacaagcacaaggaggaatcctcttcctccatcaagtcccatcggagaggcgacaagaaaaataagatgaagaaagtggtctactatgagaccgactcatcgtcgccctctacatcaagctccgagtcatccgtcacttctaagcgccatgagcgcaagtatagagaagagccacaagcaatgtacaaccggctaaagaccatggtcaatcaagtgtgcaacctcgggacacaaaatgggatgaccatgaaatggtcaaggttattctaa

SEQ ID NO: 206 - DNA, 573 bp, Zea mays
  Peptide Sequence Number=SeqID_41985
atggacgttgttaccgggcccaagtttaatcctagcaatttcaggttggctgatgctgatggcatgttatctgaagatttactgaagcgtcaatcagctgaagatcctgatggaagtttctacactggggatgatcctgatgtaagcttttataacggggatgatcttgatagaagcttctacaatggagatgatcctgatagaagcttttacgatagagatgatactgattatattgagggaagcgatgatggaccaccaaggaagagttctgaagatattgtacagttaagaactcaaaatggctttgcatgtagagaaatctcagttaaagagactaaaaaagtatttcgctcagaggatgaaaatggtaataagatggtcaatcaatatgtccacttgggaaagattggttctggaagctacggaaaagtggttctgtacagaaacattaaagatgggaagttgtatgccatcaagcgccgggaagatagtcaagcagagttggcttgggagggactagactattggagagatcttggactaagggctcctttgaaatgtaggaattga

SEQ ID NO: 207 - DNA, 210 bp, Zea mays
  Peptide Sequence Number=SeqID_41986
atggcgaacaaaggacattcatcgtcgtgcatcggtcgccgcagaaccgcgcaacttcgggggcagcctgtctcgcctatcgattggaggggcgtctggtgcgcggtttggggctcggtgatggctggatacgtctgcatctatggcgccgccgcactggcgctgtgcgccgccgcgttgacagtctgggcgaggaagaagaagccttag

SEQ ID NO: 208 - DNA, 201 bp, Zea mays
  Peptide Sequence Number=SeqID_41987
atgtcgcagctggcggctggcctgcgcttgcgtagcgtggtggtgcgcggcggcatgattgcgtccgtgcagcccccacgccggaacgacaacgagatcagagcagacatgggagcagggagcgattggcgcagcccacgcctcgagctacatgattttgtggcacatgaatctttgtatttaataggggtattgttgtaa

SEQ ID NO: 209 - DNA, 2268 bp, Zea mays
  Peptide Sequence Number=SeqID_41988
atggccgccgaggcgcccgtgcgggcccctgccgcggcgcggtccgcgcgccggccggccgccgtcgtctccgcctcgcgcctcctcctcggctacggccctttcctcgcgccgcgcttcgccgccgagcgcgccgcggtggcaggccccgcggccggactctgcgcgcgcccgcatcgccaagtgcctttacatgattaccgcaatattggtattatggcccatatagatgcaggaaagacaacaactactgagcgcgttctgtattacactggaaggaactacaagattggcgaagttcatgagggaacagctacgatggactggatggaacaagaacaagagagaggaataaccattacatctgcagcaacgactgccttctggaacaaacacagaatcaacattattgatactcctggccacgtcgacttcactcttgaggttgaacgtgctctgagggtgttggacggtgctatatgtctctttgacagtgttgctggggtagaaccacaatctgaaactgtgtggcgccaggcagataagtatggggttccaagaatatgtttcgtgaacaaaatggaccgccttggagctaacttctttagaactagagacatgatagttgcaaacttgggtgccaaaccgttggtgattcagttgccgattggttcggaggacaatttccaaggggttgttgatctagtcagaatgaaagctattgtatggacaggggaggagctgggtgcaaaatttgaatacagagacatacctgctgatctccaagagatggctcaggattatcacgttcaaatgctggaaactattattgaattggatgatgatgttatggagaaatatcttgaaggaaccgaaccagacgaggaaactgttaagaaattaatcagaaagggaacaatttcagccagctttgtcccagttttatgtggttcagcattcaaaaacaagggtgtccagccattgcttgatgctgttgtcgattacctgccatctccacttgatctacctccaatgaagggtactgacccagaagaccctgaaatactacttgaaaggcaaccaagtgatgatgaaccattttctgggttagctttcaagatcatgactgatccgttcgtggggtcactaacatttgttcgcatatactccgggaagctgatagctggttcatatgttctcaatgcaaataaagacaagaaagagagaatcggaaggcttcttgagatgcacgcaaacagtaaggaagatataccagttgctgtgacaggtgacatagtagcgcttgctggtctgaaagacacgattactggtgaaacactctgtgacccagacaagcctgtagtgcttgaacgtatggaattccctgaccctgtcattaaggttgctattgaacccaagaccaaagccgatgctgacaaaatggctactggcttaatcaagcttgcccaagaagacccgtcattccacttctctagagacgaggaaacgaaccagactgttatcgaaggaatgggagaactgcatcttgatatcattgtagacagactaaagagggagttcaaggttgaagcaaacgttggagctccacaagtcaactaccgtgaaagtatttccaaagttgcagaaatacaatatgtccacaaaaagcagtctggtggatccgggcagttcgcagacattcttgtgcggtttgaacctctggaagctggaagtgggtacgagttcaagagtgaaatcaagggaggggcagtgcccaaagaatatgtaccaggagtgatgaaagggttggaagagagcttacccaacggtgtcctggccggttacccagttgtggacttccgggccgtgctggttgatggctcgtatcatgatgtcgactcaagcgtcttagcgttccaaatcgcagccagaggagccttccgtgaggggatgaggaaagccggtccaaggcttctcgagcctataatgagagttgaagtgataactcctgaagagcacctgggcgatgttatcggtgatctgaactctagaagaggacaggttaacagcttcggggataagcctggtgggctcaaggtggtcgatgcttttgtgccactcgctgagatgttccagtacgtcagcaccctccgggggatgaccaaggggcgagcgtcctacacgatgcagctggccaagtttgacgtcgtcccgcagcacatccagaaccagctctccacagcaaaagcagaggaagctgctgcttag

SEQ ID NO: 210 - DNA, 297 bp, Zea mays
  Peptide Sequence Number=SeqID_41989
atgatgacggtggcagttcgagccgtagcacagagcctttggaggagcaagagccagaaggatgggtcgcccgacccatcacttgtgatgccgctcgcggttgtaatttccacgggagcagtaggactcatccccttgcctcagcagaagatggagtctaggaggcatccctcctctgagccccagctagaggtgccccctgcaccactacagggcaccctagctgacggaggagaccccgatggagacgacgacggtggtagttcgagccacagcatggagacttcggaggagtaa

SEQ ID NO: 211 - DNA, 279 bp, Zea mays
  Peptide Sequence Number=SeqID_41990
atgaacatatgtgagctcacccttgctgtctcacacccccaacaggagaagaacaggtgtgatagcctcgtccttgcgctggggctatctggcagttctgattggttgctagggcaggaaggcgatgtgcctgattgttctgcctctagtactgacttcctaccggtggactatgctggcggtactgctgctactgctactgagagaactaactctggaattgctgctggtgcggacgctggttctagtgctgatatccttgcgggtgactctgcttga

SEQ ID NO: 212 - DNA, 414 bp, Zea mays
  Peptide Sequence Number=SeqID_41991
atggtggaagtgcacgacaagaaggggaaaggcaaagtcccgatgtcccattttatggtcatccgaaggggttcgatgttggacccgcatggacggctggattcgcggggcaagcgccgatctcgatcaaggttgttgcgggaggtcggcgtcgtgcgcatggagatcacggcagcaagggtcctcagggtagcactggtttcgttcacaggccgcgtgcggtttgtggaactgacgaaaggggcccgcgtgtcgacgccatttctccagctaggtcgaggggaggaagggaaagtgggccgcaaaggagaagagaatgggccggtctgggaagtaaatggcccaggcgcagtaccagcatttgggcggcaaccactggatcggttccagccgctggaggatttggaggattaa

SEQ ID NO: 213 - DNA, 363 bp, Zea mays
  Peptide Sequence Number=SeqID_41992
atggtggaacccgcaaccgggggaattgggccactgatgttgatgggtcctcggggaccagtctgggcgcttctccgagtctctaagaagtcgctcatgacgccgactaggtggaatcagggccaaggtgaccggaacggctcgacaagctactggccaggaattactcaccgttgccttggcaccgccgtcgagctgctgctctacgtgggcagggctcctaacgtcatgtgggattcgagcttcagggctagggattcgggcacgccggcgtacctccgccgcgtttgcttgggcgccgccgctctgggcaacgggaggatggtaggtgaagcgctccaatcctctgggactcaaatgtga

SEQ ID NO: 214 - DNA, 258 bp, Zea mays
  Peptide Sequence Number=SeqID_41993
atgggtgtagcccccgagcttcgagtggatttttgcaaacaatccactcgaaggtcttcacttcaagtattatcagaaatctctttcatcttccacttgtgctttttcagaggtgtaatcatatcgcccgcacagttgactggagtcccaatgggtgtcgtgttatgtgaagcggcgtcagccgcctggcgtgtcttcagacggtttgaattgcatattgaatttttgcgactgttcggtggctgtggtaggaggtga

SEQ ID NO: 215 - DNA, 417 bp, Zea mays
  Peptide Sequence Number=SeqID_41994
atgagtgatgggtcgggcgatccatccttccgactcctgctccttcgaaagctctgtgttgtggctcaaactgccactgtcgtcgtcatctctgtcaaagtctcctccagcagtcgaggtgctaaaggttcaacacaaaccaataaaaaggtcaaagttagggttcaaaagaaaggagcaaaagaaaccgtagagaaccctggtctggcgcaccggacagtgtccggtgtgccaccggacagtgtccggtgcccagggctgatcgacttcaaacttgccaccttcgggtttctgaagagccgctccgctataattcatcggactgtccggtgtgataccggactatccggtgtgccagcggagcaacggctagggagcgcaatggtcgactccaatggttgcctgcaacgtgaatag

SEQ ID NO: 216 - DNA, 237 bp, Zea mays
  Peptide Sequence Number=SeqID_41995
atggtgaggagaattgatggtggtggaattttcaaggatttcatggaaaatattactcgagcggcttttgatgtgcagtacggtctcttcaaggagactgctgatcatcttttgtacccaaacccaggatcaggattggttcatgaactacatctgcaatatttccattttcttggaagtctacttgggaaggcaaatgtagttgtcggaggttatggtggatacaacacaagatga

SEQ ID NO: 217 - DNA, 948 bp, Zea mays
  Peptide Sequence Number=SeqID_41996
atgaagtccaccttgccatctatgtccttccaatcaccctgtttcaagatccaaccggctactcagcagagcctctggcctcctcggcgacagagcacgaggaaaccaggacttcctctaaagcttatacgtgcagcattaggaccagacgccaatggcggactcctcaatgctgaccgcagaggtgccaccttaccatcttcgcccctgtcagatgtagttcaggagttttactcctccctcaatgaaaggaacagcaaacggctcgacaagttgatggcccctgattgcatcatcgaggataccgcatattataagccactggatgctaaggtcaatttctcacctgcttcagcatttcagtcacccatggatcatcttcgtttctggcaaggctcaccggagtacaaggcgacaactggtatcaacgtcgttgtcgtgttgggactgtgcttgcagttatgcaacgcggacaaactgcctcaccaccgcatcgccgtcaagagacggggagcgactctggcaatggcgaccgtgtcctggttcaaggacagtgaatttgttaacgacttcagcatgcacatcattgacctagagttgattggaaagctcaaggcgaaggaggaacaatacgatctcggtggtagcaacggtggcgaagccttagctggcctaaacctgaccgagaatgagttggtggcacatgttgtgctccagcagtggaagctcgggcggcaatcagacgtcgccaggcatgagtcgtggcgtggtagcgggcacaacagaatcgaggatggaggcagcacgcaatgggtgttcactgaggaccttgagcctgtggcactcatggcttcggcgttcgccaatgacactagactgcctcccacaaaggcagccccaacccctacaccaaagatccacctcgatgagaactggatgttcgtctag

SEQ ID NO: 218 - DNA, 1743 bp, Zea mays
  Peptide Sequence Number=SeqID_41997
atggccgcgacgcacgtcctgcacagcttctggcgacgccaccggtggacggtcctgcgctccctgctccttgtcgctctgctccaccgtctccatctcttggccttcctcgccgcctcctcgcccgtctggctgctcaccgccttccttctcggcgcagtcctcgtcaacagcgaacccaacgtccccctcgcggtcgcggcggcattagaggatcatgagggccgccacctcaccaccgccggcacggggcccagctccagctccagctcctcggacgacggcgccaacgaatccgaggaggacgtggatgaggaccacctcgtcgtcgacaaaaaggaggccgttgcctggacggcggacgacgagcatagcatccagagcatcgggtcgctggagctggagaggaacgccaggctggagaagctcatgtccaggataactgtccatcggggcctcaccgacctcgatgtccacacccccgccgtgctggcgcccaggaccaagaaccccttcgacctcgacctcgaccacgacgcagctatggacgcccccggctccgccccgtcgtccttgctcggccagcacaccaacccattcgacatccacatccagcaaccggacgaggtggaggaggaggacgacgacaagaaagcggcaatgctggtgggacggcacgacagcttcacggcccagccatcgcgcttcatgccctactttgtcgccgacgtcccggaggaagaaggcggcggcggcagcggcagggacgccggcagcgacaactccaactccaactcctccagcccgtcagcctctacggccagcgatcaccagactcaacaagaagccgcagtcaaagtagaagaagcacctgcggcaatggcatcgacgtgggacggcaaggggaacgggacggtggtggcggtggacgtggagctcatcagtgattcctctgacgacgacatgtcgctgcaggctgacgatgccaccggcggcagcctgaacaatgcccatgatccctcggacgaggacgaggaggactcgttcgaggtggagagcatcacgcagcaagtagctgcagccaagcagcagctgcagcccgtgtcgcctccgtcagagcaggggcaccgggacgaagaagacaaagaggtcgcgagcatcgtcagcggccgcaacgagtgggtgccgctcactacgttggtgtcagtggaagagaaggagaagggggagagggggctcacagagaacagggagcaccatatattgggcgctgttccggccatcgacgcctccgctggtgctcgagttggagctgcaggtgcagtggtcgcagccgcaccaacaccaccggcaacagatgttgcttcaggaccaccacctgtaacggcagcagcaccaacaccgcggccaactactgtggcgccaccaaccccaccggcaacagatgctgctgcaggaccaccacctgtagcagcagcaccaccaccaccggcaacagatgttgcttcaggaccaccacctgtagcagcagcaccaccaccgcggccaactactgtggcggcaccaccaccaccggcaacagatgttgcttcaggaccaccacaaccggcagcagcagcaccaccacggccaactgccgcggtagcatcagcaccaccatcagggaagctgagcagcaaatccaaggtggcctccaagaagatagaccccaagaaggctgtcttcggcttcttccgaaaatag

SEQ ID NO: 219 - DNA, 2121 bp, Zea mays
  Peptide Sequence Number=SeqID_41998
atgccatggcagccatcgccgctcttcgccgtcttccgccaacaacgcctcgcctcctcctgggccgccgccatcgctggccacgcgcgctgcggtcgccacgccgccgcacttaccgtcttccgccgcgttctccgagcccaccccgccgtcgctgcctccgaccagttcgcctatgccgccctgctccggtgccgcgaccgccgcctcgcgtaccagatacatgcccaggcgtgccgtcgtggcctgaccgcctccaaccccgtcctcgcttgctccctcctcatcttctatgccgactgcgaggagtggaacggcgccaccagggtgttcagcgaaatgccgtgcccagacaccgtgtcctacaccgccatgatatccgccctcctccgcgccggggactgccacggggcgctcgcgctctacccgtgcatgctcccactttgcgcacccacccagcacaccttctccaagctgctcgcgccctgcgcctccatgcgcttgcaccgccacggcagccagctccacgcgcagctcctccgctggggctgctggggcccccacctcggcctggtcctcaagaccgcgctcgtccacatgtacgccgcttgcggcgccatggtctccgcacgcgccgtgctccacgccactcccgaaaccgacgtcgtgctctggacggcaattatcaccgcctacacgcgtcgcggccagctccatcgtgctctgctggcgttccgtgacatggaacgctctgctgtgcttcccaatgccttcacctacgcagcgctcatcgccgcctgctccgcggaccactcgctgcacatcggacagcagctccatggccgcctcttcaagtctggtctggagcacgacacctctgcttgcaatgcgctcctcgacttgtacagcaagtcctccgcacgttccctcgacttgctgcttgctttccacgcggctgacatgcccaacgtggtgacctggacttccttcattgctggactgatgcgccatggcagggaacaagaggcgcttgcggcatttgctcgtatgcgggctaccggagtgaagcccaactccttcaccctgtccactcttctgaaaggctgcacctccgcacatgcatgtctgcacgctgcaaagatccatgcctatgtgctcaagaccagttcggagtcattggacgcggctgccggaaactcgtttgttgatgtgtacgcaaggtctgcaagaatggatgacgcgtggaaggtggctaccacaatgtccttcgtgagggacagattcacatacacaagcctggccaaagggctgaatcagatggggcttcaccacagggcactcggcatgatacttcacatgttccacgaggaggttagtatcgacggtttcagcctagcttgcttcctttctgctgctgcgacattggcatccatagagtccgggaagcagctgcactgctgtgcagtgaaattgggattgagcggtcaggtatctctctccaacagcctcataaacatgtacagcaggtgcaagagtctggaggatgctaagagtgttttccagtcaatcagggaacccagtgtcgtgtcgtggaatgctataatctttgggatggcattcaacggctcttacactgaagcgttgtcagtttttgaagacatgattctggctggagctcagcctgatggggtcactttcacagttgtgctttctgcctgcagccatggtggcttagttgacattggcatcaaacacttcaactctatggcgaatatgtttgatgtccccccacaaaagagccactatacattgttcctggatatgctaggacgatcaggccgctttacagaggtggcacacaccatcgaggccatgcccgtccagccagacttatcaatttacaggaccctgctggtatattgcaagttccacaatgaaccggtggttggtgaatatattgccaagaaggcactagagttggatccatcagattcagtgtcacggaatacactttcaggcatccgccgtgctcctcggatacaagatcatgacgaacagatatatttgtgggatgaagagggatgcaggcatccaagttctgtgctgccgatcaattgctga

SEQ ID NO: 220 - DNA, 261 bp, Zea mays
  Peptide Sequence Number=SeqID_41999
atggcaaggtttgaagtagtgtcaagtggtaacacaaactccaccttcgtctatgatgaaggtgtaccgatcgctggaggtgtaccgagcgtgggtgtatatgtgttgcatgtcgttggcatcgttggcgagcctggcgctgatgttgcaccactcatgtgccctagcgagcctaacacaggcaccacatcgcttgtacccgacatagatgttatgtcttcagtgccttccttttctgattcaacggtgtccgtgccttag

SEQ ID NO: 221 - DNA, 1128 bp, Zea mays
  Peptide Sequence Number=SeqID_42000
atggagctggccgcgacgcgtgtaggcggtgataattgccgtccagagcacgacgtcggtttcgggagtggcgtggagcacggcgcgtgcggagaccatggcgccgcaagcggcgtacatgtggacgagcgcggtcttgaggaccaggccgaggtgggggccccagcagccccagcggaggagctgcgcgtggagctggctgccgtggcggtgcaagcgcatggaggcgcagggcgcgagcagcttggagaaggtgtgctgggtgggtgcgcaaagtgggagcatgcacgggtagagcgcgagcgccccgtggcagtccccggcgcggaggagggcggatatcatggcggtgtaggacacggtgtctgggcacggcatttcgctgaacaccctggtggcgccgttccactcctcgcagtcggcatagaagatgaggagggagcaagcgaggacggggttggaggcggtcaggccacgacggcacgcctgggcatgtatctggtacgcgaggcggcggtcgcggcaccggagcagggcggcataggcgaactggtcggaggcagcgacggcggggtgggctcggagaacgcggcggaagacgagccagagttcgttcccctacaggaggaggaggaggaggaggaggacgcccgattcgtcgtggtgaccttctacaaattcgtgcccctctttgacccccacgccgaggtcgccagacacctcaacttcctccagggacgcgacatacatggtcgcatttacttgaatgagaagggaatcaatgctcagtacagtggccctcacaaagatgcagtggcatatgcagactgggttaagaaacatcatcagttttctgatatgcttgttcaaacctcaccagctgtaactgggcatgcctttcctagactgaaactacggtacaaaccatcacttgttcaggagaaatttttagccctctgcttcaagattcaatcccgaagcttgtatgtcttagtcacttctttgcaaattcaaaagcttatacatggtgatgaccttccacagttctgcccccagtccccaggtccctctcatgttcctacatttttattgatgatgaattaccttactgctttctgtcaaaactag

SEQ ID NO: 222 - DNA, 909 bp, Zea mays
  Peptide Sequence Number=SeqID_42001
atggcgaaggcggcgcaggggggcaacgttgtggaggtcgagagccacgcgctaggtggggaagacgatttgcgcgacatcggcgttgtgcagggcgtgagctacacgcggttggggaagaaagcttgcgcgacatcgtggggcatgagcagggacggaggagaagctgccaccgtgcgtggattagggaagacagcgggcttagaaggaggtagtttgcatcttccgttgctggaccctaacatgcgtgcgacaccattgactccatcagagtggaaggaaagacttgaagctaggacatgccttgatgtgtcctcaggcgaaacatctggaagggggcttttgctgcttgatgtgaggaatgattatgaatgggatgttgggcactttgaaggtgctcagcggcctaatgtggactgcttcagaagcacttcctttggactttcgggagagacagatcctctaaatggtgtagacaaagagaggacagatatactaatgtactgcaccggggggataagatgtgatgtgtattcaacaattcttaggaagaagggctttcggaatctgtatacactggagggaggagtgtcgaactatctcaaggtggaggggccagcagggtgggtgggaaatctctttgtctttgatggccggctctcgttgccaccagcgacattcaatgaggaagaagatgaggaggaacagcaggagaacaagaggtgctgcggttggtgtgcggaggagctgtgcggctgctgctgctccgactgcaaggtcgcccctcggctgcggccgctgctgccaggccaccagagatacttgaaatggcatgtctaccgcgacggacggacggacgatgaaaacaaactttatggttttgttgacgatgacagcagtggcctgtga

SEQ ID NO: 223 - DNA, 2421 bp, Zea mays
  Peptide Sequence Number=SeqID_42002
atggttttcgagtctgcagatgaatatagcaagaatggaatgtcatatgggcaagatggagaccaagggagctggaatgttttccagagtttcctgctaagagctgatgagaaaagagataatgacgcggacctattcgccagtgagaaaaaagcacccccagcaaggatgaaggttagcacaagcgttgatgttgattcaattctcttggtggagcaaaattctgctggggccaatgaacataatacaacaggtttcagtatggaaaatgagaggattagaccccagcagatgctgtctggtgatgaacttatgatgtatggggaaggtgaaggcatgagctttggatgtgatgacataaaggagattgaagctggaggtgtgagatacagaagaggaacaagtgatgacttcatgatatatggacaggaaaagtcaatggacagagggagttctttggatcctcttgcagaagcacagtacaagagccccaccctggttgacaaaaatgtgcacagcttggcagatgaatcgtttatgatacctcttaggtctacctcagaggataaccatgaaccagaatgtcgtactgccattgacattgatgttgagcttccctcaactgttcagaagatatcagatgctaaagctggtagtcagcttttctatgagccagctgaattgatgccggagcgtggatgtgaagacgtttcgtttggatatgatccagcaatggattataatagtcagatacagagtcaatctgccaccatggttgaagatgcacatatggaagatgcattgttgagcactgtggatgaaataaagaagccagagaaagacaagaagctaagaagttcacaggagagtttggataaacgtagaaaagatgcttcagcgaggaggttgtcatcatcaaaaggcccgctgactgatgcacagaaacgcgcacaaaacttgcgaatatataaagcggaccttcagaaggcaaagaaagagcaggaagaggaacagatcaaacggctagaaaggcttaagctagagaggcaaaagaggattgctgcaagaagcagcacttccaatgcaccaacaccacagcagcccagagtaaagccttctcccaaggtttcccccagcacctacaagagctcaaagctcagcgataccgaacttgcatcctcttcacctctcagaaaatttcctatcaaaactaccccagggactgatcctgaaaaaacagcaaaatcaagcaaactaaatgacaatactaatgcagttagtaagccaaccttgacagacatgaaggagagaagtgggaggaccgaatcatccaacgagagattgagaaaacttgctgaacctaaaaccaacagttcgactggccatactttgaattccaagtcagcaagcgtggaccgcccgcggagaaaaagcatgccacaagatagccagacaaagaaaatttcagctataatgcagcttgaccagagtaaatcagcaacactaccagaactgaaggtcaaatactcgcaagctcctgctgttgtgaaaaatgcagtagctagtagagagagaaaagaggtttcagctggagctaaatctcttcgtacaacagaaactgctagtgtaaaggaaaccaacggtaacatctcaaggatgaacagcagcgacgataatgtggtggttgagaagaccgttgtgatgctcgaagatgaggcggtcattctacattctggaagaaatgcagcaaaggaaacttgtagtgatgacaggacagagaagcccagcccagaatcggagtacatagctatcagggctccgctgtctccagttattcttccggaggctgagagatctgatgacctggggagctcatatgaggtggtgactgagtgtctaaaggatgaacctgaggagccaaccttgggcgccgtggagaaaccttaccaggccccctttgctagggtgacatcgctggagaatgcatcagacaacagtccattacctgaatcacttgcgcatgcaaatagcattaaggctcgagtgcctgagcctgtgtacacagtttcagttgagggccatgtggtaagtgaaaagcctcgaagcaaagagccaaaaggcttgaggaaacttttgaaatttggcaggaaaagccatgctgagggcgcaatggattcatcagttgacgaagcctcagcaggagatggttcgatgctgaagaatctcatttctcaagatgactctggtgcgtcttcttcaaaaggttgtgtgcacaacttgtctcttgaatcgatttctaacaaccatgacctagtggtggtggtggaatgttcactatgcttgtttactgtttcatcagcttctcggtccttctccctactgtcaccgttccgcagcaagcacaaggtgattgttctgtga

SEQ ID NO: 224 - DNA, 165 bp, Zea mays
  Peptide Sequence Number=SeqID_42003
atgtctgcacgctccgaatttcctccgtttaatccttctggcattatgtttatgggggacaacatgaagcagactatggaatctatgtctgtttccaacggagatgcaaatggcgaagatgcttctaaagcagctcacaatagcttgttccttgagactggataa

SEQ ID NO: 225 - DNA, 180 bp, Zea mays
  Peptide Sequence Number=SeqID_42004
atggagggcgaagacgtggagcatggcgtcgagccggggagttgggcgctgggccggagagcggagtgcgagcacgaggaagagggaggtgcaggggaaggtcgtgcaacctccatggaaagggaggcgggcacggggaagggggagaccggcggccacgagaggtggctcatgaactga

SEQ ID NO: 226 - DNA, 957 bp, Zea mays
  Peptide Sequence Number=SeqID_42005
atgaaggtatgcattctttataacgcactggctaatgctattttctatgacagctgcaggtgtgatttagttgtggtggcgaatggacggaaggagaagatagcctctggtctgctgaacccattcgtcgcccatctcaaggttgcacaagaacaaattgccaagggaggctattctatcacacttgagcctgacccagagattgatgcaccctggtttaccaggggcacgttggataggtttgttcgatttgtcagtacaccagaggtcctggagcgggtcacaaccatagagtctgagatattgcagatcgaggatggcattgccgtccagggcagtgacagtcttgggttgagatctgtggaatactataatgggaaattggtggactgcatggaaggtagtaaggcaagttacaatcctgatgcagatagggcacttgttccatacaaggctggtacacaaccaattccaccattgcagaatcatgatgctacacaggaggagaattcaaaggatcaattgctcagagtgctagagactcgcaaaacagtcttacgtaaagaacaggctatggcctttgcacgtgctgtagcagcaggatttgacatcgacaacttggtgtatctgatcacttttgcagagtgttttggtgcttctcgcttgatgggaagaggagagatgttgacaggatcgacatcgagggaatcaaaatcgaaaggtggggaggagccactaaggggaaacattctcattgaaaacaacatgacgagagatgatgatgcagtggatgagaaagtcaaggcatcggtatcccttgtgatccgaggagtaatcgaggaagagacatcgagtggaacaaggcacaagtttgtgggaggcagtggcagatgtgttgggatagcaagcacacccgatgacgcgaaggtgctcgtaggagggtgccaaagagggtga

SEQ ID NO: 227 - DNA, 792 bp, Zea mays
  Peptide Sequence Number=SeqID_42006
atgagcttcacgacggcgagctgggtacagcgcgagcaggggctcgacgacgggcacgtggcgttgctgcgggtttctggcgcgatgcagggcgcgcaggtctgcgtcctggcgcgggcgtcgggctgggcgctgggcgcgagcgcgctggcggcgcggcggcctgcgggatggcacgcgcggctgggcagttcggcgtgcaggggagaaggcagggagaagaaacggcagcacgtgagcacaggaatgggaggtggcctcaacgaacagggaacatggcagagggatgaacgtcgacgagctgggttcgacgggcagggaacgacacgattgttggtgagcgttcgggcggagctccggctgggggacacgaacggtgagtacgaactccgccgagtctccacggatggcgaacgacgtacggctgcggacggtccggcgatgagcttcacgacggcgagctgggtaaagcgcgagcaggggctcgacgacgggcacgtggcgttgctgcgggttcctggcgcgatgcagggcgcgcgggtctgcgtcctggcgcgggcgtcgggctgggcgctgggcgcgggcgcgctggcggcgcggcggcctgcgggatggcacgcgcggctgggcagttcggcgtgcaggggagaaggcagggagaagaaacggcggcacgtgagcacaggaatgggaggtggcctcaacgaacagggaacatggcggaggttgaagataagtttccctgacgaatgggccccacgaggcattcacacaaagatgaagcatgcacag

SEQ ID NO: 228 - DNA, 207 bp, Zea mays
  Peptide Sequence Number=SeqID_42007
atgaccgaagagcgccaacccccatggggtcgcgctcctccaacagcagcaagacgaaggcaacatgggtgctccccatccgggggctcggaagggactgggaaaggggatattttgaaaaggatccttctcggtgaaggaaacgggcccccgagccctcctactcatcaggggttcgaaggctggccccatggaagggttcgttag

SEQ ID NO: 229 - DNA, 315 bp, Zea mays
  Peptide Sequence Number=SeqID_42008
atgcagattagtgcctctaagggcaccaaggcagagtttctcgtctacagcaacaagatgtcacatgaggccccgtccatctatgatcagcctccagagtacattccagaggcttcatgtggcatgagcaccgtcgacatgcaagagcagctcgcaaaatttatgaaggaccgtttcagtatcctctcaaagcgaaaggtgatcgcatatgccaaacaacgccccgatgagttcaataggatgacactgtcatctaaatttaagtgtctaagctcgcatttgattggtacacctccctccatcccgggtccataa

SEQ ID NO: 230 - DNA, 402 bp, Zea mays
  Peptide Sequence Number=SeqID_42009
atggcgtccggggaggcgaggctggggatggcgtcggggaggtgctctcgagggtggacgttggcgtcgcggggagcaggggcatcagccgtcgggggagatgctgccgaggccagggttggcgacgtcgcgggatcgttggggagaatcgtctggcctctagaggccagggttgtttccaactggaaaaaggctgccctagatgaaagcccgtcggatgatgggcttccaaacaaacagacggataaatccaagaaaagtgtccgtgtgaactttcttcctaggaaaaagaccgggaaacctatgagtttttgggctgccaaactagcccttacttctagttatagctaccaaccgaaactaaaggtctcttctaagccagcttacggtgctaaccattag

SEQ ID NO: 231 - DNA, 1764 bp, Zea mays
  Peptide Sequence Number=SeqID_42010
atggggatgataactgctgttaccggggggggccaagcagacgcagacgcaggccccgttgtttctgcttttccaaatacaccaagtcataatgatgatgctttcgagtctctatggaacgtgccatctcattctaatcctcaggaggacgacgtctccgactgggagttaggactcgttggttcgtcaagctcgccggtcatcagggtcagaaccagcgcctcatcccctttcccccctgatacgacgcctcctctcccccttctgggcagcgacgccgtggggagccgccgccgcgcgctccgctcctccctgcacctcatccccttcccctgctccccctcacacgacgtgtggcggtccgaggatcggccctggcaccagcgcccccggtgcctggagcagtgcagggaggagcgggagaagcggcaagagcggagcaggcacgaggccgacgaccgcagcggcgagggctcgtcggaggatgagcgcgagcacgagcaggagaaggaggagaagcagaaggaccggcgaccgtacgtgttcgaccggcgcagcttccgtcgcgtggtccggagcgagcaggggtccctgagggtgctccggccgttcgacgaggtgtccaggctcctccgcggcatccgggactaccgcgtggcggtcctggaggcgaacccgcgctcgttcgtggtgcccagccacaccaacgtgcactgcatctgctacgtggcagaaggcgagggagtggtgacgacgatcgagaacggcgagaggcggtcgtacaccatcaagcaaggccacatcttcgtggcgtcggccggggcggtcacctacctggccaacaccgacggccagaagaaactggtcatcgccaagatcctccataccatctctgtgcctggcgagttccagttcttcttcggccccggcgggaggaacccagaatcgttcctgtcgagcttcagcaagagcatccagagagctgcgtacaaggataaggggatcatcgtgcgcgccacggaggagcagacccacgagctgcggcgccacgcttcggagggcggccacggcccgcactggcccttgccgtcgttcggcgagtcgcgcggcccctacagcctcctagaccagcggcccagcatcgccaaccagcacgggcagctctacgaggccgacgcgcgcagcttccacgacctcgccgagtacgacgtcagcgtctccttcgccaacatcaccacggggtccatgagcgcgccattgttcaacacccgttcattcaagatcgcctacgtgccgaacggcaagggctacgccgagatcgtgtgcccgcaccgccagtcgcagggcggcgagagcgagcgcgagcgcgacaagggcaggaggagcgaagaagaatcgtctgaggagcaggaggaagccgggaacgaaaaggtgttcctggccggcgccgacaacgtgctacagaagctcgaccgggtcgccaaggcgctgtcgttcgccgccaaggcggaggaggtggacgaggtgctcggctcgcggcacgagaaggggttccttcctggccccgaggagagcggcggccacgaggagcgggagcaggaggaggaggaacgcgaagaacgccacggcggccgtggggtgagggaacgccacagacgtgaggagcgggagaaagaggaggaggaacgcgaaggacgccacggccgcgggcgccgcgaggaggtggtggagacgctcatgaggatggtgaccgccaggatgtga

SEQ ID NO: 232 - DNA, 345 bp, Zea mays
  Peptide Sequence Number=SeqID_42011
atggcgccgaggtacgtgctgcgttggcacaaacggacgtcgtggcgccgacgtggtaccgagctcggcgccatgaatcttggcgccgagctccgttctgtacagaaaacttgtctagctcagttggtaaaatacaaggctcttaaacttgtggtcgtgggttcgagccccacggaccaaaatgcaaaaaattcgggtactcatgcaaccaagccacaaacgccaggccaagcggagtcccttgcatgtgcgcaaccaggttcaaacaagggcgctgtcatcccatggaccaggttggatttcaactgggcaaccaaaatcgaaatccgtattctccggatctga

SEQ ID NO: 233 - DNA, 1083 bp, Zea mays
  Peptide Sequence Number=SeqID_42012
atggccgtgtccggcgagaagccgccaccgccaccgccaccggccacggcgtccggcggaacggcaaggaagctcatcctagcgctgcttacatgtctgtcgtcggcgctgctgtacaggcagattcagccgctaccgcccaagatccccggcacgccgggcggcccgccggtgacggcgaccaggacgaggctcagcgacggcagatattggatgtgtttcgctgaattggtgaaactggtgtgggtgcaggagcttgcgcaagagctgggcgtttacatgttgtccttcgatcgccccgggtacgccgagagcgacccgcacccggccaggaccgaggagagcatcgccctcgacatcgccgagctcgccgacaacctgcagctgggtcgcaagttctaccttgctggcttctccatgggcggcgagatcatgtggagctgcctcaagtacatcccacacaggctctccggcgtggccattctcggccccgtaggcaactactggtggcccggcttgccgtcgaacgtgtcgcgggacgcctggtaccagcagctccctcgggaccagtgggcggtctgggtcgcgcatcacctgccgtggctcacctactggtggaacacccagaagctcttcccggcctccagcgtcatcgcctacaaccctgccctcctgtcccaagaggacgagatgctcatggccaagtttggctatagagcctacatgccgcagatcaggcaacagggggagcacgagtgcctgcaccgggacatgatggtcgggttcggcaagtggagctggagcccgctgcagctggagaacccgttcgccgacgccgacgccgacgatggccagggggcggggaaggtgcacctgtggcacggcgccgaggacctcatcgtgccggtcagcctgtccaggtacatcagccagaagctgccgtgggtcgtctaccacgagctccccaagtcgggacatctcttcccgatcgccgaggggatggctgacatcattgtcaagtccctgctgctcggagacgatcatctgtcgtcgtcggcctcacagcctcctcattctccatga

SEQ ID NO: 234 - DNA, 534 bp, Zea mays
  Peptide Sequence Number=SeqID_42013
atggcgtcgtcattcagcgacgacgtcgaagcgctgccggaggctggggaggaggtcgatcagcaggcaaaaggagcatgcgccgtgacggaagagaacgaggcggcgctgcaggagcagcatgatgatgacaaggcgcccgtgcccgatgagcacaaggagacgatgtcgtcggcgccagagcaagctacagaggcaccggcgccggaggatcaacacggggacgagaagggccaggtggtggtggagcccaaggcggcggcggatgatcaggagagcacgcgcgagaggctgaagcggcacaggcgggagatggcggggagggtgtgggtcccggagatgtgggggcaggagaagctgctcaaggactgggtggactatgccgtcttcgaccgccccttggtggcgacggggctgctcacagcgcgccgagcgctcattgccgagtgctgcacgcgccgcccggaccgagcggcggcggcgtcgtcgtccaccagctccaacccgctccgggtgcggaacggctgctcctga

SEQ ID NO: 235 - DNA, 1050 bp, Zea mays
  Peptide Sequence Number=SeqID_42014
atggcagagctgggcgcacgacggtcatgggaaaccaggagaaggagaccgagcgagctggagaccgttagggcgctcggccatagacaggggctcgcggtgctggacactaggaagagcgcccgcaggaagaagaagaggagggagatgggcatgggcaaggccgacgagcagaggagagagggatggacttggcacgagagaggagcaaacaccagggagctcagcgcgcaagagaggcaagccaggcgtgcgcgctgcgcagaggagggagaggaaggagatgggcgcgcggagcacgcggcgaaatccgagctggccgagcgcatggcagggagctgggggataatcgtggcgcgagcaggaaccggctacggcaagcatagggacacggatgcgcgcggccaacaggagagctcgagggagctcgactgcgcggtgaccagggagcgattgaccggacgagcaaggagccgaggcagggagggagacgcgctggagaagacgggagggcgccgaaggagctgcacagcagggatcgagctccgcggagcacgagcgagcagagagagacgcgtagagggagacgcgcacgcatggatccggagccggccacggcgagtaggggagagagccaagggatgctcgcgcctagaggctgacgaccatggatccagagtaccccgcgaccactatgggagacgagcagaaaaacttgcgcgggctggaagagaaagggagggcgcggtcatggtagagctgggcatgcggcggccatgggaaaccaggagaaggagaccgagcgagctggagaccgggagggcgctcgaccatggacaggggctcgcggcgctggacaccaggaagagcgcccgcaggaagaagaagagggagatgggcatgggcgtggccgacgagcagaggggagagggaggggtttggcacgggagaggagcaaacaccagggagctcagcgtgcaagagaggcaagtcaggcgcgcgcgctacgcagaggagggagaggaaggagatgggcgcgcggtgtgctag

SEQ ID NO: 236 - DNA, 672 bp, Zea mays
  Peptide Sequence Number=SeqID_42015
atgcgggcgagcagagcaggctggacgccgggcatcacgagcgagctgaaaaaggattcggcgcgggagctcgacgcgtgtagggaaacttcacggtgcgaagtcacagcaaaggatgacggagcgcgcgcgacacagggaaaagctccggccatgtgcgcggcgagcgcgaaccgatggagcaacatcggccatccatggagaagcactgggtgtcaaactaagaagcacgcggtgaaatccgagctggccgagcgcatggcagggagatgggggataatcgcggcgcgagtaggaaccggtcacgacgagcatagggacacggctgtgcgtggccaactggagagctcgagggagactgcgcggcgaccagggagcgattcaccagacgaacaaggagccgaggcagggagggagacgcgctggagaagacgggagggcgccgaaggagttgcgcagcagggatcgagctacgcggagcgcaagcgagcagagagagacgcgcatgcgtggtatggatcaatccgagctagagctgcgcagcggccaacagagaaaagcaggggcaagcaggacgtgcaggggcgagctcggcgaagcgagcctgtgcgtgagcgaacagagggagaaaggacggagctgagcgctggcgggatggtgtactggatctag

SEQ ID NO: 237 - DNA, 171 bp, Zea mays
  Peptide Sequence Number=SeqID_42016
atggcgagagtagcgtgtaccctccatggcggcaagaggctggactgtggtgtatctgtgctctcgataaaatggccagaagatggactgtcattcaccactaatgacagaatcattaccaccagtgacattggcagaactttaagatctattttaagtaggatcccgtga

SEQ ID NO: 238 - DNA, 369 bp, Zea mays
  Peptide Sequence Number=SeqID_42017
atgaacccagccgcgctcgcgtggcggcacttttctccctccaacctcccggcgacatccatccagtcgtccaaggttcccaccgcacccgaggctgccccggccatggcaaatcgacgacgcgcccacagcagatcattggggctcgctgcgtggacattaatggcgagccaggtggtggtctcgtgcgaccgctggaaggaaaggagcactgaacctgcgcctcgcctcggactcgcgcttcatcgttcgccacccctgcctccttcaacggtgagaatttccccccacctccatgtcaatggggccgtgacacttgctgttggcgtagtcttgcgtatttcaggagagggtagcggcataggatag

SEQ ID NO: 239 - DNA, 369 bp, Zea mays
  Peptide Sequence Number=SeqID_42018
atgaacccagccgcgctcgcgtggcggcacttttcttcctccaacctcccagcgacatccatctggccgtccaaggttcccaccacgcccgaggctgccccagccatggcaaatcgacgacgcgcccacagcagatcatcagggctcgctgcacggacattaatggccagccaggtggtggtttcgcgcgaccgctggaaggagaggagcactgaacctgcgcctcgcctcggacccgcgcttcatcgtcggccacccctgcctccttcaacggtgagaatttccacccttctccaaatcaacggtgctgtgacgcttgctgttggcgtagtcttgcgtattccaggagagggtagcggcatagggtag

SEQ ID NO: 240 - DNA, 267 bp, Zea mays
  Peptide Sequence Number=SeqID_42019
atggagaggtacgaggtgatcaaggacataggatcgggcaacttcggggtggccaagctggtccgggacgtcaggaccaaggagctcttcgccgtcaagttcatcgagcgggggatgaaggtgcgtccggcctttgaatctgttctcccccttccctacgggatcccttctcgcgtggaaaaggttcgatcttggagtgcgttcgatcggttaatgcgaattatggcagctggatcaagagatggcatgaacgctgcgctgcgctag

SEQ ID NO: 241 - DNA, 480 bp, Zea mays
  Peptide Sequence Number=SeqID_42020
atgaacggacgcattgaagctcaacgcaggggaaacggatgccgcgaggtcgcgcggtttgggcgctgcgcgcggtcggtgtcgcggtgctcggcgcctgggctgcgcaaggtggggtcgggcgcttggtgtcgcggtttggtgggcgcgggcggctcaggtgcgcgcgacctacgcgggctccggggcggctcgagcacaggggctcggccggcgttgcggctcgggcagggtggccgcggggtgctcggtgcaggtgttacacaatgcaaggagaagaccggggataagcaagagcaagagctcaagccaacaaacaaaatctccaacacctacatcaacaagacgaacaaaaaggccgctacaccatatttgatcaagaagaaaaagaatggaaaggtggtagcaattaaggctaacaagcaagccgacaaaggaaagcgggccaaattcatctgggtgtcaaaggaaattatctga

SEQ ID NO: 242 - DNA, 318 bp, Zea mays
  Peptide Sequence Number=SeqID_42021
atggggcgaggccatcgggtcgcggggcgagtcgccgccgaggcgtggacgcacaggggcgcgggggcaagccaccgggaggcgcgggcgcgcaaggccaccggggacgccggggcgtgggagcggggccaccaggccaccggggcacgggcgcgcgggggcgtgggcgcgggggccgccggggtaggggcgccgacggggagcagggggcacgcgacggggagaaagaaggggagtctcaagaatctgcattggcttctctatataggtcaagtcctcctggacctccaggccttccactggcaactgctcttctag

SEQ ID NO: 243 - DNA, 363 bp, Zea mays
  Peptide Sequence Number=SeqID_42022
atggcaaagcttctcgtgctctacacggcgtcgtactgccactacgacttcctaatctcccctcaccgcgccgcagtaacccttccccttcgtttcccccttctagccgctgttgaccatccgctgctctgttgccatgttctcggagcactgcccaggagtgttcgccgacgcctgggaaggttgtccgcggccgcaattgataggagagcgccggcgggtaatcgtggtttggcgctcagaatcgctaggaagggttcactggcaagctctgccgccggggagttgtgtggcgccgccgcgtccacgctcgggatgggaacgatgtcgctcggccgttggatggccagcggacgacgatga

SEQ ID NO: 244 - DNA, 291 bp, Zea mays
  Peptide Sequence Number=SeqID_42023
atggctcgtattaggtgcactgcacgtaagtctgtgatccccattttcccttcttgcctagcagagcatccactgcgtcgtatggtgccagcaggaggagtctgggaggccgcctaccctgcacctcaaccagagatgccccctgcaccaccactgggcatcccggctgctggaggagaccctgacggagatggagacgacgacgacgctggaggcagttcgagccacggcacggagctcttggaggagcaggagcaagagggatggatcgcttgtcacacccggttttaa

SEQ ID NO: 245 - DNA, 351 bp, Zea mays
  Peptide Sequence Number=SeqID_42024
atggctgctgtgcctccccagtcaagctcctcagtgcccatgttcccctctgtttctcgtgctcggtctccatctcccttgctatgcgtgtgtgcttcattgtttggttgtcgtcacgccgagcccggattccagcgccccttcatgctctggttttctctctttgcgtcgatgtgcaaacgccttcgtgctcgcatcccttgggcccgtttcgccttcgcacgacaccggctgcgagttgaatttagtttcgcagagttactcggattaagtccgatcggtgttgagagttcgtcatgtggtgtgtggcgtgaggatacagaaggaaaggtcgtcgccggttatggataa

SEQ ID NO: 246 - DNA, 717 bp, Zea mays
  Peptide Sequence Number=SeqID_42025
atggagcttggggcggaagggggctcgccacggcctaggagatggacggtcgggcaccatggattgaagaaaagagaaggcaccggcagagagcagaagggggaagatgaagccgaggggctgcacagcggccaggcgaacgccggccgagccagcgttggggcgagtgctggccataggaaggatgccggccaggacgagcttgagggcacgacggctgagcctcccgggcgaggatgtggagaaccgacgcggctgctagttggcggtggtcggctaggcacccatgaccgggcagggaggagagcagcgtgcttgagggagacaagttggaggggcgcggccatggcaagggagatgggagggactcggccagccctagggaaggagatgcgggaggccgaggaacaaggacgcgggatccgtggccgggcagaacccgccggggcactggccagaggactgagcgatgcggccagggcggggcgagagatggcgcggccatggataaaagcaagagcaaccagagctgcgcgacgattagagcttacggcgatggggcgcgcgccggcgagctggagcaggagagaggaaggtctggcgtgcggcgagcttgaggaagacaaagcgcgcaaagaatatcagggaggagcgcgcggctggaaaaggggctgggcgcagggaggactggagggagctcagcacgcaacgcagtga

SEQ ID NO: 247 - DNA, 186 bp, Zea mays
  Peptide Sequence Number=SeqID_42026
atgggggtgtcaactacgccgtcgcgattccttggccccgttggagtatggggcgcgggatcatgctcatggtacttgtcggtatctatgggatggatgctcggaagatttacggtcggtgaggaagagtccctgcgtttcctcagtatcaacccgcagtcctactgctggctctctgagtcttag

SEQ ID NO: 248 - DNA, 651 bp, Zea mays
  Peptide Sequence Number=SeqID_42027
atggatgacggcaaggggcgcggcggcaggaagggcgcgcggccaggattccagcgcgacacttcgaagacggctcggtctaagcagaagctagccaggcgcgcggagcgagcagagagcaggcccggcgcgcgacgcagaggaaaatcgagcagaggagcaccgagctggagctccgcggcgctggagaaagagagagcgcgccagccatggaagcaggagcgcgcggagaagaagccggctgcgcgtggctggaggagcagagtgcgagcaggcacctgggcgcgcggcacggagggaccgagcagaacgcggcgagctgagaagccgcggcgccgggaagaagaaatccgagctgggcgcgacgagctggagaaggactcagggagagggagagttcgacagggaggagtgggaggcggcggcgtccatgggaaggggctgcaggaacgcgtagggaagctggatgagggagctgcgcggaggagaagccagggaggagcggaggagcggcttgacgccatggcttggagagagagaagacgaggaggtggagataaatgcaagaatcggccaggagatgaacatatcgcatgggaaaagatcaagggccacgggcggccaggggataggaacgtgggatttttttag

SEQ ID NO: 249 - DNA, 1323 bp, Zea mays
  Peptide Sequence Number=SeqID_42028
atgccgaagccgtggaggccggtgctggcgtcggccaccaagtgctgcgcggcggaggacgcggcggtggcgcccgacggtctggcgcggtgccggccgcagcagtcggagctgtcgcggcggctggcgtccttcaggcgcctctcgtcgctggccaacagcccggtgtccgccaccgccaccacggtggcggacaaggacggcggtagcgtgaagcaggccgcctgcggggagatggcgggcccgctgcagctgcactcgttcggcctgggcgagctccgcggcgtcacgcacgacttctccagcaacttcctgctcggggagggcggcttcggcgccgtgtacaagggcttcgtggacgccggcatgcgcccgggcctcgacgcccagcccgtcgccgtgaagcagctcaacgccgcggggttccagggccaccgggagtggctcgccgaggtcatcttattgggccagttccgccacccgcacctggtcaggctgctgggctactgctgcgaggacgaggagcgcctgctcgtctacgagttcatgccgcgcggcagcctcgagaaccacctcttcaggagtaggatctcgacgacgacgctgccgtggggcacccggctgaaggtggccatcggcgccgccaaggggctggctttcctccacgccgccaacacgcccgtcatctaccgggacttcaaggcctccaacatcttgctcgactcggacttcactgcgaagctgtcggacttcgggctggccaagatgggccccgagggcgaggacacgcacgtgacgacgcgcgtgatgggcacccacgggtacgcggcgccggagtacgtgcagacgggccacctgaacgtgaagagcgacgtgtacagcttcggcgtggtgctgctggagctcctgacggggcggcgcgccatggagcacgtccgggcccgcagcgcgcacgcggagcagcaggtgaagctggtggactggacccggccctacctcagcggcggcagccgcaggctgcgctgcatcgtggaccagaggctggcgggccactactccgtcaagggcgcgcgcgccgtggcgcagctggcggtgcagtgcacggcgcagcagccgcgggacaggccgcgcatggcggccgtcgtcgaggcgctcgagaagctgcaggggctcaaggacatggccgtcgccgtcggcctctggcccgccggcgccgccaccgcgactggcgccggcaaccggagcgccaaggtcgttcgtgccgaggtcaagggcgccggcgcagcgtcgcggcggaggagctcgtcgtccaagctggcttga

SEQ ID NO: 250 - DNA, 183 bp, Zea mays
  Peptide Sequence Number=SeqID_42029
atggggtgggctttggcggcgtctgccctgctactaccagtgggtggcggggctggaggcttgttaggtgggggttgccctagtagtggtgggttcgtcctggtgaacctagccagagacacgggcattttcggcggccagaagccaccaaaaataaggcctttgcccaaccagaaggggtga

SEQ ID NO: 251 - DNA, 456 bp, Zea mays
  Peptide Sequence Number=SeqID_42030
atggtgcaggctttatctggccgggtgacctcatcccgacacgggcgcagcggactccggcggcgcgggcgtctctggcgcgtccaccggtggcgcacggctccggccaagcgcgacagccctagctcgtacctcagctcgggagcgcgaccgtgggcgtgctgcgagcgggcgagaggggccgccacgtcgccagggagccggagaggggcctccgcgccgggaatgggtcccgcgcaaacggacagggggcgcggctgcgacgggaagaaggccgtcaacggcgacggcgggcagggccgcgcccgcgacagggaggacgcccgcgcgcacgttggttgggccgggtcgagggttgcgccagaggcggagaagacggcagcgccgacgagatccatgaggatgaggagctggcggcctggtcctcatcctcctcagacatcgcgcgtgggctag

SEQ ID NO: 252 - DNA, 654 bp, Zea mays
  Peptide Sequence Number=SeqID_42031
atgaccagcgcagacgcgggctatcgtcttctcggagtccacaccggtctttactccagccgcaatattcgcgccctcacgacgctgcgactgctgagggatatcaacccgccggctcctatcttcggcttctactccagtctcatcgtgtgcggtgccacaagaccagtatatgctctagagccacatgacgtaggacgctatttgcaagctgaaatcgacgtaggcggcgaaatcgcagtagcaaagactgctgggccagtagaccctgatgctgggttggttgattatgtggagacgctcgtaaggaaacctgaaactgaattcaatgttgttgtgcttcaatccaatggcgtcgatcagccaaaagagtcggttcatgtactaaatgtcgggaggctgcggatgaggcttactaaagggaagtcggtagtcgccaaggaattctattcctcatcgatgcagttatgtggtgtgagaggcggaggcgaagcagcctcgcaggcgatgttttggcgacccagaaacgacctcagcttggtgctagccttcgagagcactcgagaacgcaacgcagccatcatgctcgctcggcgtttcgctgtagattgcaacatcatccttgctgggccaggcgacaaaactccctggtga

SEQ ID NO: 253 - DNA, 696 bp, Zea mays
  Peptide Sequence Number=SeqID_42032
atgacgaaggcagcaactatttatgggagcaagacacagagcgatgccttgcggccagggccattgcgtccagcaaatattatcagaaataaatttcccacatacaagaatggttcaaatggtatagtaatcaagctggctgatggtcccgaaataccacctctcaaggagatagttgcaaaggagactgcagatctacttgatcgtcgtcagcgtctctctgtccgtgaacttgcgatgaagtttgagaagggtctcagcactgccacattgttgtcgaatgaggtggagatcctcacggttcagctctccaaaagagaagctgagttggttcaacaaaaagaagaggtcacaaaattagcaaaatcattaaagcaggcttctgaagatgcaaagagaattgttgaagaagaaagagctaatgctcatacagaaatagaaactgctaagggtgctgtccaaagagttcagcaagcagttcaggagcatgagaagatgtcccaaaatactgggaagcaaaagcaagcaatggatctggaaaatgaaatacgaattttacgtaacacatttgctgagaagtctaaggattgtgttagtcttttgaaagagcagcacaaccgccctccacctcacactccgctgccgctgctcccctccctcccgcttgaccgcctcagaccacagctgcgacattaa

SEQ ID NO: 254 - DNA, 1539 bp, Zea mays
  Peptide Sequence Number=SeqID_42033
atggatgtggtctcgtggtttagccaggtctcggtggtggtaggcgttctggccgtgtgctggaccgtggtatggcagaacctgcagcacatccacctgcagcagttcttcgcgcgcagcttcaaccgtcgcgcgcggcggctcgccgcggtggtcgacccttacctgtcggtgaccttcgaggagtacgagggcgggcgcatcaagagcagcgacgccttcgacgagatcaagtcctacctcaccacggcgagcacgcgcgacgtgcgccacctcagggccgagtctggcggcggcggccgccgggacgccgccgccaccgacagggacaagctcgtgttcagcatggccaagggcgaggaggtcgccgacacattccggggcgccatggtctggtggtcggccgccggcgtgccgccgcccagtgacaccgtgccgtggagccgtgcctcacgcgccgagcgccggttcttccggctcgagttccacgagggccaccgcgacctggtgctcaacgagtacctcccgtacgtgcgcaggcagggccgcgccgtcatggccaagaaccgccagcgaagactctacacgaacatcctcagggaaggctttgacgacggtttctaccgagacgtttggacgcatgtcccgttcgagcaccccaagacgttcgacaagctggccatggacccggcgaagaagaaggacgtcatcgacgacctcgacatgttcaagcagagcaaggactactacaaccgcgtggggaagccgtggaagcgggggtatctcctgtacgggccgccgggcaccggcaagtccaccatggtcgccgcgatggccaaccacctcgggtacgacgtctacgacttcgagctcacgtcggtgaagaccaacaccgacctccggaagctgctcatagagaccaagagcaagtccatcatggtgttcgaggacatcgactgctcgctccaagtgaccggcaagcgcaaaagcaaggaggaggaggagggttcgaaagacgggaacggggacgacccttatgcggcgaaacagaaggaggaggaggaggacgccaagagcagcagcaaggtcactctgtcgggcctgctcaacttcatcgacggcatctggtcggcgtgcggcgaggagcggctcgtcgtgttcaccaccaaccacgtcgacaagctggacccggcgctgatccggacggggcggatggacaaaaagatcgagatgtcctactgcgacttcgagtccttcaagttcctggcccggatgcacctccgcgacgacgtcgtcgaggcacacggggcgcagtgcgaccgtgttagggctttgctccaggaagtgaacatggtgcccgtcgacgtcggcgagcacctcacgcccaggagccccgacgaattcgaagacgctggaccgtgcctcgcgaggctggtcaccgcgttggagaaggccaagaaggaggctgctatactaccgaagccacaggcccaaccggatgtcagcggcatcgttgtggacgatgatagtaataactag

SEQ ID NO: 255 - DNA, 432 bp, Zea mays
  Peptide Sequence Number=SeqID_42034
atgatggtctccgcctcagttgctgccacctcgttctccatcctgcttcttttctctctcccctcatgcatcagcctccgcgccacccaattctcggtagagaacatgggagcaggcgcatcctccccgtattcgtccgacaccagccccgacaccgaccaacgcagtggctattgcacgtccacgagaatgtttcacagcatgcgcacaccatcgttttcaccatcgtcggatgtggcattcgccctgttcttcctccccaacttactgcccccacccacggtcacagctgtgagccgaccgacgctcatcgacacggatgcccatgtcttcgtcgtgtccatcttcagcaacgaacatgtatgctcgccccttcccttcatgctctacgaatccttggaattgggggaggcaagggatgagggtccctga

SEQ ID NO: 256 - DNA, 610 bp, Zea mays
  Peptide Sequence Number=SeqID_42035
aggcactcgcgctataattcaccggactgtccggtgtacaccggacagtgtccggtgctcctctgaagagctgcctcaggaactcgccagcctcgggaaatcagaacggctgctccgctataattcaccggacatgtccggtgtacaccggactgtccggtgcaactccggagcaacggctatttcggcgccaacggctacctgcgacgcattaaatgcgcgcgctgcgcgcgtagaagtcaggcgtgcccatactggcgcaccggacactcaacaaaacgccttccgacaaggtttctactgtccgacggcggtggccgacgccactagaattgtccgcacctgcgaagggtgtcagttctacgcgaggcagacccacctgcctgctcaggctctgcagacgaaacccatcacctggctttttgctgtgtggggtctggaccccgtcggccccttgcagaaggcacccgggggctacacccaccattgggaagggttgttcgtcatcgccaaagttctgaggcccggaacgaacaagctggctgacagtcagggcgaggtctacaccaacacttggaacatccaacagctacgtcgcttctacccttaa

SEQ ID NO: 257 - DNA, 432 bp, Zea mays
  Peptide Sequence Number=SeqID_42036
atgagtatggaattactcatcaagtcttacccgactaaagaaaagactctcaagggtatgctggttgtaagggagtcaagagcaatactaagcatagtaaaaccttttgtaaaaacagggtttcaaggaagaaaaagaaaaagaaaaacttgcaacagtactggacccattctagcccagacggcccaacaacacagggaatcagggcgcgcccacgcccgcggtggaaactttgcagaaaggccctcggggttttcactaactgggaacggattccttcactgttactcagagtcactaacagtttgcactaaggcccttgaagttctattcctttaccgactgaagtccacgacggcgagcagtgcaggtgaagcgtccccaatcctttgggactcaaatgtgatacaattactagtcccaggaggctag

SEQ ID NO: 258 - DNA, 192 bp, Zea mays
  Peptide Sequence Number=SeqID_42037
atggcggggtcaagggagatggaccgagggaaatggatttggcccaagtctggacggagaattatatccattaccatggtttacaaatttgggtattacatatgcaaaacagagtctttgataattgagaaaccttaccttgactcccttacaaccagcatacccttgagagtcttttctttagtcgggtga

SEQ ID NO: 259 - DNA, 861 bp, Zea mays
  Peptide Sequence Number=SeqID_42038
atggcgcctcctgttgacgtggctggtccacgccctaggttgggcgatgtggaagctcctccgaagccgaggtcgagtctgtcttcagtggccgaggtcgagtccgagcccctgggtcgggcgaggcggagaccgtcggctgaggccagggcggagtccgagccctggggtcgggcgaagcggagttcgtcgtcttttggggctgagcccaagtccgagccctgggtcgggcggagcggagtttgtcgtcttctgggacttagcccgagtccgagccctgggtcgggcagagcggagttcatcgtcttctgggacttagcccgagtccgagccctgggtcgggcggagcggatcggagcggcgcaggcggcgctgtctttctgtcaggtcggtcagtggagcggcgaagtgacggtgctttatgctgatgggggttaccagctgagaattaggagccttgagggtacccctaattatggtccccgacagtgcctgatgactaacgatgtacaacggaacttctaccggcagcccagatgggtcgagcgcgagggcgagcgcgaaggggggagagcgaggcggccggagaccggcgtgagagaggtgggaatcccgcggccttcgtgttcgtcccgcgcccaggtcggggtgatgatggcgcctcctgttgacgtggctggcctgcgccctaggttgggcgatgtggaagctcctccgaggccgaggtcgagtctgtcttccgtggccgaggccgagtccgagcccctaggtcgggcgaggcggaggccgtcggctgaggccagggcggagtccgagccctggggtcgggcgaagcggagttcgtcgtcttccgggacttag

SEQ ID NO: 260 - DNA, 2652 bp, Zea mays
  Peptide Sequence Number=SeqID_42039
atgcctccatggggcgaccaagcagctgctcctaggggtagcacaacaaggggatcagcccaacagcccaatgcccccatgcatggtggaaccctagagcttcacccctttttagcaccagcattccgccgcacgacctcactcaccacaggtcgcattgtagctgctgctgttttcccagtaatttcagctctaattccaggtgtcaacattcaaggtatcaaggaacgcaaacctccagattttgttacctcaaggagaagatacatgaatagaagcatttgccaccacctccttgcccactgcaaaaagctaagagagctccagagaatccacgctctggctgttacccatggtctccaccccaaccatcagtctgtttcctgcaaaatcttccgctgctacgctgattttggccatgtagctgatgctcgcaagctgttcgatgagatcccacaccctgaccttatcttctttactagcctcatgtccctccatctcaagttagatcaccaacgcgaagctatatccttgtttgctcgtgttgttgccgctggccaccaccttgatggctttgcggttgttggtgccctgtctgcctctagtggtgctggtgatctagtggttggtagggcagtccatggccttatttttcggcttggattggatcacgaggtcgtcgttggcaatgcattaatagatatgtatagccagtgtggggagtttgagtctgcggtaaaggtgtttgataggatgtttctgaaagatgaggtcacatggggtagcatgctgcatggtcatatcaaatgtgctggtctggattctgcactgtcgttctttgatctggttcctgtgaggagtgcagttgcttggacaacactgataactggtcatgtgcaaggcaggcagcctgtacgggctctagagctttttggtaggatggtactggagggccatcgccctacccatgttacaatcgtaggtgtactctcagcttgtgctgacattggtgctctggatctagggagtgtcattcatgggtatggaagcaaatgcaatgccagctcgaatataattgttagcaatgctctgatggatatgtatgcaaagagtgggcgcattgagatgtcattttctgtgttccaagaaatccagtcaaaggatttttttacatggacgactatgatctcatgctgtacagtccagggagatgggaggaaagctcttgagctctttcaggacatgcttagagctggaatagttccaaacagtgtaacctttgtttctgttttgtcagcatgcagccatgctggcttgatagaagaaggtagagaattgttcaacagaatgcgtcaagtatacaaaattgatccccgacttgagcactatggttgcatgattgatctgttaggacggggaggattactagaggaagcagaagatctaatagctgatatgaatctggtgcctgatattgttatatggaggtcacttcttagtgcatgtctggttcatggcaataataggctggctgagattgctggaaaggaaattataaagatagagcctggagatgatggagtttatgtgctactttggaacatgtatgcatcatcaaataaatggagagaagctcaagagttgaggcagcaaatgttgactcttgaaatcttcaaaaaaccagggtgtagttggatagaacttgatggtgttgtccatgaattcttggtagaggacaagacacatgatgatcgaagggaaatttatgaaaccttggaatacatgacaaggcagctcaagacacatatcagattatcctcatgggagcaacatgttgtcaggtcaaagaaatgcctaattcaagctcacatggttgcacatcataaggatgaacttgataaatcagaaatatacaactcagatggggaaaagattgttcatgagcaggaacataggtgccaagagtgtggccgttgtttccagaaaccagctcatctgaagcagcacatgcaaagtcactcacatgaggaggacggctgtaacaaggttttcaggtattcatcaaagctgaagaaacatgaggaatctcatgttaaattggactatgtggaggtagtgtgctgtgagccaggttgcatgaagatgttcagaaatgttgaatatctgagggctcataaccaatcttgccatcagtatgttcagtgtgagatatgtggagaaaagcacctgaagaagaacatcaagcggcatctgcaatcacatgacaaggtgccctctgatggaaggatgaaatgcacttttgatggttgtgaacacttcttttccaacaaatcaaatctgaccaagcatgtcaaggcatgccatgaccagctgaaacctttcaagtgcggaatcgttgggtgtggcaaggcgttcacctacaagcatgtcagggataaccatgagacatctggtgctcatggagactttgaagagttggatgagcagttgcgtgcccggccaagaggtggtcggaagaggaaagcattgacggtggaaacactgacacgcaagagggtgaccatctccggcgaggcttcatccttggatgatggagtggagtatcttcgctggttgctatctggtggggatgattcaattgattgtcagtag

SEQ ID NO: 261 - DNA, 171 bp, Zea mays
  Peptide Sequence Number=SeqID_42040
atgggcgaaatagtctccccaggagcgttcgcggggacggagaatttttctccccaccgggacgaggatggggagcagttccccgacggggaattccccgttgccatctctatttacaagtatgagaacgagaatgcggctcaaactagctccaaaagagtgaaacgttga

SEQ ID NO: 262 - DNA, 249 bp, Zea mays
  Peptide Sequence Number=SeqID_42041
atggacaaggcctcgaaagccacagttccctcaacaattggctcactcgacatcatcgaaagccttgaccacctccagtttggtcccataggaggtggtaacggccggtggtgtgtgccgcaatccaccttcaccaagatcatggggatgctagaccccgcccgagattcattccatggcctccccctgtcagggttagaagacatgcctgattccccatcgaacgggatcaaccaaatcttggcctag

SEQ ID NO: 263 - DNA, 216 bp, Zea mays
  Peptide Sequence Number=SeqID_42042
atggggcgggacaacaacagccccgtggcgacagcgcattgggagtggcatagcgaggaggtcaagggcggcgacgacaagattgtcttggaagacgtttggctccacacgttcttgaggcttgtgagggatttatatgcgccgcttgatgaagtaaattatgaggaagcacctcgtgatttgaaggttctagaaacttttgatgaatttatctag

SEQ ID NO: 264 - DNA, 618 bp, Zea mays
  Peptide Sequence Number=SeqID_42043
atggccgttggggaggctatctgtcgatgggtgcaccggacagtccggtgcgtcacccaaccgttagggttcgaccgttggagctctgacaggtgggaccaccggacagtccggtggtgcaccggacagggcgccgagtctttgaaccttgccaagacttgtactcagattggtggcaaggttgcgcagtttgaaacttacacattcacgccgaggattggaaagactttgggtgaagtagttgagattgtgtcgtgcaccaagaataagtggggtaactggtgggatttttggttctacgtggcgctggaggataccgaaggggttcttgagctgccttcgtctattctgtactcgcactattatatcgcgttcccgcggtttaggctgaagaagggagataagagtgaagacacccttcggcgcacggctaggacaagaagcgaccacgatttggtggaagagatcgtgctgagccccgcctttgccattgagatgtgggggctaagccgtgtttttgaattgaatggccttcggtatggcccatatcctgaggagggttttgccgatgccggggatgaacgaggaaagttgaaggtgatgatccgggtagtgtag

SEQ ID NO: 265 - DNA, 480 bp, Zea mays
  Peptide Sequence Number=SeqID_42044
atggcagtcaaggcctcgcgcattcccaaggcgcccccggtcctcctgctgccgtggcgcagattggtgggtcccgctggacagtgtgcggctcggtcgtgcggccgcgcgtgccgcaggcgcggtacggcagggcggtggggtgacaggacgactggacgaggcgtccgtgctctggcagtggcagccagccagccagtcgcgcgtcgcgccggacgagaccagtcgcaaactgtccagaacgaggacccgcaaggcgtcaaatcgcgcggcggcggattcataacgccgtggccgtgctgccgcccccacacacacccggtcagcgacagcctcaaagcccaggcccagaaacctacctccccgtttcacgaggcgcggccattagtagccagtagccacagtccacagagactgggagcggaggaaggaggaaggggaggtgcggccagggcgccaagccagcaggcagtggtataa

SEQ ID NO: 266 - DNA, 423 bp, Zea mays
  Peptide Sequence Number=SeqID_42045
atgatgtaccccccctgcaacgtggtcggtctgagcccaaggtcgggcgaggcggtgactcctctgaggtcgaggttgaggccagccctggggtcgggcgaggcggagactgtcttccaaggtcgaggcggaggccgagccctggggtcaggcgaggcggagaccgtctgccgaggtcgaggcggaggccgagccctagggtcgggcgaggcggagactgtcttccgaggtcgaggcgggggccgagccccgaggtcgggcgaggcggagcttcctatggcgcatgaggctggactcggctgctgtcagcctcaccctggcgggtggcacagcagtcggagcagggcaggcggcgctgttttcctgttaggtcagtcagtggaggggcgaagtgactgcggtcacttcggttctgccgactga

SEQ ID NO: 267 - DNA, 327 bp, Zea mays
  Peptide Sequence Number=SeqID_42046
atgtacgatttgggtccaatatccgaaattccccgacctgaacacaagcaacaagcttggacagaagaattcggcggaggcagcgacgatgtgagcgctattggcacagtggcggatggacctgaggtggtgttggtgttagtgaacagggagagcataggaaacgaaagcaccgtagccaccagcaaatctatgggggcatggaacgacgcagagcgagaagagagggaccgggagccgttggtaaacaataagcccgaccgacgaggcaccagggatgccacacgactgagcgaagcctgttgtgtgcatgcgtgctacgggtag

SEQ ID NO: 268 - DNA, 1032 bp, Zea mays
  Peptide Sequence Number=SeqID_42047
atgcacccgactttgttccttaaaaccgagtgtgacaagtccggtgctacaccggacagtccggtgaattatagcggagtggctccccgaaaacccgaagctgagcagttcagagtggatctcactggtgcaccggacactgtccggaaaaggtttgaccctatttccctttcaattagtccacatggtgatcctgttcaatacaaatatggtgaaaccacaaaacaggtgcctcaattcgatggtgtaaattttttctctaattcaagtatggaatttctacaccgagtcttagatgttcctacatcatttgttggcattggaagcatcttcctaataacattactgaacgatgttcatggtcactatgatagtcacagcaaaggtagtgttcaatatgggataactggactgagacaatggtggctaaatgtttttagctcgggaaatagtggtatggcggttcagtcacagtttgacaatcaaagaaaagccatgaacaaattagtgggcttacaattcagaatggtgtatgataaacgtaaggagaatttagtgactaattattatgtacaaaatatgtggccaatagtgaccattcaaagtccatatgaggttgtgttctcagttcagcaggacaaagttataaggctccatgaacttggggtggatagaagtgcagctttcagcactatattgatttcaacattttatgattccattgtttgggagtattttggaagggctgttagttccatgcttaaagagcaattggtcagggatcaacagttcatggaaagtgacgaggagtgtataggattcaacaatgacatgcgccagtttgccatacattttttgtgtgttctccactaccttatttctgcaacaatgactagtgtgaagtgctgccttcgtgtcctggaacagcgaaattctgatttgcagaagtttgcagttaatctgatttccttttcgcatattcttttcatcgtggttggattccattcactgacctcacggtgctcccagtag

SEQ ID NO: 269 - DNA, 540 bp, Zea mays
  Peptide Sequence Number=SeqID_42048
atggaggcggaggggacaagggaccgagaaaggggatatttcgaaagggatccttctccgcgaaggaagcgggccccaagccctcctactgatcaggggttcgaaggctggcccctcggaacggtttcgacagccgccccagagcactcgggcttcaagctcattactgatcaggggttcgaaggctggcccctcggaagggttcgacagccgccccagagcactcgggctccgcgcccactactgatcaggggttcgaaggctggcccctcggaagggttcgacaactgccccagagcacgcagagcgagggatgactctagggtgaggctgacaacagctaagttcagcctcaggggcaacaggaagctccgcctcgcccgaccttgggcctcggactcaggtggaggtctccgcctcgcccgaccccagggctcggcccccgcctcggcctcggaaggtagtctccgcctcgcccgaccccagggctcgccctcaacctcggcctcggaaggtggtctccgcctcgcccgaccctag

SEQ ID NO: 270 - DNA, 462 bp, Zea mays
  Peptide Sequence Number=SeqID_42049
atgcccggcgcgcccgccctccaccggtgcgcgcagctcgccccggcgtggctgtccgtggcgcacgcgcagcgttgctgctcatggcccccttgtgctcggcccctccccgcctcggcgtggctccctgcgtgctcttccagcacgctgctccctgtccgggcgcggcgtggccccagcactgcgcggccttggctcgcatggccgtggtgcctctgcgtggcgtgcccccctgcccgcgacttcgcccagcgcgacgcgcagcgccccgccatgctcgtggcgtgcccatctacacctagccacccgtctacccccccccatgtggtgatgagaatgatggttttggtattgactatggtaatggtggctcgtcttagacacactgcacggaagtccgtcatccccttcttgccatctcgtctcgctgagcgcccgcttcgccgtccagtgactggctag

SEQ ID NO: 271 - DNA, 156 bp, Zea mays
  Peptide Sequence Number=SeqID_42050
atggcttttataggcgcgggcgtggacgcgagctttatagaacaagtgaccaacagatactatgtttcggaaatgaagttttattatgatgttaacccggtggttaaacaagaacactttttgttaaatggaatatggagtgactacccaggataa

SEQ ID NO: 272 - DNA, 789 bp, Zea mays
  Peptide Sequence Number=SeqID_42051
atgcaggcggcatgcaaccgcaccaagggggcgcaccctttcgacttcgacgcgtccagcatggaggcccaggcccacacgtcatggaccgggaaaggggataccccgaaagggatccttctccgcgaaggaaacgggccccgagcccccctactgatcagaggttcgaaggctggcccctcggaagggttcaacagcagcctcagagcactcgggctccgcgcccactactggtcagaggttcgaaggccggcccctgaaaagggttcaacggccgcctcagaccactcgggctccacgcccattactgatcaggggttcgtaggctggcccccgaagggttcgacagtcgcctcagacgcagagcaaaggatgaccctggcggccaagtccggcctcgggcgccataggaagctccacctcgcccgaccccagggctcagactcgggctcggccccggaagacgacgaactccgcctcgcccgaccccagggctcggactcgggctcggccccggaaaacgacgaactccgcctcgcccgaccccagggcttggactcgggctcggccctggaagacgacgaactccgcctcgcccaaccccagtgctcggactcggcctcggccccggaagacgatggactccgcctcgcccgacgacccagggctcggactcgacctcggaggacagactcgaccccggcctcggaggagccaccgtctcgcccgacccaggtctcggaccaaccacgtcacaggtggagccatcattaccctacccctagctag

SEQ ID NO: 273 - DNA, 423 bp, Zea mays
  Peptide Sequence Number=SeqID_42052
atgaagacaatgcgatcaacatcaactgacaagatcagagtggcgcagcggaagccgctgcccagcgccccgtcctcgccggcgtccaagctcgcctcgtggagccaccaaccccccgccccccccgaccctcttctctcccacctcgacgcacccgccgagcctggagctattgccgccgtcgaggcgcgatggcccggcatcccgtggtggccagtgtggcccggcgcggtgcgcggagtcccggcgcacgtgcggtgcccccagcgcacgcgtagtgccctcggcgcagccaggcgtggcacgcggtgcccgcgacgcgtcccggcgcacgcgcagtgccccagcgctgtaaagaagaaggagaacggtgtcgaggtggatctctgggagttccaggacttcgatgagttcgagaattag

SEQ ID NO: 274 - DNA, 162 bp, Zea mays
  Peptide Sequence Number=SeqID_42053
atggcggctgaactatctctgcctccggagccatacgatctagaagccgacccgttcctgaatgaggcactcgagactatcaaaattgccaatgaagctattgacgaagctgtcaataagctattaaacgaagcaaccgagaaggtcctgaaggaagactag

SEQ ID NO: 275 - DNA, 552 bp, Zea mays
  Peptide Sequence Number=SeqID_42054
atggcgagatctgtcaacagagccatgcttggcctcgccccggaccttgggacgcgtccctgctggaggacgagagcgaggcccaccgtcgacgcctctccctcagcagcagcacctgcagcaccctccctgtttccttttccggctgagctcctcccttgcatcgcggttggcttcgctgctgctcgttcactcccttgctgtgcggagcagcacatcgtccacgcgccacctgttcgacgctatgccgagtcgggtcgccgtgcgctcaaccacgccatgcaacagcagtgcactcccttcagcccctgcgctgtcgtgcttgcgcactatttgacaaaatacacggatgagcgttgtgtcgtggacggtgccatggtggtgccctacgtcctcgctgcacgacctcgtcttgcgctcgcctactctccaagcagcagcagtagcagcgctcctcgagctcgacctcggcaaggacaagcagccccatcctcgacgccaaaattctttggtgagacctcgctgttccgtgttcctgattttgtaaaataa

SEQ ID NO: 276 - DNA, 889 bp, Zea mays
  Peptide Sequence Number=SeqID_42055
gtccgagctcgagcagttgacacccaggctggagtccgagcttgcctctgccctggtcgcgctggtggcagaagttctcttcgttggtggagatctcggccagtcctgcagggagccccacccacgaagttctccaccatttcccctgcgcgcgtcagctggacactatccgagctcccctggagtaagcgcaaggaatctccaagttcaggcgaccaacactttccccatggcgtccctctccatctcctcccctgcgtcttcttccatgcgcacctgcaggccgccggaccttgctccatccagatttcgcgccatatgctccttcatcgatgccatggtgagatctgtcaacagagccatgcttggcctcgccccggaccttgggacgcgtccctgctggaggacgagagcgaggcccaccgtcgacgcctctccctcagcagcagcacctgcagcaccctccctgtttccttttccggctgagctcctcccttgcatcgcggttggcttcgctgctgctcgttcactcccttgctgtgcggagcagcacatcgtccacgcgccacctgttcgacgctatgccgagtcgggtcgccgtgcgctcaaccacgccatgcaacagcagtgcactcccttcagcctctgcgctgtcgtgcttgcgcactattcgacaaaatacacggatgagcgttgtgtcgtggacggtgccatggtggtgccctacgtcctcgctgcacgacctcgtcttgcgctcgcctactctccaagcagcagcagtagcagcgctcctcgagctcgacctcggcaaggacaagcagccccatcctcgacgccaaaattctttggtgagacctcgctgttccgtgttcctgattttgtaaaataa

SEQ ID NO: 277 - DNA, 453 bp, Zea mays
  Peptide Sequence Number=SeqID_42056
atggagaagacagctagagagagggcaccgacttggggaaggggctgtcactccctggcagaaggaggcagcgagaatgtctcccatgctagctatggtgggtacaagtgcggtcactccacggcggtagtcggggtcagtggagcattgtatgccaaggcggctcaccctctgcagcctggatggcgttcccttgactctgagaccctcgggttcagggcagacgacaccaccgaggccgcagaactaaaagccctaacaaccttctacggataccatcccctagagatggtgatgcacccactgggactcttccccacagagaagagggatgaccccatgtggtgcaacagagtaagtcacgtgaaggacgtgtgggccatgcatcctgaccaagttgggaggatcactgtttggtgtatgagcgcactgtaccacctgcaagccctatag

SEQ ID NO: 278 - DNA, 444 bp, Zea mays
  Peptide Sequence Number=SeqID_42057
atggccggacctacaggtgagctcgctagtgcgaacccaaggtccggggcgaggccaagcatggctctgttgacagatctcgccatggcatcgatgaaggagcatatggcgcgaaatctggatggagcaaggtccggcggcctgcaggactggccgagatctccaccaacgaagagaacttctgccaccaacgcgaccagggcagaggcaagctcggactccagcctaggcatcaactgctcgagctcggacctgggagaggaagcgcatgaccataggggccggcgtcggctaggatgtggaagaaaagggagatggctgcgcatgggggaagaagaatgcctgctggcgtgcgtgagaagctggcggccaggaaatgcttctgcgctcaggaatagggaggagcgacgcttaaagggtggctgcagcagggtgattggctag

SEQ ID NO: 279 - DNA, 279 bp, Zea mays
  Peptide Sequence Number=SeqID_42058
atggaaaccatacaacaaccctttacaatctgggacgacaaatgtgttgacagtccaaaaaaaattatagggataatcgatgagaagaagaaagatgatgacgatgaagaaagcgaggctaagaataggaggcaatgccctacagctcaggtcaagatggcaaatagagagaagatggtgtgtgataaggttgtgaaggcagtagaaaggtggacatgtggttatagttacagtcatgacatgagagtccttagttggacgccaatgatgccattttag

SEQ ID NO: 280 - DNA, 189 bp, Zea mays
  Peptide Sequence Number=SeqID_42059
atggtgcctgtagtaggggtttacaagcacaccgggagaggagaagtccccaaatccctagagatgattgagggatcactgccctatttatacaccaaggggagcgtccgcagtaaagctgagtcttgtattcgaaagagagatgccttgacgtctgacgtgacagcgaaccatgtgaaagtcgcctag

SEQ ID NO: 281 - DNA, 1668 bp, Zea mays
  Peptide Sequence Number=SeqID_42060
atgtggatatatggcagtgacgacggtacgacatcaatcacgaacacctgcctccacatcgcggctctctgcggccaccagaacttctgcagcgaggtcctggcgcaggagtcgcgtctccatcgtcccggcccgtcgtctctgctctccaccaccaacgacgacggcgagacgccgctgctcgtcgccgtgaagagcggccgtgtctctctggcccttcatctgctcgaccagcactactcgaggcataatctgctggtggagcatcttcttaagcaagacactggcaaatgcaacgttctgcaccacgcgatccgcaacggctacgtggacctggcgctggaactgatccaccggcagccggcgctctcggagtcctgcaacgcgcgcgacgagtcacccatgttcatcgcggttctcaaaggtttcaggagcatctacatggagctgctgcgcaacgagaggtcggaatacggcggggccaggggatacaacgctctgcacgctgctgtcaagtatggaaaccaagatttcgttgaacagcttgtggagcagcatcccgagaaggccaaagagctggcgagacaagcggacactcagcacgacactccagtgcagctcgccgcgcatttcaacagggatacgattctaacgctgatgctgagaggtgatcggtccttggggtatcgggtgcacacggaacactccacgcctcttctctacatcgccgcaaaccgaggccacgtagcttttgctcgagcgcttctggagcactgtccagatgcgccctacaagaacgaccggagcaggacatgtctccacgaagctgtagaacaggaccggacggagttcgtcaggttcatcctcgacgacaactccaagcttcggaaactcgtcaacatggtagatgacgtcggtgacactgctctgcatctcgcggttcagaagagcaatccgaggatggtccgtgctttgctgcgtcaccctgacatcgacctcactgtcatcaacaacagggttaacacggcgatctggaacatgtacaatgatggggacgaagtcaagactataaactggaacaaaatctacttgctcatacggaacgcagatcgtagagctaaaaatgacatctacaatttccgagaggagatcaggaacaaagtcaactatgcaacaagaaaagatgccaagtctctgattcaaacatatacgaccaacacgtccttagtggctatcctcttagcgacaattaccttcgctgcagctttcacattgccaggagggtacagcagtgatgctggaagcgaggggctccccatcatggctaggaaggtcgccttccaagcgttcttgatcttcgacacgtcggcgatgtgcgcctccctcgccgtcgccttcatatgcgtcatagtgaggtggatggactttgagttcttgctgcactacaggtccgtcacgacgaagttcatgtggttcgcatacatggcaaccaccctagcgtttgcgactggtttgtacacagtcctggaagatcgtcttccttggctggccattgcgatctgcgtcctgtctgtgttgctgcccatccttacgatgatggtcggtggatggcccatattgaagctcagaattcaatacggtaattctgatttccttgacatggtctag

SEQ ID NO: 282 - DNA, 1077 bp, Zea mays
  Peptide Sequence Number=SeqID_42061
atgacggactatcggctagacgataggcttgtggcaatggcaggcgagccgcaagctagagacgatgtcctgacggctggcgatgacggttgggtaggcggttgggcggatgtgttgtaccccttaagaaagaaaggaatgaagaagaatgagttcaccatgacacactctagttcacgtaatcaatgccacaaatcggcaatcaagaaacgctacttccaccacacggaggagctgctacttggccaccctgcattcatcgaccgttcgatgccatcgttagatgagcggcaggccatcatggctactgccgttcccgagctcgccgcagcggccgcggccgatgctatcgccgagtgggggcgtccagccacggagatcacgcacctcgtggtgaccacttactccggcgcccacatgccgggagtcgactggctcgtggcttcactgctcggcctacgccccaccgtccgccgcaccatgctctacatgaacggctgctccagcggctgcgccgcgctccgcctcgccaaggacatggcggaaaacaaccgcggcgcacgcgtgctcgtggcctgcgccgagctcacgctcatggttttccgcgcgccgcacgaggcccaggtcgacacgctcatcacgcagtcgctgttcggagacggcgcgggcgccgtcgttgttggggccgaccctgtttctgtcgaagaaccggagttcgagatggtgtccgcctcgcagaccatgataccggagagcaagcaggtcgccagcggccagctctctgaggatgggctccgcttccacccttccagggagatcccgtccctgagatcatggtcaagcaaaatggatgcactgagcaccccatcgtcccagccaggtaccacccctgccgtccttcagtacacagacgacactctgattcttttcaagggggcgaccagtgctgctcgatgcctcaaggacacccttgatcagttcagtctagccactggcctccacatcaattactccaaaactatcatggtccctgtgcatcttgtctttgcaggatttatttttctttcccagttatga

SEQ ID NO: 283 - DNA, 336 bp, Zea mays
  Peptide Sequence Number=SeqID_42062
atgacgaaggcccttgtcgatctcaccaccgccatcactcagatgatcagtagggcgccaacaccactgccgcccccagcatccaccagccctacttccatcccatatggcatgccaggtcgtggccctcacctgagcatacgagtgccgccagcaaggctcggacgggcgcgtgcctccgctctctacgcgtatactggctatgccatcctcgacgtcagcatcgtcggctgggccagcggctgctgcctccgccctggcagcaccgacgttcaagcgccttaccccagcggaaatgacggagcgacgccgctaggggctatgctacagctgtga

SEQ ID NO: 284 - DNA, 312 bp, Zea mays
  Peptide Sequence Number=SeqID_42063
atggcggacgcgggggtgacgggggtgctggccaagctgggtgagctgacggaggaggaggcgacgacgctgctgcgcgtggacgccgagattcgggcattgcggcagaagctggcctacctgcaggcgctcgtacgcggggccgaccgccagcgccgcggccgcgcaagcgagctgctcctgctctggctacgcgagaccagagtggttgctttcgcgggtggttctgccatacatagcggcgatggctcttcctcccaggactaccatttctacacagaacaagcatgctctcatgaagttgtgatgtaa

SEQ ID NO: 285 - DNA, 858 bp, Zea mays
  Peptide Sequence Number=SeqID_42064
atggagctgcaggagtctaactcctcgatcccgcagaggcgcacaccgatctcgctcctatcgcgccccgaaaccctctcgtctggaaaccgtcgcccccgacctcccatctcctcccccgaaaccctctccttgccctcaacgccggccgtgctggagttcagcatcctcatccggagcgacagcgacgcggccggcgcggacgaggacgaggacgccacgccgtcgcctcctcctcgccactgccaccagcagcagctcgtgacccgcgagctattcccggccggcgccgcggcattgggccgagctcggcttcttccgcgccgaccgacagcagcaacaggcgctgggtcacgaaacaaatccatcgcctcgccgtcgctctgctgccgtttgctccagggccatgacgcgcatcgacctcaacaccgtggaggaggaggacgaggcggaggcggaggcgctgccttttctcgtggcggtggcggggtgaccaggcaggtgggccatcggcgaagcgccatggtcgtcgtcggggggcaggaaccgggcggtgtacgcgcgccgcgcgcccggctcttcatcgcctccacccgctccagcgtctccaccacctccttcatcgagggccagctgcgaggctcgccggccaggcagccgagcaagctctctgagatccattccgacgttgaggaagctgaatcgctggctggtttgcttgcaaagctgagggagtataaatctgacctcaacaacgtcaagagtgagctcaagaggatatctgcgcccaatgccaggcaggctacccgggaggagctcctggagtctggaatggctgatactctcgcagtgagctaa

SEQ ID NO: 286 - DNA, 282 bp, Zea mays
  Peptide Sequence Number=SeqID_42065
atgacgcgcatcgacctcaacaccgtggaggaggaggacgaggcggaggcggaggcgctgccttttctcgtggcggcggcgggatttggaagatggacctggaggcaaggagcctacagcctagcattaaggctggtttgctttgcaaagctgagggagtataaatctgacctcaacaacgtcaagagtgagctcaagaggatatctgcgcccaatgccaggcaggctacccgggaggagctcctggagtctggaatggctgatactctcgcagtgagctaa

SEQ ID NO: 287 - DNA, 312 bp, Zea mays
  Peptide Sequence Number=SeqID_42066
atggcggacgcgggggtgacgggggtgctggccaagctgggtgagctgacggaggaggaggcgacgacgctgctgcgcgtggacgccgagattcgggcattgcggcagaagctggcctacctgcaggcgctcgtacgcggggccgaccgccagcgccgcggccgcgcaagcgagctgctcctgctctggctacgcgagaccagagtcgttgctttcgcgggtggttctgccatacatagcggcgatggctcttcctcccaggactaccatttctacacagaacaagcatgctctcatgaagttgtgatgtaa

SEQ ID NO: 288 - DNA, 561 bp, Zea mays
  Peptide Sequence Number=SeqID_42067
atggatccccaggtccccaatgctaagatatggtccaagatcgctgccaagttacctgggagaacagataacgagatcaagaaccactggaacacgcacatcaagaagaagctcgtcaagatgggcatcgacccagccacgcaccagcctctagccaactcgaaggcggctgcttcctcgcagtccactgttacagatgaatctgctaaaaccagcaacaccagaaaggagctgagcttgaagaatgatggtagccgtagggaggctccactgtccactgattcgtcggagcagtcaagctggccagagtcaggctcatgcagcaacgtctgtgatcaaggccctgaactgctggagaactggctctcggagactggcctgtcgatggatgagccatggctggattttacgagcagaaacgacgagcttggcaatgtcgaggggacgttgccgtgggatggaacaaccgactggctgctggactaccaagattttggcatgtgcagctcaaactcagtcgacagttcagtgttccatgcctcaaacggatcgaacttctaa

SEQ ID NO: 289 - DNA, 258 bp, Zea mays
  Peptide Sequence Number=SeqID_42068
atggcgctcaacggagtaaagtctcggggtggtaattggctgtctctcatgaccaactgcgacgtggtaacatggtctatagcatggtgcaaccgagataaatggcggttaccacggcgacgatcgcacggccacgtcgccgggcaagtgggattattgcaagatatggttgatggtgtgacttggccagccaccctgccaccgatttggacggtcgagtgggatgccgcctcggcaagagaggaccaggaggagtag

SEQ ID NO: 290 - DNA, 306 bp, Zea mays
  Peptide Sequence Number=SeqID_42069
atggccgtcggcccctgtgtctccctctgctccacacggccagcacggcagccgaacaccgagatccatggtgagcaacatcgcgccctcgacttcctccacatcgacaataaacgagccaaaaaaaacagcgggtttcttccctgttgtcggactgcggcagtgacatcgtgcgcagtgagctccacctcccacgccaagcccctgcgcaatgtcgttgaactccacctcgtccccatgaagaagttcctggccacaccgggcacgattggcgaccggatctcggcgaatttctcatcggaataa

SEQ ID NO: 291 - DNA, 423 bp, Zea mays
  Peptide Sequence Number=SeqID_42070
atgaccgccatcgcagcaaaatcatcccaagggccttcctacactgaccactcccctactgcccttgcccctttcgggggcttggcgtgggaggtggagctcgctgcgcatgatgtcactgcaacagtccggcaacagggaagaaacccgctgttttttggcgcgtttattgccgatgtggaggaagtcaagggcgcgatggagctcaccatggatcttggtgttcggctaccgtgctggccgtgtggagcagagggagacacaggggccgacggccatggggagaagtggtcggtgcagggagcgtatatatactgtgcacaagccaaggggtgcggaggcagggaaatcaaatcccaacaacccggagcgattccggcggaggcggacccgctggggctactggtttggggaagaatctga

SEQ ID NO: 292 - DNA, 306 bp, Zea mays
  Peptide Sequence Number=SeqID_42071
atggcgaactcgaccgtgggcaccatgccggtgtgggggaacaggagggcgcggtacactacggggcggatcaacatggcatgtgcacggtgcgaggcgagtgctaagggctgcgggtgcgtgaatgagggaagaggagggcgagcgggtgctgggcagctagaaaaaggctgggatgggtacgagcgcggccacggcgtgcgtcgtgggcgtggagtccatggtgacgcatgggtcgtgcgtgggcattcgaaggggacgagttcgatagacggcacccaccggtcagagagggtggacaagtga

SEQ ID NO: 293 - DNA, 357 bp, Zea mays
  Peptide Sequence Number=SeqID_42072
atggaagttgtccctgaattcctcctaggtgatggcttcaaggtcggcatgggtggtgaggttgaggtgggggtggttgctgctgcacctactgcatcgctgctaaggtctgaccaatcgcttggactgcttgggtttgcatcaggaacatctgctcaatggtcatcaggggtggcagtggcaactgctgctgagctgcatcttcctagggtgcctactactcctgctgagcacgccttgcacctcggcgtctgttctcagacatctatagaaagcacacacatatcagatctgactccgcagtctttcagcataagaaaagatagatggaaaatcttcatagcactgaacaattga

SEQ ID NO: 294 - DNA, 725 bp, Zea mays
  Peptide Sequence Number=SeqID_42073
atgccgtcgtctgaggcgaccttgagcaacttggcggtggttgagtttcagcccgaccacaccgtggagtttgggacctcatggattttctcgggccacatgctggagatgcaacagcttggttactttagtaacggtgtcacacgggccctaggtgcagaagaggcagtctactcctacggcagacaaccatctgtggaagttttcgccaagaattattgcttgcactggcagaagaggaagataggggataaaatagccaaatttggatcgtgcaccttcacactgaggactgggaagacttcgtctgaggttgtggagatagtcccgtgtgctaggaacaagtggggcaactggtgggacttttggttttatgtggcttcgggggacgtcgaaggcttgtcgagtctgcctcctgccatcctgtcctcacattgttatgtggcgtttcctcgattcgaggtggcggatgaagacaaagacaaaggggccctccgatatgctgcccgccttagcagcgggcatgatctggtggaggagtttattgcctatggggtgtggcccttggcacatggttggccattgggcgaagtgagccactgccggatgcctaccttgggcggccagatggtgcgaagtccgaccttcgccgtggatcttcgcgattgcgatgcggccacgtttgtgcgtgaggtcgaggctgaggccgtgaaaattgttgggaa

SEQ ID NO: 295 - DNA, 300 bp, Zea mays
  Peptide Sequence Number=SeqID_42074
atgcatgccatcgtcatcctaaccctaaggttgaaaaccgcctccacattcatgaattgggcttctgggcaaggttgtggcgatgtcctcgacatcgactgcactgtggtatttggtaacctctctgacagcttattggtgctaaggagtatggagcattctggtgttctcattgcaatgaacaaaaacagtgtgaacttatttgttgatgttgcacccatcaaaactcctacaggacagtctacgctgttgggcgacaacgtggagacgtttgagcaaaggattgccaagctcctatag

SEQ ID NO: 296 - DNA, 471 bp, Zea mays
  Peptide Sequence Number=SeqID_42075
atgggcgctcttgggatgtggcaccagactatccggtatgcaccagacagtctggcaatggtcggatccaacggtcggctgacgtggcttaggcactggactgtccggtgtgtatcggacagtctgggtatcagtcggatccaaagattgactgctatagaccccaacggtcggctgatgtggcaggcaccagatactgtctggtatgcaccggactgtctgctagcaagagccccttatctttgtggttggccttgtggagacttcggtcttttgtttacaaagaagaaggaacactcgccggacttggtgaccgttggagagagagaaagagttggccttgccctcgaacttggggtagctagtaatgaagtgatagtggcaccaacacccaaaacacccatccttgtccacatgctgtcagttcttgtggttgttgtaaaaccattggaaatttttgatgatcaatga

SEQ ID NO: 297 - DNA, 150 bp, Zea mays
  Peptide Sequence Number=SeqID_42076
atgcgatgcgagttgaagaaaactgctccttggatgcgtgagaagataaaaccgcatgggctccactgcatgctgccatgctggtttcccacgattcgtgagtttgaagaaaccgcatgtaccctcggactaaagtcggcattgcagtag

SEQ ID NO: 298 - DNA, 408 bp, Zea mays
  Peptide Sequence Number=SeqID_42077
atggcgttcgagaagatcaaggtctccaacccaatcatcgagatggacggcgatgagatgaccagggtattctggcagtctatcaaggacaaggcatttaggctagatgatgacaacatattttttcagcttatcttcccatttctggacctggacatcaagtactatgatttggggatactgcacggtgaagcaactgatgacaaggtcacagtggaggctgcagaggctactctcaagtacaatgtggctattaagtgtgcgaccattactccagtcgtcgtcgctctgcctcctgcccccgccgtcgccgccgcgccacagacgcagccggctacccaccgctcgcgcctcccgcaccgtgtcgcgtgtgggccacagctgcagctgccccccgagcaaccctag

SEQ ID NO: 299 - DNA, 135 bp, Zea mays
  Peptide Sequence Number=SeqID_42078
atgaggatgacctccgggaggatgctgcagcgctctttggccttagcagtgagcatcccgtccatgtcggtgatgaacaacaagtcggtggtcaggatcaagaagtggtggcactggccacctgacccgacatag

SEQ ID NO: 300 - DNA, 246 bp, Zea mays
  Peptide Sequence Number=SeqID_42079
atgtgtggactctatctcgtccgagcacgcgttttcaccagagtcgggttcctgtaccacgccgccgcgccgggcctctacagtgtccgagcgcgcctgcagtggaccgagggtgcgctcagcagaggcgaggaggggcttgctcggccgacaaccgggactgcgcaggctacaaggggagtagtgaagatcgacggcgagttgctccacgactggtctctcccgcttgaggatttaggttactag

SEQ ID NO: 301 - DNA, 1713 bp, Zea mays
  Peptide Sequence Number=SeqID_42080
atgatgggagaagcaggggaggaagaatcggcggccgcgccggcggaggtgagccgacaagcggagctggatgagcagcgatgcctggcggaggcgctggacgccctcagttcgttggtctccgcttccttgtccgcgacgctgttcccgctcaagtggcagctcaccagggaccggctccacgcctgcctcgccgacaccaccgtccccgcgggggacgagagcggcgaggacaggcgcgacgcgttcgtgaacctcctgcgggacgtcgcggcgaccgctcgggaggcgcgagagctggtgccgcgtagccaggggcggcagtacggcggcggcaagctgcggctgcgcagcgacctcgacgtcctggccgcagccctcgacgcgcacgtggcgcggctggacgaggtgcacgcgtcgggcgcgctgacgcgggcgcgggcgctggtggtgccgcgccccggcgccggggccacccgcgacgacgtgcggttctacgtgcgcgacctcttcgcccggctcagggccggcggcgccgagatgcggagggaggccgcgaccgcgctcagcgaggtgctgcgcgacgacgagaagtgcgtccgcgtcgtggcgtccgacgtcgcggacggcgtcggcgtgctcgtcgcgctgctcgagtgccccgacgcccgcgtccgggaggacgtcctggaggcggtctcggtgatcgccgggtccgacgcgcacaggggagacctggtcgtcggcggcgtcatcgcgcctgtggtccgcgtcctcgacgccgccgccagcgccagcagcgaggcggccaaggagagggcggcgcgggtgctctgcaaactcacggagaactcggacaacgcgtgggccgtcgccgctcacggcggcgtcacggcgctgctcgacctgtgcacggaccacggagcgagcggcggcgagctcgtgtgcgcggcgtgccgggtgctgcggagcctcgcgggcgtcgacgagatcaggaagtacatggtggccgacgctggggccgtcccggtgctcgtgtctctctcgcagagggccacggacgacgcggcgcgaatccaggcaatggagctcgtcgtcgccatcggctctggggacagctcagccagggaggccgtggtccaggaaggtgccatcgaggtcctcgttcgcgcgctcgacgcctcctcctcctcgaaggtgcgggaggtggccctccgtgccatcgacgggctctgcctctcgccgcccacatccaccgaccgtctcctcgccgccgggttcctcgacagcgtcctctccctcctccgcaccggagacaccacgctgcagcactgcgccctgaaggcggcgcaccgtctgtgcccggtgtcggaggagatcaggaaggcgatgggcgacgccggattcatgctggagctggtgagcgtcctcggcgcgtcgtccaagtcccccgaggcgcgggagatggcggccgagtcgctctgcgccttggtgtccgtgcaccgcaaccggaagcggttcgtccaggaggaccgcgacgacgtggcgcgggtgctgcagctgctgggctccggcgacgaggagaagctcacgccggcgaagcggttcctgctgtccacggtgacgcgtctcgcggacagcagctccggccggaggaagatcctgacctcggagcacgtcaggcacaaacaacacacacctacctatcagtag

SEQ ID NO: 302 - DNA, 765 bp, Zea mays
  Peptide Sequence Number=SeqID_42081
atggccactcccgctcccaccctgccggagccggccgcgcaagagctgaccgctgccgtcgccggcgccggccagcggcagcagccccatcaccagcacccgctcctcgcggcggcggctgcggcgtcgctcctcgccgtgctctacctcccccggccggtgctgctgctcgtgctctccccggcctcgctctcctccctgctcctgctcctctccctcctccacctcggctccacgccgccgccgccgcctcccgctctcgccgcccctcctccttcctccccgccgccgacggaggagaagaagcagcaggagcaggagcaggctccagaggccgcgtgcccgccgcctccccctcctccgccgccgccagagccggagcgtggggccgtgttcccggagctcctggagttcgcgtcgtgggcggccaaagggcgcgcgctggaggtgatccacgaggagttcgaggccgagtgggggctgccggaggagatgggactgccgtgggactcggactcggactccgaccccgactcgggcagcgacgacggctacgtccggggcggcggcgacgcggacgacggcatgatcgagatcgagctggaggaggacagcctcatcgagatcgacatctccaggtgccggctgcgtgctctggtatcagatcctttgcagcaactgcagtccgggccggcagaagatcagctcaacggattacgacgtcgcaaactcgcaatgatgtatggggaagctgaaaaggggtag

SEQ ID NO: 303 - DNA, 576 bp, Zea mays
  Peptide Sequence Number=SeqID_42082
atgcgcagcgcagcgcagcgctaccaaggactccaggagacgcgagccctccatggaaaaggggatccgggaccgagcgcgggcgttggacttggactggaccgaaccgacgcctggctgccgcctcgcctcgctgtttgttgccttaccttttggcgtgccagcatcgtggccggtgggccggtccccgccggcgggacaataattcagcagttcgatccggcgaccggcagactccgaccccgccgccaggcgcccccgcacgacaccggagccggcgcgcggcggcctgtggtgcactggtgctggggtgctgctgctatacggctgtcaggggacaggaaggggacgctggcaacagctgcgccagacgatataaatgttgatgaagaggtaattgatccttatcatatatacgctaattgttctaaggtgttgcaagattacagagttgctattgataataatattataattctctcaaatatgattatgtcatgcttttacaaattagaaagtaaaacaataggctacgttgatctaccggttgaaaaatctgctcttaaccaaccttga

SEQ ID NO: 304 - DNA, 1023 bp, Zea mays
  Peptide Sequence Number=SeqID_42083
atggagtacagattgatcacaaagattgcggcgccgcctaagctggctcagcgcacgtcgggcgttctctcaccagcagctgcagcctgctctctgtctttcggggattccgggcaccatggcgaattggcgatgtgcttgtgccgctgtcttgtgcgccgtcggtttcggccgcacccgcacccattcgggaagtacctaccgcctaccggcctcatgaaccttcccttcctgaccaaaaccagccacaccggcggcctatcctggagctggaggatgaggaaaccggagaatcgtctgtttctgatcagccagccacgccaccacgtcaccaacccctcccggctggtgggcgacgccgcgagtcagaccggcctccaccacccgttcaacggctggtcctcagaccctcacgaccgcaccacgtacccggtacgccagcatctcgcgccgttcgatcccacacgttcgtcgcccccgcacgagttgcgcgccaacccgctccagcaaacatcccaggtgttctgtctgatcacctgtcgagaggcgcatgaggagcttgggtttgacagcggaagaacagggcaacgcgaagaagggggtctcttgccagttgccaccagcttgagcttctcaaactgcaggagcagcacaaggatcatcgggaggaagagagtcgccgtctcgccgactccgggctcccggaccccgcactcgccatcacgcaccctgcgcaagcagcgaagcgtccgcttccacttccacatggacgacgccgtcaacctccttgagtcgctgccgctggatgtactgacaatttatgctagggagctgcatttcaagttttcgacgccgtcggcgaagcccgtttttagagacgaggaagccggcggtggcgacgacacttgcccttgcgcgcccaagcaacaccgggctgcaaagtcacgcttgcggggccagaacctagagagaatcgccgtcaacctgtcggcgtcgtacgagagcatgctccccgaggtctag

SEQ ID NO: 305 - DNA, 243 bp, Zea mays
  Peptide Sequence Number=SeqID_42084
atggcttgcgcgcggacagctgcagctccagcgcctcctaccacgcgcttcttcctctttctcggtggtcaccacggccactcgtatcgacccatgcggccacaccgcattttcgctggaggtgcttcttgccactggaatcggcgggaaactgggagtctcttcattgctactggtatccttgttattagggtcaaggttgcagatggccagatggggcaggcggtcatgtggttagactag

SEQ ID NO: 306 - DNA, 219 bp, Zea mays
  Peptide Sequence Number=SeqID_42085
atggatttaattccaatccatgctagcgggattggtgtaaacgaacaaagcctcacgtggcgcactgttggcgatcagattggaggcgtcactcgacagctccgcctgtgggagaacctccacctccccatccgcgacttctgccaccagcgcccggcacatcaaggcccgtgctccaggaacgataccaaccggagcctaggcgatcgtgtgacgtag

SEQ ID NO: 307 - DNA, 360 bp, Zea mays
  Peptide Sequence Number=SeqID_42086
atggccagggggagagcatggaacgacggccagaaaaagagaaggagagagtgggagagggagagagaggggctgcgcaggggcggttggggaagacgtgggaggcttgggcgggagagatggttccctgggagggatgacacgtgggacccgtgtgggacccgcacacaggcggcggcgacggctggggcgcgccgacgctctagggtttggggaaggggcgtcgacgctgggtgggccgcgctgggctacgcaggcgtggagggggagggggtgtgggccgagacgcgaggtgggccagtggaaggaagggcgtgtggcgctaggccacgccggggaagcagatgggccgcgctgtag

SEQ ID NO: 308 - DNA, 318 bp, Zea mays
  Peptide Sequence Number=SeqID_42087
atggcgattgtgggcggcgattgtgggaccgtagtgatgcaccagcaggtttatgggcgtctaccaaagctagcgggggcctccatgggcgaagaaaaccaccagtgccccactaatctctcatcgtcgatcatccatcgccgcaaatccgcagttcgccatgggcgtgaggccctgtgcctccacctcggctcggtgggggctcgccggacggtgccaccgtggggtggccctgctctgcggtctgttggtcaggcatggaaggatcaatcacgaccgtcagatcttgtgggggcagaccggatttggggagcatag

SEQ ID NO: 309 - DNA, 414 bp, Zea mays
  Peptide Sequence Number=SeqID_42088
atgcccctctccttccctgcagctgcccgagcccgctcgctcgcatcccttctcctccctgtgggtggctgcccgaccgccaccatgaatgggcgtggtcgcgcgcctatccctcctcctgcaccacgtgtcgcgtggggcctgcctgacttcagcacgcagccacccgtcctgacgctcgccgccagtgcccctactgcgaccgttgccaccccgccactgtccctgtcggcgctgatagttgccccatgggttgaccccatcctagagacacgcaaatccgccctgacgctcacggtagcaccctactccatcctgcctacctcgatcatcgccatcgtgggtgtactagctttatgtggggttaaggtcaagcagttgcttttagttggtcagtgtgaagcactagcatag

SEQ ID NO: 310 - DNA, 1593 bp, Zea mays
  Peptide Sequence Number=SeqID_42089
atggcgtgcgcggcggcgcacatgttcgtgtacaacgccactctctgcgcctgcgaccctgggtactacctcttcaccaattccaccggcggcggcaacgcaagcagcgccagtaccagctgcgtgtcattgccccgcagcggcgacgggttcggcgactggcaggtcggatccgtaggcgcgtcccggaaccagagcttctacttcctgaccccggtcctctctctcgacgtcgtccgccgcctcacccagtcccaggccgtcatcctctgggtcgcgctcctcacgctgctctcctggctcgccttctgcgccgccgccaggttcgccggccaggaccccgagcgccacaagaagctcttcggcgcccggttctgggtcagccgcctcgactgcatcttcgacaacaaccactatgcgaatgatcagaaagtactgaggaaaagaaaaacagagctgggcggcacgttctcagtggctaccttgatactattccttggattagtcatagttctgctgtatcaagccatcaacaggcgtaacgcccaagtacatcgagtgaaaccagctaatgctccggatttgctagatttcgtgaatgaccttgagtttcacataaccactgtctcaagcatgtcttgcgcccaagtagtggcaccttctacaatagcaatgggaactcctgggtttatggacttcagggtactgccactgtcaacactcttgacctacagttgccagaacacgagtgagggcccatcaattacactaaagtgcaatggctgccgaatccctccaagagaccactatgtatcctggcagtttgttgacctgccaaggcaaccggctgccgctgttggcttccaatttaacttgactgcgagggaacatggagattataaagatatgagctttgtgagtggtactttaagctctgacaactatgatgatgccaagctgaaaacattcagagggccggattccaatgtgctcaaaattcaattgtttcctcagatatacaaccaccttcatggcttgaagctcttgcagccacttgttcaggacttcactcaaggttctatcttatcagatctgagcagcttgaatgcttccttgcacaaccctagagatggagttataaatactacactcttcataagttatctttctgactatattgtggagatcagcaatgagaatgtgcttggcccagtcagtattcttgcgagtattggtggcctgtatgccttcagtgttgcattttttctctgtctcatggctcaatgtgaaggcagaataaagaagcttcgtgacgaggataccagaatgctgaaaatcctgagcaaacaacgcgctcaacgaaattggaacaaggttcggaagtttgtcatgtacacatggggtccaagcaacttggatccaaccgatagaagtggaaagtggcctgaaggctcggtgatggattccatccatggatccttccacaagataagaaaaccaactagaagaggaacctctaacgggagcaaacctaaggagcccgctgacatggtacattatttcttgttcttcagcagatcttcacatatctga

SEQ ID NO: 311 - DNA, 354 bp, Zea mays
  Peptide Sequence Number=SeqID_42090
atggtattaatcgacattgccatgagcttctgcttgacccctcactactccgtcccccagtatgtcatgtcatctctcatcacgcttgtgttcgccgaggtgctcgaaggagtgaacctgttcctcctttctctcgtgatgtcgtcaaggctctcccgtgagacttacaatggcaggctactctcgacggaggccgagacgctggcccgcgttgccgccgacatgactatcacggctgctgaatatgtggggcagagctgcctgctgaacaccaccctcctgccgtcattggtgatatgtctagcctctatcgtcgcgtgcatacccctcctttggttggtgacatccccctaa

SEQ ID NO: 312 - DNA, 279 bp, Zea mays
  Peptide Sequence Number=SeqID_42091
atgcgtctgctcgtctgccgatgcgtctgctcgaagagtcgctcgttcggtggtggccagggccaggtcaggattcccagcaagccaagcgaagccgcggggaaggcgcaggaagtggtccacggcgagccgagccgagtggagcgcgagccgctagacgacaagctacacgttggcgtcatctgccgctactctgcccctttggaggtcaaagggtctggaagcagcaaacacagatcattaagctgtgagaagatgtgtcgtccactggttaattag

SEQ ID NO: 313 - DNA, 726 bp, Zea mays
  Peptide Sequence Number=SeqID_42092
atgacgctggacaccccggccgccgtggtcctggagctgatgaccatggggcagcagtccgcggcgcacctcggggacctgctccgggccgcgtcccctgctgcagcgtctccgcaccaggagctcgcggccgagatcctccgctgctgcggccgcgtcatcgacgcgctcagggccgccgccgccgccagcgggcacaagaggaaggcggcggcggagtaccaggacgcagcagcagggggaggcgcctcgcctcctcctcctcctcctcctccggggccgccactaaagagaaggctctactaccgctgcgcgcacaaggaccaggggtgcgacgcgacccggcgggtgcagcggacgcgggagcagcccgcggcgtacgagatcgcctactacggggaccacacgtgcaggggcgcggccaccgcctggcagcagggagcgccggcgcccgccgtcgtcgacttcggctccaactcctggggatccgcggacaccaccagcggaggctcgccggcctcggtgccgctgggagggtggtggtccccgtcggcgtcgtccgaggtcgggttcgaggcgcatgcggccgcgcacgagtggcgcgacacggctgcggctgctcctgatccggtaatggagttcctggacggcgccttcggctgggaatccgtcctcgaggaccgctttgacttgggcggtctacatggcatcgctacgtttcagtag

SEQ ID NO: 314 - DNA, 885 bp, Zea mays
  Peptide Sequence Number=SeqID_42093
atggactggataaagttttgcagcgattttaccgcaagtgatgggaaacagcatgcattgcttgataatcttaatcaggaattgtcccagaagtctgtactattgggtgatggttttaaactgtcagctgctgataatgatgtgtttgcaactgttcatccttttgtgatccgtgttagtgacagcgagttgcagaaatatccacatgtactgcggtggatggactacattcagaacactgttggtgctggtacaactttgcaaaagataaatgtgaccaagtctgactttgatccaccttctcatccaaggaaagctgataaaaaagatgctgaatcaagttcaaagaaagccatttccgtacagaagactgctgacaagtcaaatggaagtgctgactcaaagaaatccacaagagagcctcctgaaaataaggagaatcctactgctgcggggaacagcaaaacctctggggagaaaaagaaagtgcaagagaagtcagcaggaaaaacaacagagaaagctccagagaaaattgcagacaaggaatcagagtgcgatatcagtatcctgaatatacaggttggccttatccgtaaagcatggaagcatccatctgctgacagccttttagttgaggagatagatttgggagatggtaatgtgcgtcaagttgttagtggtcttgcaaagtattgcagcccagatgatcttactaatcggcatgttgtcttgatcacgaatgtgaagcctggaaagctgcgagatgtaatgtctgctggattgcccaggaatgccatggtggacaacgtgtttcatttaagtctaactgttgaaatagaatgtgacactgacattccaccattttccaaagttatcatataa

SEQ ID NO: 315 - DNA, 714 bp, Zea mays
  Peptide Sequence Number=SeqID_42094
atgtcccgcgggatacggccgattcccagcgccctgggcatgcaggtgaacgagcgctttttagacctggcctgcacccacgcataccggctgaggcggtgccatgcagtctcgtcctttgcatttgagaacaacgaattcggcagaatatgcttggcgacccgcgacagcttagggatggatggatctggtgggagccagcggtgctactataggtgtacataccaccaggatcatggctgcccagcaaccaaacatgtggagcaaaacaattcgcaggatccgccactgttccgggtaatctacacaaatgagcacacatgttgcagcacccatgtctcagactatatggcttcatctatatacatccagcagatcgccgatgcctctttgagagaggcagaggtggaaatacctagccagctggcccaatgtttcggtggccacgaattgatagaagaagagaatgatgccatcatctcctccttgctcacggccatcagtggttgtgatgttgcaacattagatggcgggcagcatgcagccatcgaagagaacacacctgctcggatgcccagaagcagaattgaggctagcccttcgatttcacccgtactgttgcatgcatcgtccgataagctgaaaacagacttcatcgagccactggagacccaatggttcgagcttttggatttaggttggttcatagaataa

SEQ ID NO: 316 - DNA, 1131 bp, Zea mays
  Peptide Sequence Number=SeqID_42095
atggcaactgatcaagacgcgaagctgttcgacgtgctcgccggcggttaccatctcaccacccagctccaggcattgctcggcggccgccgtcccctggatggcatcggccagcaggaggccatggcgttcagccaggagctctcgcgcgtgttcaaggtatccatgtccatgctgaacggtagcgcagtggcaggagcgaagacggcgccggcggtaaggcccggcgccatcgttcaggcggtggccaaggataagcgtgcaaggagtgatagtagagaagtggttactcccgccagaaggagtagagaagatggggttactcggaaggagattacggcttcgccatacaaggatggttacgtgtggagaaaatacgggcaaaagaacatccagaactgcaatttcgtgaggtactacttcaggtgcagccgcgaccggcgctgcgaagcgaagaagaaggtgcagcagcaggacgacgacggcagccatctgcctcccatgttcgaggtcacctacttgaacgagcacacgtgccatgcgctccgtgccaccaccaccgccaacggcgacgctgctgtacctgtacctgtagcggcatcgcccccgaccacgaaccggcggtggtactaccgggacgacgccgcgagagacgacgacggtggcctgcagttcgacctgtcgtcgtttccccgcatgagcggccccggaggcgccggcggcagcgcccaggagaaccagaccatcgtgtcgtgcctcgcggacgtcatccgcggagccgcgccgtcgccgtggtcgccagtagcggcagacgcaagcgatgctggcgcggcgtcgtacgggcccgcgccgatgcagatgcagatgatgcaggcctccggctccgggcactcggcgagcgtggcgcaagatggtggggccacgatgatgacgacgatgatcggcacggacgacacggacttttgctgctgggatccctcgctggtgggggaggccgatcatcagatgatggacgaggaccaccgcgacatgctgcacgtggtggatgtcgcccggctcgcggacacggtgtggccgcggcacaccacccccgcgggcgcttggcactgtccgctgtgcccgcagatatag

SEQ ID NO: 317 - DNA, 586 bp, Zea mays
  Peptide Sequence Number=SeqID_42096
tgagggcgtccacacctcatcgtgcccccgccaatcccccacgcgcggcttcctccctcgccctaaatcctcgccgcccgccttcaacgccggcagccgcacccccaaattcctccccaccatcggcgccctttcccaaacccacccgtggcttcctcccccacacgcggctgccgagatgcctccttctacgcgcggctttctccccaccaacggcgccctgccctaccatgcccccgcccccgccatgctcgtgcggccccgcctacgccccgcgcgcgccgccggctatgcgccgatgtcgaaggtggtgggagcagagcgacgtgacgtgacgccgtgcttggctgctagccaaccagcgcctccgtccccctgcctccacccgggcgctttgagtttctattgccagtgcacccatgtccaattgtccaagttcaacaggatcttcgggaagcccaaggagcagcccaactccaatgccttgatcactctagacaagttctgtagtgtgcctcatgttgcccagtcgagtatggggatgacagatgcatcccattctcttgtccagctcttctggctctga

SEQ ID NO: 318 - DNA, 129 bp, Zea mays
  Peptide Sequence Number=SeqID_42097
atggctggcacgcgtgcgagtgatcaaggcattggagttgggctgctccttgggcttcccgaagatcctgttgaacttggacaattggacatgggtgcactggcaatagaaactcaaagcgcctgctaa

SEQ ID NO: 319 - DNA, 546 bp, Zea mays
  Peptide Sequence Number=SeqID_42098
atgggcgtgcacgccagggcgatgagctggtacacgagcccgccggggtcgccggctccggggagcgccgccgaggcggagcacgcgctgagcagcagcccccggggcggcgacaccaacatggtcatcgtcctcgccgcgctgctgttcgcgctcctcttcgcgctgggcatcaactcgctcgcgcgctgcctcatccgctgggcgcgccgcgcgccggcagcggagggcggcggcgccggcgggctcgagaagcgcgtgctccggagcatgcccgtcgaggtgtacggcgccgcggccgtcaccgtcgccgacgtctgcgccatctgcctcggcgagttcgcggacggcgagaaggtgcgcgtgctgccgcgctgcgcccacggcttccatgtccgctgcgtcgacacctggctcctgtcgcacgactcctgccccacgtgccggggctccgtgctcgacggcgcaaaggccgccactcccgccggtgggggcagccggtggcagggcagcgaggctgctgccatcgccgttgtcattggatga

SEQ ID NO: 320 - DNA, 774 bp, Zea mays
  Peptide Sequence Number=SeqID_42099
atgagcgccgacgaggacagagcgatggccgcggccttcccaggctccacgtaccgtgcgttcagggagaaggtggacaccttggcgtccaaaatggaggatatagcaaaagctgtcatcagggttctacacgataacgtcaaaaaccctaaagcctctgccgagcccagagaagccgccccgtcaatcctgcgcctggcactgtacagcagtgacacgtcgagtacgtgctggaacgagcttgacagcaccactgctcctaactcgcacgctttgagcgtccacctctgcggacaagaccggcggatctgtctgcggcggagtctggggggctcgaccgtctccactctacctgcgggctgcatgcttgtcacagtcggcaagcagattcaggaatggtccaacgggcagttcaaggccgctgttggaggagaggtagtactgttcgagacgaccgacgaaccaggccccttcgtctccgcggaactcatcggaccagatactggtcgctctggttttgctgtctttgttctacctcttccggggctgatccgggtggatcgatccgtttggactggattgtcgattccttttgcgacgtccgagatggctagattttacagccttgtcggacctgtgacgactgcctgcccttctctgttggctggctacggagatgatgggggaaaacaccgcgtggattgcggtggcatgcaacaggtggttcgagtgtttgtggtgatttgcatggcttttcttttcttggagggatag

SEQ ID NO: 321 - DNA, 1212 bp, Zea mays
  Peptide Sequence Number=SeqID_42100
atggggcggcacaagttccggctgtcagacatgatgccgaacgcgtggttcttcaagctccgggacatgcacgcacggggcggcggcgcggcggcgaccagcccccgcgtggccgcgtcgcggccgcccccgagcacgccgagggccgcggcctggctcccgcacagggcgtctcactactacacgcctcgggcaggggacctcggcggcctgggctcgccgctgcaccccagggcctccgacacgcacttcccgccgctgcagctgtcgccgccgcgccggtccaggcggcgccaccggaggcggtccgtcaagctggcgccgccgccctcggccagcagcagcagcagcagcggcgtcgcgtcctcgccggcctcagccgcctgccgctgccggcaagagctcgtggtggtcgaggcgcccgacaccccgccgtgccgccgcgacatttttgccggttacagtagcgacggcgacgacgagtgcgtgaagaaaccgacggtcgccgtccgcgctcaccacaggctcgacggcaaggtgatcacttccgccacggatatcatcttcgacctgcggaccaagaagaggcccgcaaagtctctcccgccgatcgcgaccaagccggcgacgaagagggagcccgacgtgtgccagctcgaggacaagcacatcgacgtcctcacacacgcggcccgacgcacctcgccagctgtccccgagcagagcacgctgaagccacggcggcggtccgtgtcgtcggcgcgccgcctcaagacgcgcgcgaacaccccgcgcttagcgtcgccgtcgtccaagaagtgcaagtcacccacgaccacgacggccgcgcgctccccgccgcctcctctggccaagagcttcgcggtggtgaagtcgtcgcgggacccgaggcgggacttccgggagtccatggaggagatgatcgcggagaacggcatccgcgccgccgccgacctcgaggacctcctcgcgtgctacctgtccctcaacgccgccgagtaccacgacctcatcgtcgaggtgttcgagcacatctgggtcacgctctctgacgtcaaggggaacaaggttgttactgtcggaagaagcttcggctgggaccagcagtggaagaggattttactgcgatcaacaagatggaccaactgccgaaagctgtgcagcctacagcagcagcagcagcaggagtag

SEQ ID NO: 322 - DNA, 309 bp, Zea mays
  Peptide Sequence Number=SeqID_42101
atggcgccaatgattgcaatgattagcaagacgcaaggcacacaacaaacaggatggaaggacggggtgggggttgagagatcggcatcagccaccgcctccgcctgtgcttgctgcttggcccgggcagggcagatccccctccgcattgatgagggaaggaagggctcacggtccgcaggggtttcactgcacaaccacagccacaggggccgccacggcctggacgactccgctgcaggatccatccgcacaggccgcgcgggcccctggcggtgcacggatgcatttggcgagacaaggacctga

SEQ ID NO: 323 - DNA, 837 bp, Zea mays
  Peptide Sequence Number=SeqID_42102
atggacagaaaagaggaaaaagaagagcacgacaatgcagatgatgatgaagacgatgatgaagacgatggcgaggaatatgagcattcagttgagtgtatggtttctaatgtgaatttcgatgccaatatgaagcaagaaacaaagggatttgaatccaaaggtattcagtgtactgaagcaccagaaccttgcgagacagtagaacttgagataaaggcacacaagaaagagttgatgagaaacagagtagcaaatgcagaagaaactcctggtttcacagtatatctgaatcgaaggccagcaagcttggttgaggccatgaaggatatcgactcgaagatgctgaacccagttgcatttttgcgttctgcgtcatcccgttcatcatcatctcgtttccttcttgctccctctagctcaatagatgatctctttgacaatgagactagcagctgctactctgaagaatcttgcagtaccatgtctggaagtcaccactctaccttggatagactctatacatgggagaagaaattatacaaaaaagtaaaggcaggtgagcggttaagaatcgagtatgagaagaggctgacacatttgaggaaccaagatgtgaaaggcgaagaacctacctctgttgataagatttgtgcagcattgagaagcttgcatactcggctgaaggtgtcaatacacacagttcagtcggtatcaaggaggattgaaattctaagggatgaggagctgcatcctcagcttatggagttgattctggacacggagacgatcagcaagcacgacgtgatcagggattttccttcgcatctcctgtag

SEQ ID NO: 324 - DNA, 783 bp, Zea mays
  Peptide Sequence Number=SeqID_42103
atgggcgcccgccctcgctctcgctcggctcttccccgcctgtccttcctgcctcggcgccgccctcgacctcgacctcacttgatctgcctgctcccagatgcagcagaggtagtcgccgcggcgccacctgcccactgcactgccccagagcctccaagctgcatatcggaattcggaagtgaagcgccccgtgattcgcagtcctcctctctggatctcgcggtggaagtcgccggtccactcgatcagcaagcgagttggtgccgcgcggcggattccccgacccgagaaaaggaaccggacatgcggccgcggctggtgctcttcggcgactccatcaccgagttgtccttcacgtccggcggatggggcgctgcgctcaccgaccgcttcgctcgccaggctgacgtggtgctgcgcgggctcagcggctacaacacgcggtgggcgctcaaggtgctgccgcgggccatggagggcgcggcgggcgcgggcgcggacccggcggccgtgacagtcttcttcggcgccaacgacgcctctctgccggaccaggtgcaggcgcaccagcacgtgccgctcaaggagtaccagagcaacctccgcgccatctgcgcctacttcaaggttaagttatgggcttatcttggattcggatgtcttggattggtcactcacctatctgtcgcttgggttcttcgatcgcaggagcgatggccctccactgctgtcatactcatcactcccccaccgatttacgagccagcgagaatccggtaa

SEQ ID NO: 325 - DNA, 1131 bp, Zea mays
  Peptide Sequence Number=SeqID_42104
atggtgaatgggggtggcactgacttggtgttggcctgctgctgcgagacctcgaagcatgtcttgagctgctccgacacgacgccgatagccaggaagccggcccacgccagccccgcaccgattccggaccgccgcgtcaacgacgaggctatccagtcagtggagtctgcgacgcccgcgtgcttcggcctcgccgctgccgccgcctgctgtggctgcgcttgcacggagtgccactatttctgtggttccggctgctcgctggacgatggcgaagccgaggaaaacccgtacctcggctccagatccgcccgtagccgccgttcggcttccgtggcacccaccggcgccggcggtccccacatccgttctgatctcgctcgctgcgctcctcatccgcgtgctggacgtgctctagcactgccagattttcaggctggaattgaaggctgtaactactctagaaagttctcccacaagggtgacacatacagaaaaactgtcaccttctggtgggacatcaaaggttctggaagtgctgatatttgtgatacatttgatatgataaaagaaccgggggagctcattgtttctcctaagctccagttcgcaatgcaaaaacagttccttcagaagagtgatgtatctcctggagttgctgagggtaaggcatgtgcagctgctgatcttagctcatggatagcttctaaagaagctgggtctcaaaatgatattaacaatgacaggccgaaaacttctctgtgccatgctgattccatgaaaataaaagttagtgatgaactaccagtgaagcaatggacatactgtgatcatatgtctgatttacacagttctttcacatctgcaaataatgatatagccaaagaaatgaatgaagtgctatttaaatcattgcctgctgatacatctgcccttgatttgttggcatcaagtgatcttcttagccaacggaagattgatttgattggcaaagaaagacttggagtacgtaaaaccaggctgaggttgaaagagcagattcttacaatgaagttcaaggcatatcgtcacttgtggaaagaggatgtactcatgtacggctactttctgcaaagaaacagcgattga

SEQ ID NO: 326 - DNA, 270 bp, Zea mays
  Peptide Sequence Number=SeqID_42105
atggccgcgggtgggaaccagatcacacggggagcgaaccgaggcggggtacttgacgcgctgggctgggagggtgggatcggaggcagagttgggtgggggttagaagcgcggcggcgcgtgccaggcgaggcgaggcgaggcgagacggacgacggcgctcgcgcctgcggggcggttgcttccaagttccaaatacggcttcgcctcgccgtcgccactgtccacggccgactggctgtctggctgactgccgcttactgcgactaa

SEQ ID NO: 327 - DNA, 357 bp, Zea mays
  Peptide Sequence Number=SeqID_42106
atgaacagtgacacgctagattggtgggagagagaagagtgccgacacgtcgacaggaggccagaccaggtgcgcgcgtccgtgtcggcgatgagcgcgggcgggagccgggcgcggcagaacgcgatgcgctcaggggtggtggtgctgggcgccgtggccttcggctacctctccttccgcgtcggcttcaagccctacctcgaccaggctcaggaggccatcgactccgcccgcgaccccgaccctgaccccgccaccaccgccgcgagggacgcgtccgacgatcccggcgccggtcgcccagggggagacctcgggccgtccaaggacccggccgtcgtactgcgcgactga

SEQ ID NO: 328 - DNA, 1662 bp, Zea mays
  Peptide Sequence Number=SeqID_42107
atgaccggctcggcggcctcgctgggcctgcggtccgggagctacggctccctcgcggccgccgccgtcgtcggcagcggcgggaggaaggccggcgccaccgcctgccgcacgctgcgcgtggagaaggagcgcctgcaccgcgcgctgcggctggtcggacgccgcaggaccggcgtcctgctgctgctcgccgtcgcgtccgccgctctcttctgctccctcttcgccgtcgtcaaagatgacgccaattcaactagtattgtaaataattacgaagtcccaaatgccatacagaagtcagtgtatcccagcagaacacgacctctaatgatgtctggaaaccaagagtccaccagtgttgtcaacaaaattgattttccaaatcggcttcatctttcatttgcaaacttcacacatccttgtgaaggtttctcagttcctcctcccctggttgataagaaacgcactggaccccggccatgccctgtttgctatgtttccgtggaccaggcatttgccttgatgcccctacaagcttcaccatcacctgtcctaaaggacttaaactatgtatcagaagatggtgttactgcaaatttatcaaatcagggatctggatttggagggcatccatccctggatcagagaaacgattctttcaacattaatgagtcaatgactgtccactgcggctttgtcagaggaaagaagcctggccaaggtactggattcgatatcaaggatgacgatctgctagagatggagcaatgccacgatctagtcgtagcttctgctatttttgatgaagaaacagaggcttatgtcaagaattctagttctctgtacaacaataataaagttggactgtggaggctggtggttgtccgaaacctcccttatgaagacccaaggcgtacgggaaagattccaaaacttctgctccataggctttttccaaatgtgagattttcagtttggatagatgcaaaacttgagcttgttgtggatccctatctcctgcttgagaggttcctttggaggaagaataccacttttgcaatctctcggcattacaaacgctttgatgtgtttgaagaagcagaagcgaacaaagctgctggaaagtacgacaacgcgtcaatcgattaccaaatagagttctacagaaacgagggcctaacgcattattcttctgctaagcttcccatcacaagcgatgtccccgaaggctgtgtgatcatcagagagcacatccccatcacgaacctgttcacgtgcgtatggttcaatgaggttgatcgcttcacctccagggaccagatcagtttcagcacggtccgggacaaaatcagggctagagttggctggatgcctgagatgttcatggactgcgaaaggcgcaactttgtcgttcaggtataccacagggagctactggagcagatgattgcatctggtaggatgccccctttggcggcggctgtgacgcacgcgaatgtccgggtaggtagcaggaaagctcctccgacaaagaagccctccgtgaaacggaaaagggagaaaaaatcgagctcgcgacggcgtctcccgaaacccatcgcccaggggttggatgccaatgtgacgcaagtttttttctcagtagcagagtctggatag

SEQ ID NO: 329 - DNA, 1611 bp, Zea mays
  Peptide Sequence Number=SeqID_42108
atggagaagcagaagttcctcggagccaactcgacggcgcggcggcgcccgctcagctccctctccggaaacaagccgagcccggcgctgcaatccctgatctgcaaggcccaccctcacgccgaccccgccgcccaagcgaccaccgccgaggtagacgcggcgctcgaccgcctcctcttcgcccgcaccgacctcgtgggtatcgtttcccagattgacgaattgatctctgaagccttaaaatgccaaaatgtgtccaaaaaagcaacacgagagatagaatccttcaatggcttcttaacagacactaaggcttccttcaagcaatggtcttcaagactgaagcaagcactagagaccggtctggtgaaaaccgaagctatcccaaaaaacacaccgggaacttgcttaaatactgctgcaaaagggaatgacaagttgatcagctgcagtaccaagctacctgatacaggtagctcaaaaaacacaccaggaacatgcttaaataatgctgcaaaagggaatgacaagttgatcagaggcagcagcaagctacctgatacatatagttcacaaaacacaccaggaacatgcctacatactgctgtaaaagggagtggcaagttgatcagcggcagcagcaagctacctgatacagatccactggagtcaccttgcagcaactttactgaggtcgacatgattgtctcaccttcaccacttgtctcatggaacactggatcttgtatagttgagagcggaaagcagttgtttctcttgacaccactgccaaaaacaaaagcatgctcgtcaaggtgccaaacatcaaaaacccagatgaagacagtttctagcactgaccaattgaacaatcttctaaggcctgtttcaaagctaaccatttctgataataatcatcctgatctagagcaaagtgtgaaggtaaaggaatcatggactagcactacgacacctcatgttgctctagcaaacaaggcctcactagaagacaagctctgttcgcctcgtactttctcagttcagaagagcagaacactgcctagatcatgcctgaagacagcattatctagcaagcagcagctgttctctccaatcccggagggaaggaaggaggaagacattgacagcaatggttcaattggggatgacaaatgctcatctgataaaatctcaaaggatttagcatcaagatatgatatttatgggcttaatcaatcaaacagacaagtcgaagatcctcttcagtggtttctgtcaccactgaagacaatggtgttaatagatccatcagaggataatcaacttccaactccagcgaggagtaacatgggggaaagattggatattgccgatgacaagcccatccacactcctgctgtgcatagcaaggccttacttggtaccccctggaaaggcttggagagcacgaacctgaagggaaggtgtgctggagaaactactcttaagaaagaactgtggactcgatttgaggcggcttcaaccaatgagctgcactttgataaggtgcgcttccagcagacagacgcaaaatgttttctggacatgcttgaagaagaggcgtcgtga

SEQ ID NO: 330 - DNA, 1497 bp, Zea mays
  Peptide Sequence Number=SeqID_42109
atggtcaggctggccgagctgctggtggcacatgctcggacgccaacagtgcccgcccgggacatggccatgctggccgcgatgcagtggagattggcgcgtacgtacagtggagactggtgccgcctctttcatgtctgcagtagaaattgctccaagaacgtggggactaggatgaggaaggttggtggtctggcagatgtgatctctggtcttgggaaggcacttcaaaaaaaggggcaccttgtagagattattcttcccaaatatgattgcatgcagcataaccaaataaataatcttaaggttctagatgttgtggtgaagtcttactttgaaggaaatatgtttgccaacaagatatggactggaactgttgaaggtcttccggtctactttattgaaccgcaacatccaggtaagttcttctggagggcacaatactacggagagcatgatgacttcaaacgtttttcgtactttagccgtgttgcactggaattgctttaccaatctgggaagaaagttgacataattcactgccatgactggcagactgcatttgttgcacctctttactgggatgtatatgcaaacctgggcttcaactcagctagaatttgttttacctgtcacaattttgaatatcaaggaatcgctccagctcaggacttagcatattgtggtcttgatgttgatcacctggatagaccagacagaatgcgggataattcacatggcagaataaatgttgttaagggtgcagttgtatattccaacattgtgacaactgtatcaccaacatatgcacaagaggttcgctcagagggtgggcgtgggctccaagatacactcaaagtgcactccaagaaatttgttggaatacttaatggcattgacacagatacttggaatccgtctacggataggtttctcaaggttcaatacagtgctaatgatctatatggaaagtcagcaaacaaagcagctcttaggaagcagttgaagcttgcttccacacaagcttctcaaccattaagagagttcgagggtattgcggaccaatttcagaacaacaacaatgtcaggctgcttttgaagtatgatgatgctctggcacatatgatctttgcagcatcagacatgttcattgttccttctatgtttgaaccatgtggcctcactcagatggtagctatgcgatatggttctgtgccagttgttcggagaaccggcggtttgaatgacagtgtcttcgatttggacgatgaaacgatacccatggaggtgcgaaatggcttcacctttttgaaggctgatgagcaggattttggtaatgcactggaaagagctttcaactactaccacagaaaacctgaagtttggaaacagttggtgcagaaagacatgaagatagatttcagctgggatacttcagtttctcaatacgaagaaatctatcagaaaacagccactcgagccagggcagcggcataa

SEQ ID NO: 331 - DNA, 2367 bp, Zea mays
  Peptide Sequence Number=SeqID_42110
atggccgacaaggagaagttggagtctgaagaggagtacgagagcgacctcgacgacgcacccctctccgcgttgcggcgccgggacgctgcgagcgatgacgaggacgaggatgaggacggagggatgcccttgaggcggaggaaggctggatccgacgcagattccgacgggcagggcgccgccgaggtgtacgacgaggatggcgcgtacgaagaaagcgaggagtacgaggaatacgagtacggggggttcaaagcagggggcggcggagtgcgcggggtggctgtcgaggcggttgccggtgcgggccatgaggaaggcgaggcgggggatggggaagctgaaaaggcgggtgaggcagcgccaggaggcgaagaggaggacaagaaggggaacgaaccctactccgttccgacgaccggcgccttctacatgcacgacgaccgcttccaggagggccgggggcgggggcgggggcgccaaaggagaatggtgaacagtagaaggttatggagtcctaaagatgagcaagcctgggttcatgacagatttgatgagatggacctgcatgattttcatggtgacaatccaaaaagaaagcagggaggtgtctttagaggacgtggtggtggacaaggtggtagaactcgtggtattagccgtggtaacttcagaggcagcagaactcgaacatactatcatgatggtagcaagaactacagctatgttccaaaggaatctcatgcataccgtgataacaccaagaatgcccatcattcttcacacattaatggaaagaatagagttccaaaaccatctcgtgaccactatgatggtgctaaaagttatgacattgtcccaaatgaatctcacatttaccatggtgatgctaagagccaaaaaaatgcaccaagagtagttcgagggagaggctccaagcgttaccaaccacgcttgaaaagcacctctgatgtatcttcagtgcaaaataccaaatctcagagtcttgaaggcacttcgtcaaatgcaaacttggtaaaagatgaagctcaaggaccaaattcacgacttgagcaagtccttcctattaagcagactgttgcatcaaacttgaattcagcttcgccaccattttatcctgcgaggtcatccagtcaagagtttgcagttggtcaaggagagaatacacaagaacttagtactaacctagtaagaggaaaggcttttgtgccatcggggcatgttgaagctgctataaatggcatgaatagacctgcactgcttccacctgcatcgtcatcaaatggtccatttcctgtagccactaatcaagtcaatagagattatggccatcctgcacatccaattgttcaacaaaacccagttcaaccccctacacgatctgcacccaggatgcctgcccagatgtttggtgcaacattcagcaatggcagtaaaatatcacctgcacaacctacatcaactattttagatgatgacgctgaaatttcttcacctagtggatcaaacaaatatgattctcggttaacagttaaaggacaacctgatgaccaaggagaagagcgagcttcgtttctctatggtggggctcgtgttcttggggctacaagcgcaatgggaatcacacttggtgatcaaaattttcatggtaccccagcattgctgccagttatgcagtttggaggtcagcgaccagttggacgtggtgttccttcaattggtatggctctgccaggatttgtgtctcaacagcaacttggtatcaataattctgagatgacttggctaccaatattgactggtgcctctggagctctaggagcaccttatggttcaccttatatagccgtcgatggaagttattactctcgaccgcctgaacaaccatcttcatcagtttctaatagagaatctagtgcaaataatgcttcttctctgaagtcccaagaaattacagaggttgcaggcgacgcaagaactcaacaccaaaataaacctcgtcgtcagctgtgcttacaaaatctggacatcgcccgtgtgcaggtgagtttatcggcatttcaagtgtttggaattcttggccctcactatgcaagtgaacggttgtgtgacactagcgtccttgcgttgtcaggtgagattttctgtgtacatcacgtctctgactgtgtttgggtgtgcgctgcctctgcctacgaactcttcggtggttgtcgcatttttgaactgacaaataaaaaagaacgtgttgagcaccaaattgagaagggcggacggtccagcccggtccggacagtccgcgcctgtgggctgcacggtctgcgcaagcgcagaacagattag

SEQ ID NO: 332 - DNA, 249 bp, Zea mays
  Peptide Sequence Number=SeqID_42111
atggccgagcgagccaggtccgcggcagcctggttgtgcatcgcctatcctttcaccactcccgaaataaaaaaatcgtgccaaaggtttcctcgtcgagctatctcgcgccttttccccctccccgccgccatcacaaacatgcataggtccagcttccccgccgccaggtttgatctgtctctctgttaccggtgcccgtttctctcacaggtcgcagccatcggtacccgcctgaaagtcgcctag

SEQ ID NO: 333 - DNA, 306 bp, Zea mays
  Peptide Sequence Number=SeqID_42112
atggggaggggtgagcgtcgcgggcaggtgagggcgagcggacaggatggaagaactagttgtcaggcgtgcagcaacagaaaacgtgcaacaaccccttctctccagtatagcttgcgtgtacaagaggcgctagtgataggtggattgaaggaatgcatttccgcgagccccgccggaggaaaaggatctagtggtggattccaaagaggaatagatcaaagaggagatagtaagccgaccaactatggcactggtggtcaggcaacagatgactggtaccttgtatgccgttctagcgcctaa

SEQ ID NO: 334 - DNA, 240 bp, Zea mays
  Peptide Sequence Number=SeqID_42113
atggacatggcttcaggttcaggctttcaacaaagcaaacagccatacgtgatacgccaatggacatgggcagcaacaggccaacagccatactacaacatgaagcaaataatcactcgaaggtttcaggtttttgaaacatttgttgaatctacactattgtacaaccaacatttgtccttgactacccagttgagatatcaccattggcaaaaccacattggaggtttagtggcataa

SEQ ID NO: 335 - DNA, 288 bp, Zea mays
  Peptide Sequence Number=SeqID_42114
atgatgatcgccgtgaagtgccgctacagcgtcaagatgtgtccccgcaggagcttcgccgactcaacaaccttcctcgtcacccatcaggccatcacatcggcgctacactacatcaccggctcagcacctgttattcatgttgataaaaatgtcgatgaaccattagagcctgctgcaaagaaaatgagagagaaaaaggctacatatgaggaggagaacctggctgatgatgaggacaatgggaaggacagtgacatcgacgactacatggagatggatatttga

SEQ ID NO: 336 - DNA, 594 bp, Zea mays
  Peptide Sequence Number=SeqID_42115
atggacgacctgctgttgccatccaaatgttccatattccacactaaaccgacgcgtggtgtcgcaagaaagaagcttggccattatccagacaccattggcctggccggtcagatagcttggaaactgtctctttccaatggctatataaaccagcctcacttcactaattctgggcaaagcaagcaccgctacttgaagcatcttacacgaagctcttctagctattcctcttcccgcgaagaagtggtaatctgcttgatcagtaagtacacaataatggaccgggtgacgaagctggcttctcagcgtgcggtggtgatcttcagcgcgagctcatgctgcatgtgccacacggtgacgcgtctgttccgcgagctcggggtgaacccaacggtggtggagctagacgaggaccccagctggggaaaggagatggagaaggcactagcgaggctgctgggccgcagccctgcggtgccggcagtgttcatcgggggcaggctcgtcggctccaccgacaaggtcatgtcgctccacctcagcggcaatctcgacacaatgctacgcaacgcgggcgcactctgggtgtag

SEQ ID NO: 337 - DNA, 1083 bp, Zea mays
  Peptide Sequence Number=SeqID_42116
atggcggcggcgccgtcctccctcgcctcctcgtcgcatatcccccgccgcgccacagccacggccccagcacagtcgcactcgcctccgttgccgcagcagctccgccccgccaggtccttcaaacgcggggcgctcgcgcagcacgtccggtacagctttgccggcagggaggcatcgaggcggcgcacaccagctgaacaaatttttggtgctggtggaaaaagattaaggccagcattggttttcctggtgtctagagcaactgctgaattagctggtttgtcggagttaactgcagaacatcgacggttggcagagataatcgagatgattcacactgcgagtttaatacatgatgatgtcatagatgatagtgggatgagaagagagctaactgtttcagggaaggaaactattcaccaactatatggtacacgtgtggctgtacttgctggtgattttatgtttgcacaatcttcttggtttcttgcaaacctagaaaatattgaagttataaaattgatcagtcaggtcatcaaggactttgcaagcggcgagataaaacaagcttccactctttttgattgtgacatcacacttgacgactaccttctcaagagctactacaagactgcatctttgattgcagccagcacaaaatcagcttccatattcagtggcgtcagcaccactatttgtgaaaaaatgtatgcatatggcaggaatcttggtctatccttccaggttgtcgatgacatcctggatttcacccagtcagccgaacaacttggcaaaccagcagcaagtgacttggcaaagggaaacctgactgctccagtcatcttcgctttgcaaagtgaaccagagctaagggagatcattgattctgagttcagtgacacggattcgttagctactgcaatagagctcgttcatagaagtggtgggatacggagggcacatgagcttgcaagagagaagggtgacttggcaatccaaaatctgcagtgccttccaagaagtgacttcagaagtgcccttgagaagatggtggaatacaatcttgagaggattgagtag

SEQ ID NO: 338 - DNA, 246 bp, Zea mays
  Peptide Sequence Number=SeqID_42117
atggacacacctatgccacaggcttcttgtgggaaaggttctgagaagaaatcatacttcatgaatgtaacagctattgtggtgtttccacaattctggaagcttgcacgttgcaagcgcgtccagcggtccagccaagcattcgagtctgaaattccaatcggcgaacgcgatcatcagaatcagatagacagactacacggatttttctccaggaagatatataaaaatttaagccgttcttaa

SEQ ID NO: 339 - DNA, 1035 bp, Zea mays
  Peptide Sequence Number=SeqID_42118
atggatcctccgccaccactggcgctattcgcctccagctcgtcctcgtcctcgccctcgccgccgacgtcgtcgtcgtccggcgcgagcatcaccatggtgatcatcacagtcgtgggcatcctcgcggcgttcgcgctcctcgccagctactacgcgttcgtgaccaagtgccagctcctgcgcgcggtgtggtcgcgccagccgccgtggcaccggcgcgtgcggggggccggcggcggcggcttaacaggcaggcgggacgagccgtcgtccgtcgtccgcggcgacgggcggcggggcctgggcctgccgctcatccgcatgctccccgtcgtcaagttcactgccgcctcctgcgacgccggcgccggcgctggtggcgtggcgccgaggatatccgtgtcggagtgcgccgtgtgcctgagcgagttcgtggagcgcgagcgcgtccggctgttgcccaactgctcccacgccttccacatcgactgcatcgacacgtggctgcagggcagcgcgcggtgccccttctgccggagcgacgtcacgctgccggcgatcccgtcggcgcggcgcgccccggcggcggcggcggcggtccttcccaccagcaggcgccgggacgacgcgctcgccagcgaaagcattgtgatcgaggtgcgaggggagcgcgagaggtggttcagcagcagccacgggacgacgacgacgacgccccggcgccagccgccgaagcagccggcgccgcggtgcagcaaggcggcggagagcgtcggcgacgaggccatcgacacgaggaagacggacgcggagttcgcggtgcagcccttgcggcggtccgtctccctggactcctcctgcggcaagcacctctacgtgtccatccaggagctcctcgccacgcaaaggcaagcggccacagcgccaagtcactcacaacacaaggacaaggccgctggatttcctgacaggatatacgagagggaccttgggaggttggcactgcactgggacatgttgttcatgtcatag

SEQ ID NO: 340 - DNA, 231 bp, Zea mays
  Peptide Sequence Number=SeqID_42119
atggcatggagcccattagcagcctctggcgaaggcaactgcttcgagtccttgggcgaaggcgaggatgacgactgcgctgtggaatatcgtagagggcggcaaggaaggctccaggtgaggaatggatgtgagagcacaatcacacgcgcaagggggtgcgacatctatggagaggtgaagaaaggaaaatcacttttagtaccagttgtatataataaccgatactaa

SEQ ID NO: 341 - DNA, 909 bp, Zea mays
  Peptide Sequence Number=SeqID_42120
atggacgcggcggcaggcgcgccaataccagcgccgtcggacgcggggcagggcacggcggcggcgttcccgatcgccatcgtcatcgcgatcgggttcatggtcaccacgctcatcctcatcagctactacttcctcgtggtccgctgctggctccgcggcggggggcccggcggcctgctccaccgcgcgcgccgcgaggacgaccgcggcggcctggcggagcgcgtgtccgcggtcttcttcgccgaccacgatgccgctgagctcccgggcgggctcgacccggacgtagtcgccgcgctgcccgtcgtccggtactaccgccgccgggcgaggtccgcgtccgagtgcgccgtgtgcctgggcgagttcgcgcccggggagcggctcaagctgctgcccggctgctcccacgccttccacatcgactgcatcgacacctggctccaccacaacgtcagctgcccgctctgccgcgccgtcgtcaccgccgtcggcgtgctcgcgcgccacgaccacgacgcctcctgccgcgacctgctgcagctcggcggcggcgacgcgcggcgcgtcgtcgacgccgcggcgagggtcgggtacgggagctcctgcaggttcccgaccaaggccgcccccgccgtcgcgcaggagcccatcgcgcgctccttctccatggactgcttcgcgggggggctcggccggaagccgcaggaaaaggaaccagctgccggcagctgcggggaggccggcccgagccttgccgttgccgccgccggcggcagcagcgacgtcgctgaccgcggcgctggcgagacgagcggccggttccggcggctcctgtcgtcgttcgggctgggtcggagctcgcggagcacggtgctgccgatccacctcgacaacccgtga

SEQ ID NO: 342 - DNA, 327 bp, Zea mays
  Peptide Sequence Number=SeqID_42121
atggggaaggcagatcagcgggtggggaaagtagagcagcgggtggggaagcggaggcagaggattaccggtgatggaagctccgacggcggagaagttgctagcggcggcaacagattaggctacaaacttgctatggagtttcaagaacaagtcatggatgcctacagtaggtgtggccatggtgccttggatgatttcaaggaagctgaaaggcttttagagcagatcaagatgaaggctcaaggattgcgtcatgcagtatttcctgcaaattcattgcctgattcagctctagctctagctcaacgcaacaaagacgattag

SEQ ID NO: 343 - DNA, 465 bp, Zea mays
  Peptide Sequence Number=SeqID_42122
atgggcaagagtaacaagcgcaagcgcgaatcgactcctccatcggaggatttcggtggctcggaatactcggaggaggagttctcctccgagtccgagggatctccggctcccgtctctcccccggcgtcgtccgatgactcggacgactcccaggggatagccgcggaagtctggacatacatccgagctgttgagcgctccgggctcgagggctcggatgagtcggagtactcctcggatgaggaggactcggacggcggcggcgaggacgaggacgacgacgacgacgacggcgacgacgacgacggtggcgacggcgacggcagcggcagcggcaggggcagcagcgacagcggcagggacggtgacggcggcaacagcaggggcagcaccaagggcggcagcagcaagggcagcaccaagggcggcggtggcggcagcaggggcagggccagtggctag

SEQ ID NO: 344 - DNA, 216 bp, Zea mays
  Peptide Sequence Number=SeqID_42123
atggcctcgtggaataatgggcctggggtctttcgtgaggccttcttgccttctagtggacccgaggatatctgtcccccacaagcccccaatctttgtgctgattttgaaataatcggcccaaagattccagaggtcgacgctttgctctcagaggttaaggattcattgggtgcaccgaaggtgcacctaatgggtgtagcccccgagctttga

SEQ ID NO: 345 - DNA, 489 bp, Zea mays
  Peptide Sequence Number=SeqID_42124
atgctcgacggcgaggccgtgaagaacaagggaggtaatcacgatcaggagaactccacgagcttcttcttcttggtgacggcggtcgcgcccccggctggccctgggacggtctgcttgcacctcggccttggcctcctcctccgccttcctccctctcttcttcttcttgtgccagcagagagcagatcccagcgcgcggtgctgggtgtgcgtgtccaacgccgaacaaaagagagacagagagcagatgtaacgaaagagaagggatcctaccggagagaagctcgccagcgagtagaggtcgccggcggcggggaggatggctcgtcttcttccgccgccaccgctcctgggtctcacggtctcacaggatttgttccagacccttgcagccttggctccaatccaggaccgtctctggccaaaaaaaatcccaaacccatgggcttgaaatccagtggacttaaccgaacaaaaataaattag

SEQ ID NO: 346 - DNA, 2139 bp, Zea mays
  Peptide Sequence Number=SeqID_42125
atggagtggaatgatcctaatccaggcccagaatccttgacgagcttccaaaccgaagctgttcgaccagacaccgcagggggccacagcaacgacgacgttgaagctggatttgagaagcatggcttggcagtcaccgtaaggccgcctgaggaggaagctcggtcagtgccactaaccccacagcttggccagaagtccagtcctggcagcagcctcgcggagaggatgcaggcaagagctggattcatggtgtcgaagctcaacatgcccttcagcacagcagctggagctgacaattcagtacccgaagttccatcgccctacctcacgattccgcctggcctgagcccagcaacgctgctggagtcaccagtcttcgtttctaattccatgggccaggcctcgccaaccacggggacgctattcatgtttggtagcacaaatgacaatgatcctattagatttggaggtggtcctccttcagttggagatggccctaatgcttttcctttcaagcccttagatctgaaatcctcacactacactgctgaagcaatgaaggaacaaaatacgaagtcttctgtcaagactgaaaccaagattctgacagtacaagaggctagtttgctcagccaactgaaccagctgaatcacaattcgcagaccattattaatagtggcggtcctcatgaccccaagctcagccgtcctgcatctggcgccggtgcaggcaatgaacacatatcacccccggatcacggacagacagctgaggaaagtgatgcgagggaagactacccggcaatggctactaccacgccagcagaggacgggtacagctggaggaagtacgggcagaagcaggtgaagcacagcgagtacccgcgtagctacttcaagtgcacgcatcccaactgcctggtgaagaagaaggtcgagcgctcgcacgaggggcacatcacggagatcatctacaagggcgcgcataaccacccgaagcccacgcagagccgccgtccaggcgtccagcccgtgcacccgtttggcgacagtgcgcaggcggacgcagccgacaacctggggtcacaggcaaacgcactggacgccaaccagccgaggcgtgcgggtgttcaggatggcatggacgcgacgtcgtcgccctcagttcccattgagcgctgtgactcgccggcctcgatgcaggtcgactcggcaactcggtttgggtcccccgagggcgcggatgtgacgtctgtgtccgacgaggtgggcggggacgacagggtgactcgtggcagtatgtctcagggcggtgccgacgcggagggtgacgagctggaatgtaaacgaaggaagctggagtcgtacgccatcgatatgagcaccgcgtcgagagctgttcgcgagcctcgcgtggtgatccagacgacgagcgaggtggacatcctagatgacggctaccgctggcgcaagtacgggcagaaggtcgtcaagggcaacccgaatccaaggagctactacaagtgcacgtacccgggctgcgtggtgcggaagcacgtggagcgcgcgtcgcacgacctcaagtccgtgatcaccacgtacgagggcaggcacaaccacgaggtccccgccgccaggaatagcggccacccgggcaccgcggcggcgacaggcgcgggtggcccgcgcaggctggagcacccgtcgctgcgcgacggcctgatggggcacttgggcggctgcggcgtgccgttcggcctgccgccgcctagggatccgctggcgccgatgggcaattacccgacgtatgcctcctccattccccttggcggcgccggccccacgtcactgccgagcctgccggtgccggcggggaccctcagcgccgtcgatgggctgaagctcccgatgctggcgccgtcgtccctgcagcagcacccgctgctgaggcaccggcaggcgatgcaggccgctggcctcgtggcgcccaaggacgacgtgaaggtcgagggcaacgttgccggcggcgctgccccgtcggtgtaccagcagatgatgtgcagcgggctgcggttgcgccagcagatacctttagttcttggtaaaaaaatacccacccggataaacgatctttag

SEQ ID NO: 347 - DNA, 528 bp, Zea mays
  Peptide Sequence Number=SeqID_42126
atgccgatttccccttctgaaccggactccgtcaacagcccagccgatgcgctcctaccctcctctgattggctccctgcgtctataaaaattgggacaacccttgtggcctgcgcgctcgccatctcaccccatccacagcgaaaccgagatttgccgccaacagctagtgcgcgattcaccggtgtttggttcgcgggaagcttgggagcgtctcctcaggggctaccgcaagtcaggggtgccctgccgaagtttgggggtgtctgggggtggcttaatttctcgtcggagtcttaccccgccacggaactacgcctcgccgtggacagggcagccgccacattgaaatccggggcggatacgaagcaggtgtgcgggagcatgggtttagggcttatatgccctcggggggagccttggggccgtgttgggagccgctggccatggcctccaccacggtcgtgctcacgcaccgccggtcttaccgtcggggttgaagaaacactctgcgtcgttgagatctag

SEQ ID NO: 348 - DNA, 363 bp, Zea mays
  Peptide Sequence Number=SeqID_42127
atggcgatgcgcctccccgagtcccaccaggccaccaagttgcatccaaactgcatgctccaaatccaaatgcaatgcaatgcaacgcagcggatatgctccagacgcaacctctgtctatgcgtaccattcattcatgccttttggcacgacggcgtccaatccgtccgtccgtcagtgagcgagagtcttctcacagccgaggcagagggccgacgcggacatgactgcgctgcgctcagggccaatctgggtggcagcactcactgcacctcggtcgcaaatctcaacatgcccggcgccgcaactggtccataccctccctgcccctgccaccgctcggcagccagccactgcgactga

SEQ ID NO: 349 - DNA, 528 bp, Zea mays
  Peptide Sequence Number=SeqID_42128
atgccgatttccccttctgaaccggactccgtcaacagcccagccgatgcgctcctaccctcctctgattggctccctgcgtctataaaaattgggacaacccttgtggcctgcgcgctcgccatctcaccccatccacagcgaaaccgagatttgccgccaacagctagtgcgcgattcaccggtgtttggttcgcgggaagcttgggagcgtctcctcaggggctaccgcaagtcaggggtgccctgccgaagtttgggggtgtctgggggtggcttaatttctcgtcggagtcttaccccgccacggaactacgcctcgccgtggacagggcagccgccacattgaaatccggggcggatacgaagcaggtgtgcgggagcatgggtttagggcttatatgccctcggggggagccttggggccatgttgggagccgctggccatggcctccaccacggtcgtgctcacgcaccgccggtcttaccgtcggggttgaagaaacactctgcgtcgttgagatctag

SEQ ID NO: 350 - DNA, 1917 bp, Zea mays
  Peptide Sequence Number=SeqID_42129
atgaagcctctgggcttctcgaagaaggaggtcttcgccgtcctcaagaacctcctccagctgttcgataactcctgggagcccattgaggacgagtgctaccgcgccctcgccgatgctatcctcgaagcccgcgaccggccccagatgcattgcagcaacagtacaagaggggttcggcttccgccggagggggagggctgccggccccggccttctacttcccgtgacatccacgacggtctggatggtgggaccgaggcccttcgcatcaagaggacgaggatcagcgctagttgctctatcgatccccagtctcccgtctccgctgcggaagcccttgatgaacctataggcgtttcgtctgagctaagccatccacaaatggggacctcaacccaatgtcagcggcccactgcatatggtggcgtgccttcacatgggaatactgcacacaagaagagggcaatacaaatgatggatgaagatttccaacataccgtcttcttgagggagcctaaacctgaacctgatactgatgatctacaatgcagtgcccctgcatccagctgtcagaatgcccaacttggccgcattgcttcccacccgctcaatgccagcaccttagatgctctacctgttcaggctccgttaaagatttcagcgccttcttcctttgttgaacctataaatagcaagacgaagcaacctcaaagtctggaaaatgggttggaccatgcaactatgatgcacaatgctgggacaggatctgcagctggaaaaacacaggaagcaccttgtttacacactcttgtagcttcatccactatgggtgaggtcgagatgtcgatcaaatgctgcatagacccatcaaaattccacatgcctgatttagaagctgttttcaagatggttgaggaaaaatgccttcgctcacacaagagcctcccacctgatttttccatagccggtctcatcaagcagatatgccagtgtgtcgcacgactaggcagtgatcatgctgcagaacataataaacaatcagatgcttttggcaagatcagaagctcacaggataagccaacaacgagtagtgctccatccttggaaccaattgattgcatgaacagcagaagcggggaatataaagctgtagaagaatcattgattgtggaagcttcagagaatggcccaccaaattcaactacccatcagcaggcccatttggtacttcctcccaatgggtgtacccatgatttatctgacatatcaaagggaaaagaaaggttaagtatatcagcagtaaacgaatttggtagcgagaattgtttaccttccttttattatataccaagaaatcttgtttcccaggactcctatgttaactctgttgaaacaattggcgacaaggactgttgttctgattgctctggcaactgcttgtatgcctctgaaccatgtgcctgtgcaagaaaaactggtggtgaatttgcctatacacgagacggattggttaggacaaagttccttgatgagtgcatctctatgaaccggtttccagaaaaacataatatgttcttctgtaaatcttgcccacttgagagtatcaggaacgagccttcaccagagctttgcaggggccatattattaggaattttatcaaggaatgcgggagtaaatgtggctgtaacgcgcaatgtggtaaccgtgtagttcaacgtggtataacttgcaatctgcagtttgcatttttcacaaccaagaaggtggaagcatttgaggagctcacatgggattatggtattgattttgatggtgataagcatcctgtcaaatcatttgaatgcctgtgcggaagcagatactgccgtggtagaaagcattcgaggacgcgaggcaaagctgcttcgaagtga

SEQ ID NO: 351 - DNA, 1725 bp, Zea mays
  Peptide Sequence Number=SeqID_42130
atgtcctggttcggccccagccccaaggtgaccatcgtcgacccggacctggccaaggacgtgctgtccaacaagttcggccacttcgagaagctcaaggtcccggcgctgtccaagatgctgggctccggcgtggccagccacgagggcgagaagtgggtcaagcaccggaggatcctcaaccatgcgttccatcttgagaagctcaagcgcatgctgccggcgttttctacgtgctgcgaggagctggtgagcaggtgggcggcggagtcccttggctccgacggctcgtgcgagctggacgtctggccggagctgcagaacctgacgggagacatcatttctcgcaccgtgttcagcagcagctacagcgaagggagaaggatcttccagctacaggtcgagcaagcttcgcttgtcatgaccaacattcggaagatcatgatccccggctacatgtacttgcctaccgcgaacaacaggaagatgcgcaggaacaacagggaggtggagtcaatcctgcgagagataatcgggaagaggatccaggcgatggaacaaggcgagggcaccaaagacgacctggtgggtctactgctggagacaaacatgagagacgacatggggatgacgatcgaagacgtgatcgaggagtgcaaggtgttctacttcgtcgggatggagaccacgttggtgctgctcatgtggacgatggtggtgctcagcatgcacccggagtggcaggaccgcgcgagggaggaggtgacggctctgttcggcagggacgacaagcccgagtatgacggcctaagccgcctcaaagtcgtgaccatggtgctctacgaggtgctccgactgtacccgccggccacctccgtcgtccgacaaacgtacaaggagatggaggtcggaggcgtcacctaccccgccggcgtgatcctggagctgcccgtgctgctcatccaccacgacccggacatctggggaggcgacgcgcgcgagtttaggcccgataggttctccgagggcgtgtccagggcctccaaggaccccggcgcgttcctcccgttcggttggagcccgcgcatctgcatcggccagaacttcgcgctgctggaggccaagatggcgctctgcatgatcctccagcggtttgagttcgggctcgcgccatcctatgctcatgcgccgcataccatgataaccttgcatcctatgcacgattgcaaaaacgggactgctaagcaagctaagatttcaatggcatattccttcatacataggccattgagcgacgaggcacgccgcgtcagcactcccttggtggtcacttgcaatgaccagagacgggaggtctccgttgcccagaacatcgctaacaaggaaattgaccgcaccgttgcattcgacaaggtgctaggtccaaagtctcaacagcaggacgtcttcaaccatgctgttgtgccacttgtcagcgaggttttggacggttataattgcacaatatttgcatatggccagactggaactggcaaaacatacataatggaaggaggagggggcaaagcactgaatgctgacctcccgactgatgctagtgtcattccaagtgctgttaagcgcatatttgacatcctcgaggcacagagtgcagagtacagcatgaaggtttcttttcttgagctgtacaatgtggagctcactgatcttctagctctacaatga

SEQ ID NO: 352 - DNA, 1980 bp, Zea mays
  Peptide Sequence Number=SeqID_42131
atgccgcggtccgacgggccgaaagctctgcctcccgaaggcagggtacccctcagaacatcgcgccgcaacttcccgattcatgcgggaagcctcggtccacaccgggcgcacgcgcaacacagcgcctgcggccccgggtcgcctcggcaacgagcaccaccaccgcaaccgtcgggcccacctcgacgagaggatgcgccgaggctaccaccccatgggggacactatgacagcggggaggatcggagtccctcgctcgaaccacctggtccgcaggctttcagtcgcgccatacgacgggcgccgttcccgacccagtttcgaaccccgactactatcacaaagtactcgggggagacgagaccggaactgtggctcacggactatcggctggcctgccacctgggtggaacggacgatgataacctcatcatccgcaacctccccctgttcctctccgatacctctcgggcctggttggagcacctgcctctggggcagatctccaactgggacgacctggtccaagccttcgccggcaatttccagggcacgtacgtgcgcctagggaactcctgggatctccgaagctgccgccagcagccaggggagtctctccaggactacatccggcaattctcgaagcagcgcactaagctgcccaacgtcaccgactcggatgtcatcggcgcgttcctcgccggcaccacctgccgcgacctggtgagcaaggtgggtcgcaagacccccaccagggcgagcgagctgatggacatcgccaccaagttcgcctctggccaggaggcggttgaggccatcttccggaaggacaagcagccccagggccgcccaccggaagatgtccccgaggcgtcaactcagcgcggcgccaagaagaagggcaagaagaagtcgcaagcgaaacacaacgccgccgacgtggaccttgtcgccgccgccgaatacaagaaccctcggaaacctcccgaaggtgccaacctcttcgacaagatgctcaaggagccgtgcccctatcatcaggggcccgtcaagcacacccttgagaagtgcgccatgatttggcgccactttcacaaggccgggccacctgcggaaggtggcagggcccgtgacgacgataagaaggaggatcacaaggcaggagagttccccgaggtccacgactgcttcatgatctacggtgggcaagtggcgaacgcctcggctcggcaccgcaagcaagagcgtcgggaggtctgctcggtaaaggtggcgccgccagtctacctagactggtccgacaagcccatcaccttcgaccaagacgaccaccccgaccgcgtgccgagcccggggaaatacccgctcgttgtcgaccccgtcatcggcaacgtcaggctcaccaaggtcctcatggacggaggcagcagcctcaacatcatctacgccgagaccctcgggctcctgtggatcgatctgtcctcggtccgggcaggcgctgcgcctttccacgggatcatccccaggaagcgcgtccagcccctcgggcaactcgatctacccatttccttcgggacaccctccaacttccgaagggagaccctcacgttcgaagtggtcgggtttcgaggaacctaccacgcagtgctggcgaggccatgctacgccaagttcatggttgtccccaactacacctacctcaagctcaagatgtcgggccccaacggggtcatcaccgtcggccccacgtaccgacacgcgtatgaatgcgacgtggagtgcgtggagtacgccaaggccctcgccgaatccgaggccctcatcgccgacctgaagagcctctctaaggaggcgccagacgtgaagcgccacgccggcaacttcgagccagcggagacggttaaatccgtccctctcgaccccagcaacgacgcctccaagcagatctggatcggctccgagctcgatcccaaatag

SEQ ID NO: 353 - DNA, 369 bp, Zea mays
  Peptide Sequence Number=SeqID_42132
atgaagctgtggaaggagacttccaggagttccaagattacgacgagttctaggtgtgggttagcggcaacccccagtcggctgcctgtgaaggccgtgttatctacgtttcttttccgcactttgatttattgcacagggcgcaacctttgtgaaattatatttataccctttacaatcgattacattcatgacacaaactatcatgggtcaatctatcttttcatctttaagtcggtgcaacccttcgtcttaggcatgtcattatgccgaagttccttgaaaggcagcttcggcgttatttccgtgctgatttccgaaggtgtttcttcttacaggaccttcggctatgaagcagacccccaatag

SEQ ID NO: 354 - DNA, 252 bp, Zea mays
  Peptide Sequence Number=SeqID_42133
atggaacgacagtctgacattggtggccgccagctaagggtgagattcacggtgacggacccggcgcaggcgattgtggtggcacaggcgcatgtgttcacccaacacagaaggttgaaggccggggcccagttgtcagcacgtagcttcactgaacgaattggtgtgcacacgactgataggtgggggccaccagtcggtgccaaaccttgctcctgggcgaactgggtcacgcggatgtttgaaatatga

SEQ ID NO: 355 - DNA, 408 bp, Zea mays
  Peptide Sequence Number=SeqID_42134
atgaacgaactggaaacagggtgcacagaactagatcagcagcagccaaatgaacctcatgtaacaagaaccgaatatgaggcacctaaaatcctaaaggcgccgcctttggccaatcggaagggagaaacctaccgctccgagtgcggcgaggacgacgccggcgaggaagaagacgaggcggccaccgcagccgacaccacagccaccgcgctcccagccgcagccgctgcgaaggaggaggacgaggacgaggacgcggcggcggcgaggagcgaccggatgtggatccacgatgaggacggaggggaggacgcggccgtcggcgaggacgaggtgctggatcgccgcagcgccttcatgtccttctcactcttacccaccaacccaacagctgcactccgctag

SEQ ID NO: 356 - DNA, 585 bp, Zea mays
  Peptide Sequence Number=SeqID_42135
atggaagaacagggatcaaagcgcgataggtacatcaagtccgaaggcaacctgctcctgaacgactcaaagcaacacgccgctgatgctctagaaccagacgctgctggagaagagccgtgggacttcgagagtagttcaaccatgcccagccgtggaggtggaggcgtcaggcgtggccgcatcctgagtggagaccaatattctgctgtgagatctggtagccgcggctgcgctgagctaggtggatctggatctgggcggggtagtggtttggatcagagagtggccggctcggcggcggcgtgggtggaggcaaagatggatcggccgctagcgttgtcgtcagagatggatcggccgctagctgcctgcttttccctgttactcgtggcaatggatcaccgccgcaagcatctcgctaaacccgatctacatggcgggctaaacagaaaggcccgtgtgctccgcctgcttcctcccgtgacagcgtgcgctcgtggcttccctgcggcgctcggcgggccaccgctggctgccaacggcgtgcaccagacgctggatcgggctgcccagggcagttaa

SEQ ID NO: 357 - DNA, 735 bp, Zea mays
  Peptide Sequence Number=SeqID_42136
atgggggtggtgaacgacggggtcggtgaagaagacgttgacatcgtgaattccagcgccattgtggatgagagggcgtacgatggaattggtgatggtgatggtggcatggagatgaggcatggtaccgtcgaggcgctgggtgggcggatcgagcctggaagggagagcggggccgatgccggtggtgtcggcaatgcatgcaacggcggcggaagggtggtatgggatgtgtgccgtggcggtggaaaattggagaggaagacggtgatggccgccccggaacgaccgagatcggcaaccatttgggctacgacttccagggtgagggtcgatgtcgtcgccggtgacgcaagggcagggactgaggcggccggtggtggcgcaaaggacgccgaaggtgaggcggtgcagcagtttcagcagcagcagcatgtggtgaaagaggagagtggcagcatgatcgtgttcggcagagaccagcaaagctgcagctcatgggacagcggctgcgcacatagccagcagcagccacagtacggcaatggccatggcaaggagctgggcttcgacggctacttgttcggctacaacaacggcggcagcagaatgaagcatgacaactgcaggctgatcagcagctgcagatgctcaccagcaagcccatcagcaggtgtcggtggagtacaactacaaggagatcaagcagcagctcatgagcacagccgccgctga

SEQ ID NO: 358 - DNA, 489 bp, Zea mays
  Peptide Sequence Number=SeqID_42137
atgggctcctatttattcctcggggacccagctcaggataggacggtcacccacgatcccgacgaagtcggcgttccgcgcgtggtttgttgcggagcagcgaggaagacggggatgacatcgtgggcccacacgccagtggctcacggcgcaaacgacgttcacgcctgggctgcgcagagggagaaggaggagatgggccagaatgggtacagtcggcccaaatacaacaacatttttctccgtgaaaaggcaaaggctgtgcaaaaggcaaggctcaatatgaagtttgcgttgttaacaacaaatttcaggtctgatgcctcacataacaatctagctgttgttgcaggtatgatgcctcacataccaatgccaggagactggtctaggcatttacagaacatatcgtggtttccagcctccttggacactaaacgttcaggcaaaaacttcccaagctatttctcccattcagggctggtttag

SEQ ID NO: 359 - DNA, 384 bp, Zea mays
  Peptide Sequence Number=SeqID_42138
atgacggcgacgacgacgacagccgccggcggcggcaaggtgcagccgcgcggcctgcccgcggcgctgtccctgctgctgctcctggtgttggcagcggggctgggcggtggcgccgaggcgcagcagacgtgcgcggggcagctgcgcgggctggccccctgcttgcgctacagcgtgccacccttgccggggcaggttccgccggcgcccgggccggagtgctgctccgcgctgggggccgtgtccagggactgcgcctgcggaacgttcagcatcatcaacagcctgccggccaagtgcggcctcccgccaagtaatgagctgatgatagccagtgcgatgcactgggcaaaaggcaagggatccaaacacgctgaataa

SEQ ID NO: 360 - DNA, 1143 bp, Zea mays
  Peptide Sequence Number=SeqID_42139
atggacctcggtcagaactcagaaggctgctgcatgccctcgccagtcgccgccgatgccattttcgagataaaaagtattggagtgctcctacgtcggcccacgacgcgcatacatgcagttcgtcagggcgtcagatcaactgagtacatggcagagctaataacagctcctgagtcatcagtcacccctcatgcagcacgcagcctgtctgtgtacacgtacacgcccagcttgctgcctgcgtctacggtctactacgcgtacacaggcggttatcacgccatcgcgcggtctcgcagactgttgagccttgaagcagcaccgagtagacccagtggttcgtgtggcccaaccgttggtgcggcccattatgcagcccagcctacagcgtctgtcatcctcttcggcagccctaaacctccacgatggcgcgccgcacgcagagatgtgcccacgtcctcaatctgcctccacgacggcgcgccgcaccacgacttcaatctcccccccccccacgacctcaaccgctctgccagagtcaacaccgtccagctccggtcaccggttcatggaggcggcggcggtactccttcggcaggcaaaggagcaaagttggaggcgacgagggtccagatccggtcgccggcgtccatccggggtttggaagcgccgcggccagctggagatgtcgccagccaactctcgggcttcctctcctccatccccgagatcgtcgctcgtggagatctcgccagccaatgcccgggtgagaaacaggtgcgtctgctcatcatctttgtggtcctcaatccccacgccgccattgaacccgactccaagctcgagttcgatatgcccgatgccttgcgtgtgtacaagatcgactgtgtcgagcgcttcgacgacaccaagtccgtcccgtcgtcccccaatggcaattccaccaacggcgtcgcgtccaaggacttcgctacaggcatctcctcccgactctacctacccgcgagagtggatcccgagaagaagctccccattgttgtgttcttccacgacggtgcattcatggtccacaacgcctccttcccgctgtaccacatctacatcgcatctgtcgatgtcgcggtgcccgctagccgctga

SEQ ID NO: 361 - DNA, 2250 bp, Zea mays
  Peptide Sequence Number=SeqID_42140
atgggtgggccgccgtcaggctggcgcgctgggcccgtggggtgccgggcggtcagacgttgctgtccgcggctggagcggttgggttcactcttcacttgggacgaggcggtgattagtgggggtggggaccgtggggtaccggcgctaactactctgcctctgcgtgaggaggaagggaacccggaccgagctgagcaggagccgcgacacgccacggcactgcgagtgattcgtgggcgagcgagcgccgacgccgagagcgcgttgtcgctgggccaggtgttggcgtcgcggcgtgtcacgacgcctgcgcgctcgtacgcgcccgaccgacctctcacgcacgcccgtcacagctccgtagctttgcccgccagccacgcacacacgccggctgtgggcacggacccgcgtcgcgcggtcaccggcgcgcccggcgcggcgtcgatgcgcggtcgcgtcagcgcagcatgtggagcgtacgacgtccgcagtccggcacacgacggccttgtcgcgtcgtcggccctcctggccgtcggtggccgctcattgcgtgcttcgtcgtgggtagatccatgcaatgcagctatgcttccacagcactatgaccagtggccagcggcaccgccatgtgggactgacggattgtctgccgtgagcttgcattgccgtttgctacctagctttcacacgccgcccatctcgcattccgtcgcgtgcctgccaccacgtaagggtaaggccaactggacgagcagtgacttctcacttcttttcacctcgtcagatggtactcaagtttcagtggccaatcaggcaaccgccaaccgcaaccaccttgcagcaggcttgggtgataatcccacacaagtctcgatgctccgccgcatagcggccctccggccgccgtctcgagcggccgcgccattgggggcgattgcggcgccctattcctcgaagtccacatccatccctcagaagcagcagcgcgtccgagaccatgccttcgacggcgtcatggaggtccagaagcgcgtccgccgcttccacgccctccacgctctcatcctctacgccgccgcccccaccgcgccctcccgcgccggcggaagcggcgccgtgtccgtccccttcacccgcctcggcgccctcgcgcgccgccagttacgcctcgcgcccctcgacgctggccgctttctcctgcgccacgcgcacgccttccacctcttcctccaccccgtccaccgcatgctccacatccgcctcaccccacgcgctgcagcggtgctcgacgctgaggccgacgccgtcgccgccgcactccccggcatctccgtcctacgcctccgcaagctcctcctccttgcgcccccgcaccgccgtctccgcctcgagcacatccacctcctccgccgcgaccttggcttcccagacgatttcgcccagtctatcatccagtccaacccctccctcttccgcctcacccctgacggcttcgtcgaattcctgccgtcccccaccgacccgcccgatctcaccgtcgccgccgtagagcgcgcccgggagcgccactaccgcgagcaccgcgcgcccggctccgccgaggaggacgcgcgtttcgcgttccccattcgtttcccgccagggtttaagatcggcaagtacttccggatcgctgtctggaaatggcagcgcctcccctacgcttcaccctatgcagacgtcacgggccatgacctgcgttcgcttgaggcacaacgccgcatggaaaagcgcgcggtcgctgctgtccacgagtttctctcgctcacagttgagaagcgcaccacattggagcgccttgcgctgttccgcgatgcactcggtgtgcccaagaagatcaaagagttcttgctgaagtaccagggtatattctacatatccacgagggggaatcagggtaagctgcatacggtgttcctcagggaggcgtattacaaaggggaacttgttgacccgaatgcaatacatgatgcaagacggaagctggaggagttgctcatgatcaacccacagagggcgaatttggacagaatgttcaccagcatgggccgtgggtgggatgaacttggtggcagccgccgtggtggatctgaactgagggatgagtttcttggcgatggaggtggcaggaaaaggaatgctgatgctgatggggctgagagtggggaggactcgggtgttgaatcactgtacattgattga

SEQ ID NO: 362 - DNA, 882 bp, Zea mays
  Peptide Sequence Number=SeqID_42141
atgacggaggagaagaaaatattcagctcctacgtcaagaacaaggattcccaagacacgatcatctttggagatgggaaccatggcaaggataaatctgaaacccaagagccactgaacttcgtccgccgctccctctccaattttggtaaagttgggctcattcgtgcaatcatgctcaactctagcatcacctcccccatctaccgggacctccacacgctcgtcaacccacgcctgctctccgttgtcgcctcactccacgcgctccccaccaccattgactttttatctcaaacactgctacgagtcattgttgaacttgcaaaggatatgcactggagagttcgacttgcgatatttgagtacatcccattgctggcgctccgagtatctgagcgagttttcaagctatttgactatttgatgcctgctcccaaagattatccatctactagattcacccctggtggaggaggagaagaagttcccaagagcatcgttgacaacgagtacgctactgccaccattcgggagcccaagatactattgaccacttctcgcaatcctagcgcgcccctaactcagtttgttaaggagctcaaggttgtcttcccaaactcacaaagaatgaaccgtggtggacaggtcatatcagaaattgtggaggcctgccgctcacatgatataacagatcttattctggtccatgaacaccgtggtcaacctgatggtttgattgtctcccatctaccacatggtccaactgcatactttgggttgctcaatgtggtgacacgtcatgatatcaaggacaggaagacgatgggcaaaatgtcagaagcttacccccatttaatactggacaacttctcaacccag

SEQ ID NO: 363 - DNA, 183 bp, Zea mays
  Peptide Sequence Number=SeqID_42142
atggcaagagggaaggtgcgatattgcctcaatataagtgaagatgagtacaggaagaccattaaagtaaatgtgataagaccttggttcctaatgaagattattggtgctgagggaggattatatccaggtgctacaacatatggtaacagcttgggagccaccaaacctgtatacacttag

SEQ ID NO: 364 - DNA, 306 bp, Zea mays
  Peptide Sequence Number=SeqID_42143
atggccgctttctcatggctgggatctgggtgcagtaagaccacacccgatgcccttttgaataatcggatggtattgagccctgccttcgctattgagccgcgggggcgagatgcggccgcctttatcagggaggtagaagcgaaggcagtaataattgttggaaagtactcagcgaagatagaattgctaagaagctgggatataaggggttcaaatgtcaggttgaactgtgtttttgaattgaatggccttcggtatcgcccatatcctgaggagggctccgctgatgccggggatgattga

SEQ ID NO: 365 - DNA, 474 bp, Zea mays
  Peptide Sequence Number=SeqID_42144
atggcgccccgcatactctgtgacgacggctgctctcagcccccttacggaagcaagaggacatcagcaaggactcaacagctccgacagttgtccctccgccaggctccagcactcctccgacggccacgacatcacaccagctgggtgccaaaatctctccggctgccacgacggcatggccctcttagagagggtgggccgcgcggggacgaggacgagacaggcgctcgcttgaagccgctcgctccctctcccgcgtggacgcttgtaaccccctactgcaagcgcacccgacctgggcgcgggacgaacacgaaggccgcaggatttccacctctctcacgcctgtctccggccacctcacttccccccttcgcgctcggcctcgcgtcgacccatctgggctggggcacgcggcgacattcactcgtcggcttagggaccccccggtctcgaaacgccgacaagtaa

SEQ ID NO: 366 - DNA, 222 bp, Zea mays
  Peptide Sequence Number=SeqID_42145
atgggttcgaaaaccttgagtacagagtgtactttcgcaagtcttacccgacaaaggaaaaagactctcaaggatatgctggtttttgggaatcaagaatccaccgtcaacgaaagatgcaagcgtggaggcatggtggtggacacaggtggccgcgccgagagcaaaggcgccagtctaggtggagacgagccgctatgggtcgaagtgcgagaccgatga

SEQ ID NO: 367 - DNA, 360 bp, Zea mays
  Peptide Sequence Number=SeqID_42146
atggcgaggtgtctggagattggcgggggcgggggcgagggcgggattggcggggagatggccggagcgacggtggttgatggagatggcgcggcggggaggatggccggtgaattgcggggtcgagggcaggattggcggggagatgtcgtggcggggcggggtggcggcgagtgggggtggctgggcgcggggtggcggagcgtgggggcgagggcacgtaggggtggcggcgcgcgcgggcggcggcggcggcagggcgcgggggcgggggcgcgcaggggtggtggcgcgcgacagggcggggtggcgccgccgcggggaaggcggcggagtggcagcatatcggggatggtttga

SEQ ID NO: 368 - DNA, 252 bp, Zea mays
  Peptide Sequence Number=SeqID_42147
atggcaaggattgtgcactacttgatggctacttcgttggtggttcttgtgatgagtacttccaactctatacactgtcaagccggcttgtcttcgcgtgggccaccttgcttcgagcctccgactcaccgctgtaaggacggccgcagctgcgtgtttgtttgccagtataacggaatcagaacctatagggcattctgtaaaacacctacaaatgctcaggagacctatatgtgctgctgcccaccatag

SEQ ID NO: 369 - DNA, 330 bp, Zea mays
  Peptide Sequence Number=SeqID_42148
atggcggcggcggttccacgagagcacgaggtggtggcggcctccagtcgtgcaaccgacggtcgatcccaaattcaaaggcgcgacgacggcgacttcccgattcaaaggcgtgacggttctccgatccggagccacagcgacagtggctccctgatccgacggcacgacggcaacaactccctagcggcgcgacgacggtggtttctcgatccaaaggcgcaacaacgacggctccctgatttggtggcacggtcatggcagttccttgatccggaggcgcagcatcgatggcttcccagaggcgtgcttgcgacgtcggctccttga

SEQ ID NO: 370 - DNA, 363 bp, Zea mays
  Peptide Sequence Number=SeqID_42149
atgggtgaccttatggagctcaaaactctgttcgcaaatttctccaaggatgtccttgccaagattgacagcatccacatgcagatcgttgatgtcaaaaacaacctctcaaccatcaagaaggggcatttgcaaagggacattgccaaagagctagagcatgacaaggagatcctcaccaccaagctcgagatgcgcactaggtacaagatggagaaagctagccgcaaattcctcatatcgcaagtcagcggctctggaacacaaacaatagcagagattgccactaagatagtggagccaaaatcagaaatatcaccgggaggggcaacaccgggcgccttcaacgccctcaacatatga

SEQ ID NO: 371 - DNA, 369 bp, Zea mays
  Peptide Sequence Number=SeqID_42150
atgagctcgtacgcctatggggacaccgaaggagcacttgtttggattgaaaaggaattagatgaagtcaaaaccataatcagtgcccaaagcaactactacacaatgattgggtcgcgtggcatggcgtcggtgcttgggatagttgtggaaaacataagaaaaacggattttggaatagttgtggaagacataaaggctccttcgaagagtgtacttgacgctacaaaaagatacgtcttcgaattgtgggataagggtggtcgacagctagctgctatggaggctgaagcatatacaaagaagagaaaagaggccaagaagaagtcgaggaaactgaaaagtagaaaaggaccgaagcttagctga

SEQ ID NO: 372 - DNA, 534 bp, Zea mays
  Peptide Sequence Number=SeqID_42151
atggagcagatggcgcatgatgaggaggtcgacgaccttggggacctagagagcatagtgtcgctggtggtggatgcgagggcagggattgaggagcagccggcaccgccgactgatgttggcgagggccccgtggaggcctccgcgccgactgagccgttggcgcaccggacactgtccggtgcacaccagacagtccggtgcccccttgtgaccattggctcggccacgcatcacgcgcggaatccttggccgaccattggcccggctgaccgttggctcaccggacagtccggtgcaccaccagacagtccagtgaattatagtcgtacgtcgttaatcacttcccgagagcgacgactcgtctgtgaacggctcaccggacagtccggtgcaccaccggacagtccggtgatttatagccgtacaccgccgtcgaagtcccgagaacaacaagttcgccagagccagcctggcgcaccggacactgtccggtgcacccagactgagcagactttggctgaacaaagctaa

SEQ ID NO: 373 - DNA, 3303 bp, Zea mays
  Peptide Sequence Number=SeqID_42152
atgtcgatcgcttggcttccatctacaaatcccgccgccggcccgctggcgatcgctgaggcggtccccatctcgatctcccttgtccagttcttttcgccggagtgcactatgtcggcactgccgccggcagaggaattggatgcgtcgcatcagaagaagcggcggaggaggaaaaagcacagggagcaggtggaggctatagcggcatcctcggagcctcctccacctccggcaagcccggagtccaagcccaagtcaacaattccagtcgctcccgaaaccctaacctcagcggcggtgagggagtctccccgacctctgggaaacccggaatctaagtccgagtcgccgctactagtcgctcccgaaaccctagcctcggcggtgatggcagcggcggcagtgaggctggttaaggagcgcgagaggaagaatcaggtggtgccaccggcatctccgttaatggaggagcccgtgtggaaggaggaaaagcagcgtaagaaaaggaaacacgtgggcgccgcactggtggttccatcgccgccgactcctgatgcggcccaaaacttgcggatggaagccaagatgatggctgagggggcgacggtgaggaagaagcagaggcggctgaaggcggggcaggagcaatccggcgagccaccattttcaattgatgtccatccacaaggaggggaagaagctactgatgatggtggcgttggcgtcatggtcactcagtgtgtcaagaggagcaaaagcaagaactcccgggttttgaagacgcagcagacactgccccaaggttttttccctcccatggccaatcccaattccattgatcaggaccccaattattcctcaccttttggtgcattctttgcccaattcgcctacaaacctgctaatatcgctgatcgcccagcgaggctgcctcctcgaggccacccatcatctgggtcttctctactcactggaaaagagacctccaaggctgcctggacagcaacctcaaacaccaagcaaccatgcccagcctcagaatcaacctcagattcacaagaagaggcaaggatcgaagggaaagaaaagcctgagaagaagatgacaagggagatggcagtgagggagtctacccgacatttggcaatactggaatccatgtctgcttcctcagtcccagtcgctcccgaaaccccaacctcggcggcgatgacagcagcgacagtgatgcaggataaggagtgcaagagggagaatcaggaggcactgccggcagctccattaattgaggaccctgtgccgaaggtagaaaagaggcacaagaaaagaaaagtggcacaaatcacgcagatggaaaacaaggtgatgacagagggtgcgacggtaaggaagaaacataggcggcagaaggtgaagcaggagcaatctggccaaacaccatttctcaatgatgtctattcaaaggcaggggaagaagctgctgctggtggcgtcatgggcagtcagtgtgtcaagaggatcgaccgcagcaagaattccaaggttttgaagaagcagcagacactgccccaaggctttttccctcccatagccaatcccgatttcattgatcaggaccccaattattgttctccttttggtgcattttttgcccaattcgcctacaaacctgagcgccggcaagatgggaatggttcgccacttcctagtaccactggtcgcacagcgaggctgcctcctcgaggccacccgttatctgggtcttctctgcttactgcaaaagaggtctccaaggctgcccggacaacaaccttgaacaccaagcaaccatgcccagcctcagaatcaacctcagattcacaagaagaggcaaggatcgaagggaaagaaaagcctgagaagaagatgacaagggagatggcagcgagggagtctccccgacatttggcaatactggaatccatgtctgcttcctcagtcccagtcgctcccgaaaccctaacctcggcgatgacagcagcgacagtgatgcaggataaggagcgcaagagggagaatcaggaggcgctgccggcagctccattaattgaggaccctgtgccgaaggtagaaaagaggcacaagaaaaggaaggatagggaggctgcaatgattataccatcggtgcccactgctgctgtggcacaaatcacgcagatggaaaagaaggtgatgacagagggtgcgacggtaaggaagaaacataggcggcggaaggtggagcaggagcaatctggcgaaacaccatttctcaatgatgtctattcaagggcaggggaagaagctgctgctggtggcgtcatgggcagacagtgtgtcaagaggatcaaccgcagcaagaattccaaggttttgaagaagcagcagacactgccccaaggctttttccctcccatagctaatcccgatttcattgatcaggaccccaattattgttcaccttttggtgcattttttgcccaattcgcctacaaacctgagcgccggcaagatgggaatggttcgccacttcctagtaccactggtcgcacagcgaggctgcctcctcgaggccacccgtcatctgggtcttctctgcttactgcaaaagaggtctccaaggctgcccggacaacaaccttgaacaccaagcaagcatgcccagcctcagcatcaatctcaagttcacaagaaggtgtaagggtcaagggaaagaaaaaacctgaggagaaaacgacaatggagaaaaagccgaggaaaccaccgatattacttagtcctgccgagaagtggtcagataaataccgccgcctgccgctggatcagctggtgcccccaccacgctccccccataagctattgcaggagaagtatgcttctgacccctggaaggtcaggaagaaagtgaagggcttcttcaagcgctatcctgatgctcagactgcatatacagctgatcccgaaaagatggcagagtatctagcacctcttggactgcagcgtgtgaaaacaaacagaattcagaaattctctaaggcttacgttggagaagaatggacctatatcactgagctttgtggtgttggcaagtatgctgctgatgcttacgcaatcttctgtgctggaagggcaaacgaagtggttccaaaagatcacaagttagtagattactggaattatgtctgttttgagttaccctcgattcagaaatcgcaggaggctggagtgacggagctgggaaaccttgtcgctaaggtgcaggaagttgctgtcagctgttga

SEQ ID NO: 374 - DNA, 276 bp, Zea mays
  Peptide Sequence Number=SeqID_42153
atggcgccaccgtgcagctgcccgccgtcggtcgtctggacggttggtggcgggttgaagtgtggggactgttggatggcgtttgatcggccccgattagaagtcaataccccttcgagtttgtttaaatcacggccgtgcattctagattgggtgaccgtcagtcccagatctaatgtcttggcgaattgggatctgagtcttagggagttttgcgagttagtccctgagctctctgggaattgtgtgcatagtccagagggcagtgaaaactag

SEQ ID NO: 375 - DNA, 198 bp, Zea mays
  Peptide Sequence Number=SeqID_42154
atggctataaattgcaccgtgatccacaacggggtatgcacacctccactcatatcttacggctgtatagccccaatcccacccccaatttcacctagagccgccgcgacaccattttcccccttcctttgtcaccagcaagccaaagtctccgcgctccgtggccagcccactctggtaataggagttgagtgctaa

SEQ ID NO: 376 - DNA, 2163 bp, Zea mays
  Peptide Sequence Number=SeqID_42155
atgcagatttggatggggctgacatgcagatttggtccaacagcgagtagatccgtccgtgctatttgtgctttctgcaattatgctgatctcgaggcattcaccgaagagaaaaaaagatccctacttgctaaaagacatggtaaaggggctgatttcctgagagcagttgatgagataattgaagtttatgattctctaaaggatataggtagcaacaaggttgacttgcctgccgaagaagtaaagccaggtgtagaaaagtttgctgaaaataatagccgcatggatactgaagatctggtcagtagctcctatatgcacaatgatagaaagatagaagatcattatgtcactaccaggagtcatgacatggtcaattctgacaggccttcagttgacgagcgatgtgttgtaaattctgctcctgatgagcctattgaaaatgtatccatccttgatgaaatgagggatatttctttgcgtactaattcattttcaaataagcaaagggatgcacagccacaaaattgctacacacgtactagggttccatctctgcggaagtcaagaagttcattaagtctggaatcaagaaaggctcaaggttctggtaatttttttgatcataccaatttggcttctattaatttggttcctggtgaacataaggaaccttctcatcataggcatgaagatgacaaagctaactcaagttctgtttctacatcagataatgtctggttgcattctggtgaaggcacttccaaccaacctgtaactttgggggctagtaacggcaacagaatgttgaatactcctgctgaagtggatagtactagtaaccgtgaagcatctgaaaatggaactacagagacagaactgaaatcaaatggcacatcagatcttcccatgaacacagcagtaaatttcaagagaaaaagaaaatcagatagaaaacctggacctcattatagagattgtacaacaccaaataaagatgaccaattatgtgctgagtacagtgaaatccttccagattctccgaattcaaagaatgaagtaagcaagtcagatggagatgagcacttgccattggtcaaaagggcaagggtccgaatgggaaggtctcagttggaggattcaccagttgatgaaattgatgtttctaataagaagccagagcttgcaacagccttggaccaatgtgataggaatggtaaacctgcaagtcccgccaatgattactcagctgatcaggtgtctgcagtcgtaagttctgctcctaatctgtcctgcaaattggacacaactatcttgtcaaaggaaggtcatcttccttggaagaataaagaataccatccaaaaattttagcattagatgtggaagctgctttgcctccttcaaaacgcctgcatcgcgccttagaagcgatgtctgctaatgttgctgagaataccaagaatatacctgaagtgacaggaccaaatgaaatgactctaaatggctctttgttgacagcaagcagcctttctaataaatctgcagatgcagtggtcacagtatctaatagacctgtaatagttcaaagccctgaaccttctttagacacacagtttgtgcataacccatcaggcaaatgtacctcagaatcaattctacaaaataacagcattcctgattctgcttcagttccttcaaaagaaaatgatcatatcgtgttaaaaggtgatatttgtgaagaaaccctcatggatactaaaactgctaatggttcttgggattgtagtgaactaaataatgattcctgtgggaaaacttcagccctttgcatgaaattgaatcggcctgcacttaatgttacacaagccacatctgtacctgaccgattatcttcgtctttggagaaagccagtgaaaatgtggccgcaagtggtgtcaaagagacaaaaacatttggctcagctgtttgtgatgttgacagaagtgcagaaccaattgaccgttcaaacaacaatgtgacgagcaacacaatgcgacatagtgagactattgtagcggattcagtgaacaatgtgggggatacagcaagcaactcttcactggctactaaatcatccagtatacaatctgatgcagacacccggacgtctgaattgtaa

SEQ ID NO: 377 - DNA, 219 bp, Zea mays
  Peptide Sequence Number=SeqID_42156
atgcccaccactgacctcaatttgattggatatagagatgaaccattcgtcctgctaaggatgtaccttgtcgggctaaggtacagttatgcttgtgcagtggaagtacgagcaagggaaggatgtaccaatgggtggtggggagggaaggggagggagagtgatgggattcaactattcaaggtgaggccccgccatgttggcttaggttgggtttaa

SEQ ID NO: 378 - DNA, 321 bp, Zea mays
  Peptide Sequence Number=SeqID_42157
atggattgcgacctccagttacaggaacacaatataaaagggaagctaaggcacggaaaccaacacgttgtaacaccgacaaatcctaaccgccacatttactcagaggtcctaatctacctagtgttcccagcgaccggaagagctgccaccaatgacgtccacaaagctcggccacccacgaggccagacactaaggagccccctctttcgtcaactacacatggtcgggacaacactggagaaggatcaaagggacatggtgcaccagtgatggacaccaccgcgatgaccaatgatgccaccccctcgaacaagaag

SEQ ID NO: 379 - DNA, 180 bp, Zea mays
  Peptide Sequence Number=SeqID_42158
atggcgccggcgaagaggaagcgcgcagcagctgccgccgcggccgcggccgcggccaagtggaaggtgggcgacctcgtgctcgccaagatgaagggcttcccggcctggccggctatgatgttgggttcttgtagagatccggtgctacttctgatttatggcatgggggctgggtag

SEQ ID NO: 380 - DNA, 609 bp, Zea mays
  Peptide Sequence Number=SeqID_42159
atggctgaacctaagaagaggaggagcaaaggcaaatcgctcacatgtgtcaagacttgggatgagtatttaagtgaagatgaacctccaaggatccgcgaccatcactcttcatcacgctcttcacgttcatcacacaaatgccttatggctagagatttcatcggtgttaattataaaccatgcaatcaagtccatgttaataatgttattgtagaaacttgttctgatgagattgctatggagaatggattgttaaagcaagaattggctcgccttggtaaggctttgtacgataagaaaggcaaagccaaacaaacccagtctcttcaggataaaaatactttgggactcaacaagcatgtggaggatgaaatcgtggtttgttggctatgtcacaaagaaggacacaagtcttatcaaggcaaggtgaaaaccgaaggagataacaaggaaaagccaacaagcaagatctccaacacctgcaccaacaaggtggacaaaaagatggatacaccgtacttggtcaagaaaaataagaatgggaaggtgatagccatcaaggccaacaagcaagccaacaacggaaagggggccaaacagatctag

SEQ ID NO: 381 - DNA, 129 bp, Zea mays
  Peptide Sequence Number=SeqID_42160
atggcatctcgtcggaacccgacgacgacgacggccgagatcgaaagggttccgacgggggactcgacgaccgacgacagcaataggcgccactgttcaactcagcaactgaataaagatacccaatag

SEQ ID NO: 382 - DNA, 321 bp, Zea mays
  Peptide Sequence Number=SeqID_42161
atggcaccaattcttgcatcaaggccgaatcctgaattcctgatcatcgcaacttatgggaaaatcactagatttctggacatttgtgtgaaccctgaaggcttcaacaaagaggtgaagggtatccatggaataaggatgatgaaaatagatctgtgtttatcccatgttactaccgaggtagccagctttggtagagaaaatagtaaaagagattttggctggaatatgcaagttcagagctttctagctgccagcttggcattattagtggagggacattatgacttcttattaaactatcttagaatcaagacttga

SEQ ID NO: 383 - DNA, 216 bp, Zea mays
  Peptide Sequence Number=SeqID_42162
atgactgagaaggagaagctgactgaggagacgaagctgtttgaggagaagaaggctgtggatccttatattgctggattcattgagttgatggcgaagacaaacacagagaagattactaaagagatattggaagttgaagtgctgaagatctaccagatcttccttcaccagatcacccccgaagctataatgaggatggggatttttgtctag

SEQ ID NO: 384 - DNA, 162 bp, Zea mays
  Peptide Sequence Number=SeqID_42163
atggaacaaggtgttggcaaacctccgttctttgatgggacgaactacccatactggaagatccctgtgtcggtcttggcgatcatcgagtcactcaactatgagacactcaccatggatgagcttttcaacaagctcaagtccatagagattgaccactag

SEQ ID NO: 385 - DNA, 447 bp, Zea mays
  Peptide Sequence Number=SeqID_42164
atggaacttggtgaggacacggtgagcagcggtgacagagacatcggcgatgactccacctctcaggtattacctttcgccgatgatctcaccgctgaggtggatgagctgacagctgctttggctagtcaagacaagttgcttaggcttgctgctcgtgagaggaaagagtataagaacaagtatgagagcacgcttagagagcttgagtcttctagagcttctatcgaggtgtccgacgagactgaatgtgatgagtgcgctcttcacatgttgaacatcgccacattgcagaccaagtacaccaccctgcttgatgagcacaatgagttgagatctagacctagtttttgggacggagtcctggagaacacgtggctcaagaattctaggttttcgtgccacatgacggaagctctagatggttctccagcttcgaccccgtga

SEQ ID NO: 386 - DNA, 534 bp, Zea mays
  Peptide Sequence Number=SeqID_42165
atggcgtcactcacgcccacggtagaggcccaccggagacaagggtctgggcgtgttgagggccctgggcgccgggaagggctcagggagtttcaggggaatgtggtgaacacgggcgtgggcacgacaacaacgtgcacaaccacggcggacggcggtggtgcgtctctagcgtgcgcggtgcgaggtgagtgcgggagctctgcgggtgcgcgagtgagggagggggagagtgagtgggggtgcggaccactagaaatggccgggggttgggtggtcgcggcctcgacatgtgtcatgggcgcggagtccacggtgtgcgcgtgggtagttggggaggacgggactgacaagcagggtccgggccagcgggagagggtgcgcaagggggaacaggcaacgatgctgacaggctggacccgccacgcagagaaaggaagggggcaagcatgcgtgggcgaggggatcagcactaacagggcggaaccaccaggcagagggagcgggggagcgggcgcgcgcggggagagctag

SEQ ID NO: 387 - DNA, 393 bp, Zea mays
  Peptide Sequence Number=SeqID_42166
atgaccaagacgacggcgaggtcgagtctggagcgagctggctcgtctggacgctggggaggggcagggagaggtggccatggaagcaaggagctggggggagggtgcggcggccatggggatgagcttgaggaggagcgcgcgtgggacatggagcaggggctgaccgacggctatggatggagctcagcttggggtcgggcgagatccgagctgcggccaggcgccatgggagataagggagaggggagcagggaggccgccgagggagcaaggacggccagctctgccgtcaccggtgagctccaagccggcgcgcgcgatggtgcaggagcaccggcgtggccatgggagggggagatgaggagcgctcgtgggagggaccttggctag

SEQ ID NO: 388 - DNA, 210 bp, Zea mays
  Peptide Sequence Number=SeqID_42167
atggagcggcgaacgttaagtgtgctgagtcccaacaggggcgggggaactatcctcctgatgtcggcgctctgcgcgctcaacatgcagttccgtgatttctgcacgagccttgtccaactcatcaagggcttgatccagctcagtgttgagcacgacgaccaggttgaccatgctactcaatctaggattgccctcaccaacgtgtga

SEQ ID NO: 389 - DNA, 534 bp, Zea mays
  Peptide Sequence Number=SeqID_42168
atgaagcaaggtcaggcctcggcaggcaagagtcagcccttatatgtcaatcggggtgaagtcaaccacgtggaagcagaagctgaacctggtgaacctgaaaaccaagaagagatgccggttgaaggcttgtcctatgtcaccgccgtgtggggtcaccccatcagcctcgcccgacttcgtgctcccctgcttagtcactgcctggtggggccagtgctcaggcacctcaacaacctggccgaggtcgccgctgcgctattcgggggtagtccaggccctagcgaagctgtagaaggggttaatcgagaggagagtcgctatagtcccgggaattgctcgtcggagcgggttctccgtctccgtaccgccatctgcgtggccagcctcgccgtcatcttcaccattgcttggctggatggccctgcgtcggtgatagcgccaccaagggcgtcctgcacctccgtacactacccttgcggggaagggagaatcaggggcaccgtcgatctctggattgagggctcagattag

SEQ ID NO: 390 - DNA, 222 bp, Zea mays
  Peptide Sequence Number=SeqID_42169
atggccaggcggataacagcccaggtcttcgccgagatcgaccagacgccggcggcgtcacccggctgctacggcagcgccatgggtggcacccagtgcagacccccagcccagcgagtcaaaaagaaaggcgcggacgttggagtctcccatgaatatggcagttcgttcacaacaacccagtcagcatgggaggggcccaccacctacggcgctacgtaa

SEQ ID NO: 391 - DNA, 306 bp, Zea mays
  Peptide Sequence Number=SeqID_42170
atgggattagtctgcgaggacccacacgaaattaggagcaatcgccggttgaaatcaggaggattagcgtgctgttcactggaagatcagaaaaatcttgccggggataagatcgccaccgcggttggggatgggtctgcgaccatggtaaagatcatccgcgacgtggcgttaaaacgttgcggtggcactgcccggttaatcagcggtcgccggaccatcgccgtggctctacccgtgcgggtgaactcgccagcgcgtttacagctccgcgagcctcatccaacttcggccatcggcctataa

SEQ ID NO: 392 - DNA, 738 bp, Zea mays
  Peptide Sequence Number=SeqID_42171
atggagcctgtcaatcttgagcttcacgttggcttaatgctctgcggcaagacgtaccgcactccattcagcttcgccatggccacgctcgccaggcacctcatcctgtgctcctcctcgccatcgcagcgccgccggcgccccctgccgcccgacgccaccgcgggcacgcagcagcagcagcagcagcaggcgccgccgccgcagccgtccaccacgcgccgcctggcggtggccgcgtccgcggcgctggcggccacggccgcgctgtccgcgcgccggcccgcgccgcccccgcccgcgatggccgccgaggcggccgtgccgcccgcgccgccgacaccggcgtcccccgggaccgtgccgcgctggggcaccaggtcctacgtgcgcgagcggttcttcgagcccgagctcaccgcggaggaggcggccgcgcgcatccgccagaccgccgagggcatgcgcacgctgcggcccatgctcgagaccatgtcctggaagtacgtgctcttctacgtgcgcctcaagtccaagtacctcggcctcgacctcaccaccgccatggccggcgtccccgcgggccgccgcgctgactacgtccgcgtcgccaacgagctcgtcgacaacatgacggagttcgatcgcttcgtgcggactcccaaggtctacgagtcctacctcttctacgagaaaacgttgaagtcgctggatgacgtggcagagttcctcgtttga

SEQ ID NO: 393 - DNA, 486 bp, Zea mays
  Peptide Sequence Number=SeqID_42172
atggagagacccgcgaaggaggaggccatctgggagctggcgattgagacaaccggatgtcgcgcagacggactccgcgggggctggctcgaagctgaaccccagatcgatgcactcgtcgcgcggagaatctccaaagtccgcaaaggcaccagctcaagggtggctgggcaagatggtgatgctcccaagcatgttgggacacaggtcggtggagggcagtcgacgtggcaacctccagactgggcgattgagccacgcccaggggtctactatcttgatgtggtgaaagatgggacctcaacaaccatccataagagaaactccaagaaagaagatacagctgtctacataaacaataaacaatttttcttctcggactgctcaatctggttttcagtagtgtttccctgtcatctactcatacagggttatgctcttggttgtaatcatgaagcgtcccgatcctctgggactcaaatgtga

SEQ ID NO: 394 - DNA, 1470 bp, Zea mays
  Peptide Sequence Number=SeqID_42173
atgagcgctgctactctcccgcccggccaggagccgcacgcagtgtgcgtgccgttcccggcgcagggccacatcacgccgatgctgaagctggcaaagatcctccacgccaggggcttccgcgtcaccttcgtcaacaccgagtacaaccaccgccgcctcgttcgcgcccgcggcgccgccgccgtcgcgggcctcacggggttccgcttcgccaccatcccggacggcctgccggagtcggacgccgacgccacgcaggacccggcgaccatcagctacgccaccaagcacaactgcccgcctcacttgagaaacctgctcgccgggctggacggcgtgacgtgcgtcgtggcggacaacctgatgagcttcagcttggacgccgcgagggaggcgggcgtgccgtgcgcgctcttctggacggccagcgcctgcggctacatgggctaccgcaacttccgcctcctcatcgacaggggcatcatccccctcaaagacgaagagcagctgacgaacgggttcatggacacgccggtggactgggcgcccggcatgagcaagcacatgaggctcaaggacttcccgaccttcctccgcaccacggaccccaacgacgtcctgatgaccttccagctacaagaggtggagcgctcggagtacgcgtccgccgtcatcgtcaacagcttcgacgagctggagcggccggcgctcgacgccatgcgcgccaccatcccggccgtatacaccatcggcccgctcgcttccgtcacggagcaggtcgtcccaaggggccccctcaacgcggtgagctgcagcctgtggcaggaggaccagtcctgcctcgcgtggctggatgccaggaagccccagccgtggtcggtggtctacgtgaacttcgggagcgtgactgtcatgagcgggcaggagttggcggagttcgcgtgggggctggcgagcagcggccacgacttcctgtgggtcgtcaggccggacgtcgtgaagggcgacacgtcctcggccgcggcgctgccccctgggttcctggaggcgaccaagggcaggggcctcgtggcgagctggtgcgaccaggaggccgtgctgcggcacgaggcggtgggcctgttcctcacgcacagcgggtggaactcgacgcaggagagtctcagctccggggtgccgatgctgtcctggcccttcttcgcggagcagcagaccaactgccggtacaagtgcgtcgagtggggcgtggcgatggaggtcggcgacgacgtgcggcgggaggccgtggaggcgaccatacgggaggcgatgggtggggacaaggggaaggagatggcgcgcagggcggcggagtggaaagaggtcgccgcgggggcggcggcgaggtcgatcgcgaacctcgacacgctgatcaacgatgtgctgctctctccggcacgattgggcggctcactcaaaacgacttga

SEQ ID NO: 395 - DNA, 663 bp, Zea mays
  Peptide Sequence Number=SeqID_42174
atgggggatcatgtcgcggtggatgttggggagctcgtagcgtcccgagtcggtgaggcagcggggctagtgtccggcgccaaggaggaaacagaggcgctgattgggatggtggagtgccgcatttgccaggaggaggacctcaggaagaacctcgagagcccctgcgcttgcaacggcagcctcaagctattgtttaaacgtttaaacatagtaatttgtaaagatgtactcggacctaccttgtacaagcctggttacactgccccaacccaggtgcatcatgatgaaactaccatagagataagtggtggagattggaccatctctggcaaccgtttggatttacatgatcctagaatattggcaatggctgctgctcaacaccgtctacttgaagacgactatgatgaatatactgcaacaaacaacaacgctgctgcattttgccgctctatatttctgattttgatggcccttttgctcctgaggcatacactgaccattactaacagcgatgatgaagatgatgcatctgctattttctcgctatttcttttgagagcggctggatttttgctgccatgctatattatggcttgggctattagtatcatgcagcgtcaaagacaaagacaggatggttgcaatatccttgtttga

SEQ ID NO: 396 - DNA, 1671 bp, Zea mays
  Peptide Sequence Number=SeqID_42175
atggctcacaagtgggtcatcgctggtaaagccacaccattgaatgagtacatgctaggcagtggagtcgccggggtcctcgtgaaacgaattgagcagccccatgtggaacacgtcatggagacgatcgccctctggaagctgaagacaatagcacatgctggaaaaggtggagagctgactcatgatgaaaccactatcattacaggagctctggagctgactcaaaagattgcaaaagatgccatgactgctatatctgaaacattctcacttgacataaatgctaagctggacttggtggctgatgatcttcctctctatgacattctaaatgagttccagaaaggtcacagccacatggctgtggtaattaaacgaacaaaggaagcaggagtatccactgaaaagcaaaagagcacaactgccgattataaaataaaccccaaagatgctcgtgctgatggctcatccccttcttatggtagcactgccgtaagtcgtagaattaacatagagaagcatggagatgggcgcccatacaataagaaatcagaaaggaagcgggaaaacattcttgattttaacaacgatccacttccaagctattcaatggatgaggaggcagtgggaataatcacaatggaagatgtcatggaagaacttctacaggaagaaatctatgatgaaacagatgagtatgttgatgtacataacaagatcaggataaacatgttgactccaggcaaatcgctgtcacctgctatatctcctggtggtgggcccttatctcaggggtttcgaaggactcctatggcatctccgttctcaccataccaccatggtagttctgtcttgcgttccccggcttcgaaccatggtcagtcacctgggactttaccgacaatactgtcccctggaagatcacctactgcacagacacctgggcaaagttcaccaaacggaagtcaggcgagctcggatcggccagcgggcctgctgtgggtgcccgggatgagcccgtgtccgacgacgggcgcggggccgtcggagagggcgcaggagatcgcgcggcggcgggaggagatgctgcacgacctccccgagtccgagtacgagctctcgctcaccgacctcgtcgagaaggccgcgggcgggggcgactgtggcgaagccgcgcccgcgcccatggcagaggggaaggacccgggcgcctcacggccggcgcccggcgggcagctgccgcccgcggcagcgaggagggcgtcggcgcggcggcgggacagcgggggcagcttccgcttccgcagcagcagcgacggcgtcctgctcaacttctacatgccgcggtcgctcacccggagcttcaccgcgccgcgccccgcccggacgccgtcgtccgcatccggctgccggagccccaccatcgcatccgactgcagcaagagggagagggactcggacgccgagaccgtcaagtgctggtcgttgctgtgggatcggcggtggcgcaagtccagccggcgggacccgggcgcgccgcccagcgagagcgagtccgccatccgcgccgcgtcggtcgtcaaagcgaagcggccaagcactccgctccgccggcccatatctgagccgactttttttcgtccgtctcctgccccgcctgccggataa

SEQ ID NO: 397 - DNA, 567 bp, Zea mays
  Peptide Sequence Number=SeqID_42176
atgggccgcgaggacgatgcaaccggtggcggcatattctgccggggcgccgtcgatttgggtgcggaccatatccgtctgacagaaggacagcgccgcctgcgccactccgactgcagtgccactcgacagagtgagtctgacaggcagtcaggccttgccaaaggcgccacggcgaactccgctccacccgaccccagggctcggactcgggctaagacccggaagacggcgaactccgctccgcccgaccccagggctcggactcgggctaagacccggaagacggcgaactccgctccgcccgaccccagggctcggactcgggctaagacccggaagacggcgaactccgctccgcccgaccccagggctcggactcgggctagcacccggaagacgacgaaactccgcttcgcccgaccccagggctcggactccgccctggcctcggccgaacgacttccgcctcgcccgaccccttggctcgggctcggccacggcaacaaaaggcaaactcaaccttggcttcggaggaacccccacgtcgccctgcctagggcatag

SEQ ID NO: 398 - DNA, 1797 bp, Zea mays
  Peptide Sequence Number=SeqID_42177
gtcggcgccgccatcgtgctcgtgctcctcttcatctttgtttgcttctcccgccgccgccgcggccgccgccttgccggccaacccccttactaccccgccgacaccaagctgctcaagaagcacctgcagcagcaggccacgcccacgcccacgcccaccaaggacatccaggagatcgtccgccgccagcaggagcccgcggtgcagctcgccaaggccgtgccgcagccgcagccgcagccgcagactcctccgccgccgccgcctccgcagcacaggccaccggcgcggaagacgcccggcagcggcgtgtcggccacgactagcggcgggagcgagcgggacggcgccacgcctaggagcaccggcagcggcgcggggctgccggaggtctcgcacctcgggtggggccactggttcacgctccgcgagctggaggaggccaccggcgggctcgccgaggagaatgtgatcggcgagggcgggtacgggatcgtgtacaagggcaccttgcacgactccactttggtcgccgtcaagaacctgctcaataatagggggcaggccgagaaggagttcaaggtggaggtggaagcaatcggtcgtgttcggcacaaaaatctcgtcaggttgctcggctactgcgtagagggtgcttacaggatgctcgtgtatgagtatgtggacaatggtaatcttgaccagtggcttcatggtgatgttggcgaagtgagcccactgacatgggacatcaggatgaacattatgcttgccacagctaaagggctggcctacctccacgaggggctggaaccgaaggtggtccaccgcgacatcaaggctagcaacatccttcttgaccagcagtggaacgccaaagtatcggatttcgggctcgcaaagctgttgtgctcggagagaagctacgttacgacccgtgtcatgggaaccttcggttacgtggcgcctgagtacgccagcaccggcatgctgaacgagaggagcgatgtgtatagcttcggcgtgctgataatggagatcatcaccggcagatgtcctgtggattacacaagggcggctggagaggtgcagctggtggagtggctcaagaacatggtggccgagaggaaagcggaggaggtagtggacagtaagatggccgagaggcctcctcccaagacgctgaagcgggcgctcctggtggcgctccgctgcgtggaccctgacgcgaacaagcggcctaagatggggcatgtgatccacatgctcgaaatggacgatctccagttccgagacgataagaggcccggggccgggagagatggtcgtcgtccccagggtccggatagattggtcgtggatgtggatgtggatgtggatgggtccaaaaacaagggcctggaggattttgcagaaaagaaaacgacaggcaggggggcacacaacaacgtagctggaggcaaccagcgagttctttcatgccagctcgatgaagtctgtggctcaagtgccggcggtagtccaggattaaagccacgaaccaaacagcccctaagtatcccttcagatgttttggatatactcaattgttcacaaataacatcttccaaaaacatgtcatcagccgcagataaaaggcacaatcagagtttgttcctttcggggccttttatgcagctggcacatggaccagggaaacgaccgcaacaaacagcgacatatgttacggagatcgacaaccagagtgctcaagcaaaatttctagtcagtgtgatcattatgacgaagccttag

SEQ ID NO: 399 - DNA, 312 bp, Zea mays
  Peptide Sequence Number=SeqID_42178
atggccgcacgggaggaaagcagtggaagcagttgctgccgctcctccgaagtccgaacccgtctcgctgaccagtgcaacatttgcgagtgcatcacaagggatattcacaagggaggtgcgcgtgtgttcccttgtcacaagggagaaccaagcgattgttgtattcttagtttaagagaaacgataaacttccttcagatcaaaggcattcacccagctttattagaaagctcaacaaagaccaatgatccagtgttggggaatccagcttacagatttcaagaagatcttagcaagcagcaagtctag

SEQ ID NO: 400 - DNA, 513 bp, Zea mays
  Peptide Sequence Number=SeqID_42179
atggccggtggagcccgcgttggggttgtcgcacccgtgctgccgggccgtcgtgttgcgtctgaccgcaccggcgctgtggccgacgggggtcgcgcttgcgcgcgcacgccggaaaccgcatggccgctggggccacgcgcccgccgtcgtcggatctgcgcgctgctacggtcgcgccgccgggggaggctgcgcacccgcgtcatgaggcctcgcccgcgtcggggccgcacacccgcgccatggctgcaccacgccgaggccgcagccgcgcccgagcctggccgggatagtgcgcccgcgccggggccgcgctgcctctgggccgtgccccacgccgccgtgacccgcgcgcagagccgctgcccacgcatcgcggagggaccgcgcgtgcgcgtggggctcacactgtcgtggccagcaccgaggccgcctgcacgcggggcagcgccgcctcactgcgtgccgtcggggccgtgcctggccgaggccacgctcctcaagttatga

SEQ ID NO: 401 - DNA, 660 bp, Zea mays
  Peptide Sequence Number=SeqID_42180
atgcagatatcaaggagagacaatcggtatggacctatttgggctatctgggagagaccaacacaaccagttgacagtataaacaaagcgagagctggaaaaactaagaagacaactattgttgttgcacctacatttgtatgtgataatcgtgctgagaagagaggagagttttatacaaaattagaagaaaagcgcaaggctttggaagaggagaaactccaagcagaggccagaaagtggacacagcaggggaagggagagagcctgctgggcgtgggggcagagcacgggatctacggctgctcaggagtggccgagatccccgcccggcatgatctgcgagatccccacctcgtggaatccgaggctggccgctgggagtggggtcggctgctggacgccatcagcgactgcagaggcgtagcacgggagttgggcgagatctgcgcttggcgtggtagtcgtgggcacggctgcgcgctaggagttgggcgtgatccacgcttggcgtgctggtcgtgggcgcggctgtgcgctgggagttgggcgagatccgcgcttctcgtgctggtcgtgggcgcggctgcgagctgggagtggggtcggctgctgggcgtagcacggctgtgcgggcgggggcaaggcaggctcatttag

SEQ ID NO: 402 - DNA, 264 bp, Zea mays
  Peptide Sequence Number=SeqID_42181
atggcggataatcctattgaacacagccgcactaagcacatagacatccggcatcactttctgagagaccaccagcaaaagagagatatcgaggtgtaccatattagcaccaagaaccagctagccgatatctttaccaagccattgaatgagaaaactttttgcaggttgcgtagatcacctattcaccccctctatgtgctctcaccatccacaaaagagtacctggttgagcctaaaacaagtgcaaaacatatcagctaa

SEQ ID NO: 403 - DNA, 567 bp, Zea mays
  Peptide Sequence Number=SeqID_42182
atggactacatggtatttgaggttgctgaattggatggatcagcaatgatttgtcacactaacaacaaaatgaaaggttatttgttggttttaaacgtgagcggcacggcacagcagcggagcaagagcacgctctctccgtcgctgccgccgccgggcgagaagcgccgcacagcgtttcggcgaacaggtggtagggaagtaaagagaagcgagggggacgtagtggtggtggaggaggaggcgaagcgagcgaagacgacgtgcagctggcacggagatttctgcagcttcgtcttcacacaagcgtcctctaatggagttgggatcagcgatcagccggcccggacgtcggcatatttgttgctctctccgcgtgccgtcgtttcgtcggcgaggaaaagtcaagtattggcgccgccgcggatcacgccactgaggaaggagcacgtcaaggatatgcacatcgggtcgggcacaggaggcaccgaagaactgaacctcaaccaccacactgacgtggagcgcaaacctaataagagcatcttcaacagactagctaaatag

SEQ ID NO: 404 - DNA, 411 bp, Zea mays
  Peptide Sequence Number=SeqID_42183
atgtggttcttaatcgggccgtgtcttaataggctcaggcccgcttcaacatctgtacaagctagccaccctggcccgtcatgtcacccgctcgcctttcacgtgttgcaatgctttcccctcaccaccgggtgtctcgcgccggccgtagctatgggcctcatgccggctgctgctgcggcggcggaggcgaccgaggagaggagcacagtgctggagttcttcccgcagcaggctggcacgctgaaagacgagcagcaaaataaagccggcggcaaggtggtggtcatggacaacttccccgccgacaaggccgatgagctcatgcagctcaccggctccggcaacgccgcgctcgccgccgcccagagcgcgctgggacagcccagcctcaaaggtctcattggttga

SEQ ID NO: 405 - DNA, 348 bp, Zea mays
  Peptide Sequence Number=SeqID_42184
atggcgccctgctcccaacacctgtttggcatggcacctgctgggacagctgggttaaacagtaaccataatggcttccctgcgctcggcgtcacaggtgctctgttttctccagcgcacgtcaccggcctgccgcgcgaggaaacgggccgggttcctgtggtcctggaggaaagaaatggaccgctggtcctatttcgcggtttcctcatcctcctaatcctaacctccttccctgttttattcttcctcgtcgagcctgattcccctgccgccaccgcggccagcgccgccctcgccgccggtcgccaccgccgccgccaccgtccactcctcgccctcacctaa

SEQ ID NO: 406 - DNA, 1605 bp, Zea mays
  Peptide Sequence Number=SeqID_42185
atggcggcggcgtcgcggcaggatgcccaccggagcacgaggcaggccgtgccggcgtcgtcgagggtggcgatcatcggcggcggcatcagcggcctggccgcggcgaagcagctggcggcgcacgaccccgtggtgttcgaggcgacggcgtccgtcggcggggtgtggaagcactgcgtgtaccgctcgacccggctgcagacgccgcgccgggactacgagttctccgactactcgtggcgcaaccgcgacgaccccaccttccccacgcacgccgagatcgtggagtacctggagggctacgccgacgccttcggcctgtggcgctacatcgtgctcagcgccagggtggtcgacatcaagttcctcggcggcggcgggctcacggagctgtggagcggcggcgccgccggccagccgccgctcctccggggcaagcctctgtgggaggtcggcgtcgccaccgccggctccgacaccgttcagtactaccagttcgagttcgtggtgatgtgcgccggtaagtacggcgacgtgccgcggatgccggcgttcccgccgggcagggggccggaggtgttccgggggcaggtgatgcactccctggactactgcaagctcggcgaggaggagaccgtggagctgatgagggggaagaaggtcgtggtcgtcgggtacaagaagagcgccatcgatctcgcacttgaatgcgcccaggccaaccaaggtgagggaggcgaggcttgcaccatgctggtgagaaccctgcactgggttgtgccgtcctactccatctggggcctgcccttcttcctcttctactccacccgcctggcgcagttcctgtacgagaggcccaaccagggccttctccgctccatgctctgcacactcatggcaccgctgagagcgggcgtgtccaagttcatcgagtcctacctggcgtggaagctcccgctcgacaagtacggcctccgcccggaccaccccttcgtggaggactacgctagctgccagatggccatcctccccgacggcttcttcgacatggcggaccgggacatgatccgcttcaagagggccggccccggcggctggtgcttctcccgcaacggcgtcctcctcgacgacggcaccgaggtggaggccgacctcgtcttcctcgccaccggcttcgagggcaaggacaaggtccgcgccgtcctgccggagccgttccgcggcctcgtcgtcgacaggtccggcatgatgccgctgtaccgcggcaccatccaccctctgatcccgaacatggcgttcgtggggtacgtggagagcgtgtccaacctgcacacgtcggagctgcgctgccgctggctggcgggcctgctcggcggccggttcgcgctgcccagcgtggaggacatggtgcggcacgtcgacggcgaggcggaggccatgcgccgcaccacgcgcttctacaaacgccactgcatctccacctacagcatccacgacagcgacgccatgtgcgccgacctcggctccagggttctccgcaagggcaactgcctagctgagctcttcgcgccctacaacaacaaggactacaaggaagactga

SEQ ID NO: 407 - DNA, 609 bp, Zea mays
  Peptide Sequence Number=SeqID_42186
atggcggtggcgaagaatatcttggccaccggttgggaagcgcacctcaacactgtcaaggctgacaacaagggaagcaagaatgagatttacacgtcgagggtgcactacatgatccataagggcacaccctacttgattgtccccgagaacgacatgcacaacattgtaaaactcttaattcttcatttacttatgaacattataatcgatgagcgggggtctcttgcagtattcagtctgattcgtgaccgagttgcgagcttattgaagccatcgaaggatgagattgaagctgctcgaatggcagcgatcaacaaggaaattaagcgtgtattgactgaagtcctttcgaaggctgggcaaaagtgcttatatggaggtgctccaaaaggccctcagctaagagagttggagcgtggtgttgacattcttgtcgcaactcctaggagattaaatgacattttggaaatcaatagagtgagcctgcaccaagtatcatatcttgtccttgatgaagctgatcgtatgctcaacaaatatcatttgtacaagtatattagacccctccagctaccttgccgacgcatgaacgagaaaacgggttag

SEQ ID NO: 408 - DNA, 489 bp, Zea mays
  Peptide Sequence Number=SeqID_42187
atgaggccggtgttctgcggcaacttcgaccacgacacccgccagtacgacctcgagcgcctcttctccaagtacgggcccatcagccggatcgacatgaagttagttgtttcacaaatctggttcatgtgcaccatattggacagggtagtgaccgttgaatatgccttccgggatgatgacggcgatagagatgaccgatacgacatccccaaacaaggtgcttatgacaggcgtggtggtagcccctacatgcgctcacctagcccaagtccggtcgattctgaggaacccagtaaggaagtagtttccaaggaagaggtggcgagcaacaacatgatttttgccacgccaagtatacctggaggagccgtggtgttccaagataattctagagataacaatatggacccgatccccgaatcaccgccggaaattcctctattaggagacgagggagagggtagtttaatccacacggagatctaa

SEQ ID NO: 409 - DNA, 829 bp, Zea mays
  Peptide Sequence Number=SeqID_42188
atggcgatgccgagggcgccgggcgcggggtcgctccgcttcctgggcctgctgaagcagccggagtccgacgccgccgccccattcgagctcgacgagcgcgacgtgttgtggccgacgggcggggggcagcaggacggttgggccgccccgccggcgaggcggcgtcgcgcgcacgccatgccgctgtacagcttcgggctgtcgtcgctgctcgccgaagactgcggcggtggggtgcccgtgcccgtgccggggagggcgatggcgatggcgccgagcgccgcgccgaggcagtcggcgccggtgcgcgtgccggcgccgtggccaggcggcaggagggccgacgaggacgaggaggacggcgaggaggtggtgccgccgcacgtggtcgcggcgcggcgccacgcgcggtcgtcgtccgtgctggagggcgccgggcgcacgctcaagggccgcgacctccgcagcgtccgcaacgccgtgctccggcagaccgggttcttggacctcaccaacccaaccgccaatatttttctcctctgctctgctcccaccggcggcggcggcggggttggtggctggcggcgtgacggcataatgcggtttcgtcagagatcggagatgggaaaaaggcaggctcagatccccatgccatgccgtgattgtccacaagctaaagctagcctgcacaggcaggcggtctccagatccatgccgtctctcgagctaaacagtttcatgatttggatgttctcgtcgacattaacgttgtcagttccgtcttgtgtatttaccgattcactcttcgaggatgttgatagagcag

SEQ ID NO: 410 - DNA, 1953 bp, Zea mays
  Peptide Sequence Number=SeqID_42189
atggcgaccacgttgacgcccacgcagcgctatgcggcggggacgctcctggcgctggcgctccgccaggcgcagatccaccagtccgagcccctcggctccggccccgacgacgaggagcgcgccagcagcgccagcgggagctcctcctccaccatatccagcaccggctccgacactacctcgggcgccggcctctggacgcacgattcccgcggcctcctccgccccgtcttcaggttcctggagatcgagcccaaggcatgggcggggatggaggagacggccgcgtcgccggacgccgccaagcatcacatcggtgcgtatcccatagtctcatttcactccttggtttcgcagtttataagcatactctttgaggaagacggcgagagctcttcagacaggctagagcaggagatcgcattggcgaaagcagttgatgtgatggtcatgagcttgggcagcgacactgcaccagatgagaatatcaaagacgagtttaaatactccacggcctgtacctatgcgaccttggagtctacggaggcaggctcatccgagaacttgcttggaatcgtcaagctgtccttggaaaatgttcctgtgaatgagcaccgcaagatggtgttgctgtatgcgcttctctctgcatgtatcgctgataagcctgtatcgcaagaggaagaggacaggaagtcgtctcacttcaggaagggctatgatgctcggcatcgtgttgctcttcggttgatagcagcatggcttgacgtcaagtggatcaaaatggaagctatggaggtgatggtcgcatgctctgccatggctgcggcaaaagaacaagaacaagagcgtgaaaatgcatcaccaagaagcaagtgggagaaatggaagcgtgggggaattattggtgccgctgccttgactggtggagcgttgctggctattactgggggtttagctgcaccagccattgctgcaggatttggtgctctagctccaacactgggcacacttgtccctttcataggggctagtggatttgctgctatggctgctgcggcaggatctgttgctggctctgtggcagttgctgcctcatttggagctgctggggctggcttgacgggtaccaaaatggcaagacgaattggtaaagtgaaagaatttgagttcaaacctattggtgataaccataatcagggtcgccttgctgttggcatcttggtttctggatttgcttttgatgaggaggatttctggaaaccttgggaaggatggaaggataacctagagaagtatggaatgtacatccttcaatgggagtccaagcacataattgcagtgagtacagcaatacaggattggctgacatcaaggcttgcaatggaattgatgaaacaaggtgctatgagaactgtcttaagtggccttcttgcagcatttgcttggcctgctacgttgcttgccgctacagattttattgatagtaaatggtctgttgctatcgacagtgtacctaacagcttgtttagcgaactgatgaactgtatcctctcagatcagataaggcaggaaaaatgcttgcagaagtgcttcttaagggactgcaaggaaacagagggacttgtcgagagggttgtactccttggtgcacccgtttcagtgaaaggtgagaggtgggagcctgccaggaagatggttgcagggagatttgtgaatgtgtactcgagagatgactggattctcggtgtaaccttccgagcaagcctgcttacccaaggactggctggcatccaggccattgatgtgcctggtgttgagaacgtggatgttaccgggcttgttgatggccattcttcgtacctgtcagctgcccagcagatcctggagcaccttgaactgaatacctactatcctgtttttgttccccttccggaggtcaacaaataa

SEQ ID NO: 411 - DNA, 6033 bp, Zea mays
  Peptide Sequence Number=SeqID_42190
gttgattttgatgacatactcagctgggagtacctgttcaagctatattggttagatctgaaagggaagctttcattaacattggaagaacttactattgccaagactagatggaatgttcctagcacttctgctaggaaagaaaaagatgagtcgtctgatgacctgtatgacgctaataatgatgatgatgctggtactgactgctcctcaggaaaacgaaggcgaactaattcaaggaaaaagggtcaaaaatgccggaaggtaaataaagattgtagtgttcctgcaaaaaaggtcgagcttccaattacaaatactgagagcgttcccacagaagtgacaaatgaacgagtgccattgccagtagacacaaaagtaccaaatggatgggtacccttgccagtagacacaaaagtaccaaatgaatcagtgcccttgccagcaaacacaaaatgggcatcaccagagctactggagtttgtaggacatatgagagatggcgatcaatctttcatttctcagtttgatgttcagactcttctgcttgattatatcaagaagaataaccttcgcgatcctcagaggaaaagccaaattatttgtgacttgagacttcatcgcttgttcaggaaagcacgggttgctcactttgagatgttaaagcttttggaaatgcattttcttatgaatgagacttcaacagtaactgatagtagacaagtgactatcgatctcaattcagcttatgtagataccaatggatacaatgacatggctgcaaaattttctcctgataagaggagaaagatccatagaaagatggaaagagatacccaagttaatcttgaggactatgcagcaattgacatgcataatataaatttgatttttatgaggcgcagcctgatggaggatttagttgatgatgccaaattctcagacaaaattcatggtggttttgtgaggattaaaatttctgatgtgtatcagaaacaagacatataccgtctagtaaaagttactggaacgcacaaggttccagaaaagtatagcattggaaagaagatgacaaattttgcactcgagatattgaatttaaacaaaaaggagattattacaatggatacaatatctaatcatgattttacagaggaagagtgcaaacgtttaaggcagagcatgaagtgtggcgtgattagcagactaaaagtgggggatatcctagagaaagcaaagatattgcaatctgtaaaagtgaatgattggtttgaaaatgaaaagcagaggcttgggcatcttcgtgaccgtgcaagtgaaactggacgcagaaaggaatatcctattagaccatactatgatgtgcttctcaacgattctgaggaaagaacccgcaggattaatgaagttctggaagtgcatgttgactcacatatggatcctaattatgagtctgctgaagaaacagatgagaaaagaactgttggaaagtcggtagatcggacaagaccagatacaaccatatcacgacgaatatcaagatatcttagcactatgcagaaccatcctcaaaaagtttctgattgtagccaccatccaaaaaacttgtcaacagaaagtacaatatgtggatcaggagcaagaagtttggagaacagcacagcaaacagaactatgtatgaagctggatcattttcatcttctggagtaacaatgtcaaatgacacggagccggagaaagtctggcactacaaggatccttctgggaatgttcagggtccatttactcttttgcaactatcaaagtggacaagttacttcccacgtgatctgagagtatggcttacatttgagagtgaggagagatctttgctgttgactgaagtgctttcaaaacagcagaaagatttcactcaggctgcatcacatacaagcagcaaggcaacgctggttggcactggacatacaaggaacaaccctagtgtggatcagaccaatgctttctcccctgctggtcatagtgtggttagttcttcaggaataactgttcagtataataagtattctgttccagaaagggaaagtgtgtactctccagatgatagcttgtcgctgtcaactagttcggttccgccgaaggatgcttgtactgtgaatagccaaacacactgccagaataagcattctgttttcattcaatctcctggaagtgcatatgggcacacagacttgaaccatgatggaatacagggaggatgctctggtgaatcaaaccaccatcacagcagcggagccctatggagtcctaccgtggtacaggtgagttgtggacatggtaatgtggaatctcatcagagccagcatgtttcctggtcacaaagtcaacatgaatctaaaaatagttcacaacgacctgttaaagatctgaattcaaggcgggatctatcgaaaaacctacctactcaacgtatagggaaagatgtctccagtcctttgtttgcttgtgcttggagtccggccgagtcgaggacagcttcaagtcaacatgacggctcttgcttaagttcaacaactaatccaaactttctcgatgaacttcattattctattgcttccgcaaagcctaagagctgcgctccagcaacccctattgaagacagaggttctagttcaccatcaggcatgctgagtcatgcagaaagagttccaatctgcagtccacaatcaacccctttggcatctgctttcgatatgtgcaagatggaggagatcatgaatcagcaaagaacactggagccggatacatcaaatgcttcaattaaccagtctcccgaatcaaagattttccctgtatcctctcctgataaccatgatattgaccgtgagtttcctagtccagttccaagatctgagaataaggacattgcggttgacagctcaggattaacaccagcatcacctgaaaatattactacgaatttgcctggttcagatacatgcaagatggaggtcatgagtcagcaacaagtaactgaggctgtcgtatcgaattcttcagataatcattcccctcaatctaaggtttcccctgtatcatctcctaataacgaagatatgaaacatcagtaccccagttcaacccgaaggtctgagaataagattcctgctgtggacaatttactttcaacatcagctgctcgtgaaaatctaacgacaacttctgcccatgattctgatacatgcaaaatggtggagttagtgaatcagccaaaaacacctgaagtggatgcatcaaatgctccactttgtcaatctcctcattctcacacttcccaggtaccttctgacaatcaagatattgaacgtgaatgtccaggtccaactccaagatctgacagtaaagaacctcttgtaaacaactcagcgacaacttctgcatcagcctctgatacaatcaaaatggaggagtttgtgaatcagcaaaaaacagttgaagcagatgcatcaaatgctccacttaatcaatctcattctcacatttttccagtaccttctgacagtcaagatattgagcatgaatgtccaggtccaactccaagatctgacactaaggaacctcttctgaacaactcagtgttaacattagcagcgtctgaaattctaacaacaacctctgcggcctctgatacatgcaaaatggaggactcagtgaatcagcaaaaaacgcttgaagcagatgcattgaatgctccacttaatcatcatcctcattctcacgttcttcctgtatcatttgataatcaagacattcagcatgaatatcctagcccaactccaaaatctgacagtaaggaacctcttgtggacaactcagtattaacatcagtagggcctgaaatgctagcgacaacttctgtctctgatacatgcaaaacggaggagtttgtgaatcagcaaaaagcagttgaagcagatgcatcaaacgcttcacttaatcagcctcacatttccgctgtaccttccgataaacaagatattgaatgtgaatgttctagcccaactccaaggtctgactgtaaggaacctcttatggacaactcagtattaacatcagcggtgcctgaaattctagcaacatcttctgcttctgataaatgcaaaatggaggagtttgtgaatcagcaaagaccaattgaagtggatgcatcaaatgcttcacttaatcagtattctcgttgtcacattttcaatgtatcttctgataatcaatatgttgagcgtgaatgttctagcacaactccaagatctgactgtgaggaacctcttatggacaactcaatattaacatcagcggtgcctgaaatactagcaacatcttctgcttctgcttctgataaatgcaaaatggaggagtttgtgaatcagcaaagaccaattgaagcggatgcatcaaatgcttcgcttaatcagcctcatcgttgtcacattttcactgtatcttctgataatcaagatattgagtgtgaatgtcctagcccaacttcaagatctgacagtaaggaatcccttgtggacaacttagtgttaacatcagcagtgcctgaaaatctaccgacaagttttgcagttgcctctgattcatgcaagatggagatcttgaataagaaaagaacacttgaagcagatgcatcaaatgcttcacttgatcagccttctcactctagcgttttcacttcatcttctaatgataatcaaggaaatgcgtgtgaacgtcctagtccaaatccaagacctgagggtgagcagcctctcatggataactcagggttaacatcaccagtgcctcaaaatctaacttctgcttccgacatatgcaagatgggggagatcttgaatgagaacaggacacttgaagcaaacccatcaaatggttcaattactcaatctcatcaatccaaggttttccttgtaccatctattgatatcctagagcgtgaatgttccagtgaaacgcctaggcctcagtttaaggaacctgttgtggacagctctgggttaacatcagcagcacctgaaagtttaacagctaagcaacatgtccactcaccagatgcctttataccaccaaagcatggtgctccaactggggaattaggtgatgcaaaatcagattttaaaggtgaagaaattattcaaaaagaacaatattgtgaaagagaacctattgttgctacaagagagaatttgctaattgatctttcctgtggtgccgagtcgatagatgtgtcagatgtattggaatctttaatggaagaaaggagtgtaacttcgtacgtgccagtatcaatagaggacttcctagccgcttcagcagtggaagaaccacaatactctagccctatagcgttatctccttggggtgaacctagttactaccaaggtgatgctggtgattctgcgctatggggtattcaagattcgatcaatgatatgtggtcattgctttcaccaagacctatgctccaagcttcatctggtattggaactgaggggaaggaaacttttgatatcaacgaggtggctgtgacccatgttaatagtgattttttccaaagaggatcgatgcttggggaggaaaatatgaatcaggcaaacttgagtgttgctgcagataggatgctgctgcctgagcaggtcccatcaataccaaatggtatgtcaacatcatcagtagacgagggcaccagagttataggttctcaagcatcaatcaatcagagcttagactggggtactacatggaggactagtcagaatctcagcgtgtatagcaatgaaatagcagggccctcgagtaaaagctattgggaagaatcaaggaagcaggaagccaccaattcgggcgtttctatttcaggggaagccattagaaacaagcgcttgaaccctcctgataatgctattcggggcagccatcatcaccgtggcagtttgtataggctaattaaaattaagtcaacagagcgtaaatga

SEQ ID NO: 412 - DNA, 450 bp, Zea mays
  Peptide Sequence Number=SeqID_42191
atggaggccgccgcgcccgacggggccggcaaggcatccccggcccccgaggagcccgactggccgcccgagctccgcctcctcgcgccgccgccagctgcggggacggacgatccgcagttcctcagctcgatcatcggggacgcggccgcccctcccccgccgatgccgccgctcgcgcagaagcggaaacgggggaggccgcccaagaggaaagacggcgcgggcgcggtggtaccggcccggcccgccaggcggagggaggacgaggaggaggtcgtctgcttcatctgtttcgacgggggcaacctcgtcgtctgcgatcggaggggttgccccaaggtctaccatccggcgtgcatcaagcgtgacgaggcattcttccagtcgcggagcaagtggaactgcgctaacatgatttttggtggtagaagatggaccttaatgtaa

SEQ ID NO: 413 - DNA, 156 bp, Zea mays
  Peptide Sequence Number=SeqID_42192
atggggatggccgcgccggcgctagcgttggtgcacctcttccgccgattttatgataacaacgaagctaagaacctcgagagggaggtagaaagagaaaaacgtaccttggccgaggatgtgataatggatcttatgcacttggagctggactaa

SEQ ID NO: 414 - DNA, 1938 bp, Zea mays
  Peptide Sequence Number=SeqID_42193
atggggagagagggtgcttgctcctgtcttggctggcatgggggaggaaggggagcagctgcgggggaggaaggggagggccagcggctgggatggtatgttgatgttattcttcagcttatagacaaagctggagattttgtaagtgatgatatatggtatcgagttgtacaatttgtcacgaacaacgaagatctacagtcatatgctgcagctaaggcaagagaatatcttgacaagcctgctttacatgagacaatggtcaaggtgagtgcctaccttcttggggagtatggccatcttttggcccggagacctggctgtagccctaaggaattttttgctattataaatgataaacttccgacagtatcgacaagtactgtagctattcttctctcaacctatgccaagatattgatccacactcaacctcctgatgttggactgcagcaacaaatcctcacaatatttaaaaagtacgagagctatattgatgttgaaatacaacagagagcagttgagtattttgaactaagcaggaaaggccctgctttggcagatgtgttggctgaaatgccaaaattccctgagcgtgagtctgcacttctgaagaaggctgaagacgctgagattgacacagcagagcaaagtgctataaagctacgcagtcagcaacaaacttccagtgctcttgttgtagctgatcactcccctgcaaatggatctgcaccaccagctaatcatctcactcttgtgaagatgccaagccaaattgtttctgacactcaggagagtggggtaattcatgaagaagttcctaatcctcctgttgaagctcccaaagaaaatgggactcccgtcgaagtggaaagcagggacacaaacattactggaatcaacaatgaggttaaaactgaaccaccctctacatcgcattctacctctcccgcggacctcctggcagatcttttgggtcctcttgcgatagagggccctcctgccgtagagcaaaatcctacccaaggattgaatagtaatcaaagtccagttggtgacttggcacttgctacccttgatgatcaatccaactcagttcagccaattgtcaacgtcgaggaaaagttccatatattgtgcacaaaagatagcggagtgctgtacgaggatcctcacattcagattggtatgaaagcagagtggcgtgcccatcatggccgtcttgttcttttcctgggtaacaaaaatacttcagcccttacgtcagtgcgggtgctgattttgcctcctagtcatttgaaaatggaactttcgtctgttcccgatactattcctccaagggcgcaggtgcaagttccacttgaggttgcaaatctccgtgcaagtagagatgttgcggttttagatctctcatatacttttggaacttcactggtggatggcaaacttcgacttcctgttgtattgaataaatttttgcagcctataactcttacccctgaagaatttttcctccagtggaaagcgctgactgttcacttgctgaaggttcaagaagtggttaaaggtgtgaaaccaatgcctctttctgagatggctaatcttttcatgagccttcacttggcggtcgctcctggacttgataacaacccgaacaatctggttgcatgcacgacattcttttctgaagcaacacgggccatgctttgtctgataagacttgaaacagatccacaagacaggacccaactgcggctgacagttgcctcgggcgatcaacatttgacattcgagttgaaagagttcgtcaaggaacatttgattgatatcccaaggactcaggctgccccacctatggcaatggtccagccacagttgcttactgcagcacctgccacatacaatgaccctggtgccatgcttgctggattgctatga

SEQ ID NO: 415 - DNA, 2406 bp, Zea mays
  Peptide Sequence Number=SeqID_42194
atggcggtggcatggaagggtaagaaattacatccaagtggcatagaaaggattttgacattttttatgacaaataaggtactggacaaaattgcagtggcattcaaagaattttcccataaaactaagaataagatccttatagctggtgataaaaagggtaacatcacagcctatcctttccctaaaatattggtactgcatgacagtggtctgatgcaacagaagatgcttccatgttgtcgctttaaaggagctcatggcatttctagtgtcacgagtgttcatatagaagactccacttctgatcatattgaaattcacactaccgggggagatggttgcatttgctttttcaagtatggaagaattgcacaaaagattgaattttttggaatgaggcaagtaaaagaactgggcaccattcaatccatctacactaatcttgcatctgagagccaatctagtagtacctacgcaataggtttcacctctgcagattttatcatttgggaccttgagaatgaaacaaagatggctcaagtatcctgtggtggctggcggcgcccttattcttattatcttgggacagtccctgaatatcagaactgctttgcctttgtaaaggatcatgatattcacattcacaggcactgggcaccaactcatgataagaaattactcgctcaagttctccatttgcagtttcatggtagagaagtgcactcgttgtgtttcataaatccagcaagccattcagatcctgagaatagctcagatctgttgatagcaaccgggtgtgaagatggaactgtgcgccttacaggatttttgactggtagttctggaaaatggcattcctcaaagttgctaggggagcatgtaggcgggtcagctgtgcgagctacatgcttcataccagagacctacacagtaacatataattcatgtaactacagttcgaacggtatttctgatggcattgctgttgaaaaagacgagactttcttactcatatctgttggatcaaagcaagtcctcactacttggattttgcaaccgaggaatgcagaaaacagacaagtatattcaagtggcttagatattgactccaagcaaaactccagaaacttggaaaacgttgattcagccatgtcatttcaatggctaactacccacatgccaccaaagcttcctaggaacagactgaaatctggccacataaaacagagggttgaggaaggaaatttttctgttgttcagccaaatatggacgttatggatcacatggaaaatgactggcgttacctttctgttacagcatttcatttgaagcatccggttctcagcaggttgacagtatgttttgttgctgttgcttgctcggatgcaacagttgtgctccgtgctcttctgttaccttctcgattgtggtttgacgttgccttcttggttccacatgcatcaccagttttggtgctgcggcatattatcatcaatgctagccactataaagatgatgctggagacagataccttattgcgagtggatcaacagatggtagcatcactttttggaacctgacagagaccattcatggcttcatgcaactaatatcagagactcaaccacatatgagtattgattatcaaaagcgtcccaggacaggaagagggagtcaaggtggtcgtctccggtggagatcactgtcatacgcttcgaagaagagagatggagatatgtcatcctctgacggaagcaacccgggtagcctaaacactgctgaaaattcatctgaagcttctggtgtggaaaacactcagattgtagtgcatgaagcaagtgacagctcaaaaactgagatgccttcaagtacccagtcatgtgatatacctgaattgagaccaatgcactcgttatccggtgttcaccagtcaggcgttaattgcctccacatatcattctcaacacctgacaagtcatactgcattataagtggtggagatgatcaatctgttcagcgcttcaacttcagagtaatatcttcggaggattgcttaacaaccccagcaaggctaaattcgcatgacaatgacacacttaaaattctatatcaacataaggtagcatcagctcatagtgcagcagttaaaggaatctggacagacggcacttggtcgttctctactggccttgatcagagagtaagatgctggaagatgggattagccggccaattcacggaatactcccatgctatcattagcgtgcccgagcctgaaactctagatgttttccatgaccgtggcgatgcttgccttgctagggcaaagaggaagtaccacattgctgttgctggaaggggtatgcaaatggtcgagttctcaccacctgaagatgattga

SEQ ID NO: 416 - DNA, 1473 bp, Zea mays
  Peptide Sequence Number=SeqID_42195
atggcctccgccgccgccgcgcaggcgcagccaggtggcgccccaccggcgaccgcggagtacgaggaggtgctggggcggctctcctcgctcatcacgcagaaggtgcgcgcgaacagcgccaaccgcggcaaccagtgggacctcatggagcactacgtcaagattctggagctggaggagtcgatcgcgcggatgaaagtgattcacgtcgcggggaccaaggggaagctcctttctgagggcatcagggttaatatttctgaagagaaatttttgaagtacttctggtggtgctggaacaagttgaaggagaagactgatgatgatattcccatgccagcctatttcaggttcctcgcgttgctcgcattcaagatattttctgctgagcaggtagatgttgctgttcttgaggttggcctaggagggaagtttgatgcaactaatgtggttaaagcacctgtagtttgtggcatatcttcccttggatatgatcatatggaaatccttgggaatacacttggagaaatcgcaggagagaaggctgggattttcaaggttttgtttaattgctttcctaaaggagttccggcctatactgctccacaaccagaagaggcaatgactgctctcaaacaaagagcttcggaattgggtgtctctctccaagtcgttgatcctctggagccccatcacctaaaagatcagcatcttgggctgcatggagaacatcaatatataaatgctggccttgcagttgctttggctagtacgtggcttgagaagcagggacataaagatacgttaccactcaatcgtactgatcccttaccagatcattttattagagggctatcaagtgcttctttgcaaggccgagcacagattgttccagattcacaagtgaattcagaagaggacaaagattgttctcttgttttttatttggatggagcgcacagtcctgaaagcatggaagtatgtggcaagtggttttcccatgtcacaaaggatgatacaaggctaccatcttctttggagcagtctcatacatctaggtctcaaaagatccttctgttcaactgcatgtctgtgagagatccgatgagattgcttccttgtctcctggatgcatcaactcaaaatggagtccactttgacctggccctatttgtgccgaaccaatcacaacacacgaagcttggttctaacacttcagcaccagcggagcctgagcaaatcgatttgtcatggcagctgtcacttcaaacagtgtgggagaagttacttcaggataaaggtataaatactacaaaatccagcgacactagtaaagtttttgattcgcttccggtcgcaatcgagtggctaaggagaaatgcccgagaaaaccaatctacttctttccaggtgctggttactggctccctgcatctcgttggggatgtcttgagaataatcaagaagtga

SEQ ID NO: 417 - DNA, 1131 bp, Zea mays
  Peptide Sequence Number=SeqID_42196
atggctagcaacgccgaccagcatgctgccgttgtctcggctgccccgtccgatagcccggttggggcgaagaaggctggggcggcggccgccgtctggaaactccccgcggccgcggcggttcccgtcgcggaggtggttgaaaaccccatcatggacgcacactcctggccggcgctgcccgggctgtcgtctccgccgccgccgccgccgccgcatgcggggccaacagccaaagcgtcaccgaaggccgcttctccagctcccactggggcggcgacgtcgcccgtctctttgggcaatcctggcgcgccggatgctagccatggtaacgatgctcgggtgcgcaatcctgtggcccggcgtgccctggtgatgcctgcggcggatgggctggagaagagtgcccctgcaccggaaccgtcccctgtttatgtgcctaatgcccggagcaatggtgcagatcctcatcagaatggacgtcctggctcgcatcaccatggccgaggtggtggctatggtgggggaaacaggaggggtaatggtggaggtggggggcgtcgcgggagtgagcaccacggtggttttgatgggcaacggcgcggaggtggccgcagagatggccatggaccggttcatcagctgcgtggccatcagccaacatacattaaggctcctgttgtagcaggagcacctccaccgcctccaccatttgttagccccgctactcctcagacaccaccttatggaccacctatgggcttccatgacatgtcagcgcatgtttactatttcccggcacccacctcggaaggcattcaaggcctgccttttgtgcctcttccagcaagcccccaagctgttctaattgacccttctcgaaagaaccttctggagcagatagaatactatttcagcgatgacaatttgtgcaaggacctttacttgcggcaacacatggatgggcaaggttgggtgccattatccctgatcgctggctttcgccaagggtcagtagcttcaaggcgcattttttttcaaggttcattgcaagctgagttcatcccaactaacagcagtggtacctccatttttagtgtattcagctacacatttgtacaggctgtttga

SEQ ID NO: 418 - DNA, 327 bp, Zea mays
  Peptide Sequence Number=SeqID_42197
atgtcaccaaagagagatgagttaacatggtttgcatatctttttcatataatagtgaaatctatcattaaagaaattgatggtgatgtattttgtttattgttagacgagtcatctgccaaagtgaaggataggtattgccaagtagaattgaatgttcatgacttggagaaagttggtttagccaaggacaaaggcatgaagtacttcgagggacttagagcaaaggagaaggtcaagaggactgaggtacctgaagccaaggtgaagaataagttcttgcaagggtcaaggttgatcaagccgagaaaagaaatagtgcattga

SEQ ID NO: 419 - DNA, 1167 bp, Zea mays
  Peptide Sequence Number=SeqID_42198
atgggggacgccgtggaggacatcgtcatcgccggcgcgggcctcgccggcctcgcgacggcgctcgggctacacaggcaagcactacctacctactcccctgcacaagcacaatccgccgttgctgtcctccgtgctgacggacgggctgctggtctcgtctctatgatcgccttctctgcagctactggtgaagcagctgcagaagtgagcctaaagattcagagcaaaagcgggccacacgagatccggtgcgtgaagcgggacttcctgctgcggacgctggccgacgagctgccggagggcaccatcaggtactcggccaaggttgtcgccatggaggaagacggcgtcggcggcgccaagaccctgcagctgcacctggcagacggttccaccataaaggccaaggtcgtgatcgggtgcgacggcgtgaactccgtggtggcccagtggctgggcctgccgaagccgatcctgtcggggcgctcggccaccaggggcctcgccgagtacccgggcggccacggcttcggccccgagatcctgcagttcatcggccacggcttccgctccggcgtgctgccctgctccgacacctccgtctactggaactacacctggtacccgtcccccgcggacggcgacgccgaggagagcgtggccaagatgcggagccacgtggtcgccaagctgcggggcgccaaggtcccggccgaggcgctggaggtggtggagcggagcgagatgagcgacgtggcgtcgtcgccgctgcggttccggtccccgctggcgctggtccgcggcagcatcagccgcggcggcgtgtgcgtggcgggcgacgcgctgcaccccatgacgccggagctcgggcagggcgggtgcgcggcgctcgaggacggcgtcgtcctggcccggtgcctgggcaaggccttcgccctgctcggccaggagcgggatgaggggcgggtcgtcacggcggcgctggaggagtacgcggcggcgaggcggtggcgcagcatccagctcatcaccgccgcctacgtcgtcggcttcatccagcagagcaacaacgccgtggtcaggttcgtcagggacaggttcttgtctcggctgctgtccaagacgctggtcgccatggcggactacgactgtggggcgctatga

SEQ ID NO: 420 - DNA, 2190 bp, Zea mays
  Peptide Sequence Number=SeqID_42199
atggaccgcgcagacggaccgacgcaaccaggcaccatccagtgcatgcgcacccgcggcccagccatggacatggggtttgtcgagagccagccggagttgacggccgcgccggcggcgggacccggcacgggaagcaggctgccgggcgggggcggcgggcgcaagcggaagcacctctcctccatcgccaaccacgtgctccggcaatgttctctgacactggacaggagcgtggacgatttggtggcagacttcgagctgggcttaaagactgcagcagtggacagctactcaagaaaactggtcgagttctgcagtctccaggcgctgcagatcatcacgtcacgcgatataggggagaagatcagcgagggctcgctaggtcggttcaccttcgatatgatgctggcctgggagaccccgactccgtcggaccaacagatcaccatggagagcgtagcgaaggagagggaagataggaaggagacccttggagaaggtgaagctgtgatgggtgatgagacgtcactgttctattcagacatcatgcctcttcttgtgaatgaagagccaactgttggggaagaagcgtacgtgtggtttggatctgtgttccctttggcttgtgacgtggtcaatgctcgattcacattcgaagctctcactgccaccacagctaacaggctgcactaccctgcctatgacaggttcctgaaagagatggataagtccttcaagttcttccaagacttgccaactccgactggagttgaattcgctgaggatgagttcattttgcacatggagggcacggcagggacacagagagtggtgaggcacattggaaccactagctggccaggtcgagtgactctgacgaacaaggcactgtattttgaggcttccggaaaattttcatacgaatctgcaatcaaggttgatctctcagacaccggagtagaacaccaaatcagcacggcgtcaacaggccctttcggcgtgcctttgttcgacaaggccatcgtgttcgagtcactaccagagcctgtggtcttggagttcccggagatgaccagctcgacaaggcgcaacacgtggctcgctctgatcagggaagtgctgtccatccaccgtttcatctcagcgtacagcatagtgtcccccgtccacagatgggaggtgcactccagaaccatactaggagtggtacgtctccacgccgcgagggagatgctacggatgtcgccgccgccggcttccagcttcctagtgttctcgctgtacggcgacatgcccaagggcgacttcgtgctcgagcagctggcgagcaacctgaagcggacctccaccatcacccggctgagcgcgtcctacgtgttcaagggtctgagcaggtcttcttctgtcccacctctgagcgcggaggtggccgccgaaggccgtggcgcggacgacgacgccagtggccgcgagcacgagcggcccctggcgtccctggaggacaagatcggccgggtgcgagatgaggccagggaagtcaccgccgccaacgccgccgttgaagggatgaaggacgaaggcatctcggatagtcttctcgtgctggtggggttggtcggtcccgtcggcaagctgcggcccgcgatccagcggataacctcgtgggagcggccgcttgtcactggcagcatccttgccgcagcttcgctgatcatatacaatgaatggttcagttacgtgctagctgcgtccctggtgctggccgccggcgtgatggtctgggcgaggcagaggaagataggggagctatgctcggaggtgatcatcgatgcctcttcgtcgtcgtcgtcggacaagacaacgatggatagcatagtggaggcgcagcgaagcctgcagaaagtgcacaggtacatcgtgaccgcgaacgttgccatcctcaggctgtggtcgattgcgctagcaaggtcgccaaagcacacagagacggtgatctggatgctggccgtgtccgcggcggtggtagccgtggtcccgttcaggtacattctgatcgggctggtggcggggagcttcgcgttgaacacgagggtcgcgagggccgtgatgaacccgcagggcggccggcggtggagggagtggtgggagtccatacccgccgtccccgttcggacggtgcacagttga

SEQ ID NO: 421 - DNA, 423 bp, Zea mays
  Peptide Sequence Number=SeqID_42200
atgggcaagggcaccaagcgcaagcgcgagccgactcctccgtcggacgagttcggtgactcggaatactcagaggaggagttctcctctgagtccgagggatccccggcccccgtctctcccccggcgtcgtccgatgactcggacgactcccaggggatagccgcggaggtctggacgtacatccgagccgtcgagcgcgccgggctcgaaggctcgaatgagtcggagtactcctcggatgaggaggactcggacggcggcgacgagggtgaagacgacgacgacgacgacgacgacgacgatggcgacgacagtggcaggggcggcggcgacggcagcagggacagcaccaagggcggcggcggcggcagggacagcaccaagggcggcggcggcggcaggggcagggccagtggctag

SEQ ID NO: 422 - DNA, 114 bp, Zea mays
  Peptide Sequence Number=SeqID_42201
atggcaacaaccaaagctccggattcagatgagatatcgaaaagacaggcgcagttccagaacgcgaaaaatggaacagacgacacgcagcagcggcagaagggcaagttctaa

SEQ ID NO: 423 - DNA, 229 bp, Zea mays
  Peptide Sequence Number=SeqID_42202
atgcacggcacagcagcactagccaggcagccgccatcgctgtcgtccaatcaaattaagcggcagaggttgccgaggcctggctccgttccgttccgtggcacggagcaatgcggccgtgctcgtgctcctgctcgcggcgcgcaggtgcaggcatcaatgctcgcagcgagcgcacgcagatctaactacagcgcggcccagggggcgctgccgcttgtgcgcgcag

SEQ ID NO: 424 - DNA, 405 bp, Zea mays
  Peptide Sequence Number=SeqID_42203
atgagcctgcacgacaagttcgcggtcatcttcacctccagccccgtcgtcctcgacgccgtcgacgacctctccgttctcctcgcgttcaccatcctgctcaacagcatccatcccgtgctctcagtctcaggtgtggccgtcggctccggctggcaatccatggtggcctacgtcaacatcggcatccccatgggcattctgctcggacggctcttcaacgttggcgtgctgggaatctgggcggaaccctcgtttattgccacgctcatcctggccattatgacagtccgctgcgactgggaaaaggagtcgtacactcgtactgtctcatgtcatgcctaccgtggagtctactgtacaacttcatgccacagctggaggcaatcaaggacttccaagtaa

SEQ ID NO: 425 - DNA, 636 bp, Zea mays
  Peptide Sequence Number=SeqID_42204
atgtccttagaaaataaagataacggcgcactcgtctccgagggcggcgacgagctgcggctggacagtctcctcaaggcatccgccgaggtggttggccaagggcgtgtccgggagcacgtacaaggcggtgctagaggacggcgtcgtggtggccgtcaagcgcctcagcgcgctgcagttccccgccagcgaactgcgaacgtgaagccgtccaacatcctcctgggcgagcgcggcggcgcgtacgtgtccgagtgcgagctcatgcgctacgccaccaacatccagcagtccatcgccccgcaggccacccggacgcgccacccggacgcggtgcccgcccgagctgttcctggagtgggacgcgggcacgacgtcggggctcgcgtcgagcggcgggagcgggtggcacgggtacgcgaccccggagctggcttccggcgcggccgcgcgggcgacgcaggaatcggacgtgtacagcttcggaatggtgctctggaggtgatggctggcgagtgtagcgatgagacgatggggatggtgaagatcggcatgctgtgcaccacccgaggagcggcccacgatggcgcaggtgctcgccatgatgagcgagttcgtgtgaagctggtgtag

SEQ ID NO: 426 - DNA, 2301 bp, Zea mays
  Peptide Sequence Number=SeqID_42205
atgaagaaatcagaacacttgaattcactgtcagaacgatgcatgggtgattcagacagaaaaccatacccagctcagctgtgccctgcgaacgcgtggcaccttcgatgcgctcgagtcgcaaatgataagctgctgaggcagaatatgccgtgcaggaggaagtccggtccactgagaaaggcggcgacctttggcgccagttcccgttccgccgtgcgtgcaactgcaattgcaatattcgggtccgcgctgctctgctctcgcgacaccgtcgccgatcctgcccttttgaatctcgtgctaataaacaaggagcaggagcagccgccgccgctctcactggacagaaaggaagacggggccttgagacgatctgagatagcgagagatgactgcaggcaccgaatgctcattcaggcgccctccaactccgggctccgcaaccgctgctccccctccctccctccctccagctcggcctgcctcagcccgcgccgcgcgatgtcagaggaggacgaggaccagccgccgcccaagcggccgtgcgcgtcgccgcccgcggaccaggtgctcgacaacgtgctcgagacggtgctccagttcctggacgccccgcgggaccggagcgccgcctcgctggtctgccgctcctggcaccgcgccgagtccgccacccgcgactccgtcgccgtccgcaacctcctggccgcctcggccacccgcgccgcgcgccgcttccccaacgcgcggagcctcctcctcaagggccgcccgcgcttcgccgacttcaacctcctcccgcacggctgggacgcctccgccttccgcccctgggccgccgccgtcgccgccgggtccttccccgcgctcacctcgctctacctcaagcgcatccccgtcaccgacgctgacctcgacctcctctcccgcccgctcccggcgtcattccgcgacctcacactgcacctctgcgacggcttcacctcgcgcgggctcgcctccatcgcctcccattgcaggggcctgcgagtgctcgacgtggtggagtgcgacatggccgaggagcaggaggtcgtggactgggtggccgcgttcccgccggagcccaccaacctggagtcgctctcgttcgagtgctacgagccgcccgtggccttcgccacgctcgaggcgctcgtggcgcggtccccgcgcctcagccgcctgggggtcaacctgcacgtctcgctcggccagctgcgccgcctcatggcgcacgccccgcgcttgtcgcacctgggcaccgggtcgttccgcccggcggaaggcggcgagggggaggcagagttcggggaggttgtctctgcattcgtgtccgctgggcgagcgcgcacgcttgtttctctctccggcttccgtgacctcgcgcaagagtacctgccaatcatcgacgtggtgtgctcccacttgaagagccttgacttaagctacgccgcggtcaccccgaatcagatcctgatgttcatcgggcaatgctacaaccttgagacgctatgggtacttgactcggtgcgcgacgaagggctcgacgccgtggggatttactgcaagaagctccagactcttcgcgtgctcccattggatgcgcatgaggatgccgacgagttggtatcggaggttggccttactgccatcgcacggggctgccctgctctccgttcaatactatatttttgccagacaatgaccaacgctgctgttgtcgacatgtcgcgccactgcccggagctcaaggtattccggttatgtataatgggacgacaccagccggaccatgcgactgaggagcccatggatgaaggattcggtgccattgttaagaactgtaggaagcttaccaggctatccacgtcggggcaacttactgaccgggcgtttgagtacattggcaggcatggcaagtccctgcggacgctctctgtagcgtttgctggaaacagcgacgtggcgctgcaatacatcctccggggctgctcaaagctcgagaagctggagataagggactgccctttcggtgatgccggcctcctctctgggatgcaccagttctataacatgcggttcgtctggatgtcaggctgcaacctgaccctgcgggggtgcaaggaggtggctcgggggctaccacgaatggtggtggagttgataaatggccagcctgatgagagcgagaggaaggaaagtgtggacatcttatacatgtatcggtcactcgatggtccaagggaagatgtaccaccatttgtgaagatcctgtga

SEQ ID NO: 427 - DNA, 363 bp, Zea mays
  Peptide Sequence Number=SeqID_42206
atggcggctccgctgaatcttctggcaagggcgcgggcgaccggtcaggcgcatccccagcgcgggctcggtcctggcaggcacgctgctccagccagcctcgtcgcgggtgcgcaaccccggcgcgcgtgggctcggccccagcatccccagtcggcggcgtggaggccaggcgcgggcaccgcgacgagcgtcacgcgggcgctcggcctccagcgcgggaccgcggcccggcggacaagcgggcccccggcgcggcaccggatgggcatgggcgcgcggccgcccccgacttggcgcgtctcaggcgcgggagcaccggtcacggacgaccacgacggatcgggcgtgcggctcctctag

SEQ ID NO: 428 - DNA, 168 bp, Zea mays
  Peptide Sequence Number=SeqID_42207
atggcgatggcacatgccaccggtgaagtgtctcccaaggggtgtgtcccttgggagaaaactgtcagtttaatggagcgaaaatctaagtcaaggactaaagagagccattataagggtgttgaggcttcaattaagataaaaactagttcaaggtctgtctgttga

SEQ ID NO: 429 - DNA, 684 bp, Zea mays
  Peptide Sequence Number=SeqID_42208
atgaacggggccgagaagctgcggtgggccttctcggacggcagcgtcaccgatctcctggacgcccgcagcctccacggctcccccgacattaagaaaaaagtacagttccattcttctctagtgcaaaagcttgctttggaaaaggagatggagggtcacgtaggttgcgtgaatgccattgcgtggaactcaagtggttcgcttcttgtatcaggatcagatgacactagagacatagtatcatggatcttgtcgttgaaaggcggcatcgtaattaacatctggaattataataaccgagagctggtgcatgatattgacactggccattctgcaaatatcttttgcacaaagtttgttccagaaacatgtgatgaagtagtagtctctggagcaggagatgcagaggttcgtgttttcaatatgtctcgattaagtggcagaaggcctagagaaatttctatggaaccaacagcagtttaccagtgtcactcaagaagggtcaagaaactagctagcatgacaaaatttgtatttaattttgacaaaaaaaatctgaaagaagtctcagattgttatggactgcaatgggattggggaattagagagggagttgtagttgcaggaatgccggctggggggctcttctcacgaccgagcaagaagaaggcttgcttctaa

SEQ ID NO: 430 - DNA, 3585 bp, Zea mays
  Peptide Sequence Number=SeqID_42209
atgtacaagctccgcggccgtggcggcgggcgcggcggcagcggcgtagcaaagcgaccgatgccctccaacgcccgcggccgtggcgttgcctcctctatcggcgggatggccgggcctcctcgcagtcgcgccgccgccgccgccttgaaacagccggtgggacgcgaggaggcgttctgcctcgagtccagcgggctgcctgcctttgcggctataatacggctgacgcccgacctcgtcgacgagatacggcggacggaggaggccggtggaggcgcccgcatcaagttcaaccctaacatgtacaactcatcggagaacgttatagatgttagtggtaaagaattcaaattcacctgggcatctgaacgaggcgaattgtgtgatatttatgaagaacgtcggagtggagaggatggaaatgggttgcttctggagtgtggctctgcttggcgcaaggtgaatgtgcaacgcattttggatgaatcaacaaagaaccttgtgaaaatgcgctcagaagaggctgaacgtctctcaaaatctcgaaaatcaatcgtgctggaccctgccaatccatctgtcaagagtcaggccaagtcaatggctgctgcagctgtagaaggtaatccacggaggatgcactggaagcagaagagcgaatttcttaagaagaataaagctgctgttatcaccccaaccaaatcagttttgaaggtgaagttatctaacaacatccccaaagggaatatctcaagttcacctgcaccttctcctgaacaacctggagaaagcaatccttcgtttcctgttggatcagatgcaaataatgaagtcataacaccttttgattttaacaaagaggaaaacagtaaatatgagaaatcagttagaaataagatgtctaacaaagatataaatcgccgagcaagttctcatgctgcaaatgtggatgataatacaaatgaagtgcgaagctacttgatatccgtgctctcaaaaaatccaaaaggaatgggcctaaaggccttggagaaagctgttgcagatgcatttccaaatgcatcaaagaaaatacagagcatcatcaagaatattgcaaattaccaaggacctgagaggtatgttctgaaatcagggttggaggtagaaagctcaaaaagtcatgtatctgaaggagtaagatccatcagtaagaaaattgaggaatcggctccaagcctgacgattgatgatcctgatatatgtgagaggattgacattgtgggctccctagttgctccaactgatggaaaactcagtaatgacagtgaaggtaaggctggaacttccagtgacagtggaagcgatagcgatagtgacagcagtaacagtggaagtgatagtgggagccaaagcagaagtgctgcagaaactggtagtggaagcagcagcaatagtgacagtgatggctcatcaagcagcaaggaaggatctgatgcagctgttgatattacgagtgatgatgacaaagcaaatatagcacacacaaaagtagtggatgaccttaatttgtcttcatcgccaagagatttgaaaagactcgatgttgatgatgaacaaattgacattgaaacaaatcttgactacaggagtacatcacctcatattggtctgaataagtttaataccggtaatgatgatgcagcagcagagggctttagtgccggcaaccttagtaagccatctgaaatgtcaggaagcaagaacatgacgagcaccagaatggattctattggagttgataccaaatataatgaaatgtcttttctggacaacctttttgatgactccatgagaatagccagtgaaaactcacccaagggggaagctggtcaattgacagtgcagcatgtcaacaagagaaaatcaacatcaaaggatgaatcaaaatttggcccagtgagtattgctaaacctaaattaaaaaggtcttctggcagcgagaactctacagcaaagcctgagagtgctaaaaaggtcaaagctgacatagcatcgtcaataggttctttatcagagcacaaaagaagtttaccacctgaaaaatatagcaatgataggtttaacaaggggacatgggatgttagccgccatgcttcacaagatagcagtcctgccatgaaaggaagacctttggctcctggaaatttacagaggatagatcagagcccaaatttacctgtcccaacaatgcactctgagagaacaaaagaaaatactgtgaaatcaagtttgaagaaaaaatcagataagtcgcagaaaccatggcatggtatggatggtgactttgggccaggttattcacatggtgtagatcaccacgctaattttgatggctctgatgatttttccacaagaaaaaggagtagacatgggaatcttcttattgatgataaaatgtttaagcgttcgaaggacgctaatgccaatgtagattccatgaatttaaccaaaagttccagagaaactgttgtgcctgatgaaataactgcttttcctgaatctaatgaatgtaatggtgagcagtcaaattctcaaagagataatgttgagagatcaccttacggtaaaaaaaagctccagagggagttttctgatcttgagttggctgaacttcgcaagacttctttggaaaatgacgatggaaggataaggaagcaatttgagagtagttcctccaagtcgcttgatgctaaattaaatgtaattaactcctaccccagtatgaatgacagaaaggttcctgttaccgtctttaatgatactaagaggaaaccttcacctcaagaatatggaattggaggccatataaaccaggaagggtttcccaggaaggcagcagggtatgagtttgatgataataggcctcagcaaaatattccagacagtcagcatttgccaaggatttataatacagattttgagaatttaatatatccagatagttcaggaaaaacaagcaaaagggaaactaggatgacacatggtggaatgctagagtatgctgatatccagaagaagaaaacaacctcaaggcttccacagaatggtactaataatgtcagagtgtctcgaatgcagaaatcaatatccccatcagataatgatgaaagaagtaggaacgactctttgattgagacaaagacaggtaggaagagaaggggcagttcttcagatgatgataatttgtttttctccaagtatgataaagatgctccggagcttaaagatccaataaaagatttctcacaatacaaggattatgtgcaggagtacaatgagaagtatggggtttattcttatttgaatagtcagatagacaaaactatgtcagaatttttaaagattcaggatgatctcaatgttggaaaagaaagaggcaaggaacagtattataacaccttagaaagactcagagacatgtatcatgaatcaggaacaagacataaattgatgaagaaggtcttcgttttgcttcatgaggaactgcagattattaaggaaagaatcaacgattttacggacgcctattcaaatgagtag

SEQ ID NO: 431 - DNA, 294 bp, Zea mays
  Peptide Sequence Number=SeqID_42210
atggaggcaagaagagcttcaaggtatcgagtgctccgaagaaggtcatggaggacgaggaacccaataccaggggtgaagaagacttgcaaagccaaggttgatcgagttgaaaagagacatgggaacctctcaaaaagagttggagaagtttggccaaacttgggtcagtctgggcctcgtcagtttgtgtataggctcggttataaggctttagagagaggatctgagcagacggaggaaggagttgaaatagactccgtccaaggtgtggctaactccaacaaggactag

SEQ ID NO: 432 - DNA, 384 bp, Zea mays
  Peptide Sequence Number=SeqID_42211
atggggttcgtgtccttcgtcgggcgggtgctcttcgtcgccgctttcctcctctccgcctaccaggagtttaatgaatttggcgctgatggtgggccagcagctaaggcccttcagcccaagttcaatgtgtttgtaaaaaatatctctgcacatctgggagtagctgtgccgcacattgagctgctgtacctcgctctgatcactcctatcgttcacgacttctacaactacgacacggagaaggaagaattcgcgcggctgtttgcgaagttcacccaggacgtggcgctggttggagctctcctcgtcttcctgggcatgaagaactccatcccgaagcggcagggcaagaagaaggctcacaaggcgaagacgaactag

SEQ ID NO: 433 - DNA, 867 bp, Zea mays
  Peptide Sequence Number=SeqID_42212
atggagctggttgtccaccgggcagacacgcctggtttgtttaatcctttggccctaatcccccagccctgctgccgtctccttctcctccttataagcattgccgccccgcccccatcctccaccgcaccacagccgcagtcagcagggcaagaacacgaaatggagatgacggggttcgggtcaccgtgcggagcgtgcaagttcctgcggcgcaggtgcgcgcgcggctgcgtcttcgcgccctacttctgcgacgagcagggcgcggcgcacttcgccgccatccacaaggtgttcggcgccagcaacgcgtccaagctgctcgcgcacctgccgctcgccgaccgcccggaggccgccgccaccatctcctacgaggcgcaggcgaggctgcgcgaccccacctacggctgcgtcgcccacatcttcgcgctccagcagcaggtgatggccctgcagacgcagctggcgtcgctcacggtcacggcgcaggggcagcagcgcgtgcacgacgtcgacgacgccaagggctacgtgggcaccgccgccgcggggcagctagggtgcagcagcaatggaagcgtcgcgccggccacgtacggcaatgtcgggcacgagtccctgaccgcgctgctgaggtcggagtcggactacttgcagcagtcgccgtgccacgcgttcgagcacgccggcgcggacgacaaggacgacgacggccggcaggggaacaccttcgacttcgaggcagcggccgactcctcgtcgttcggggcggaggagagcgggtggaggtcgttgtcagggtaccgagactgcgaggacctgcagagcgtggcttatgcttacctgaaccatctctcttaa

SEQ ID NO: 434 - DNA, 363 bp, Zea mays
  Peptide Sequence Number=SeqID_42213
atggagcgcactacgctcttcctcgacgatgaggcgagcagtggcgtcgttagcgttgggagggatccttcgagtggagaggcccacacatttcgttgtcggatgaagacgatgaaccagtgttcatccctgacgacggggaagagcatgagatgtgggctgagttcagcgcatggctcggccccaaccaccaaaaatggtcgttggaagtgtgctgtcgcatggcgcaccggacagtccggtgcgccaccggacactgtccggtgcgccagccacgtcagcggaccgttggggttcgaccgttggagctctaacttgtggggcctctgggctgtccggtggtgcaccagacaggtcctatag

SEQ ID NO: 435 - DNA, 243 bp, Zea mays
  Peptide Sequence Number=SeqID_42214
atgcaggaatactggcggcaggggcagcgtgcagatggggtgtgttgcgtgcgggcagacaacagtgagggcggcacacgccctggcagggcacacagcaaagaccggcggctgggggcggaggacgcaggagatgggcgcacactgaagctggaaccgagagcagtcccaaacacccctatatcactagctttcaagacattttctcttgaaattgcatcaacacagaatcattggcattag

SEQ ID NO: 436 - DNA, 804 bp, Zea mays
  Peptide Sequence Number=SeqID_42215
atgggcattgattcacatttaagcacttgtgttgacactcaatcaccaaaatacttagaaatggcccaagggcacatttccctttcagaaatacactcgggggcttgcggtcaccacgcagcacctcgggccctcgtgggaaacaccttccgacagggtttctactggccaaccgcggtggtcaacgccactaaaattgtacgcacctgccaagggtgtcaattctacgcaaagcagacccgcctgcccgctcaggctctacaaacaatacccatcacctggttgtttgctgtgtggggtctggacctcgtcggtcccttgcagaaggcacccgggggcttcacgcacctgctggtcgccatcgacaaattctccaagtggatcgaggcggtggcattcttcaccaacatcatccatcgcttcggggtcccgaactccatcatcaccgacaacggcacccagttcactggcagaaagttcctggacttctgtgaggaccaccacatccgggtggactgggccgccgtagctcaccccatgacgaatgggcaggtagagcgtgccaacggcatgattctacaagggctcaagccgaggatctacaacgaccttaacaagttcggcaggcggtggacgaaggaactcccctcggtggtctggagtctgaggacgacaccaagccgagccacgggcttcacgccgttttttctagtctatggggctgaggctatcttgcccacagacttagaacacggctccccgaggacgagggcatacgacgcccgaagcaaccagacaaactga

SEQ ID NO: 437 - DNA, 576 bp, Zea mays
  Peptide Sequence Number=SeqID_42216
atggatcggtaccagcgggtggagaagccgccgcccgagcccgccgccatcggcgagaatgaggtccgcatcaccactcagggcctcgtccgcaactacgtcacctacgccacctccctcgtccagagttgcctactagttgctggcggcgtccttgtggtgcggtatgtctcagttctgcgatttgcttcaccttatgtgttgtatcgcatcagtttcttgcgagccttttcaaatcaggaaaaacaggtgaaggaaattgtgttgaaggctatgggacaggctataagcaaggcagtggctattgctgagatcataaagacttttgtgattcgtgcctctaccgaactgcagaagaggattcctggtatcaagctcctctacattcggatcttaagccacaaagatatcagcaacctcagcaatatcaacagtaccagccaagacaacatcaagttcaaacggattcatatggacgcggccgaggcagaagcaggggccgaggaaggggctggggtactaggggtgggtacggcggaggctatggtggatatgaatatgataacaaccaagtag

SEQ ID NO: 438 - DNA, 597 bp, Zea mays
  Peptide Sequence Number=SeqID_42217
atggcttcctcaagaaggagtctctggacgatggtaaaaccgaccctagggaaaccatgtccgccatgggccgtggggtcgtcgtgttgttttgcgttctttatagcggacgacgcgacagtatggggcctaagcaccatcattcgagctacgctgactcctagcctctgtagcctagggttcagcgcggtttgtcttgttattccgtgcaagcggtatgcgcactcggacctagtcccgataggtcatgagtgcgacgtcataagtgcgctgcagcccgaggggctcgtaggccgtgagtgggaggttggcctcggatcgttcagcggaagcgatgcatcctgcgccgcagcccgtagatgcgaatgcgatcgggttgttgccttgtcccactccgttcgtcgagttcgagaaaaacagaccgtacagtgcatgtgcatgcgtgggtcttccgccgtcgccgtcgatgcatggaaggtctggtctggtagacgagcgagaacccgagagcctgagaccaccgagagcagcgagagggccagtgttatagtggacctaccgggggagcaaatggagaagagaagcatcggacgatga

SEQ ID NO: 439 - DNA, 969 bp, Zea mays
  Peptide Sequence Number=SeqID_42218
atggtccaaactgccaaggagggcatgatgaataatgctaccagttccgaagtttatgtcaaaatgcaagatgttttcataaaaatggaccacggaggcgacactgtttctgctcacaaagaactgaaggacctgaaggatgcaattattccagaagggaatggatcaagaacagtgcctgaagtatttgatcctgaaaagcatgtagatgcttacttgcctgtccgggtgaatgagcagagagtaagcaatctgttgcagtccctgttgattactggttgtattggagttacaccgctcattcagaagataccaacatcagtcctctggggttacttcgcctatatgtccatcgacagccttcctggaaaccagttctgggagaggatacagcttcttttcatcacgcctcaaagacgctacaaggttcttgaaggagcacatgcatccttcatggagtcagtgcctttcaacacaatatgcaccttcacactcttccagctaatctatctgttgatcgtctttgggatgacatggataccagtagcaggaatcctcttcccactgctcttcttcttcctcattatcatcagccacctgagggaattagatgcagccgagtacgaagaactgaaaggttttacacctgatccatcagtgtgtgaggacgagtctgttcgcagcggagatgctcagcctggatatgcttccgaaatactcgaggaattcacgactcaccgtggagagctgaagcgcaggaactctaccttccatgatgggagactacttcagcttaactctgtcaagatgacgagagagctttctcgggttccttcttggcttacaagaatcctggaagaatacgcggtttctgaatccgagctccaattaagcatgggggtgcgaagtctcatagcctcattgcttacagagtattctctgaagcaagcaactcattttaggtactga

SEQ ID NO: 440 - DNA, 1383 bp, Zea mays
  Peptide Sequence Number=SeqID_42219
atgcagatgcaaggcatgcgtaaaggatcatgcagccatgcaggggagctccctgtagctgggctgggagactggggagggcatgatgagcctgcagtgctgctcccctctggcggccctccctccccagtccggcacactccggccgtgctgttcctgcatgctgtgggcggactgggctgcctgcactggacacactggacgctgaagcatgcacctctctcctcactcctctcatgcattcaggcgtgcacacggagcgttctgccatcacgttctgccatcgcgccccgccccgcaatccccgccgccgagcacagccgcccgcagtcctgcaattccgccgcccgcattcaccgcgccacattcaccgtgccatcgcgcccgcattcccctccctgcgcccgcagttcccgccccgccccgcagtccacgccgccgagcacagccgcccatcgcgcccgcagtcccctccccgcgcccgcagcccatcgcgccttcagtccgccctcccctcgccgcctccccagaccgcagtctctcctcaacctccctccccaaggagctggcggcagcgcggctgcgtcgggaggaggaggacgccgcgcgggggctgcggcaggagctcgactccgagcgggcctccccggagatggcagccagatccggccattgagccccctaaccgagcggatccaaggtactacacggtcttgccctcgcccttttgcttgctttgtcgtcctctcctcaccgtggggggacccggcgtacgagcaggaggtgttcctcgccacgcggcgcggcaggcgcatgctcgacctgtcccggttccgcgaccgcgaccgcgcgcggtgccacgactggtgcttcgccgcgttcgtgcacgcctacgccacgtacctcgacgaccggctcaaagaacggatgcaggcccgcagagcaggcggggccagcccgggcaaatggcacgtcgacggcgaccctgtcgggatggcgtgccaggtggccgaggcctgggagctcgtgccgcagggaaggtcggcgtcggcgacggagacgacggcggcagaggatgtcatcgggaaggcgcagcagctgaagcacctcctaggccggttcatccagtgccggccgacggggaaggcgatgacgaacccggtggtgacagcggcgctgtacagactggtgaaggagagcgcggcgatgtactgcgagctcacggaggtgatggtcgtgctcttggaccgcttcgccgacctgggcactcctgcctgcgtgcgcgtccactccatcttcaccagtactgcttggaatttgggtatgctgagttcacgcttcacagacagaactgcttggaatttgggtatgctgatattttag

SEQ ID NO: 441 - DNA, 648 bp, Zea mays
  Peptide Sequence Number=SeqID_42220
atggccgtcgcggtgccgatgaagctctggagggtggagacccgcggcaaggccgccgccgcggggcccgacgaccccctgcgcgtcctggtgacggtgaccgtcctcgggagcgccggcccgttgcgcttcatcgtcctcgagggcgacacggtcgccgcgctcatccgcggcgcgcttcgctgctacgcccgcgagggccgcatgccgctgctcggcaccgaccctgccggcttcgtcctctccaccgccaacggcggatccggcggtatggaacggcatctgttcgtcggaattgggatctgcctcttcatctcggcttacgcatctgtttactcatctgtttgccatgcccgtgcagcactcggagaagacgagaggatcagcttcaacgggtgccggaacttcctgctttggcagaaggctgcggctcagggtgccgccgccaaccacgccgggtccgatgctctgacggcaaccctgagccccggcaggaagggcagcggtggattcaaggctactgatccgagccctggcaggaaaggcggcggcggctggaaggctggactgaacaagttcctcctcagcttcagcatcaagacaggtgtcaaggctcgccataaactacttttagagctgatctggtaa

SEQ ID NO: 442 - DNA, 1011 bp, Zea mays
  Peptide Sequence Number=SeqID_42221
atggtgaggacgacggtggtcggcagggagaggagcggcggcgtgaggcagtacaacaggtccaaggtgcctcgcctcaggtggacgcccgatctgcaccactgcttcgtccacgccatccacaagctcggaggcccggacagggctacgccgaagcgagtgctgcagctgatgggggtgggaggactcaccatatctcatgtcaaaagccatctgcagatgtacaggaacatgagaaatgatcttggaatgcaagggacggaggatcaggagcacgtatacgtaggtggaggaggcatgcataccaatatacagcagcagcgggaccatgggtgtggcgatgccccctgctgcatctgctgccgccactcgccaaataagcctgcaaaggaggaggaggaggcgacgctgttccaacgccaactgaaaaggtcgaggacggagacgaggcgtgggcgtggccagcgggaggagatcgatgatgggagcgcgagccccaagaggcggctgctgctgctgcgaggagggcgaggccgcccaggaatatgtgagagcgacggctcaggctcacccagcagcggcacgctcgcaagtggctacgacaactacatgcgcatgatgcaagcggccatgggcgtggctgccgctgccggcgctgctgctgctgctgctcctcatcatcatcatcatcatcacgcggagacggtggagcccggtcgagggccgagaataaagcagcacttggcgcggcccggcgcagacggcggcgaacacgctcctcccagcagcaggcagctcttcacgttcttgggcttcgtggtggcgccggggccgccgcctcctccctgctgcagccgtgaccaccctttcgagctagcgagcggagctgaggatggatggatcggagtggtggaccggtcgctccgtctcctgctttctcctcgggagagcgagggcgtgtttgtgaccctgtccctggccagcttgacccgttcaactggtccaggctga

SEQ ID NO: 443 - DNA, 309 bp, Zea mays
  Peptide Sequence Number=SeqID_42222
atgggggcaattttcgaccaccacaagcagagggctaagcacgacaaagagactgatggaggcagtggcggacgacccgataagagaaagaagaagggcaggtggtgtcatgacgatatgctagttgtcgcagcgggtcagaaagggaggaagcctctgaccgaggaggccaccgaccatttcaaacagatgctcgaggccccatgtccaaaccatcgctaccctgtccggcacgcctacaaagaatgtaggctactcaagaagttcctatgcatggaggtgtcatccgagaagggccccaagccctag

SEQ ID NO: 444 - DNA, 2739 bp, Zea mays
  Peptide Sequence Number=SeqID_42223
atgacacgccgcccggcctcctccgcgccttcggcggcccggctcctcctcctcctcctgcttcttctgctgctgcactgccagtgccaccgcgccggcgcggcgacggacgcggagcggcgggcgctgctggacttcaaggcggcggtgacggcggacccggggggcgtgctggcgtcgtggacgcccacgggggacccctgcggcttcgtcggggtcacctgcgacgcgtccacgggcgccgtgaagcggctgcgcgtccacggcgccgggctggccggcgcgctctcgccctccctcgcgcgcctccccgcgctcgagtccgtctcgctcttcggcaacgccctcacgggcggcgtcccgccgagcctccgcttgctggcgcccacgctccgcaagctcaacctcagccggaacgcgctggccggcgagatcccgccgttcctcggcgccttcccgtggctccgcctgctcgacctctcccacaaccgcttcgccggcgggatccccgccgcgctcttcgacccctgcccccgcctccgctacgtctcgctcgcgcacaaccacctcaccggccccgtcccgcccgccatcgccaactgctcgcgcctcgccggcttcgacttctcctacaaccgcctctccggcgagttcccggaccgggcctgcgcgccgccggagatgagctacatctccgtccgcggcaacgcgctctccggggacatagccgccaagctcgcctcctgcggcagcattgacctcttcgacgtcgggagcaacagcttcaccggagctgcgccctttgcgctccttgcatcggtaaacatcacctacttcaatgtctcctccaacgcctttgacggtgaaatccccagcattgcgacttgcggcaccagattctcgtacctggacgcgtccggcaaccgcctcacggggccggtgccggagagcgtggtgaactgccgtggcctcagggttctggatttgggggcgaatgctcttgctggagctgtaccgcctgtgattgggacactgcggtcgctctccgttctccggctcgcgggcaaccctcgcatttccggttccattccggctgagcttggagggattgagatgctcgtcacgctcgacctcgcgggccttgctctcacaggagagattccagggtcactcagccagtgccagttcctgcttgaactgaatctgtccggcaacaagctgcaaggagtcatcccaggcacactcaacaacataacctacctcaagatgcttgatctccacgggaaccagctccaagggggcattcccgtcacgcttgggcagctcacaaaccttgttctcctagacctctcggagaaccagctgactgggccaatccctcaagagcttgggaacctctctaacctgacacacttcaacgtgtccttcaacaacctatctggcatgatcccttccgagccagcattgcagaaatttgatttcaccgcatacatggataacccgttactatgtggctctccactgcccaataactgtgggcctgggactgggatgaagcaccggaaacgattgcgtgtgcctgtcataatcgccattgttgctgcagccctgatacttgttggaatatgcattgtttgcgcgttaaacatcaaggcttacacacgtaagggcacagacggggacgggaaggaagaggaagaggttcttgtgtccgagagcacccctccagctgcctctccaggctcgaatgcaatcatcgggaaactggtgcttttcagcaagagcttgccttcaaggtatgaagactgggaaactgggaccaaggcgctacttgataaagactgtctcatcggtggtgggtcgattggtacggtgtacaaggccacttttgagaacggcctgtccattgctgtgaagaaactggagacagcagggagggtgagaggccaggatgagttcgagcatcagatgagccagcttggtaacctcagccaccccaacctggtcgcttttcagggctactactggtcatcctcgatgcagttgcttctgtcagaattcatggccaacgggagcttgtacgaccacctccacggctaccgtcctcctcctcgcgctctctctgagagcagcagcagcagcagaggtggtggaggtgaactgttctgggaacggaggttcaacattgcgctcggagcagcccgtgcactcgcttaccttcaccatgattgctggccacagatcctgcacctcaacatcaagtcctccaacatcatgttagatgggagatacgaagctagactgtctgactacgggttggggaagctgctgccgatactaggaagcattgagctgagcagaattcacaccgcgatcgggtacattgcgccggagctggcatctccgacactgagatatagcgacaagagtgacgtgtttagctttggggtggttttgcttgagatcgtgacggggaggaaacctgtagacagccctgggataggagctacagctgtggttctccgtgactacgtgagagggatattggaggacggaactgcgtcggactgcttcgatcgaagcctgagggggtttgtcgaagctgagctggttcaagtgctcaaactgggcctggggctcatgaaggagctcttcaccatcgcgtgttctttagctgcacggctccggcctccggggctgctgcacatggacgtgccaaacggtgcagaatgcacgtga

SEQ ID NO: 445 - DNA, 519 bp, Zea mays
  Peptide Sequence Number=SeqID_42224
atgtaccgtgtgccccccgcgtatggactgagcccaccaccaccaccactacgtagtggggctaatcaagcccggacgtttttccccgcgcgtcgtcgttcgggcgccgaaggcaccacagggcgcggcgccatgccaactgagacggtgacccccacggtcggtgtcaccatgaccagggcaggatccatggtcggcccacccgtctcggccgggacgttagagcgaactgctgcatcgccacgacacgacgggccacccaccaacgctatgactttcgcccctccgaaagcggtggaagatggtgtggaggacgcaccctctgagtcagaagaggaggcgattccctcgcccaactcgatagggtgcaaggctttcttgcctttcttctgcactcgaaggcgcctctggcgcccccaagaacatggaggcggagtgcggatgcgccgccatgcccaggaccagagctcgtcgctgccacaccgcaaggtcgtcgtcgcgtccgggaccaggaggtag

SEQ ID NO: 446 - DNA, 267 bp, Zea mays
  Peptide Sequence Number=SeqID_42225
atgacgacgggcacaggtgagaacggaggaggaggaggagggaggggaccggttcggcaggggtcgttcgcgctgtcgtcgccgctgtcccggaagacggtagaggaggtctcggccgagatcagccagggcccagtggacttccaggccagcgcggcgtcgcagcccgtgcgggatgcgaggcgagaaagagcacctaaggtcacagagatcacattgtcaagccagcaactcctaagattaatgctcagggtaaaaacaaattaa

SEQ ID NO: 447 - DNA, 459 bp, Zea mays
  Peptide Sequence Number=SeqID_42226
atggtggagtttagtacatcgaggatttactcgagccgcgtgcacgagatgcaacatttgtgttattttgggaatggagttgggtgggccctgggggctgaagatgtccttgagtcggaggattcatcagttgacgccgaatgctatggcggcgttggcgaatctaggggtctctctgcaagaaaccaggggctcagacgcaagaaaacaggacgacgggttgattccaaagaaaccgaggggctctttaacaaaataaccgagcgaagaggtatcgggcgttctcggtcatacgatctcagatcaacggctgagaacaaatcccgcgggcgagcacgcactaacaggcgggccaaggtaatcaacggcttgggggtgagggcggctgaccagtcggtcgcagtgctaggggcacgggcgaccgacgagtgggacccaggggcaggggcgcccacgtga

SEQ ID NO: 448 - DNA, 171 bp, Zea mays
  Peptide Sequence Number=SeqID_42227
atgggggcaaaccaaagggtgtcttcagttgctggcaaggaggcggagctcaccgaggcaacagacgcgataggagctcgacggagaacgcataacgaactcaaggtcacggtggacggtgatagtgctccatgggcgtgcgcgcagtgcgagagagagttatttgcataa

SEQ ID NO: 449 - DNA, 207 bp, Zea mays
  Peptide Sequence Number=SeqID_42228
atggcggcacccgctgcccctatggtccaccccacccctgctgctcccgtgtggacacctcccccttcacgcggttccggggatatatatatagggcagctccaaaaactccatagagtttacaactctggagttagggtgtttgacatgctctggccagctcctccttggagttttgctctggagccatgccaaacaggcccttaa

SEQ ID NO: 450 - DNA, 132 bp, Zea mays
  Peptide Sequence Number=SeqID_42229
atgatccctgtcagcgccgatatccctgtggagctgcgcttccttctcgaatgcgccaccggctccaacttcgactccattcggctcgagctctgccagccagttgtccgtgctttgctacggtttttatag

SEQ ID NO: 451 - DNA, 282 bp, Zea mays
  Peptide Sequence Number=SeqID_42230
atggcctcgggaggaacctccgcctcgcccgagcatggcctcggcctagataacatcgacgaaaggacgcctgacgccaccaactcctccgcagagacatctgacaacgggatgactacagaaactacagggttggtgacaaatacctggcagagctcgagccgaatggagtcgaagttggagccggtggcgcattcgagaaggaagcgcagctccacagggatatcggcgctgacagggatcatctcgccggcggcgagaggcggaggcggggagcgctag

SEQ ID NO: 452 - DNA, 2814 bp, Zea mays
  Peptide Sequence Number=SeqID_42231
atgcgcgggcgctgggcgtggggcccacagttagttgacagtggcttggatggatgcattttggtgctccgagtatgtctgaatcaaatgttgctaaatgctggggaggtcaagaacctccagttgcaacaaaagcttctatctgatgttttcagatattgtttacataagacctgcttcacaactagtttttgtgaggcgctggcaacgatagccttgacggatgattttcttgaaagcttgacaaatctgctggagctctcagttgctgagaaaattggtgttggacttgcgctgtcagattctgaggactcagagatgaagcaaaaaggtagtcatttctgtatggtcattgatatcgcctcttctgttccagggcaatggttttcaattgctcaaattgaaaagctgtgtacgagtcatatccaatctctatcaaatggtcaaattcatgaaattgtcatgtttctgcatcagtctgatggcctgtcaaagcatatggacacttttaataatattatatctctactaaaagtcacggagaggccattttttgtacctgttacgaatggagattttgatagccaagcaaatccttcaagacatttggagatgtactttggtagcacaaatgatgattttgagtcacttctgtctgaaattgggaaagagataagcatggctgacattgtagccgagttaggttacggatttactgttgacagcactcactgtaaggaaatactttccattgtggagcctcttgatgatatcgccatatctaagttgcttggggctgttgtcggcactcatattggtcttggagaggcccataacacatatgcaacatttgtatctgctattcgtaatagccacacgaatgactcacctcagccgactaaatggaacacagatgtccttgtggactcaatcaatgaacttgccccaagtacaaactgggtgcgtgtaattgaatatcttgatcatgagggtttcaatatacctgatgaagcgagcttttatctattgatgtctatatacgagtgtgcttgcaaggatccatttccacttcatgctgtttgtgggtcattgtgggaaaacacagaaggccagatatcgttcttaaagcatgcagtttgtgctccatctgataaatttacatttgcacattcttctagacacctggcatttcaggacttggcaggccctagtcaaggcaatcatgcttggttctgccttgaccttctagaagttttatgccaactagctgaagttgggtacactgcatctgtacgatcaatgcttgagtatccactgggacattgccctgagctcttacttgttggtgttagccatatcagtaccgtgtataatcttctccaaaatgaagtactgtcctgcgtatttcctgctttactgaaggatccaacaaagcgcaatgtagtgaattatctctggcatacaaactcatatctcacacttcaaggttttgttgatgctcataatgatccagattgtttgctaagaattgttgatgtttgtcatgacttgaagattctgtcgactgtccttgattctactccatttgcattttccattaaattggctgctgcttccttgaggaaagactatagtaatcttgagaaatggctgactgaaaagctatctctttatggaaaaggttttgttgaggaatgtgtgaattttctgaaagcaactatgagcaacacagattacgtcttagagggcacgacacaacctcaatctattgtcagaaacatatattgggagtcttcttatgccttcataaaggtctacatggttctccagtctcactcggggcagctcttgtcagatgcaatattggatgaaataaggaaactgtgtgtttcgtttgaatcgaggaatcctagctctgctgtaagagagcttgctaattcagacggagggtcagatgacattgaagtagaggctaatgcatattttcaacacatgttctctggacagataagtgttgattccatgatacaaatgcttgggcgcttcaaagaatctacagataagagggaggtatcaattttcaactgtatgatctcaaatctttttaaagaatatacattcttccccaagtatcctgataagcagcttaagatagcagctgttctgtttgcatgtggcggctcttcatttgaaggcacctcatcattaccactgtcattacaactggagagccgggcaacaactgaagggtcgtgcgaaactggagagatgtttatgtttggtacatcagcactggaacagtttatggaccgtgtcatagagtggccacgatactgtaattacatattgcagatctcacatcttcgtggaacacatttagaaatggtttctgttattgagagagccctagccaaaatctcctcaagtcaaaatgagccaaatgttggcaacctgctttctgcagagcagcatgtttctggttcatcatccatggaaggcatagaggcatctgaatcatcatggttgatgggtaccatcccaagtcaactaggaaggcctctttcttctcctttgcaacataggcagcagggtcttctctcggagaggtctgaggtttctatgaattcactgaataagagcaatttatccagtcagcctccccttgcttcatcgtctgctgatttgactattaattcaaagacaactgctccaccctctttactagcttcacctcatcagtctatcagtgtgtcaacgagtgtgcatgttggatttctgcgttctcgaagtaccccaggtggcttgctagcttaa

SEQ ID NO: 453 - DNA, 147 bp, Zea mays
  Peptide Sequence Number=SeqID_42232
atgcccattacactaggagtattcagggtggaatatggcaaccaaggagtcggtgtcgtgtctcagcaactatacaagtcacttacaagcctccagatgggcaatgtggaggactggatgggttggaccatgcaacttaatcagtag

SEQ ID NO: 454 - DNA, 469 bp, Zea mays
  misc_feature (460)..(460): n is a, c, g, or t
  Peptide Sequence Number=SeqID_42233
  unsure (1)..(469): unsure at all n locations
atgggtaccagtgttcaggatctctgcccaatagctgacaggaagagacgcctgaaaaaggagacaaccgatcatgttggtggtgaaaggagcgagaggcgtacttgtcgaacttgcggccgttatgacactggagtgcacgaactgagcgcggaactaggtggagactcaagcgaagaagtgggcaagggtggaaaaggtatcagacttgaggcgcaaaggaaaggtctaaagaaaaggagtcctgactacaagagatatcagagcgactggagagctggaacatcacgtcaggtccaggtgatcgagacgacgatgccaaatggtggaggtggtggtagtagcaagagcatggggggaggatacgttgatgggggaagtgggtggcaagtgaatagagtagaggggactagagctgtcacaacgagcgagcatgacacgagtggtaaggtcataaggntgtcatatg

SEQ ID NO: 455 - DNA, 389 bp, Zea mays
  Peptide Sequence Number=SeqID_42234
atgggatttgcgtggggaaggtttggagaggtgtggcgaggcctagcgaacacagtggtggtgctcgaccgcgtggaggtggctggaggagggccgaccatgaacgcaggagggtggaacgtcatcgacgtgacctggaggcatgtgtccatgggagcaagcaggggggctcacgagcgactagtgttaggcatttctggtgtggagcagagctctggcggcaacgacggacgatggcgtgctctctggtgtggagaaaagtcggtgaggtgcaagagcaagcaggcggtcgtggctgtcaacctcgccgacatcaagaagtccctctccaaggttgcctctaactctatccgtctaggctcatgctctgtcacaccaggttttggaag

SEQ ID NO: 456 - DNA, 446 bp, Zea mays
  Peptide Sequence Number=SeqID_42235
atggcctcgggaggaacctccgcctcgcccgagcatggcctcggcctagataacatcgacgaaaggacgcctgacgccaccaactcctccgcagagacatctgacaacgggatgactacagaaactacagggttggtgacaagatacaagctacacagactgagaaccgacgaatcaaagggagggggaacgcaacgatggcaggaagcggaaagggtcaagcagtacagatacctggcagagctcgagccgaatggagtcgaagttggagccggtggcgcattcgagaaggaagcgcagctccacagggatatcggcgctgacagggatcatctcgccggcggcgagaggcggaggcggggagcgctagggcaaggggggttcggtggtcgagcgagttcctttgacagcgtcgcaaagcagatcctgccgaatagattggaaag

SEQ ID NO: 457 - DNA, 2679 bp, Zea mays
  Peptide Sequence Number=SeqID_42236
atgcgcgggcgctgggcgtggggcccacagttagttgacagtggcttggatggatgcattttggtgctccgagtatgtctgaatcaaatgttgctaaatgctggggaggtcaagaacctccagttgcaacaaaagcttctatctgatgttttcagatattgtttacataagacctgcttcacaactagtttttgtgaggcgctggcaacgatagccttgacggatgattttcttgaaagcttgacaaatctgctggagctctcagttgctgagaaaattggtgttggacttgcgctgtcagattctgaggactcagagatgaagcaaaaaggtagtcatttctgtatggtcattgatatcgcctcttctgttccagggcaatggttttcaattgctcaaattgaaaagctgtgtacgagtcatatccaatctctatcaaatggtcaaattcatgaaattgtcatgtttctgcatcagtctgatggcctgtcaaagcatatggacacttttaataatattatatctctactaaaagtcacggagaggccattttttgtacctgttacgaatggagattttgatagccaagcaaatccttcaagacatttggagatgtactttggtagcacaaatgatgattttgagtcacttctgtctgaaattgggaaagagataagcatggctgacattgtagccgagttaggttacggatttactgttgacagcactcactgtaaggaaatactttccattgtggagcctcttgatgatatcgccatatctaagttgcttggggctgttgtcggcactcatattggtcttggagaggcccataacacatatgcaacatttgtatctgctattcgtaatagccacacgaatgactcacctcagccgactaaatggaacacagatgtccttgtggactcaatcaatgaacttgccccaagtacaaactgggatccatttccacttcatgctgtttgtgggtcattgtgggaaaacacagaaggccagatatcgttcttaaagcatgcagtttgtgctccatctgataaatttacatttgcacattcttctagacacctggacttggcaggccctagtcaaggcaatcatgcttggttctgccttgaccttctagaagttttatgccaactagctgaagttgggtacactgcatctgtacgatcaatgcttgagtatccactgggacattgccctgagctcttacttgttggtgttagccatatcagtaccgtgtataatcttctccaaaatgaagtactgtcctgcgtatttcctgctttactgaaggatccaacaaagcgcaatgtagtgaattatctctggcatacaaactcatatctcacacttcaaggttttgttgatgctcataatgatccagattgtttgctaagaattgttgatgtttgtcatgacttgaagattctgtcgactgtccttgattctactccatttgcattttccattaaattggctgctgcttccttgaggaaagactatagtaatcttgagaaatggctgactgaaaagctatctctttatggaaaaggttttgttgaggaatgtgtgaattttctgaaagcaactatgagcaacacagattacgtcttagagggcacgacacaacctcaatctattgtcagaaacatatattgggagtcttcttatgccttcataaaggtctacatggttctccagtctcactcggggcagctcttgtcagatgcaatattggatgaaataaggaaactgtgtgtttcgtttgaatcgaggaatcctagctctgctgtaagagagcttgctaattcagacggagggtcagatgacattgaagtagaggctaatgcatattttcaacacatgttctctggacagataagtgttgattccatgatacaaatgcttgggcgcttcaaagaatctacagataagagggaggtatcaattttcaactgtatgatctcaaatctttttaaagaatatacattcttccccaagtatcctgataagcagcttaagatagcagctgttctgtttgcatgtggcggctcttcatttgaaggcacctcatcattaccactgtcattacaactggagagccgggcaacaactgaagggtcgtgcgaaactggagagatgtttatgtttggtacatcagcactggaacagtttatggaccgtgtcatagagtggccacgatactgtaattacatattgcagatctcacatcttcgtggaacacatttagaaatggtttctgttattgagagagccctagccaaaatctcctcaagtcaaaatgagccaaatgttggcaacctgctttctgcagagcagcatgtttctggttcatcatccatggaaggcatagaggcatctgaatcatcatggttgatgggtaccatcccaagtcaactaggaaggcctctttcttctcctttgcaacataggcagcagggtcttctctcggagaggtctgaggtttctatgaattcactgaataagagcaatttatccagtcagcctccccttgcttcatcgtctgctgatttgactattaattcaaagttacactgttttattgaatacgcaggagacctgcgtattaatatattaaggacaaaaaggtccaatgtggaccaagtacaatag

SEQ ID NO: 458 - DNA, 639 bp, Zea mays
  Peptide Sequence Number=SeqID_42237
gaaaagagtgatggtaattccaggacggagaagacagtaacagattctgaaaatccaggcatctctgtagaaaggaaggtcgaacatcaattcaaaaatggactagcagagaacagaatggattctactgaggacaacaaaaactttgtcaaaagcaaaaaaagcacgctggagaaaggtagaaccagtgaaggtctatcttatgctcagaaccacgaaaccaaggtccatgattctgcacgttctcaagaaaaaaatcccaaggatgaaagtgatgggcacaaagatttggaccaacagaagaataatgccaccaagaaagacaaacctgctgctgagccgataattgttccaattgtactgaggatgtctgattttgatcacaaagcattgctagaggaatggatagccactagagctttcagagataattgcattcctcaggggagaattatggttataagagacccgactcttcatgggctcctcaacgaggatgtaggggacctaagtggtgtgatcgaacctcagaggaccatcagcatgatgcatgaccccaatgtgaagtacttgatttacaacgtgcccattctccagtgggtgtcctccaatccagaggaggatctgggaagggcgtga

SEQ ID NO: 459 - DNA, 630 bp, Zea mays
  misc_feature (428)..(428): n is a, c, g, or t
  misc_feature (432)..(432): n is a, c, g, or t
  Peptide Sequence Number=SeqID_42238
  unsure (1)..(630): unsure at all n locations
atgcagcaacagcaggacccagcacccgccgatcccgacccactgccgccccccgacctcggtgatgccgccgcctcgtccgcaacgcagacgatcccttcccgcaacgcctcctccaagtacgatttcgtcaaggtcaaggtctggctcggggagaacgccgaccactactacgtcctctccaggttcctcctcagcaggatgctcacagtcaccaagattcctaatcatgtcgccatcaagattgcccttgagctcaagaagctgcttgtcgacaacagcctgcttgatgtatcccagagtgatctagaggctaatctgttcaaggttaggtaccttcctgcttcccttccctgctgcatgctacttcctcagccgattacacaaacttataacttccctccttccacagcttatggaaaaacggnggantacggagaggagtatataaatcgctataaaatgatgacaaggttccatcatcaacgggttccactagtaattttggtgtgtggaactgcctgtactggaaaatcaacaatcgctacacaacttgctcagaggctcaatttgcctaatgttttgcagactgacatggtgtatgagctgctgcggacatcaacagagtaa

SEQ ID NO: 460 - DNA, 735 bp, Zea mays
  misc_feature (692)..(692): n is a, c, g, or t
  Peptide Sequence Number=SeqID_42239
  unsure (1)..(735): unsure at all n locations
tactcttcagtggagataacaccaaataaaggcagtatactttccaagattatttctgttactgtgaggaccattcagaaagatgctgaggaaaagaaagcttcatttaatccccgaccatacttccgattgtttataaattggctctatgaccttactactactgatggccatcatgatggttctaattttcaggttttgactgcatttgccaatgcattccacttgctacaacccttgagagttcctgcctggagtttctgtgatgtgattccttcaagttgcattcaaatgcgcaatgtcattcttagtgcttttccacgtaacatgagactgccagacccttctactcctaatctaaagattgatttgttggctgaaatttcaatagcaccacgaatcatgtcagatgttgatggtaccctcaaatcaaagcagttgaagactgagtttgatgaatatctcaagaggccggaaggctcttcctttctaagtgtcctgaagcaaaatttgctgctgcctcagaatgaagcagctgttgctgggacacgctacaatgtgcctctgatcaattcacttgttctttatgttggcatccaagctgtgcaacaactgcaacagaacaaggctaatgcatctgcatcagtgcagcagattaaacatacgcctacgatggacagtttccagattgnaaacagctaccgagatgttcacaaatctcataacaagttttga

SEQ ID NO: 461 - DNA, 705 bp, Zea mays
  misc_feature (12)..(12): n is a, c, g, or t
  misc_feature (503)..(503): n is a, c, g, or t
  Peptide Sequence Number=SeqID_42240
  unsure (1)..(705): unsure at all n locations
atggtaattccnaggacggagaagacagtaacagattctgaaaatccaggcatctctgtagaaaggaaggtcgaacatcaattcaaaaatggactagcagagaacagaatggattctactgaggacaacaaaaactttgtcaaaagcaaaaaaagcacgctggagaaaggtagaaccagtgaaggtctatcttatgctcagaaccacgaaaccaaggtccatgattctgcacgttctcaagaaaaaaatcccaaggatgaaagtgatgggcacaaagatttggaccaacagaagaataatgccaccaagaaagacaaacctgctgctgagccgataattgttccaattgtactgaggatgtctgattttgatcacaaagcattgctagaggaatggatagccactagagctttcagagataattgcattcctcaggatcatcggaaacttataaacaaccttaagcttattcaggactacctttgttcttttgagtcacaggncaagttttccttgattgacaggctgggattgaccattgttgatatctcagcaaattcgtttcctcaaacattagattggcttcacagctatcttcttcagaaagctgcaatcaaggtcaatgacactcttggatgtaacctgtccaaccacacctcagtgggcattatatgctggcaatggacactaagaatatcattgtaa

SEQ ID NO: 462 - DNA, 246 bp, Zea mays
  misc_feature (148)..(148): n is a, c, g, or t
  Peptide Sequence Number=SeqID_42241
  unsure (1)..(246): unsure at all n locations
atgcagcaacagcaggacccagcacccgccgatcccgacccactgccgccccccgacctcggtgatgccgccgcctcgtccgcaacgcagacgatcccttcccgcaacgcctcctccaagtacgatttcgtcaaggtcaaggtctggnctcggggagaacgccgaccactactacgtcctctccaggttcctcctcagcaggatgctcacagtcaccaaggttccatcatcaacgggttccactag

SEQ ID NO: 463 - DNA, 1461 bp, Zea mays
  misc_feature (262)..(262): n is a, c, g, or t
  misc_feature (396)..(396): n is a, c, g, or t
  misc_feature (1457)..(1457): n is a, c, g, or t
  Peptide Sequence Number=SeqID_42242
  unsure (1)..(1461): unsure at all n locations
atgctgacaccgtggcggtcgatagcgacacatggtcagcgagcggtatcgccccgtgctggccctggccttagctacagcttgctgaaccaattggacatttggaggaactccttcaagcacacaagcatcgtgatgtttacatatttcccaagccaccaagaggtttgttcttttggccatgttctcattgtagaacatgcattactgacctatcaaccaattggtaactgccttctacggaaatcatttttggtctgtnacacagggccggccctgagggtgtgcagggtacttagcgcagatgataatgctaatatgattgagctccactcgcacttgatgaaacctgactattgcagctctggacagggaaaatgtagtggcagagtttcnagtgattcagcaggactttcttgcttgaacatgaaatgttcaaattctggcaaggatacctttctttatggtgataaatttgtgaaaccaaaagctggtacaggtgacagtgagtgcctgccaccgtttttcaagcgtcgcacgaagttgcctgatccagttgagaaggaaaaaagtgttagtctttggtcaatgatcaaggataatgtcggaagagatcttacacaagtatgtcttccagtttactttaacgaaccattatcatctcttcaaaaatgctttgaggacttggagtattcttatttgttggatcgtgcatatgaatgtggcctaaagggggacaatttgatgagaattcttaatgttgctgcatttgcggtttctgggtatgcttcctcggttgggcgcccctgcaaacctttcaatccattgttaggggaaacctatgaagctgattaccctgaaaatggaatccgtttcttttctgaaaaggttagtcatcatccaatggtcatggcttgtcattgtgaaggaaaagggtggaaattttggggagacagcaatgtaaagagcaagttctgggggcaaacaatccagctggatcctgttggtgtgttatctgtagaatttgatgatggagaaattttccaatggagtaaggttacaacaacaattaataacgttatcattggtcaaatttattgtaatcactatggaacgatgagtataactgggaacaggggatattcatgcaagctgattttcaaacggcaatctttcgttgagcgcaaccctcggcaggttgaaggattggttaaggacggtgatggttcgacggtggcaagcctaatgggaaagtgggatgagaggatgtactgcagcgcatcagggcagaatgagagccttccaccaacggattcaagactcagaccagatcagcgacatgtagagaacggggagtatagtaaggccaatgctgagaagctgcgactggagaggaggcaacggatgtcacggaagatgcaggacaatggttggaaaccaagatggttccgaagggnatga

SEQ ID NO: 464 - DNA, 489 bp, Zea mays
  misc_feature (3)..(3): n is a, c, g, or t
  Peptide Sequence Number=SeqID_42243
  unsure (1)..(489): unsure at all n locations
atnttgcacccgctgtgctgcctccccgccgccgacggaaggaccccctccgcctccccttgctcatgcaccgccggccgtggctgggctgctctacaagtggaccaacatcggcaagggctggcgcccgcgctgatctcctcgttccgtgaaagcaagtcagatgacaggcggttctacctaattactccagccaagacgctgcagctgagaacagactctgctaatgaacgagcggcttggattgaagcccttgtttctgctcgagctgaatcttctcctgatgggggtttattgactaaccagaatgatgcatcattttctacggagaggcttagaaatcgcatgcacgaggaaggccttggtgaggaaataattaaagactgtgaacagattgtccattcagaattctcacagtatcacacacagatgaaacaacgctgtgaaagaatatgtaagctttctcagcaggcttccacagcagtttga

SEQ ID NO: 465 - DNA, 771 bp, Zea mays
  Peptide Sequence Number=SeqID_42244
atggatggcggccgcatcctcgacccgctgctctcgggcgccatggattccgcctccctcctgcgttctcatcccgctcggccccctcctcgcacagccagccgcatgccgagcatggcggacccgcctccccatccgcaccctaaccacttgctcctcgtggcctccaccatcccattcgtgggagccgcatccacggccgggccagcctccctcatcatcggcccctacttagtaccgttcctcctccccacttccgcctccgcctcgccggccacgctcgcggatctcagccgcgctcgcggatctcagccacgcctaccaatcttgcccagccccgtcgtgcccccgctcgcgattgtcgttcgacattctcgcccgcgagatgcgttcgcggtggctaccggggcggaggtagcggtcgtggaggaaacgacagtgggggcaccgactgatgtggcgtactcgcgcaagcgctacttcgtgctcgaggacgccgtgctccgtttcttcaagtccatgtcgtcctccaaacgcgaggatcctggggactgcttctatgtgtccacaaagtcggttattgtgattacattttcctgcactgttattggggggctcttcatcattgctgacctttacctggtcacttgggctcgctacaatgaggctcaaagcactctggtgggcagttacccgcgacttcttctcatggagggtggtctgccaacagccaccaagacagaaggaaggtccttcaaggggctccattga

SEQ ID NO: 466 - DNA, 120 bp, Zea mays
  Peptide Sequence Number=SeqID_42245
atggcgacgggctacaaacacgagaaacctgtcgacaactgctacgacattggtggtggcacgagcagagggcagagaggcagcctagcggtcgaggtagttaaggggtatttggtttga

SEQ ID NO: 467 - DNA, 504 bp, Zea mays
  misc_feature (463)..(463): n is a, c, g, or t
  Peptide Sequence Number=SeqID_42246
  unsure (1)..(504): unsure at all n locations
atggccaaggcttgggctacaatcctgaggtaccctaagacatatttgatatcctcgagagcaattcgtgacggggctgcctttgcacctaggccacgaccaggtgaaaacacaaaggacgaagtcaacgacatctacaaagggaaatatcaagacctcgaaggagtcaaccactccttcgaggcctcgggggctacacccgacggggactactatcggaccccacttcacccgaggcccctctcgggggtcaccatagcttcgcttcgctcgaagccagccctcgaacaaggtatgattcttaggagaattctcgtcctggccgaggggacaggagcattcaatgtgcatacctacccccataaagagttgcaggtgaataggagcaacaagacagtggtcctatcaaggttcaccaactatgatgatgcatgtggccactgttcccacacaccatctgctnaactcccgatggaacgcacatacgacaaaggcgcgagctag

SEQ ID NO: 468 - DNA, 384 bp, Zea mays
  Peptide Sequence Number=SeqID_42247
atggagctctttggaccaagacagcttgcgcttgatgaggccgcaagggcagacgacgaaggcaagctggtgctcagtttaccaatggcgaggacgatagacgaaagcagctgtcggcgtttcgagaccggggggtccctaagccgacgacccgagtcggctcggggtagggtgatgattgcgcttcctgtcgacgtggctggcctgtgccctaggttgggcgacgtggaggctcctccgaagccggggtcgagtctgtcttccatggccgaggtcgagtccgagcccctgggtcgggcgaggcggaagtcgtcggcagaggccagggcggtgtccgagccctgggtcgggcgaagcggagttcgtcgtcttccggggccttag

SEQ ID NO: 469 - DNA, 366 bp, Zea mays
  Peptide Sequence Number=SeqID_42248
atggtggacaaagtgcaaatcaatacaaagggcgagaggctccaagttgtggagattcctcgcaaacgggaaaaagtatgcacattgaatgctcctgtcccctgcggacttcagttgagtcctgcctcagggttgtcttccttacccgagacgggctcaggcgaggcaaagacatcgattttggggagaggggacctcggccaggacgagaattctcctaagaatcataccttgttcgagggctggcttcgagcgaagcgaagctatggtgacccccgagaggggcctcgggtgaagtggggtctgcactcccttgtcttcggggaacgtgtcttgatggtggtcttggggttaatcgtgtcttag

SEQ ID NO: 470 - DNA, 1677 bp, Zea mays
  Peptide Sequence Number=SeqID_42249
atggatctgacacattttgacggatttgaccttttttatcctactgacggacggggtgaggagctgggggagggggagaaggatgccgcgaaagcgacggggaaaggggacgctgcgtcggatggtgggcccgcggggactcccctcccagacaaaaagttgctactcttcatcctcgataggctccagaagaaggatacttatggagttttctcggagcctgtcgacgcagaggagcttccagattactttgacattattgatcatccgatggacttctcaacgatccgtgagaagctgttgaatgactcgtattctaagttggaacagtttgaggatgatgtatttctactcacatcaaatgccatgtcttacaattcagcagacacaatctacttccggcaggcacggtctattgaagctcttgccaaaaaggattttgagaacttgaggcaacccagcgatgaagaagaacccaagccaccagctcgaagaggtaggccaccaaagaatccgaagatggagggtgatgcgtcaccagacctatccaatatgaaaacaagcaaacctgaagacagtatcgatacattcaggaaaaaatcaactggagatataactcgaaatacaaatactacgatgaaagagccatccagttttcacagtatgcttggttcttttagtgcaaaaagagcagataaaatcggtgattattcaggttcatccaagtggggaaagaaacctgttggtgtagatgatgaccgcagaagtacatatgatcagcactattcatgtaatagctctctgtttgctgccctggacgacgggaggaaactactagtgccagtaggggttcagcagcaacatgcatatgctaggagcttggcacgatttgcatcaaaattgggcccagttggctgggatgtgacagcaaatcgtatcagaagggcactaccccctgggacaagttttggcccagggtgggttgtagatggtgaaccacctcaaaactctcagcggggtcctgtcgcatcaaccgacccctcctctgaatccactgatccacccaatatgccatccaagaatgatgtactccaccagaagtgtgggctgtcttcaaatgggtacgttactggtgaggagcatttaactagaactcaaacagtggcttctacatcagcgagctctgaaatttccagcaaagtaaacaagcttgagaatggggttaccaaatcatgtggtggtatgggcaatacgggatcagcagggcctccaatgcagcagctctgcctacgcggtccagaaatccgttctaacatcaatggctttcctgctatgtcaaacgccacgagtcagtatgccgggcaaggtttgtttggatcaggcatccctatgacacacgcccaagtgctggggatgttttctggaatgaacggcaaagccaatggctatgtccataggcacccagtggctgctgatagtcttaaaacagcagcgcagaacggagatgtcggaaaggcagctgtcaaccctgtgcaaggtgcaggtcatgatccaaagattgccaacggtaatagttctgctcacccaggcttaaattccggtgtccagtcgtcaggttccccacctaggcgaacgctggcaaacccaaagcaccctgatctggccttgcagctatga

SEQ ID NO: 471 - DNA, 267 bp, Zea mays
  Peptide Sequence Number=SeqID_42250
atggaaactcatgtctatgcaaacacatctacacccatgggtatcaatcattttgactcgcaatacaaaataaactcactcaacccaacccgttcacaattaaaactcatcacaacccgacaaaacaaatctgttgggtctacgcttcgtcgccgaaggtcttcaagggagaagctcaaaagatacaaagatgcttcgtctttcattaatgtatactgtgatgatgaaggacctggattcctaaaccaagaagttgaccttcactag

SEQ ID NO: 472 - DNA, 885 bp, Zea mays
  Peptide Sequence Number=SeqID_42251
atggccgtccctgttggtcgcctcgccgcctccacgctcctccagctcctcgtctggctcccgctccccgcgtccgcctgcgaccgctgcgtgcgccactccaaggccgcatactactacacctcctcgctcaccctcgccggcggctcctgcgggtacggcaccgaggccgcctccttcagcgccgggctcctcgccgccgccggccccgcgctgtaccgcggcggcgccggctgcggcgcctgcttccaggtgcggtgcaaggacaggaagctgtgcggcgcggcgggcgccagggtggtggtcacggaccgcgccaggaccaacggcaccgacctcgtgctcagcagcaccgcgttcgcggccatggcgcgccccggcatggcccggcgcctcgccggcctccgcgccgtcgacatcgagtacaagagggtgccgtgcgagtacaagcacaggaacctgtcggtgagggtgcaggagaagaggcgctccccggggggccctggcgacctcgccatcaggtttctctaccagggcggccagaccgacatcgtcgccgtcgacgtcgcgcaggtcgggagtcgggttattgctgaaacaacggagctttctgaagaagaagaaaaaaaggaggtgggctcgtccaactggaagtccatgacgcgccacagcggcgggccggcgtggagcacgaggcaggcgccggcggggccgctccagctcagggtggtggtgacgggcggctacgacggcaagtgggtgtgggcggagcgcgaggtgctgccgcggcggcggcgcgccggcgaggtctacgacacgggcgtccagatcaccgacgtcgccctggagggatgcttcccctgcgacacgcgcgagtgggagtga

SEQ ID NO: 473 - DNA, 255 bp, Zea mays
  Peptide Sequence Number=SeqID_42252
atgaggaggacgggcgcgcagccaccggggacgcaggcacgacagctcatcgaaaggaggagaagagcacgcgcgtctgctgccggctggacggacgaccgcgcgaccaccgacgaggaggacggccgcgcagccaccagggacgatgcggctcgaacgacgacgactaggtggacctcacggtgctcggcgacggtggcaggtgttgattatgctgttaatcggagtactttttttgccatattgtcgaaatag

SEQ ID NO: 474 - DNA, 1722 bp, Zea mays
  Peptide Sequence Number=SeqID_42253
atggcggggacggaggccttcgaggcctacttccgccgcgcggatttggaccaggacggccgcatcagcggccaggaggccgttgctttcttccagggcgccaacctgccgcagcaagtcctcgcccaggtatggatgcacgccgatcggaacaagactggcttcctcggccgcccggaattcttcaacgcgctgcgcctggtcaccgtggcgcagagcgggcgtcagctcacgcccgacatagttcagtcggcgctgtatggtcccgccgctgctcgaattccagctcccaagatagccgcaggggcggttcctccacaaatgggtgctgcgggggcgcctaggcctcaggggagtgctgcgatgacgcccacaccagggcaggttggggcggctcagatgaatccggctgccacaccaaggccccagggaagcggtatggtgccgacatctacccaagtaagcgtgccgcaggtgaaccctggtgctgctccaaggccccaagggatcaattctacgatgccagctgcgagtcagggtggtgctctacaagcaactcagtttgctggaccaagggttatgcagccacagccttctaacttgggaattacgcaacagcagccttctagtaccggtttcatgcatccgccacaggttggagctccagcagcttcattacaagctcaagcacctggaatcaatcaaggtttggtcagtggaggcagcatgggaggatctgtcggttggcaaggttggcaaggcggtaatgctgcctcagtgggaggcattccacaagctataccaggagctgctccttcacaggcagcacaaggtggatttggcccaggtttacctagaacaataggtgtggcgctggtacaacaggtacaagcaatgtctccatcgccattgcctccgcagagcaacagtgccggtttgcctcaggattcaaaagctttggtaatgtctggaaatggccctgccatcagttctggatcaagcacagacatcttctctgcacttacacagcagaagccaagcatatctgcacctgcacctcagacaagctcgattccgagctcatccagttttatgcccacgccaactggctcccagaacctgactaatctcacacagtttggttctttgcaaggtagcagccaacgtcaacagactcagcctgttgtaaagcccagtcctgctccagctgcacctgttgtctctgctgggatttctaatccatctccccaatggccaaaaattactcagtctgacatccagaagtacatgaaagtctttggcgatgttgacagggatagagatggcaaaataactggcgcagaagctcgcactctgttcctcagttggaggcttccaagagaggtcctgaagcaagtatgggatttgtctgaccaagacaatgatggcatgctttctttgagagagttttgcgttgctctttatttaatggagaggcaccgagctggaactcctctgcccccagcacttcctgactctcttaggcatgatgagacactgttacgagctacaggcttgccttcaacagcatacaatgggccatcatggcaacagaatcaagttcaaggaaacaaagatgacaaaagtggagtgaaccagtctgtgcaggaggtggcggatcctaagaaggttggctctgtggtggtcaaaaactcaaaatgcacccagtttatgcacctttaa

SEQ ID NO: 475 - DNA, 219 bp, Zea mays
  Peptide Sequence Number=SeqID_42254
atgtcgagcacaattgagcgtctgagccgccaggtccataccaccttgaagcgtgatgacgggattgagggttatttgcctggctcctgcagtcctaggctggcggtcgtggagcacgagaaggatgcaagcagcaagctgcaagcagcaagcccgcgtggccgacctggcatgagaaggctgcgagcagcccatggacgggatgaaggtgctaggtga

SEQ ID NO: 476 - DNA, 873 bp, Zea mays
  Peptide Sequence Number=SeqID_42255
atggacgcgcttctccgactcctgacacgccagcctggaacccaggcccacgcgtcggtcaaagcaaccgaaaggaccgggaaagggggataccccgaaagggatccttctccgcgaaggaaccgggctccgagccccccattactgatcaggggttcgaaggctggccccccgagggttcaacagtcgcctcagatcgcgtgggcccgacacccactactggtcaggggttcgaaggccagccccccgaagggctccatggccgcctcaggctactcgggctccgcgcccattactgatcaggggttcgaaggctggcccccgaaggaaggacagcgccgcctgcgccactccgactgtagtgccactcgacagagtgagtctgacagacaatcaggccttgccaaaggcgccacggcgaactccgctccgcccgaccccagggctcggactcgggctaagacccggaagacggcgaactccgctccgcccgaccccagggctcggactcgggctaagacccggaagacggcgaactccgctccgcccgaccccagggctcggactcgggctaagacccggaagacggcgaattccgctccgcccgaccccagggctcggactcgggctaagacccggaagacggcgaactccgctccgcccgaccccagggctcggactcgggctaagacccggaagacggcgaactccgctccgcccgaccccagggctcggactcgggccaagacccggaagacgacgaaactccgcctcgcccgaccccagggctcgaactccgcctcgcccgaccccagggctcgaactccgcctcgcccgaccccagggctcggactccgccctggcctcggctga

SEQ ID NO: 477 - DNA, 659 bp, Zea mays
  Peptide Sequence Number=SeqID_42256
cgtactgcgttgttgctaccgagtcagctggtcgccagcttccagttggatttattgagagagtcaaagaagatttttccaagaaatatagcggaggtaaagccaaaaatgctagtgccaatggcctcaagcgagaatacgggcctaaactcaaggagcacatgaggtattgtgaccagcaccctgaggagatcgacaaacttgcaaaagtgaaggctcaagtcacagaggtcaaaggagtgatgatgcaaaacatcgagaaggtattagatcgtggcgaaaaaatcgagctccttgtggataaaacggaggatctccgatcacaggttcctcatatatatgatctcatgcatgtgcaatccattggttccatcgatctgactatcaccaagctcaccgctttagtttcccccgtaggcacaagatttcaggcaacagggaacaaagatacgacggaagatgtggtgggaaaacatgaagatgaagctcatcgttttcggcatcgtggttgcgctgatcctcctcattgtcttgacagtttgcaaggacttgaattgctggtgatgtggaattatagagccgaaatctcacatgttacgactgatgtattgtacctatgcttttccttcagtttgatgttgttttgttcatgcagataa

SEQ ID NO: 478 - DNA, 697 bp, Zea mays
  Peptide Sequence Number=SeqID_42257
atgccaagacaagtgaacctgcgccagagaccggaagcgaagaagagggaagctaacagtggtatcaaagaccatcgttcctcggatctggattctatccactacacccgccgcgccaaaaccctaggcgctatggatccccaactcaaactcgccttggaagcacagactcgctccttcatctccgaactcgacaaaaaattcgccgaccacgacgccaaatgggagtctcgcgttggtgaactggagaaggcggcggtgtctgctgccgaccagttctacgacctcaaggcggacatccataccgatgtcacggcgcagttggagttcttcgtctcttctgcgaccgaacaagcaaatcgggtcgccgcggccacgacgtcgcgcgtctcagcgctggaatccgccacagcggccttcgaggcgtggcgccccgccatggaatcgtcggtcgccgaggtcaaacgcggcgtcgccgctgtccaagccgccgtcgccaacatacctcaaccaggggaacgtcgtccgttggagccgccgcacctacaacccggcatcctcggcgaattcggatcgggccctgcgcgtccatctaccggtctgcggatcgacggccccgacgggcattgctccgaccatcatcgtcgggaggctggttttggacgcgtgtacgcgtccacccacctcccgcccaatg

SEQ ID NO: 479 - DNA, 1278 bp, Zea mays
  Peptide Sequence Number=SeqID_42258
atgtcgggagatcacgccaagaaggagatggaaaccggcgacaagcccactacaagccaagggagcacttcatcggaagagtcccgcaccaagaggaaggaaaagaagaaggacttctccaaacggaaggagaaaagatcttcttcctcacaccacaaagagaagaaggaaaaatcttcttcccacaagtcgcatcggaaaggtgacaagcacaagaggatgaggaaggtggtctactacgagaccgacacttcatcaacatcgacctccgactccgatgcgccctccgtaacttctaaacgccaagagcgggatgaggattatgatgaggacgaggtggtccaaatcgagcacttcaactctcaagctacaaccatactccttgcctctctaagcaaggaggagtacaataaggtgcaagggttgaagaatgcaaaggagatttgggacctactcaagaccgcgcacgaaggtgatgaactcaccaagattaccaagcgggaaacggtcgagggggagctcggtcgcttccgtcttcgccaaggggaggagccacaagacatgtacaaccggctcaagactttggtgaaccaagtgcgcaacctcgggagcaagaagtgggatgaccacgaggtggttaaggttattcttagatcactcatttttcttaaccccactcaagttcaattaattcgtggtaatcctagatatactcaaatgacccccgaggaagttatcgggaattttgtgagctttgaatgcatgatcaaaggctccaagaagatcaacgagcttgatgaaccctccacgtccgaggcacaaccggtggcatttaaggcgacggaggagaagaaggaggagtctacaccgagtagacaaccaattgacgcctccaagctcgacaatgaggagatggctttaatcatcaaaagctttcgccaaatcctcaagcaacggaaggggaaggattacaaatcccgttccaagaaggtttgctacaagtgtggtaagcccggtcattttatagctaaatgtccattatcaagtgatagtgataggggcgacgacaagaaggggagaagaaaggagaagaagaggtactacaagaagaagggcggcgatgcccatgtttgtcgggagtgggactccgacgaaagctctagcgactcctcctccgacgaggacgccgccaacatcgccgtcaccaagggactcctcttccccaatgtcggccacaagtgcctcatggcaaaggacggcaaaaggaagaagatgtag

SEQ ID NO: 480 - DNA, 2097 bp, Zea mays
  Peptide Sequence Number=SeqID_42259
atgagtagaaaaatatatggtgaaaatgactctgagagaattgctagtgatgggacagctgcccgcacaagacctctgagcattaaggacattatgctgcggcgtgaaaagaaggctgcatcagaatctaagaaagccaaggaagggctagaaaatggtaaggacaaatctactcacttggaacgaggaagagaccacaaaagcagaaaggatcccagagatatgcctgtggagggttcaagaaaggagaagaatagagatgcaacaagggagggcgccaagaaagaaaaaccaagacatataccaagggaatattccagaaaggaggacatgagatatgcaccaaaggaggtacccaaggacaactctagagataggtcaaacactgatgcaaagatggatgacctaaaagatgcaccaaatgtcccggagaaggaaagcctgagagatgcaccaaggaaggcctccaagaaacggaggccctcaggagacgataatcattcaggtagcaaagacaaaggcattcatcattctcagaaacttagcacaagcatgagtggccgggctgatgaaagcaaaactagaactcttagtgagatcagagaaagaaagggtgatgtaatgagatctgagtatcaaaaggaacctggaaaaagatggaatgatgaaatcaatgatgatgataaattaaagtttaagagtgagaagcttcgaaatgagacaaagagaaaagaccgtagctttgataatgagaggagtttagaggtaggaccagtgttgaagagacatgattctgcacggttccaagattccaaacattcagatagaaatgctggaaggaatgagtatgcaacaccataccatggagaatcagagttgaaaaggagaaggtccagaagcagggatcatgatcgagaaagatacagtaggtctatctcaccgccactaagggaacaaaggtataattaccgtggacgtgattttggcaatcctccttactactctatggagaaatcaagggggaagtatgctgaagttgataaacaaagatcgtcggggagtggtggatacattggtgggttgcaccagagatatgaaagccggcttggtggatactcaccaaggaaaaagaaaacatcactgcaagctgagcaggcaactaccaagactccttccaaggtcattcagtccccagaaaaaaaatcagccacatgggatcagcctcctgttaaagcaaaccaatctaactttcctaccactttcctgccaactgttggccagatggctcctactccattcagtttcagcgtgataaaggacccttcaactacagctgtgacaatgttggcaggtaatagtttgactgcagattctgtccagcttacacaagcaacgcgcccactcaggaggttgcacattgaaaatttgcctgattcagctacagaggataagttgattgactgcttgaatgacttcttattgtctactggcagtaaactccagcggtctaaaccatgcctcagttgtacgataaacagagaaaaacgtcaggcttttgtggaatttcttacaccagaggatgctacagcagctatttcttttgatggaaggtctctaaatggatctgtgttgagaattcgacgccccaaagaatatgttgaaacggtgaatgttacccctaagaaggcagaagagactgctttgatatctgatgttgttgcagattcaccatacaagattttcatagcgggcattgctggagtgatctcatctaagatgctaatggagattgttagtgcatttggcccattggctgcataccgctttctttttaacaatgagctcggtggaccctgtgcatttcttgagtacgccgaccgctccgttacttctaaggcatgtgctggcctcaatgggatgatgcttggtggacgtgtactgactgctgtgcatgtgtttcctaatcctcatgtggaggctgctaatgaggcttccccattttatggtattcctgacaatgctaaattgcttctgaaagaaccaacaaaggtcctgcagctaaaaaatgtggtctcacgagttcaaattgatagataa

SEQ ID NO: 481 - DNA, 378 bp, Zea mays
  Peptide Sequence Number=SeqID_42260
atggtgaaaagaaaaccagagaaatggaaagaggaggaaccttttccgccgcagatttggccccactcaagtctcaactcaaaaacaacaacaaaaaaagaccccgccaaatcccaagccctcccgccaaaactgggcgccaaagcgcgccgccgccagccgggcgggcacgggcaccgcacgtgcggcgccggaagcgctggccgagtccgcgcggtgggcgggacgggatggggaggactggaggaaggctccggcccccccgcgctcccgaggtgctactgctacagcctgcagactgcgatctccccttttgagttccaggtgctggagctcgagctgtacgcttgtcatttcgttccggcctatctgatctga

SEQ ID NO: 482 - DNA, 1527 bp, Zea mays
  Peptide Sequence Number=SeqID_42261
atgcaggtcgcaaatcttggtttgtatgggattgcgttaggtgtctttggcgctataaaggcgaaagaatactcagacattgttactcagtaccgatggatcgcgtacctgtccattttcatcggatgctgcttcctggtggtctttcatgctggaaccaaggagcctactttgaagtctgaacctagctgtaagaaggcggctcggatttcctgggggtactggttcaagaagaccctgtactaccaagttgctctcctttatatgcttgcgaggctgatcacaaactcgctcatcgctttctacgtcaccagagatttgagaatgaatgagtactcgaaagcaataataccagccatcatattctgctgcagcttcttcgtgtccatcgtactgcaggagatcaagtggaccagccggcgcctcaagtccctcctcaccgtcggcgccacgctatgggtcatctccggcgtggccgtcttcgtcctcccgagccagatgaacagcctgatgtaccctctcgccatggtcatcggcgccgccaacgcgctcgtcatggtcacgacgatcgggctggagggcgcgttggtaggggaggaccttaacggctgcgccttcgtctacggctccctcagcttcctggacaagatctcctgcggaatcgcgctgttcgcgctggaatcgtacgaagacacgatggtgagctacggcgagacgaggggcctcaacacggtgagcaggtacgggacgggcctgatcccctcctgcttcgccgtactctccctggtggtcacctccacgctgaggctgcaggacgacaccccgagagccgctgcactggatgccccgctgcttgcgtgcgggcgcgggccgtgctacgccaccaccgctgtgagcagtcacttcgccgctccactgaccggcctgacagaaggacagcgccgcctgcgccgctccgactgttgtgccactcggcagagtgaggctgacaggcagccgtgcccggcctcagacaccataggaaactccgcttcgcccgacccagggctcggactcgggctcagccccggaagacggcgaactccgctccgcccgacccagggctcggactcgggctcagccccggaagacgacgaactccgctccgcccgacccagggctcggactcgggctcagccccagaagacggcgaactccgctccgcccgacccagggctcggacttgggctcagccccggaagacggcgacccggaagacggcgaactccgctccgcccgacccagggctcggactcgggctcagccccggaagacggcgaactccgctccgcccgacccagggctcggactcgggctcagccccggaagacgacgaactccgtttcgcccgaccccagggctcggactcagccctggcctcagctaacggcctccgcctcgcccgacccaggggcttggactcgacctcggcctcggaagacagactcgacctcgacctcggaggagcctccacatcgcccaacttag

SEQ ID NO: 483 - DNA, 1875 bp, Zea mays
  Peptide Sequence Number=SeqID_42262
atggcggggacggaggccttcgaggcctacttccgccgcgcggatttggaccaggacggccgcatcagcggccaggaggccgttgctttcttccagggcgccaacctgccgcagcaagtcctcgcccaggtatggatgcacgccgatcggaacaagactggcttcctcggccgcccggaattcttcaacgcgctgcgcctggtcaccgtggcgcagagcgggcgtcagctcacgcccgacatagttcagtcggcgctgtatggtcccgccgctgctcgaattccagctcccaagatagccgcaggggcggttcctccacaaatgggtgctgcgggggcgcctaggcctcaggggagtgctgcgatgacgcccacaccagggcaggttggggcggctcagatgaatccggctgccacaccaaggccccagggaagcggtatggtgccgacatctacccaagtaagcgtgccgcaggtgaaccctggtgctgctccaaggccccaagggatcaattctacgatgccagctgcgagtcagggtggtgctctacaagcaactcagtttgctggaccaagggttatgcagccacagccttctaacttgggaattacgcaacagcagccttctagtaccggtttcatgcatccgccacaggttggagctccagcagcttcattacaagctcaagcacctggaatcaatcaaggtttggtcagtggaggcagcatgggaggatctgtcggttggcaaggttggcaaggcggtaatgctgcctcagtgggaggcattccacaagctataccaggagctgctccttcacaggcagcacaaggtggatttggcccaggtttacctagaacaataggtgtggcgctggtacaacaggtacaagcaatgtctccatcgccattgcctccgcagagcaacagtgccggtttgcctcaggattcaaaagctttggtaatgtctggaaatggccctgccatcagttctggatcaagcacagacatcttctctgcacttacacagcagaagccaagcatatctgcacctgcacctcagacaagctcgattccgagctcatccagttttatgcccacgccaactggctcccagaacctgactaatctcacacagtttggttctttgcaaggtagcagccaacgtcaacagactcagcctgttgtaaagcccagtcctgctccagctgcacctgttgtctctgctgggatttctaatccatctccccaatggccaaaaattactcagtctgacatccagaagtacatgaaagtctttggcgatgttgacagggatagagatggcaaaataactggcgcagaagctcgcactctgttcctcagttggaggcttccaagagaggtcctgaagcaagtatgggatttgtctgaccaagacaatgatggcatgctttctttgagagagttttgcgttgctctttatttaatggagaggcaccgagctggaactcctctgcccccagcacttcctgactctcttaggcatgatgagacactgttacgagctacaggcttgccttcaacagcatacaatgggccatcatggcaacagaatcaaggaggattatcacaaagaggccctggagcacctggggtgcctgctggtggtgtgcggccacccttgccaccacatttgcattcacaaactgatggggctagcagaccagggcagccaagatcttacatgtctgggatggataatcatgtggtagttcaaggaaacaaagatgacaaaagtggagtgaaccagtctgtgcaggaggtggcggatcctaagaaggttggctctgtggtggtcaaaaactcaaaatgcacccagtttatgcacctttaa

SEQ ID NO: 484 - DNA, 228 bp, Zea mays
  Peptide Sequence Number=SeqID_42263
atggacttgaggacagcgagcacaggccacgaccgcgggcgacgcggcgtggaggaggcggtggcgagcgccctgtggaggccgccaggggcttgggagagggcgtcgagcagccgcacccccagcgctacgccgaacgtggagcccggctcatacgggcggacaatattcacccagagccccgttgcgaccgcaatgctgttcttgaaggaccttaccttagagtag

SEQ ID NO: 485 - DNA, 1164 bp, Zea mays
  Peptide Sequence Number=SeqID_42264
atggccatcccagatgccttgtgcattgaggaaatttcaagccccatagctgcacatatactcgacttctactacggcgacggcctgggcgatgacctctttgccgcggtgactgccacctctggcccattccctgccactgacgatgatgtttcttcgtctaccgctaccacccctcctatctgcggctacagtgaagacaccgcagctgctggtggagccacagcctacaccccgttgacatccttcgacaccactctcacagccctcctggaggaagagcagcaccatggccttgacgccgggttcctcccgcagatcgatggcctatcagaggtagcagcatactatccaactgccaccgatgaggccagcatagggcagttcgaccagatgggacttccagagaccttagacgagcaggtgcctcctccagtgcagatgagcagcagtgcatctgccttgatgccgctcgctacagactatgatgagtgcttcatggcagccgtagcagctggagggttcatgggtctggatggagccatgtatcagcaaactggagcagttcttccaggctgcagtgcagatgcatcacaacaggaattcttcagcagtgccggcagcaacagtatggtgatgattggcgagtatcagaagatgatggaaggtgaagggctgacaacaacatatgacgacacagattccatgcaagggacatttaacactaatgcagagatgcaggtaggaggaaataatcagcacctgataaacggatgcaacgggaacccagcaacgttacctccgacggaactatcagtactggaagactccacgtttaaggtcgtccgcttgtcgcctgaagagagaaaggaaaagatccataggtacataaagaaacggaacgagagaaatttccgcaaaaaaataaagtacgcatgtagaaaaaccttggcggatagcaggccccgtgtccgtggaaggtttgccaagaatgatgaactctgtgaagcagcgcaatcaggctcccagagtcatgaacattatgaacaaactgaccatatgaaagaagaggacatgctggacacatctgacattcttgcgcaactaaatggattaaatccctacaactacaagtataaatccaccattgaatcatggatatga

SEQ ID NO: 486 - DNA, 3920 bp, Zea mays
  Peptide Sequence Number=SeqID_42265
atggggacggaggcggagcagccggacatggacagccaccgaaacgacggcgtcgtggtggtgccagcgccgcgcccgcgtaaggggctcgcctcctgggcgcttgacctgctcgagtccctcgccgtgcgcctcggccacgacaagaccaagccgctccactggctctccggcaacttcgcccccgtcgtcgaggagaccccgccggccccaaaccttagcgtccgcggacacctcccggagtgcttgaatggagagtttgtcagggttgggcctaatccgaagtttgctcctgttgcggggtatcactggtttgatggagacgggatgattcatgccatgcgtattaaggatggaaaagctacctatgtatcaagatatgtgaagactgcccgcctcaaacaagaggagtattttggtggagcaaagtttatgaagattggagaccttaagggattttttggattgtttatggtccaaatgcagcaacttcggaaaaaattcaaagtcttggattttacctatggatttgggacagctaatactgcacttatatatcatcatggtaaactcatggccttgtcagaagcagataagccatgggacgcgttgtttcgtctgtgccatgcagctatagaggatgttgttaaggtccttgaagatggagacttgcagactcttggcttgttggattatgacaaaaggttgaaacattcttttactgcccatccaaaggttgacccttttacagatgaaatgttcacattcggatattcacatgaacctccatactgtacataccgtgtgattaacaaagaaggagctatgcttgatcctgtgccaataacaataccggaatctgtaatgatgcatgattttgccatcacagagaattactctatttttatggacctccctttattgttccgaccaaaggaaatggtgaagaacggtgagtttatctacaagtttgatcctacaaagaaaggtcgttttggtattctcccccgctatgcaaaggatgacaaactcatcagatggtttcaactccctaattgtttcatattccataatgctaatgcttgggaagagggtgatgaagttgttctcattacctgccgccttgagaatccagatttggacaaggtgaatggatatcaaagtgacaagctcgaaaacttcgggaatgagctgtacgagatgagattcaacatgaaaacgggtgctgcttcacaaaagcaattgtctgtttctgctgtggattttcctcgtgttaatgagagctatactggcagaaagcagcggtatgtctactgcactatacttgacagcattgcgaaggtgactggcatcataaagtttgatctgcatgctgaaccggaaagtggtgtgaaagaacttgaagtgggaggaaatgtacaaggcatatatgacctgggacctggtagatttggttcagaggcgatttttgttcccaagcatccaggtgtgtccggagaagaagatgacggctatttgatattctttgtacacgacgagaatacagggaaatctgaagtaaatgttatcgatgcaaagacaatgtctgctgatccagttgcggtggttgagcttcctaatagggttccttatggattccatgccttctttgtaactgagcatctatggaccaactggctcgacaggcggaggggcagtgaagatacggcacctgcagattctgcacacgcggcgacgactgggcggccgtcgctgctggcctgctgccctacgccaggtgcccaagtcttcttcgggctcgtcgtcgtcggcgacgaccaccaccaggtccctgttgtttttaagaaaaacaaaacaatggaggcaacattagcattctcccaggacagcccaccaatttcgataatttgtgcagcaaagtttgtgggtctacccctaaccattgatcctagccttgcttctggcttggcacccaccctacgttttgcttctggagaatcactccatggtgtcaacccaatcctcctgtacattgccagcggtgcaacaattccctgcttctctgggaagaatgatattgagtttgggcatgttgttgaatggcttgaatatgtccccatctttctttcaggctctgaatttgaaaatgcctgcttatttgttgatggattcttggcctcccggacctttctggttggtcatggcctcacaattgctgacattgtagtttggtcaaatcttgctggaattggtcaacgatgggagagtctaaggaaatcaaagaaataccaaaatcttgtccgctggttcaacagcatagattcagaatacagtgacacactgaacgaagttttggctgcatatgttgggaaaagaggaattggaaaatctcctgcaccaagccttaaggaaaaggtacatgtttcaaaggatccatcagctccagaagttgatctccctggtgcaaaagttgggaaagtctgcgttcgttttgccccagaacctagcggttacctccatatcgggcatgcaaaggctgggctattgaacaaatactttgctgaaagatatcaagggcgcctaatagttcgatttgatgatacaaacccttcaaaagaaagtaatgagtttgtcgagaacgttttgaaagatattgagacgttggggatcaaatatgatgctgtcacatacacatctgattatttcccaaagttaatggaaatggctggaagcttgattaaacagggtaaagcatatattgatgacacaccgaaggagcaaatgaggaaagagaggatggatggtattgagtcaaggtgcagaaatagtaccgtggaggaaaatctgtcattatggaacgagatggttaatggaactgaaaggggtatgcagtgctgtgtacggggtaaacttgacatgcaggatcctaacaagtcactcagggatcctgtttactaccgctgtaatattgatcctcaccatcgtgttggttcaaagtacaaggtctatccaacatatgactttgcttgcccatttgttgatgcattggagggggtgacgcatgcccttcggtccagtgaatatcatgacaggaatgcacaatattatcgaatccttcaagacatggggttgaggagagtagaaatttatgaattcagccgattgaatatggtttacactcttctaagcaagcggaagcttctctggtttgtacaaaacaagaaggtcgaagattggactgatccacgttttcctactgtccaagggatagtacgtcgtggcttgaagattgaggcattgatacaatttatactccaacagggtgcttcaaaaaatctgaatctcatggagtgggataaactctggacaatcaacaagaagataattgatccattgtgcgcaaggcatactgctgtgctaaaagaccagcgtgtcatctttactcttacaaatggtccagagaagccatttgttcgaattttaccaaggcataagaaatttgtgggtgctggaaagaaggctacaaccttcgccaacagaatttggttagattatgctgatgcagcagccattagcaagggtgaggaagtaacccttatggattgggggaatgctatcgttaaagagatcaaggtggagagtggagtaattactgaactagttggagaattacatcttgaggggtctgtgaagacaacaaaattgaagatcacatggctagcagatatagaggagctagtccccctctcattggttgaatttgattatctcatcagcaagaaaaagctagaggaagatgatgacttcctcgagaatctcaacccttgcactcgacgagaaaacccagcccttggagatgcaaacatgatgaacctcaagcgtggagagatcatacagctcgagaggaaaggctactatag

SEQ ID NO: 487 - DNA, 231 bp, Zea mays
  Peptide Sequence Number=SeqID_42266
atgatgctagagcagcagtgcatacccggggcagaaaaggcgcaggatgcttcaaccgctgcagatgaattgaggtcaccttctgagattccagaatcttctaccgtcaaggaagttccagaaaacagtcaaaatggatcaaccaagcaaacaagcttaaatcaagttgtttttgtccttccgtgggaacagatgaacgctatagttaacttccttgcaaagcctggctag

SEQ ID NO: 488 - DNA, 711 bp, Zea mays
  Peptide Sequence Number=SeqID_42267
atggaggtgctccgcaagcagatctccatctatgccaccatctgcgagcagcttgttgagatgcatcgcatcctcaccgagcacgagggcaccattgcagaagaagatgaagcaaaaggcgtttttgagaaaaatctcatttttgctggggaattatcaaagacagtagctaaattagctgaagatggcaaggttgctataaggaacataagaagagatgcaatcaaagcttatgataaactagagaaggaaaagaagctttctgaggacaacgtgaaagatttatcagctgatctacaagttcttgaggaaggcgtcctcaacccagaatcaactgttgttgcgatctttccctctccaatgcattatgctgggccaactgaggtgcagtggcatgctaaggctcgtattaatgctggtgcaaatttctatattgttggaagggatcctgctggtatgagccatcccacggagaaaagggacctctatgatgctgaccacgggaagaaggttttgagcatggctcctggcctcgagaggctcaacatccttcctttcaaggtggctgcatatgacacaaagcaaaagaaaatggatttcttcgatccatcaaggaaagatgatttcctcttcatctctggcacaaagatgtgcactcttgccaagaaccgcgagagtcccccggatggttttatgtgcccgggtggctag

SEQ ID NO: 489 - DNA, 693 bp, Zea mays
  Peptide Sequence Number=SeqID_42268
atgccggcggggcacgggctgcggtcgcggacccgcgacctgttcgcgcggcccttccgcaagaaggggtacatcccactcaccacgtacctgcgcacctacaagatcggcgactacgtcgacgtcaaggttaacggcgccgtgcacaagggcatgccgcacaagttctaccacggccgcaccgggagcgtctggaacgtcaccaagcgcgccatcggcgtcgagatcaacaagcaggttaatggccgcatcatcaggaagcggatccatgtccgcgtggagcatgtgcagccctcccgttgcacggaggagttccgcttgaggaaagccaagaatgaccagctcaaggcggatgccaaggcccgcggtgaggtgatcagcaccaagaggcagcctgtgggacccaaacctggcttcatggttgagggtgctacactcgagacagtcactcctattccttatgatgtgattttactgagatccgtctgcattttcatttaccgatgccgaggctcaatccaagatggatttgatcagtgtattggtggcttcctgagtgctgtggtcaagcggatgcggttgggcattgagtgtgttgacaatggttcgcacaggctgccacagacatgtctgctgcacaggctgcggctgctgaggttggaaatcctcgagtcccgtaggaggatactgtga

SEQ ID NO: 490 - DNA, 156 bp, Zea mays
  Peptide Sequence Number=SeqID_42269
atggcgactggcaacgtgctcgcggtcgcaggtcgcaggtcgcagccttctagtttcaggaggttgcagaagcccaaaccgagcaaaagctttatcactgcattgcgtcaatattcacaagaagctgctggagaaagaaatgtgatggaaacttaa

SEQ ID NO: 491 - DNA, 960 bp, Zea mays
  Peptide Sequence Number=SeqID_42270
atgggcggcacgggggtggtctaccgcgccgacatgccacgccaccacgccgtcgtcgctgtcaagaagctgtggcgcgcggccgggtgccccgaccccgaggaggccgccacggccgacggacggcaggacgtggagccgggcggcgagttcgccgccgaggtgaagctcctgggccggctccgccaccgcaacgtcgtgcgcatgttgggctacgtgagcaacaacctggacacgatggtgctgtacgagtacatggtgaacggcagcctgtgggaggcgctgcacgggcggggaaagggtaagatgctggtggactgggtgtcgcggtacaacgtcgcggtgggcgtcgcggcggggctcgcgtacctgcaccacgactgccggccgccggtcatccaccgcgacatcaagtccagcaacgtgctccttgacatcaacatggacgccaagatcgccgacttcggcctcgcccgcgtcatggcgcgcgcggaagagcccgtgcccgtgtccatggtcgccggatcctacggctacatcgcgccagagtgcgggtgcaggctgaaggtggatcagaagagcgacatctacagcttcggagtggttctgatggagctcctcacggggcggcggccggtcgagccggagtacggcgagagccaggacatcgtcggctggatcagggagcggttgcgcagcaatagcggcgtggaggaactgctcgactccggcgtcggcggtcgcgtcgaccacgtccgggaggagatgctcctggtgctgcggatcgcggttctgtgcacggccaagtccccaaaggaccgtcccacgatgcgggacgtggtgatcatgcttggcgaagccaagccgcgccgcaagagcagcagcgccacggtggccgccaccgtcgtgaacaaggacaggccggtgttcacgacgtcgccggactccagttacctatag

SEQ ID NO: 492 - DNA, 1740 bp, Zea mays
  Peptide Sequence Number=SeqID_42271
atgaggcggcgaccggtgctaccgtcccaccatgacgacacggacaagggcggcgggaagccggcgccggcgcgcctctgtttcctcgccacgctctgcgccatgttctgggtcctcatcttctacttccacttcgccgtcctctccgacgagcccgccgccgaggcccgcattgcgcgcgcccacacccgcgttcccgaacaggacggcgccggcgccggcgcgtcccgcgtcgaccttccccgcgcagaggagccggaggacgagcgcgccgccggagtccgccgggaggtggcgccggcgtcgtacccgttcgagcgggcgctcaggacggcggagaacaagagcgacccctgcggcggccggtacatctacgtgcaccacctgccgccgcggttcaacgaggacatgctccgggagtgcgagaagctcagcgtctggaccaacatgtgcaggttcatcaccaacgacggcctcggcccgccgctgggcaacgacgagggcgtgttctccgaaaccggatggtacggcaccaaccagttctccgtggacgtcgtcttcggcaacaggatgaagcagtacgagtgcctgaccgaggactcgtccgttgccgcggccgtgttcgtgccgttctatgccgggtttgacgtggcgaggtacctctggggctataacatcacgacgagggatgccgcgtcgcttgatttggtggagtggctgatgaagaagcccgagtggagcgtgatgggtgggcgggaccatttcctcgtcgcggggaggatcacttgggacttccgaaggctgacggaggaagagtcggactggggcagcaagctgcttttcctgccggctgcaaggaacatgtcgatgctcgtggtggagtcgagcccgtggaactcgaatgattttgggataccatatcctacgtacttccacccaggcaaggacgccgaagttttcctttggcaggatagaatgaggagcctggaacgcccgtggctcttctcgttcgcaggcgctccacgtcctggcgatcccatgtccatcagagggcagctcatagatcagtgcagggtctcgagcgtttgtaagttgttggagtgtgaccttggggagagcaagtgccactccccgagcacggtcatgaagatgttccagagttctttgttctgcctgcagccccagggcgactcctacacgagaagatctgccttcgactccatgttggctggctgcatacctgttttcttccatcccggttcagcgtacgtccagtatacatggcatcttccaaagaactatacaaggtactctctgttcatccctgaagatgacatccgatctagaaatgccagcattgaggagaggctgaagagtgtccacccagatgtggtcaagcaaatgagagaagatgtcatcaacctaataccaaaggtgatatacgctgatccaagatcgaaactagagaccttgaaagatgcattcgatgtttccatagaggcgatcatcaacaaagtgacaaagctgagaagagatatcatcgcaggacaggaagacaaaggttttgttgaggagaatagctggaagtatagtctgttagaagacggacagcggacaattggacctcacgagtgggatccattcttctcaaaacccaaagataaaggtggagattctggcggtccatctgctgaagctgccaagaattcttggaaaagtgaacaaagaggacataattga

SEQ ID NO: 493 - DNA, 636 bp, Zea mays
  Peptide Sequence Number=SeqID_42272
atggcggcgggcgggcagccggccacagggaagaagaggggcgtgggtgcgtgggctctggcggtcgcagggaaggagaggggcgcggcagcggcaggaaacagcgggaggagctcgggccgcaggggagagtcgccgtcagtggagaagagggagaaccggagaacgccggtggttgatgctcacatccaacagctagatcagtttatgaggaagcttgaagaaatccggcaaggaaaagaggcagctgctgctgttactgcagggactgctgttgctactactgccactccaaccgtgaatgctggagcgacaactgctgatgctaatccgaagagtggacgatctggcgaaagaggcagagggggtcggaagaaggccaaggtacccacggagcagtcagtgccagtgccagtgccactgccacctattgacttagagttgcctgtggatcctaacgaaccgacatactgcctctgcaaccaagtcagctatggtgagatggtggcatgcgacaatcctaattgcaaaatcgagtggtatcactatggctgtgtgggcgtcaaggagcaacccaagggaaagtggtattgcccaaactgcatcggattccagaagaagcgaaaaggcaagtga

SEQ ID NO: 494 - DNA, 225 bp, Zea mays
  Peptide Sequence Number=SeqID_42273
atggagaggaacaagggcaacgcgctccatccggcaccaacctcatcaggctgtgggctgtggcttctcgtcatctacttccatctcgccgtgctccgcgccacggcccacacccggccaaatatacttctaatactgtctgacaggcttttcgacatggatcacaagctgtttttagtctcctttatggtagagatggacgagaagggtacagtacatgagtga

SEQ ID NO: 495 - DNA, 354 bp, Zea mays
  Peptide Sequence Number=SeqID_42274
atgatggtcatcgcctcagttaccgccacatcgttcgccgtcctgcttcttttctctctcccctcatgcatccgcctccgcaccaccccattcttggcagagggcgtgggatcaggtgcctcatccccgtattcgtccaacaccagcttcgacaccgacccacgcagtggctattgcacgtccacgaggatgtttcacggtatgcgcacaccattgttttcaccgtcgtcggacgtcccattcatcttcccagcatttgtcctgttcttcctccccaacctactgcccctgcccacggtcgcagccacgagccgaccaatgctcttcgacgcgtacggggcgagtcagtcttaa

SEQ ID NO: 496 - DNA, 681 bp, Zea mays
  Peptide Sequence Number=SeqID_42275
atgggtgcacacacagccatagctccagtggtgagcaagatcttctgcagctcctcgcaggccgtgctgatggtgcgcaggcgtcctcctaccgtgaacggcggcggccttgttgttacagaccggaaccagacggccgctttcagggtcgatggctgtggaaccatcggtgctagcgggcagctgatcgtcagggatggcgatggcagcgcaatcctcttcattcacaagaaggtgaaagtttggtctccagctactgcttcaagcagactgactgacgaaactttggtctcgcagggaggcgtcgttcaagcgctgagcgtcaacaactggtggagagggtatctgaccgactatggcgagccaagcaagctggttttcagcttgcaggatcccaagcctgtcctctgcacgaacacgaagggtgacgttcgggtcaccgtggagcccagcgggaggacgaagaggcactgggactacgaggtgactggatccttcgctcagaggtcttgcgccatcaagaaccgagcaggccagcttgtagcgcagattggcggcaaggggatgatggcaggcagggacctgtaccaggtggtggtgcagccgggctatgaccaggcctttgtggttggcattattgccattcttgacaacacgcatggagagtccacaagctgctaa

SEQ ID NO: 497 - DNA, 366 bp, Zea mays
  Peptide Sequence Number=SeqID_42276
atggctagccgttaccgctgcgcacagcctaagcgtagggacgctacggtctgccagagggctgagactagcttcaacggttcccgcgagacgccccctccgcttgatttagcgtgcacagtaccacgccagagctgctacagtggtaacgttacctatgcactaaattgtttgcctctgtttgatttggtagccataggcttgaagcgctatttcgagctgaatgccactgttgaaaatcacgatgaagaaaatgttcataccgatgctccggatgtacacgctgcacaaccatatgaagaacaagattttgtatctaaaaagttcggttttcgatatcgtaatcggttttcaccgtatacataa

SEQ ID NO: 498 - DNA, 1494 bp, Zea mays
  Peptide Sequence Number=SeqID_42277
atgtcaccagcggttgcctctgcctcatctggcgaccgcatacgaacctacgaagacttcgtgcgggtacacgcgtacctgctggccgcggcgggcatcccgccgtcgctgcaccggaggctgtaccgcaagctcgcggacgaggtcttcgacggcggggaggtctttgccgtagagccgtgcgaggacgggaggcagcggcgcctcgtgctcaccgccgatcagtctctaggaaaagagtccgatgtcttcctcgtcgaccatgcgtggtccttccgcctccctgatgcgctcaagcagttgagggaagtaccaggattggctgaaaggatggcagcattaatgtgtgtcgatttggaccgcaagattgaagcagatgagcaggatgatgacgagagtgggagcttggagcatgtatcgcaagtagtcgagaaagaaagggctagagttcaggagagaagtgattctacagcttggctggaacttgaagaacttggaattgatgatgacatgctagtagccttggatctatctgcaaattttccgtctgaggttgatctaggatttaaaacctgtgggaccaaacttgttgatgttaagccaattaacacaatcatttcaaaatttatgaagagggctaaacgtattttggtaaaagctatggggcagaatctggtagctctgaacctatggggaaacaagctgcgggatccagagaaagttatgcaagaaatcaggaagtgcacaaagctaaaggcactttggttgaacgagaatcctgttcttggcaaaagtattgacaaagctgttttcgatggcctctctggattggaaatatacaattcacattttacaagtaaagccggagagtgggcactaggtttttgcgcagacattgttggagcagataatccctgttcttctgtggaaagcacattgtttgggagcattgggactattgacctttctgatagatgcattcacaagctaccagaggtgttctctcctagtaaattgccatctctgtcaaaattgaacattcgtggtaatcctctggatcaaatttctggcgatgatctcttaaagctatttggtggattcactcagttacaagagttggaggttgacattcctggccctctgggaaacagtgcaatctccattcttgagtctcttcctaatttatctttgctaaatggcgtggattcctcaagcataatagagagtgggaagcatatagttgactctgcacttgaaccacggcttccagaatggtcacctgaagaaccccttgctgaaagagttattggcgcaatgtggttgtatcttatgacataccggcttgctgatgatgaaaagattgacgaaacacctgtttggtatgtcatggacgagttgggctcagccatgcgccacagtgataatgcaaacttcagaatagctccattcttgttcatgccagaagggaaactgcacactgctataaggcattga

SEQ ID NO: 499 - DNA, 573 bp, Zea mays
  Peptide Sequence Number=SeqID_42278
atgtcttctccaagcaagcgccgggagatggacctcatgaagctgatgatgagcgactacaaggtggagatggtgaacgatgggatgcaggagttctttgttgaatttcgtgggcctaacgaaattaaagcttcagccttgtcctgcactagtgatttaggaggactggctgcactatctgaaggatactttgctgaattcaataggcatttatcaaggaggtctggttcagtctgtttggatgtcatcaaccagacatggagcccaatgtttgatcttgtcaatgtgttcgaggtcttccttccacaacttctgttatatcctaatccttctgatccattaaatggagatgcagctgcgttgatgatgcgtgatcgccctgcttacgaacaaaaagtgaaagtacttgaaagctcagttttcctttcacgtctttctttagagtactgtgaaaaatacgccaaaccaggggatgctggtgtcaccccagaagagcagtccagtgacgaagagctgagtgaagatgaagacgactcgggtgatgaggagataatgggcaaaccagacccatag

SEQ ID NO: 500 - DNA, 1656 bp, Zea mays
  Peptide Sequence Number=SeqID_42279
atgcgcatccgccgctacgccgcgcgcctcctctccgccaccaccgccgccccctcctcgccgccgcggccgcccgccgcgtcctggctccacaccgacgacgacgacgactgctgcgccttctgcgagctcagccgcccggccccgcaggagggccaggacgccgtcaagcacaaggggcacattgccggccgggtgccggaatccgatgtcagagccgatgagcgcgtcggcctacaccagcgaccgcctgctcccgaagttaaaaaatgcaagattgatcatgtacctcctgtggataaatcttctgtcgggctgcaagttgtgaaatgtgcttctgaggtcagtggagctgtggcgaaaccagaaggtggtactcctgctagcgaagctgctgctggtcctgcagcgaaagctggtgcttttgttgtcaacgatgctgctagtgaacagggagttcaatgtatagcttctccactgggtggtgcctccaagctggaggaggttacagcagggaattcttttgcgaatgggccaaccactgaattaggagttttcaagggtgcatcccttgctaatgaattggctgatgtgccaggggttacgagcattatgccagaagttataggcaaacctagtactgacccaggggctataaccaccgtggtggaagttagtgatataggttctgtcgttcatgaaaccactgaactggaatctgcaggggaggattatattgccagtgaagctgctgctgaaccagaagatgctggcagagcttcttgcaatacagatgatactgctgctttagatgagccactgccgcctagttgtgatccgaacataggcaatgcgcaggttggaaatgcgatggacaccgttgccagtacagtgcggccttctcgatgtgatgctgcagaagaaggtgcttctgtgaattctacagccaatggtcctgttagagccagaggaccaaccgttaagggaggagtgcccaaggataaatctgttgcacccagtgttttacgtgtattggacgtagtgactagaagcattggtaaatcagggagaacagatgttatttgttatgctaggcggacaggtaagaggaagccagagctgcaggaagtgaagacggaaaatattgacttggaagatggtgttctatgcgagaaagaggaggcactgttgagaactgattgttgtgaaagtgtcttgtcaacagccgggtccatagatgttaaacttgccgacataaagaaagaccttatggataattcagctgcaagcaaggttacaaagatgaagagaaatatatttgaatgtaaaattgattactgccacatgacattcaagacaaaagctgagcttgctgcccacaagaagaacatgtgcacagtcaactcatgcagcaagcatttcagatcccacagttacctgaggcgccacgagagcgcacacaacgatgatatgccttacaagtgcccatgggatggttgtaatatggctttcaagtggtcatgggaccgggctgagcatttcaaggtccatgctggggccaagccttacaaatgcatgacgcctggatgcagcaaaatgtttaagtttgtttcagatttcacccggcataggaggaggtgcaaacctcagaggtaa

SEQ ID NO: 501 - DNA, 345 bp, Zea mays
  Peptide Sequence Number=SeqID_42280
atgccctctgggagcaagctaaggcgacaagaatatttagggtttagagtgtccaagacatctgtccgcgtctttgggaagccattgacgtcgtggctccagatcggagagccactgtcgatgcgcctccagatcgaggaactaccgccgtcgtgcaaccggatcaaggagccgccgtcgttgcaccttcgaatcgagaaaccgtcgccgtcggcgccgtcggggacctaccgatgccgagccaccggatcagggagcgactgtcgttgtgcctccggatcggagagccgccgccatcgcgccttcgagtcgggaagccgacgcgcgcagcgcctccggatttga

SEQ ID NO: 502 - DNA, 2037 bp, Zea mays
  Peptide Sequence Number=SeqID_42281
atgcccggcataccgagggatgtcgccgagcactcgctggatattcgggccggagcccgacccgtcaagcagcctctgcgccgattcgacgaagagaagcgcagagcgattggcgaggagatccacaagctaacggcagcagggttcatcaaagaggtattccatcccgaatggctggccaaccctgtgcttgtgagaaagaaaggggggaaatggcggatgtgtgtagactacactggtctcaacaaagcatgtccgaaggttccctaccctctgcctcgcatcgatcaaatcgtggattccactgctgggtgcgaaaccctgtctttcctcgacgcctactcagggtatcaccaaatcaggatgaaagagtccgaccagctcgcgacttctttcatcacgcccttcggcatgtactgctatgtcaccatgtcgttcggtttgaggaatgcgggcgcgacatatcagcggtgcatgaaccgtgtgttcggcgaacacatcggtcgcacggtcgaggcctacgtcgatgacatcgtagtcaagacgaggaaagcttccgacctcctctccgaccttgaagtgacattccgatgtctcaaagcgaaaggcgtcaagctcaatcccgagaagtgtgtcttcggggtgccccggggcatgctcttggggttcatcgtctccgagcggggcattgaagccaacccggagaagatcgcagtcatcaccagcatggggcccatcaaggacttaaaaggcgtacagagggtgatgggatgtctcgtggccctgagccgcttcatctcacgcctcgacgaaagaggcctgcctctgtaccgcctcttaaggaaggccgaatgcttcgcttggacccctgaggccgaggaagctctcgggaacctgaaggcgctcctcacaaaggcgcctatcttggtgcctccaactgacggagaagccctcttgatctacgtcgccgcgaccactcaggtggttagcactgcgattgtggtcgagaggcaagaggaggggcatgcattgcccgttcagaggtcggtttactttgtcagcgaggtactgtccgagaccaagatccgctacccacaagttcagaagttgttgtatgcagtgatcctgacgaggcggaagttgcgacactacttcgagtctcatccggtaactgtggtgtcatccttccccctaggggaaatcatccagtgccgagaggcctcgggcaggattgcaaagtgggcggtggaaatcatgggcgagacaatctcgttcgcccctcggaaggccatcaagtcccaggtcttggcggacttcgtagctgaatgggtcgacacccagctaccgacggctccgatccaaccgaagctctggatcatgtttttcgacggatcgctgatgaagacgggagccggcgcgggcctactcttcatctcgcccctcgggaaacacctacgctatgtgctacgcctccatttcccggtgtccaacaatgtggttgagtacgaggctctggtcaacggattgcggatcgccatcgagctaggggtcagacgcctcgacgcccgcggtgactcgcagctcgtcatcgaccaagtcatgaagaactcccactgccgcgacccgaagatggaggcctactgcgatgaggttcggcgcctggaagacaagttctacgggctcgagcttaaccacattgctcggcgctacaacgagactgcggacgagctggcaaaaatagcctcagggcgaacaacggttcccctggacgtcttctcccgggatctgcaccaaccctccgtcaagatcgacgacacgcccaagcctgaggcgccctcggtccagcccgaggtaacctcggcctccgtgggcgaggcactgtgcatcgaggaggagcggagcggggccacgcctgatcgaaattggcagaccccgtacctgcaatatctccgccaaggagagctacccctcgaccgagccgaggctcggcgggtagcgcgacgcgccaagtcgttcgtcttgctgggcgatgagtag

SEQ ID NO: 503 - DNA, 1125 bp, Zea mays
  Peptide Sequence Number=SeqID_42282
atggaggtgttctactacgtcgtgttcggcgcgctggccgccgtcgtggcggggctcgagctcggcaagagcggcaaggaccgcgtcgccaccacctccgcattcaactccttcaagaacaactacgtcctcgtctactccctcatgatgtgtacgccccccgtccctcccctccccttctttagtttagatctgcgaacgccgttgtggttggttctgatggtttcgcctgttgcctgccctcccgcctcgaatggggacgggtttgttcgtgcagccgaggactggctgcagggcccctacgtctactacctctacagccagtatggcttcgacaagggcgacatcggccgcctcttcatcgccggcttcggatcctccatgctcttcggcaccatcgtcggctccctcgccgacaaacagggccgcaagagggcctgcgtcacctattgcatcagctacatcctcagctgcatcaccaagcactcccccgagtacagggtcctcatgatcggccgcatcctcgggggcatcgccacctcgctgctcttctccgccttcgagtcctggctcgtcgccgagcacaacaagagaggctttgacccgcagtggctgtccataacattctctaaagccatcttccttgggaacggcttaattgccattgtatctgggctatttgcgaaccttcttgctgagaacttgggctttggtcctgtggctccattcgatgcggctgcgtgctttctggcgattggcatggctatcataatgtcctcatggagtgaaaactacggagatccatctgaaagcaaggacctgatggcccagttcaaggttgcggctaaggcaattgcgtcagatgaaaagattgcattactgggagccatacagtcattgtttgagggctccatgtacacatttgtcttcctatggactccagcattgagtccaaatgaagaagacattcctcatggttttatttttgctacattcatgctgtcatccatgctgggtagctccatcgcgtcacgtctattagcccgaaagctcaaggttgaaggctatatgcagatcgtgttctcgatatcggctgtcacccttgtcctccctgtcgccaccaac

SEQ ID NO: 504 - DNA, 279 bp, Zea mays
  Peptide Sequence Number=SeqID_42283
atggtcgccgcccgcgaccgcgacgactggatcaacagcgtcgtggccgggctaggcaccggcgcgctcttccgcgccgctaacgggccgcgctcggcggtcgtcgccggggccgttggtggggttcttgctggcgccgccgccgctgccaagcagtttgagaaacccattgggggtggaattgagttgtggggtgctgttgcatatgagccttttcctcaagtatttgcatcaatgtttatggcttctactgaatttattgagcccgtttttcattaa

SEQ ID NO: 505 - DNA, 900 bp, Zea mays
  Peptide Sequence Number=SeqID_42284
atgaggccggtgttctgcggcaacttcgaccacgacacccgccagtacgacctcgagcgcctcttctccaagtacgggcccatcagccggatcgacatgaagttaggctatgctttcatttactttgaagatgagcgtgacgcagaggatgctataaggcgtctcgacaatgtgtcttttggttacaaccggcgcaggctttctgtggaatggtctaggcaagttgaaccggtgccaaagagccgtgataggcctactggggatgtaaagccaacgagaaccctctttgttatcaattttgaccccatacgcactaaggttcaagatattgagaagcatttcgaaccgtatggcaagattgccaacattcgcattcgaaggaactttgcatttgtacaatatgagacacaagaggaagctagtgccgctgttaagaacactgacaagagatgccacattaagttatgcacactcactttaatggtttcctacctagttgtttcacaaatctggttcatgtgcaccatattggacagggtagtgaccgttgaatatgccttccgggatgatgacggcgatagagatgaccgatacgacatccccaaacaaggtgcttatgacaggcgtggtggtagcccctacatgcgctcacctagcccaaggtaccgaagggactacgttccagattatggtcggcgtggacgttatcctggctatggtcgccgtgatggagcaattccggtcgattctgaggaacccagtaaggaagtagtttccaaggaagaggtggcgagcaacaacatgatttttgccacgccaagtatacctggaggagccgtggtgttccaagtatgtctgagtgctgtcatggtaacgcgatgctggttccctggttgttga

SEQ ID NO: 506 - DNA, 324 bp, Zea mays
  Peptide Sequence Number=SeqID_42285
atgcatgttgataccaacgaacccatgttatcatcaacagccactggagccacgccctcgcccatgctggtgctcagcctcaagcgtagccccaccggggctcgatgcctgcgtgtcatcgactcacccttccctgtcgacacgctagaggacctcgacgcccacaccgattataaggaaaatggacccaggccatttatctcaataggttttgaggcgccgcgctataattcaccagactgtccggtgtacaccggacagtgttcggtgctccaaggggacgcgactctgaactcgtcagcctcgggaattctcaacggctag

SEQ ID NO: 507 - DNA, 168 bp, Zea mays
  Peptide Sequence Number=SeqID_42286
atggcgggggtgcttgtgttcgcccaagcgatgtgggcacgaagctgggatgatggcgacagtgatcgtataggcgaggcaggtaatggatatatgtcgggtagcagatacccgacaggtaactcgaatgccacccctatccttggtgttggcactgcctggttttaa

SEQ ID NO: 508 - DNA, 2019 bp, Zea mays
  Peptide Sequence Number=SeqID_42287
atgcccccccaacccttgcactgcctgtatctcgcctgcacgcgtggaggatcagatgtgacagcgtttgacaaagaccaagagggattcagggatgtccccatgccttcgattcagacggctggctctgtcccacatcttcgggttgagaagctaccgatgcaggaggtttctgatccaccagaaacagtaaggaaagcagaaacaaaaaatattacttccattgggaaggatgtgattttcgagcaagatccatgctcttcatatcagttatggggcagtatgaaatttgaagaagatggccatttgctgtctcaggcaaagagggatttgtcacatttggattatagagcacagtctgccgacaccaaatatgttactgaacttgggtcacatgcatgtttgaaggatccattgccaatgggaagagattatcataggcagaagctacaattttctacttcagactgttcttttgagaaggcttctgcattagaagcagcatcaagtagcccagatgcattagggacaatgagaaccaaaatcaaatccagcaccctcagtgcaagtccagattatctttcgtcttatcctactgctgctccttgcatgcggaagtgtccaggagcagttgaacttgatcacggtttgggtcattcagaacattccaacagaagatcagaccaatttactttattttcaagccgtaatggtcgatctgtagaaaaatgcaaagagatggttcaatatgccagagggttccaccatgcagatgagatcaatcatgttccatttcaatggtgctttgaggatgaaggtccttcagtatcaagaggcctgcagtatggcgatgagatcccttctttatctaggaagaagtataacgtggcaccttcacgctcaagtcagtggcactatggtcctcaaaccgcactgtcctcaaggagacccgactatggtgatgagatcccgtcactctctcttcactatggttaccgagataggacccatttgcgttctggtaattggtgccatgatgctgaggcacgtataccgtcaagataccagcaaggtacttctcatggcaatggtcactcaaggaattgtttttccaggattaataccaacgagcaagccaaagttatcacaagcaaacatacctttgcaaaacctaggatgattaacagaaactgtagtgaccaacataggatcaatatgaaaggtaatcgctggagaaattctgaggatttaatggaccaagttcgtgggccgagggcaaataaattgaacaatgcttcagtatcctccactgtgaaagatatcacaagtccattgatccgtagaaatcagtataatagatcagatttttcagttcaatataatcaggccaagttttttatgataaagtcatatagtgaagatgacattcataaaggtatcaaatacaacgtttgggcaagtacaccaaatgggaacaataagctggatgctgcataccatgaagctcaaaatttaatggacagtggggaaaggtgccctgtcttcctattcttctcggttaacaccagtggacagttcgtaggtttggctgaaatgttaggtcctgttgatttcaagaagaccatggatttttgggaagaagataaatggagtggctttttccctataaaatggcatattataaaggatattccaaatcggttgttcaaacatataattcttgaaaacaatgacaacaggattgttacttttagcagggacacacaggagcaaagaccaacaacagatgctgctgtccttcctacaggccacttcctacaggccacgagacttattccaacaattctccctctaagtcttgtgtgttgtcttgttggacagttggtccatcccggacctggagcacagctcaaggaacttgatcctcccaaggggcttagtgagcaggtccgcaagctaatccttggtgttgatgcagcgtgccttgatgtccccttctgccaagcagtcatggattaa

SEQ ID NO: 509 - DNA, 1613 bp, Zea mays
  Peptide Sequence Number=SeqID_42288
gcagtggagtcgccggggtcctcgtgaaacgaattgagcagccccatgtggaacacgtcatggagacgatcgccctctggaagctgaagacaatagcacatgctggaaaaggtggagagctgactcatgatgaaaccactatcattacaggagctctggagctgactcaaaagattgcaaaagatgccatgactgctatatctgaaacattctcacttgacataaatgctaagctggacttggtggctgatgatcttcctctctatgacattctaaatgagttccagaaaggtcacagccacatggctgtggtaattaaacgaacaaaggaagcaggagtatccactgaaaagcaaaagagcacaactgccgattataaaataaaccccaaagatgctcgtgctgatggctcatccccttcttatggtagcactgccgtaagtcgtagaattaacatagagaagcatggagatgggcgcccatacaataagaaatcagaaaggaagcgggaaaacattcttgattttaacaacgatccacttccaagctattcaatggatgaggaggcagtgggaataatcacaatggaagatgtcatggaagaacttctacaggaagaaatctatgatgaaacagatgagtatgttgatgtacataacaagatcaggataaacatgttgactccaggcaaatcgctgtcacctgctatatctcctggtggtgggcccttatctcaggggtttcgaaggactcctatggcatctccgttctcaccataccaccatggtagttctgtcttgcgttccccggcttcgaaccatggtcagtcacctgggactttaccgacaatactgtcccctggaagatcacctactgcacagacacctgggcaaagttcaccaaacggaagtcaggcgagctcggatcggccagcgggcctgctgtgggtgcccgggatgagcccgtgtccgacgacgggcgcggggccgtcggagagggcgcaggagatcgcgcggcggcgggaggagatgctgcacgacctccccgagtccgagtacgagctctcgctcaccgacctcgtcgagaaggccgcgggcgggggcgactgtggcgaagccgcgcccgcgcccatggcagaggggaaggacccgggcgcctcacggccggcgcccggcgggcagctgccgcccgcggcagcgaggagggcgtcggcgcggcggcgggacagcgggggcagcttccgcttccgcagcagcagcgacggcgtcctgctcaacttctacatgccgcggtcgctcacccggagcttcaccgcgccgcgccccgcccggacgccgtcgtccgcatccggctgccggagccccaccatcgcatccgactgcagcaagagggagagggactcggacgccgagaccgtcaagtgctggtcgttgctgtgggatcggcggtggcgcaagtccagccggcgggacccgggcgcgccgcccagcgagagcgagtccgccatccgcgccgcgtcggtcgtcaaagcgaagcggccaagcactccgctccgccggcccatatctgagccgactttttttcgtccgtctcctgccccgcctgccggataa

SEQ ID NO: 510 - DNA, 435 bp, Zea mays
  Peptide Sequence Number=SeqID_42289
atggcctctgacggcgcagggaccgcggccagggagacgatcggcgctacggacgggcttgtggccggcggcggctgctgtcctggtcccggatatatccttgatgttactccagagaagattgaaaaaatgttcttcgatccattggattttggcattcctcgctgcacattggaagatctgaaaggaggcgatccagcgtttaatgcaaaagttctccaggatgttcttgctggtcaaaggggggcgattgcagatgcccttgttctaaatgctgcggcgtccctacttgtcagtggtaaagtgaaaaatttacatgacggtgttgctttagcacaggagacacagcggtccgggaaagccatcaatacacttgagtcttggataaaaaaatcaaataaaaatctccgtcgatattctaagctttttggttag

SEQ ID NO: 511 - DNA, 927 bp, Zea mays
  Peptide Sequence Number=SeqID_42290
atggcggccgcgtcgctcaagttcgcctcccccaaacccttggcctccgcaccgtccgcgctcctttgcgggcgtcgcgcccaggcgcggcccctcccagcaagtcgcctccctccgcctacccgcgtcgccgtgcagccccccgccgcgccggtcgcgacgcgcatcggctcctttgacaaggtgctggaggcgctgatcggcgggaccgacttctccgaggaggatgcggaggcgacgctgaagctgctcctggacgagaaggacgaggcgcgcatctccgccttcctcgtcctcctcagggccaagggcgagaccttcgaagagatcgtggggcttgcgaaggcgatgttgagctgctgcatccgagtcgatggtctggacgacgccgtcgacattgtcgggacaggcggcgacggcgcagacaccgtcaacatctccaccgggtccaccatcctcgccgccgcggccggcgccaaggtcgctaagcaaggaagcagggctagctcgtcggcgtgcggcagcgcctatgtgctggaggcgctcggggtcaacatcgagcttggacccgagggtattaaacgatgtgtcaatgaggtgggtgttggattcatgatgtctgcaaattatcatcctgcaatgaaaattgtcagacctgtgaggaagaagcttaaaataaagacagttttcaatatccttggtcctctactgaatccagcaagggtgcctcatgctgttattggtgtttaccatgagaatatagttaccaagatggctaaggctgctcagaaatttggaatgaagagagcattggtcgtccattcaaagggtttggatgaaataagcccacttggttgtagggtggggaactggggattgggcgcaagaagggcggcggcgctggggcgccgtcgtgaccctggctag

SEQ ID NO: 512 - DNA, 1014 bp, Zea mays
  Peptide Sequence Number=SeqID_42291
atggaggcgttcgcggcccagcatcagggggacgtgtgcatggaggccgtcggcgtcgacaccgcggcgcagcagggcccgcgcccgcgcacggcgcaccggcgctcccgcagcgacgtcccgtccgggtactacttcggcggcgaggggcaccagctgccgccgcccaaggtggaggccggatggggcgggcacctccacggcggcgggggcgacgacgacctcttcaacgcgtatctcaacctggaagggctggacgggctgaactcctccgacgaccgccggcagtactacgacggcgacagccgcgggagcagcgtgaggaccaacggcgccgacagcagcgagaacgattcggaggagtgcgccgccgcaggcccgcccgtggcccaccacgtcaggagcctgtccatggacagcagcctcatcggcaagctcaacttctccgccggcgcggctgcggccaacggcggcgtcattccggggcccaacaggttcagcctcgagttcggcagcggcgagttcacccccgtcgagatgaacaagatcatggccgacgagaagctggccgagatggcgctcgccgaccctaagcgcgccaagagggtgctggccaacaggcagtcggcggcgcggtccaaggagcggaagatgcgatacatcgcggagctggagcagaaggtgcagatcctgcagacggaggccaccgctctctccgcccacctcacgcttcttcagcgggactccgcggggatcgcgacgcagaacaacgagctccagttccggctgcaggccatggcgcagcaggcgcagctgcgtgacgcattgaatgaggcactgacagccgaggtccagcgcctgaaactcgcgactgcagagctcggcgactcttgctcgtccaacagtctagcccagcagatgcagatccaactcagcgcgcatgaccagacgttcgaactgcatcagcagcaggcgatgccgatagcgttctaccagctgcggcaggcgcagtga

SEQ ID NO: 513 - DNA, 471 bp, Zea mays
  Peptide Sequence Number=SeqID_42292
atgaccagcagtcgacaaatggaactgcactacataaacactggatttccatacacaatcaccgagagtttcatggatttctttgagggtctcacttatgctcatgctgactttgctctcatggatggctttcaggatcagggtaatccgtactggacaatgatgcatacaaactcatacaagtatggatactctggttctgggaactattacagttatgctcatgcctatgacattgacgattacatgcatagaactgatggtgggcgcagaacatgggataacactacacctgtaaacaatgtggattctgccaatgttgtcctgcagggtggtgaagctccccgcacaactgcaaatactactagtgaggattgcttagatagtgaagaacttattttgtggatctcatatccgatgatgagcacagagtatggaataacactacacattctctcacctgggaattaa

SEQ ID NO: 514 - DNA, 315 bp, Zea mays
  Peptide Sequence Number=SeqID_42293
atggagcggacacagcgcggtgcgggatcaccaggaggaggggaacaatgcggcgaggactggctccggggtggcggcaccggggggcgtgggaactcgcaggagacgagggcgaggaatgggcgcgcggcacgaggcgagagcgcgaaccgcgacgttgtcagattgtacactggccgtgaagggcagaagcgtgctacggagatttgtgggacagattggcctgtggcagctgcagtgctgcgcggcagcacagcagtgcggtcgaagtcgaaccacttccgctgtgcaggcaagtccgtggattgggattga

SEQ ID NO: 515 - DNA, 309 bp, Zea mays
  Peptide Sequence Number=SeqID_42294
atggcgctgtgtggcagtgccagcctcgtcgtcccgtcccccgagcccgagcgagctagcgcgccgagtggccacctggcagaaaaagattcatgcgtggccgtggcgccggacgtgcaagggacggagatcctccaaccaggatgtgccacgcggcggcaccacgcgcgactggacgtcacggtcggtcggtcggtcgatccggacctgtcgggaggaagagtgtggagtggcgccgcgggaacaggaaaggcgttcctcgaccggttcgacaacgagcaactcatcgttccggcacaccacttgtaa

SEQ ID NO: 516 - DNA, 264 bp, Zea mays
  Peptide Sequence Number=SeqID_42295
atggtgcttgaccatgttgtggcaaccaatttgaccgtgatacagaagaatttgtgggatccagtgaagcagagggctctggttttcaatcgtccgatggaagcaggcgctgctacatggcaagttttgagggagcttgaggttttgctggaccagtctcggaggagatctgttggatcctattcctggaggagttcacagcatgccgccctggctgacaacatcaacattgagtcgagacctgagcctgagatccacctctga

SEQ ID NO: 517 - DNA, 492 bp, Zea mays
  Peptide Sequence Number=SeqID_42296
atggcccctcctgtgacgtggtcggtccgagccctgggtagggcgaggcggaggctcctccgaggtcgaggtcaaggccgagtccgagccctagggtcgggcgaggcggagttcgtcgtcttccggggccgaggccgagtccgagccctggggtcgggcgaggcggagttcgtcgtcttccggggccgaggccgagtccgagccctggggtcgggcgaggcggagtttcctatggcgcccgaggccggacttggctgctgtcggcctcactctgtcgagtggcacagcagtcggagcggcgcaggcggcgctgtcctcttgtcaggccggataagatgtcaggccatccttgcattaaatgctcctgcgatacggtcggtcgtcgtggcgatttggccaaggttgcttcttggcgaagactgggcctcgggcgagcctaagcccgggtgctcagtcgagttccaagttctcgggctggtgatagtcgcctag

SEQ ID NO: 518 - DNA, 345 bp, Zea mays
  Peptide Sequence Number=SeqID_42297
agcttcaaggagatctacgccacgctctgcgactgtagaatggaccccgacatagctgtcgagaggctcatatcccaggaaaatgaagttctggcaattgatcacataattaattcagctgccaaatcaaactacatgtctgctgggcagatatctgttcctattgtcttgaggggtccaaatggtgctgctgctggagttggtgcccaacactcacaggtgatcaacgatataaataaaggaccaaattgtgcatatgggatgttccactcttctgtcattactgctgcaaggaaggccttagtgtatgtcataccttcaattgcaatctcattgaattggtga

SEQ ID NO: 519 - DNA, 411 bp, Zea mays
  Peptide Sequence Number=SeqID_42298
atgtattttgtctttgaggccgagttcgtgatctgcccatatcttgctaggtggtgcaatttatttgatctgcgactgattggacgttcgatggacgtcccctggctagtcttcatgtcgcttctgtcaatcaggcttgccgtcgagcgctccgggctcgagggcttggatgagtcggagtactactcggacgaggaggactcttcagactcgtccgaggagggcggcggcggtgatggcggagacgacgacgacgacggaggcgacggtgatgacggcgacgacagcggcggtggcggtgacggcggcagcaagggcggcaacggcggcagcaagggcggcaacggcggcatcagcaggggcagcaacggcggcggcagcagcaaggacagcaacaaggccagtggctag

SEQ ID NO: 520 - DNA, 1608 bp, Zea mays
  Peptide Sequence Number=SeqID_42299
atggcaagccgcatcgcatcgttcccctccttcctcgcctttgtcgtcgtcaccgtcgccacgttattcccctcctcttcctcccagcagcagcccgccgccgccgtgccacagcccagagggttctatataagctgcgggtcggacaaggacgtgcaggtagggagcatcaagtgggccaaggatgagggcttcaccgccgtcgggaacgcctccgccatcaacaagccccacctcctccccctgctcgccgcgctgcgctacttcccggacgccaccgcgcggaagtactgctaccagttgcccgtcgtcaagggcacgcgctaccttgtccgcaccacctacttctacggcggcttcgacgggggcaaggaaccgcccgtgttcgaccagatcgtggacggcaccctgtggagcgccgtcaacaccacggacaactaccggcgcggcatgtccacctacttcgagatggtggcgcaggggcagggcaagaccatgagcgtgtgcctagcgcgccgccccgacacggcgtccagccccttcatctccgcgctcgaggtcatcgacctcgccgactccatgtacaacaccacggacttcagcaggttcaccatgaccaccgtggtgcgcagccgcttcggcagcaagggcgatatcgtcagctatccagatgacccgtacaaccggtactgggcgccgttcgcggacgccaaccccatggtggagagccactcctccatctcgcccgacgacttctggaaccagccgccggccaaggcgctcaaggccggaatcacaaccagccggggcaagaagctcgccgtgcagtggccgaccacggagctccccgcggcgacctactacgtggcgctctacttccaggacccgcgcacggcgagccccttcagctggcgcgtcttcgacgtcgcggtcaacggcaacgacttcttccgggggctcaacgcctccgcggccggcgtcatggtctactccagcatgatgcagctgtccgggaagacggagatcttgctcacgcccaacgagacgtcccccgtcggcccgctcatcaacgccggagagatctaccagatcgtcccgctcggcggcaggaccgccacaagagacgtggttgcaatggaagacctggcaagcagcctcaagaacctgcctccggactgggctggagacccttgtctaccacagcaacattcctggactggggttgaatgctcccagggatcacccgtgcgcgtcttgtcactctatctcagtggtaacaatctctcaggccccatacctgacttgagcagcatgcacgccctgactgcagtgcgccttgatagcaatcagttcagtggaacgatcaacccatcaatggaaaaactagccaatctcaaggagctacacctgaacaacaacaatctcacgggcaaaataccagatggtctgaaaaacaaagctggacttgatttgaggtgcaaagaacaactgaggggaacaaatttgaatgaggctgacaaggaggaaatcatgagtacgatgctgcacccatgcacacagttcaatgatgaagggagaggactgaagacttcaaaatttgtacgatga

SEQ ID NO: 521 - DNA, 759 bp, Zea mays
  Peptide Sequence Number=SeqID_42300
atggtggcggcggccgcggagacgcagtggatgtcgccgtacgaggtggcgcgggagcggaatgtggaggagaacaagcgcaagatggaggcgctcaacctgcgccacctctccgccgtcatcaaggaggctcccaagaccccttctcccatgaagccgaagaggcgcaggcccatcgaggacgcggtcgtggttccctcgcctcccaggaggtcccgccggcttgcgaatctccctgagctcaagtatgcagagatagcaccccacactgcagatcgaatgaccaggtctcctagaaaaccagcttgccgtatctacttcgcaaaccgcggatcaatttccatgaaagctaggttggaggcaacaagaaaggccgaggagctagaatcagaacttgatcatgaaatcccatcctttgtgaaggcaatgttgcattcacatgtggttcgaggtttctggctgcaactccccagccatttctgtgacacttacatgccaaagcaagactccattatcaccttggtggatgagaaggatgaagaattcgacaccaaataccttgcctacaagaaggggctaagcggcggatgggctggttttgcactatgccatgggatgcaggatggagattcagctgtttttcagttgattaagcccacgaccttcaagaatgttcagtgctcatccaacaatgcattcgtcttccaggtgtatatcatccgagcagcttctgatgatgtcagtgaggtagatgagtga

SEQ ID NO: 522 - DNA, 698 bp, Zea mays
  Peptide Sequence Number=SeqID_42301
atgccaagacaagtgaacctgcgccagagaccggaagcgaagaagagggaagctaacagtggtatcaaagaccatcgttcctcggatctggattctatccactacacccgccgcgccaaaaccctaggcgctatggatccccaactcaaactcgccttggaagcacagactcgctccttcatctccgaactcgacaaaaaattcgccgaccacgacgccaaatgggagtctcgcgttggtgaactggagaaggcggcggtgtctgctgccgaccagttctacgacctcaaggcggacatccataccgatgtcacggcgcagttggagttcttcgtctcttctgcgaccgaacaagcaaatcgggtcgccgcggccacgacgtcgcgcgtctcagcgctggaatccgccacagcggccttcgaggcgtggcgccccgccatggaatcgtcggtcgccgaggtcaaacgcggcgtcgccgctgtccaagccgccgtcgccaacatacctcaaccaggggaacgtcgtccgttggagccgccgcacctacaacccggcatcctcggcgaattcggatcgggccctgcgcgtccatctaccggtctgcggatcgacggccccgacgggcattgctccgaccatcatcgtcgggaggctggttttggacgcgtgtacgcgtccaccccacctcccgcccaatg

SEQ ID NO: 523 - DNA, 468 bp, Zea mays
  Peptide Sequence Number=SeqID_42302
atggccggcctggctgccacggccgtcggcctcgtcacccccggggcgcccgcgcacgacgccgtcatggagtacctcctgccggctgccgtcccgctgctgctcctcggcgccgacctccgccacgtcgtccgcaccaccggcgacctcctcaagacattcctgctcggatctggcctcacgccgtccgtccttgccgccgacgtcgcagcggacaacctcatctcggcgctctacttcatggcgctcttctcactggcgtcaaacatcccagcagagcccaagacggcgacggcgagtccgcagaaggacggcgagcggctgtcggtgctgaacggtggcgcggcgatcgctttgtccttcatcatctgcaaggccgcgcggctggggctccagggcggcacgctgccctgcatcacggcgctggccgtgttcctggcactgaggccaacagatcagccgttctga

SEQ ID NO: 524 - DNA, 591 bp, Zea mays
  Peptide Sequence Number=SeqID_42303
atggagcccgatgaagagattaggtccaagattgatgagtatgacatgcatcatgaagaccaaagaggacctatcttttctaacaagctggcactcgaaaatattcaatcaaaaagccctcttgattggtggtgtgcatatggtggacaggcatttgaactacaaagatttgtgatgcgtgtggttagcctttgtgcttcatcatcgggttgtgaatggatttggagtacatttgaatttaccttcgggaaagcaaaaagcgataaagagatcgcagatggatattgtgctgtagcactttcagatggtgtgcaggacaaggcggcggcggtgcagatctttctcccttttcttgcgggcggcaaaggagagagactgcgagccaaggaacaggccaacaaatatctgaggcccgatattttctcctgccccagccacgtggaaaagcgccgtcacgtaggcgtaaagctcccgtccagtccagggcccggtcggctcggctgccgatccttcttcaatccctcgcctgcaactggctctctgtccccttctgctccccccacggttccccagagcccgagccaaatctag

SEQ ID NO: 525 - DNA, 948 bp, Zea mays
  Peptide Sequence Number=SeqID_42304
atgggggccgagagcgaggaggccccttccccatcctctaaactcccctgcgattccagcattggtgcccgcatccccgccgtccgaagcatggcgctcttcgtctcctccctcgccgccgccctctcccacctctccctcccatcgacctccacccccaagcctcactcggcctcgttcctgcgcctgctccacctaccgccgcactgcttaattcagtggacggacgacacctgctgggcacccccactgtcagaggcgcagatgcgaactgctgtccgaagaataaggcctgaaacacaagatggctatcgcaagatggctatcgcccgcttcgttctccaggagggcaccgacaaggtcttcatcaacttccgcgacgctaagatggctgaagccgcggagtgcgaggatgagtgggacctgtttgccgatgcgaacgacgacgtagggatcgttggatcggaggtcacagaccgcgagggtgaagtgaggcttacttttgtggaaaatggatcctcaaaagttggagtcagatttgataaacagatccttggggccattgatcttggaggcagttgtgagcttgatcatggcctattctgttcagttgattctctatacctcgatggtccaggatgggaagatagagccaaacattcatttgatgttgtgtttgagtttgcctctgaagaaagtcaacaggtgcctgtaatcctatttctgaaggatgttgagaaaatatgtggaaataattacacctaccatggtctaaagaataagcttgaaagtttcccagctggagtttttattgttaggtcccagattcagacagatgctcggaaagataagtcaaacaatgggtctccttggctcaagttctcatacaaccaagcagcaatacttgaccttgcatttcaggtgcagttaatagttgattctacttag

SEQ ID NO: 526 - DNA, 342 bp, Zea mays
  Peptide Sequence Number=SeqID_42305
atgggccagcgacgacggaacctgtccgccgcggtgctcctcctcgtcctccacctgctgctacttttctccgcccccgggacgtgcacgccggcgagggggagaggcggggtggcgccgacgaagggggaggaggacggctactcctggttctgggccacggcggcgcgccgggcgctggtggggccggggtcgtcaccgcccacgtgccgcagcagctgccggggctgccacccctgccgccccgtccacgtcgccatccagcccggccggagcttcccgctcgagtactacccggaggcctggcgctgcaagtgcggcaacaagctcttcatgccctga

SEQ ID NO: 527 - DNA, 2235 bp, Zea mays
  Peptide Sequence Number=SeqID_42306
atggctgtgcaagcccattcaaggccacagaatgtttcgcggcaattatggcccgtgcttcaccatgccgtcagcgagtgctgcttgatcataatgctcgttacgactgctgtgttgtcatacatggccacaaggatagaaatatcacgtttgtcatattgccagagtcacaacaagcttgagcgctctgatgatatgtgtgataagtgcatgctttcttgcatgacctcaagtggcaagacctataacctgacaaacatgcatggtagggataagttcaagaagaaacgagattcacatatgctacctgacataacaaatagctggtttccaggtgacgatatgagcaaattaaaacaaagaaacatagtcatgtcaagtgttgggtattcttcaaatgacgactatgatcacttgccttatgaaggatatagaaaactaaagcttggccatgaatctgaatatgatattcacatctcaaatagtgataatgacgagagaaatgcagtatctcatgaagctagagaaagagccaatcacatgcctagtcatgatgcactgctgcaaccaatgatctctaatgccagcggcttgttgatgccttcttttgataatactattatgacaaaggccacacaaccactgaataatgtgagagatactgacactcactctagtgataccaaggatgcaaattctttggatcatgctattgggcttgttttggatgatatcagctggagtcaaatcaatacaagtgacaaaaatattgacgtacagtcgaaggctatccctgaagaagttttagcagagctcccaaaagagaaaaattttcttattggtactgaagaagttggtgattcttttgaggatatttcaggaagccctggtgttgaagctgcaaaggattttaatgcttctgcaaatgctggaacaagatcaagtgtagacactcatattagctggaacaacagcccaaaaattgcttctgcatgtagaggctattataaatctcctcgtttgtctgaaataatctcagcccgggacaccaattcaaaaacaaatgaagaagtcaagacatttctatcacaattgtctactgcacggggatttgatagctctttgaatgagatgacacctagaagtagcacacatattgatgactaccgacaacatgatgctactggtatgacaccatttcttgataggaacaactcaaatctagattcatttgatgccaacacaactagtgaagatgaaggtgaaagttctttggaacacttgaagaagcaggctaagtttaacaagaaaaaaatgggtatgctttataaggagctcgaggcagaacgaagtgcttcagcggtggcagtaagtgaagcaatggctatgatcaacaggttgcaagaggaaaaggcttcaatgcacatggaagcactgcagtatcttcggatgatggaagagcaggctgatcatgaccaggaagcaattgaaaagctaaatgacttgctaacagaaagggagaaagaattacttgacctagaagctgaacttgagggttaccggagcaagcttcatgatcaaccatttgatgttggaaaatttggtgctactgatggagctatggcattcagagtcttggtaggctcagatttcatgaggcataccatatttgattttgaagatgaaaaggcaaagattttggagtccttgcacagattggaggaaatcctaggcatgcccagcattgacatgggtgatgcaaatgattctctacagaacagtctactgagtgatcagtcaatgcacattagccaggatatagaaaattcagagttggaaagtttatcgttgcctcgagaggacatgattagtgaatcaatttcttcacagtgctatgatgagcaggaatctgttaaatacatgcataagcacatgcacaatcacgaacaagatgataatgaatccgttgataagcaacaaaagaatgtaacttcatgttcccactcagatgatggaaatattcatactatgaaaagtgttaaacatgaaatttctctccttaatgcaagattcaaggcacttgaagcagatcaggattttctcaagcaaatcctaagatctcttaatgttagcagtgatggagtagaatgtatccaggagataacaagccatttgcgagagctgcgaagaatcatggcagaccaaagggacatgacagtttttatgaggtcatga

SEQ ID NO: 528 - DNA, 258 bp, Zea mays
  Peptide Sequence Number=SeqID_42307
atgcaggtgaagtgtgcattgtgcccttttgttctactgctactgctagtgtcggcattggatgcgcttcctgctgccgagccatcattctcgcagaaatctgtgtcaggcaggacaggaccagcgctggagatgtttccctctgccaatccaaccggacctataattatcgaaggaactgtggctgtgagaaccgtagggccaagcatgtgttactccgtgaagagactggactcgtctcatatatttttcgtgtag

SEQ ID NO: 529 - DNA, 936 bp, Zea mays
  Peptide Sequence Number=SeqID_42308
atgccggcgttcccgccgggcagggggccggaggtgttccgggggcaggtgatgcactccctggactactgcaagctcggcgaggaggagaccgtggagctgatgagggggaagaaggtcgtggtcgtcgggtacaagaagagcgccatcgatctcgcacttgaatgcgcccaggccaaccaaggtgagggaggcgaggcttgcaccatgctggtgagaaccctgcactgggttgtgccgtcctactccatctggggcctgcccttcttcctcttctactccacccgcctggcgcagttcctgtacgagaggcccaaccagggccttctccgctccatgctctgcacactcatggcaccgctgagagcgggcgtgtccaagttcatcgagtcctacctggcgtggaagctcccgctcgacaagtacggcctccgcccggaccaccccttcgtggaggactacgctagctgccagatggccatcctccccgacggcttcttcgacatggcggaccgggacatgatccgcttcaagagggccggccccggcggctggtgcttctcccgcaacggcgtcctcctcgacgacggcaccgaggtggaggccgacctcgtcttcctcgccaccggcttcgagggcaaggacaaggtccgcgccgtcctgccggagccgttccgcggcctcgtcgtcgacaggtccggcatgatgccgctgtaccgcggcaccatccaccctctgatcccgaacatggcgttcgtggggtacgtggagagcgtgtccaacctgcacacgtcggagctgcgctgccgctggctggcgggcctgctcggcggccggttcgcgctgcccagcgtggaggacatgcatccacgacagcgacgccatgtgcgccgaccttggctccagggttctccgcaagggcaactgcctagctga

SEQ ID NO: 530 - DNA, 489 bp, Zea mays
  Peptide Sequence Number=SeqID_42309
atggcggcggcgtcgcggcaggatgcccaccggagcacgaggcaggccgtgccggcgtcgtcgagggtggcgatcatcggcggcggcatcagcggcctggccgcggcgaagcagctggcggcgcacgaccccgtggtgttcgaggcgacggcgtccgtcggcggggtgtggaagcactgcgtgtaccgctcgacccggctgcagacgccgcgccgggactacgagttctccgactactcgtggcgcaaccgcgacgaccccaccttccccacgcacgccgagatcgtggagtacctggagggctacgccgacgccttcggcctgtggcgctacatcgtgctcagcgccagggtggtcgacatcaagttcctcggcggcggcgggctcacggagctgtggagcggcggcgccgccggccagccgccgctcctccggggcaagcctctgtgggaggtcggcgtcgccaccgccggctccgacaccgttcag

SEQ ID NO: 531 - DNA, 347 bp, Zea mays
  Peptide Sequence Number=SeqID_42310
ccgcgacctgctggaggtgggtgggcactgggcacgcgctcaagaccaacatcaccacccgggggcccctggtgctgccgttctccgagcagttgctcttcttcgcgggcgtgctgttccgccacctgttcccgtccaaggcctcgaccccagcgccgacgaccgcgcccggggatgcctcggccgccgcgccctacatcccggacttcaagcgcgcgttcgagaacttctgcatgcacgcggccagcggcgacgtgctggagcacctgcagagcaaccttagcctgcgcaacgccgacctgaaggccttgcataaattttcattggaaaaagaaaaaaaaatctga

SEQ ID NO: 532 - DNA, 471 bp, Zea mays
  Peptide Sequence Number=SeqID_42311
atgtggttcttaatcgggccgtgtcttaataggctcaggcccgcttcaacatctgtacaagctagccaccctggcccgtcatgtcacccgctcgcctttcacgtgttgcaatgctttcccctcaccaccgggtgtctcgcgccggccgtagctatgggcctcatgccggctgctgctgcggcggcggaggcgaccgaggagaggagcacagtgctggagttcttcccgcagcaggctggcacgctgaaagacgagcagcaaaataaagccggcggcaaggtggtggtcatggacaacttccccgccgacaaggccgatgagctcatgcagctcaccggctccggcaacgccgcgctcgccgccgcccagagcgcgctgggacagcccagcctcaaaggtaggaacgaactggacgcgcgcgtatgcctacgctgtcctccatcagagttcacagggacgatagatatataa

SEQ ID NO: 533 - DNA, 1281 bp, Zea mays
  Peptide Sequence Number=SeqID_42312
atggcgacggagaggaggcgcgcgtcagtcgtggtactgggcgacatcggccgcagcccgcggatgcaataccactccctctcgctcgctaaccaggccagtatggaagtggacattgttgcaaatggaggaagtgatcctcacttgtcactgagagagaatccatcaattcacatccacgagatgaaaacagtgcagttaactggaatttcaaagatatctggtgctctgtcacttctacttaaagctgctgtccagttcattttgctggtttggtttctttgttttaagattcctcgccctgatgtcttttttgttcagaatccaccctctgttccaacactggctgctgtaaaactggcaagctggctgagaggtgctaaatttattgttgattggcataactttggatatacattgctggggttgtcgcatggcagaagtcacattattgtcaaaatctatttctggtttgagaagtactttgggcagatggctgatggtgccttttgtgttacaaaagcaatgcagcatgagcttgctcaaaattggggaatcagggcgacagttctttatgatcaatctcctgatttttttcaccctgcttcattgatggagaaacatggggtgagcatctattttgagtttttatttcctccttcctgtaccacatgtgaccttaagacacaggaagtaggggaagacatgaacactactgcctttaccagtaagattgatggccaagttttcttgaagcctaacaggccagcacttgttgtgagcagcacaagctggtctgctcttttgaaccttgcagtcattgatatagccttctttatgttcattgcatgtgattatcgagtggatagttcaaatatgagaaagacgccagatgaagatttcagcatacttttggaagcagcactaatgtacgacagacgcgtcgctgcagctttaggtgaagatgattcaatggatgaggggcaactttggattgatatcaagaacgggaagcagtttgtctacccaagattactgttcattattacaggtaaaggacctgataggaagaaatatgaggatcaaataaaaaggttgaagttgagacgtgttgccttgcggacaatgtggcttgcatcagaggactaccctttattgctcgggtcagctgatctaggagtgtcgttgcatacatcttcgtcagggctggacctaccaatgaaggtggttgatatgtttggatgcggattgcctgtttgtgctgcttcattctcctggtag

SEQ ID NO: 534 - DNA, 3741 bp, Zea mays
  Peptide Sequence Number=SeqID_42313
atggcaactccatccgatccagaatataataagcaccatgcattgtctgcaaagaaacatataatcagcatcactatgatgatgctcatcttccacatgctcgccttctccctaatttgcctcgccaaaaacgcagcccatggagatgcatcagcacacgccctccactcctccgacgagctcgcgctcatgtcgttcaagtccctcgtggggagcgaccatacgagagccctagcctcgtggggcaacatgtccattcccatgtgccggtggcgcggcgtggcgtgcggcttgaggggacatcgccggggccatgtggtggcactggacctccccgagctcaacttgcttggcaccatcacccccgcgctaggaaacctcacttacctgaggcggctcgacctttcatctaatggcttccatggaatcctgcctccggagctcggtaacatccatgacctagagactctacagcttcaccacaactccatatctggccagatcccaccgtcgctttcaaactgtagccacctgatagagatcatgctcgacgacaacagtttgcatgggggagtacccagcgagataggctccctgcaatacctgcagctactcagtctcgggggaaaaagactgacgtggagaatcccttccactatagcaggccttgtaaatctgaaggaactagtcctgcgatttaacagcatgaccggagaaatcccaagagagataggcagccttgccaacctcaacttgctggacctaggtgcaaatcacttctcagggacgatccccagctcactaggaaacctgtcagcgttgacggttctttacgccttccaaaacagttttcaaggaagcattctaccactgcaacgcctctcgtcgcttagtgtgcttgaattcggggcaaacaaactccaagggaccatcccttcttggttaggcaacctctcttcattagtactcctagatctcgaagaaaatgctctagttggtcagatcccagaatcgttaggaaaccttgagctgctacaatacctttctgtgccaggaaataatctctcaggttccatacccagttcgcttggcaacctctactccctcactctactcgaaatgtcgtacaatgaactagaaggccccttgccccctctattgttcaacaatctttcctctctctggggtctggatatagaatacaacaacctgaatgggactcttccacctaacattggaagcagccttccgaatctgaactatttccatgtgtcagacaatgaactccaaggcgtgctcccgcggtccctttgcaacgcctccatgcttcagtctattatgacagtagaaaacttcctgtcggggacaattccaggatgcttaggagctcagcagacgagcctgtctgaagtgtcaatcgcagcaaaccagtttgaagcaacaaatgacgctgattggagcttcgtggctagtctgaccaactgtagcaacttgaccgtgttagatgtcagttcaaataatctccatggcgtgctgccaaattcgatcggtaacctctcgacacagatggcgtatctcagcaccgcatacaacaatataactggaacaataacagaagggatcggtaatctcatcaacctgcaagcactttacatgcctcacaacattctcataggctcgattccagcatctctcggcaacctgaataagctgtctcaattatatctgtacaataatgctttgtgtggacccttgccagtgactctaggcaatcttacacagcttactagacttctcctcggtacaaatggtatcagtggacctataccatctagtctcagccattgccctttagaaacattggatctttctcacaacaatctttctggcccggcacctaaagaactcttttccatatcaaccttgtcgagtttcgttaacatttcacacaattccttatctgggtctttgccatcacaagttggaagcctagaaaatctggacgggcttgatttatcttataacatgatatctggtgagattccaccctccatcggtgggtgtcaaagcctagaatttctcaatttgtcaggaaacaaccttcaggccacgattccaccgtcgctaggaaatctgaagggcatcgcacggcttgatctttctcacaataatttgtcggggactattcctgagacccttgccggactaaatggcctttctgtattgaatctggcattcaataaactccaaggtggagttccaagtgatggggtgtttctcaatgtagcagtgatcttaatcaccgggaatgatggtctttgtggtgggattcctcaactgggattgccaccttgccccacacagaccaccaagaaaccacatcatcgaaaacttgtcataatgacagtctccatatgcagtgcacttgcctgtgtcacactagtatttgcattgcttgcacttcaacaaaggagccgccacaggacaaaatcacacctacaaaagtcgggcttgagcgagcaatatgtgagggtttcatatgccgaattggtcaatgcgacaaatggttttgcacccgagaatctggtaggagctgggagctttggatcagtttacaaagcaacaatgagaagcaacgaccagcaaatagtggtcgctgttaaggttctcaacctaatgcagcgtggtgcatctcaaagttttgttgcagaatgcgagacattaagatgtgctcggcatcggaaccttgtaaagatattgactatctgttcaagcattgattttcagggccatgacttcaaggccctcgtgtatgagtttctaccaaatggaaatttggaccaatggctgcacagacatatcactgaagacgatgaacagaagacactggatctgaatgcaagattaaatgttggaattgacgtggcatcctcacttgattacctccaccaacataagccaacgccaataatccactgtgatcttaagccaagtaatgttctcctggacagttccatggttgctcgagtgggtgattttgggcttgcaaggtttctacatcaagatgtaggcacatcaagtggatgggcatcaatgagaggatccattggatatgcagctccagagtatggactgggcaatgaagtatccacccacggtgatgtctacagctatggcatactattgctagaaatgtttactgggaaaaggccaaccgacaacgaatttggtggagccatggggctccgcaactatgttctaatggcactatcaggcagagccctaaatcagagcttcttgctgacagcgagcagaaataatagtgatattgataaagcagaatatgcagcagagaggatattccaactggaacacaacaacacaggctgttatgttgttctgtcttccatgtatgctgatgccgggagaggggaggatgtggggaggataagatctccgataaaggagaaggggctccgaaagacagaggcaaggagccttgtcgatcttaatgcagtacttcccgataagcattgtgtaaggctggctgcttcctttggtctgatatcatctgaggctcggaccactgttcttgtccagaagaatgtgtgtttatgcaaccaaagccatcatgcacagaagttgatatcaaaatatttgagacagacaattgtagttggtgacacgaagatataccgcatattttcagatggctctggttgctgtggtgattactggtga

SEQ ID NO: 535 - DNA, 309 bp, Zea mays
  Peptide Sequence Number=SeqID_42314
atgtccgcctctaatctgtatgactgctataaagtaagggattggtcctggtgtgtgcatgatgttattcttggtagccaaagacagcctgtagtgttgaactctcatgcctgtgaatgcaaaagttcagttctaggggttgatgatgacagtgacctagaactggagcttgaacccgatcccaacctgaccaaggaaactttatgtgaggcctctgcattagccaaggaaagagaggcacctgcttgtgtagcatttgctctgccatttttcaacaccttattttaccatgatcaaagaatacagtag

SEQ ID NO: 536 - DNA, 948 bp, Zea mays
  Peptide Sequence Number=SeqID_42315
atggactacttcagcacctgctggggcccgcggtctcgtgcggggcaccggggcaagggctccgacgccgccggccggcaggacggcctcctctggtacaaggacgccgggcagctcgtcaccggggggttctccatggccgtggtgcaggccaaccagctgcttgaggaccagagccaggtggagtccggatcgctctccctggctgactacggcccgcagggcaccttcgtcggcgtctatgatggccatggcggcccggagacgtcccggttcatcaatgaccacctcttcaaccatctcaggagatttgcaactgagcacaagtccatgtcagcagacgtgatccggaaagctttccaagaaactgaggagggctttctttctctagtcatcaaggaatggtctttcaagcctcagattgcatcagttggctcctgttgccttgttggtgtaatctgtgctgggactctctatgttgcaaacctgggcgactcgcgtgcagttcttggaaggcttgtgaaagcaactggagaggttctggccactcagttgtcagcggagcacaatgcatgctatgaagaagttagacaagagctgcagtcatcacatcctgatgatccacgtattgtggttctcaaacataacgtttggcgagtgaagggtctcatccagggaatcgctcggagactagtgaaagccgcgatgcaagaagctgccaagaagagggagatgagatactcagacctcaagaagatcgaccgtggcgtgaggaggcatttccacgacgatataaccgtcgtcgtggtgttcctcgactcggatgccatgagcaaagctagctggagcaagagcccctcggtttctctccgagggggcggcgtcacccttcccgccaagtccctcgcacccttctcggctccggcacagttgaacggcacccactga

SEQ ID NO: 537 - DNA, 831 bp, Zea mays
  Peptide Sequence Number=SeqID_42316
atggccacggcgacgaccctctctttcagcggcggcggcggcggcactaccctgctccgcgggcacgtggccttgacgtcggggcggtgctgcacgttcccgagctcgcggtggaggccgccgcgcttgtcggcctcccgcgcggatgactcctcgccggctccgttcgagatgacggtggaggacgcgctgaagctgctcggcgtcgcagagggcgcgtcgttcgacgaaatcctgcgcgccaagaacgccgtcctcgcctcctgcaaggacgaccaggacgccgtcgcccaggtcgaagcagcctatgacatgttgcttatgcagagcttatcacagcggagggctggaaaggttgctaataaccgcatccgctttgctgatgttaaacctgtaaagagtgcaggagctgggacagtcccacagtggatgcaggcaaccatgaagaatgcacccattacatttgagactccatcttcgagcagcttgggcatccagtcatgtgtttatggtgcactaatggttttcacctatgctagtggaagctcgacatctttgccgtctgcgtacagtagccctgatgtgccaggtaaggcggcattggtcactgtcgggggacttgcagctggtgcgactgtcggatctgcactggagaatttcctgcaggttgatctcgtgccctttctaggcatccactcccctgccgtcgttgtcagcgaatttattctcttctcccaattgctgggtcagggaaatgcttgttttccgcacaaggtggaagcagcagctgtgtatagcaaaacaatacgtgggcatctctgtcccttataa

SEQ ID NO: 538 - DNA, 738 bp, Zea mays
  Peptide Sequence Number=SeqID_42317
atgaggttcggcgcctggaagatcaagttctatgggctcgagctcaaccacatcgctcggcgctacaacgagactgcggacgagctggctaaaatagcctcggggcgaacaatggttcctccggacgtcttctcccgaggtctgcgtcagccctccgtcaagatcgacgacatgcccgagcctgaggcaccctcggcccagcccgagaaggcacccgggggctacacgcacctgttggtcgccatcgacaaattctccaagtggatcgaggtccaacccctaaacaacatcaggtccgagcaggcggtggtgttcttcaccaacatcatccatcgcttcggggtcccgaactccatcatcaccgacaacggcacccagttcaccggcggaaagttcctggacttctgcgaggatcaccacatccgggtggactgggccgccgtggctcatcccatgacgaatgggcaagtagaacgtgccaacggcatgattctacaagggctcaagcctcagatctacaacgacctcaacaagttcggcaagcgatggatgaaggaactcccctcggtggtctggagcctgaggacaacaccgagccgagccacgggcttcacgccgttctttttagtctacggggccgaggccgtcctacccacagacctggaatacggctccccgaggacaagggcctatgccgaccagagcaaccaagctagtcgagaagactcgctggactag

SEQ ID NO: 539 - DNA, 141 bp, Zea mays
  Peptide Sequence Number=SeqID_42318
atggtcactagtggaatcaagagtgctgagaaatcgcggatacccgtcccggcagaacgaccactaacaagaatgaagaaacaagaaatcaacatgactatctgccagacaccggacaaagggttcgaccgatgctcctag

SEQ ID NO: 540 - DNA, 306 bp, Zea mays
  Peptide Sequence Number=SeqID_42319
atgaaagctaatatattgcctgttcccaacagattacaaacaccacaattgcaaggcctcatccaggagcaaaatcccccaatcgatctctgtggtcttcacatcagcgaggcaatacacgtcctgaactacgagctcaacaaccgaagaaagatcgtgagatcaaccggtcgccgactccaggttatgataatatcaagcgcccgcaccccagcaaggctgactgccgccgtcgagcagtatctcatggaacacggccttctgtacacgcaggtgcaaccaggcctgctccgcatcctgctctag

SEQ ID NO: 541 - DNA, 540 bp, Zea mays
  Peptide Sequence Number=SeqID_42320
atgagccgcggcacgggcgcgggttatgaccgccacatcaccattttctcccctgagggacgcctgtaccaagtcgagtacgcgttcaaggcggtgaagtcggcgggtgtcacgtcgatcggcgtccgcggcgcggactccgtctgcgtcgtcacccagaagaaagtcccggacaagttgctggatcagacgagcgtgacacacttgttcccgatcaccaagtacgtcggattgcttgccactggcctcacagctgatgcaaggtcattggtttcccaagcaaggaacgaagcagctgagtttcgtttcaaatggggctatgagatgccagttgatgtgttagcaaaatggattgctgacaaagctcaagtttacacgcaacatgcatacatgagaccccttggagtagttgctatggtcttgggctacgacgaagagaaaaatgcacaactattcaaatgcgaccctgcgggtcacttctttggacataaggcacaaagctctacgtgtttacaatgttataccactgcacaaggctag

SEQ ID NO: 542 - DNA, 405 bp, Zea mays
  Peptide Sequence Number=SeqID_42321
atggctgacttactgatgcatgttcatgtaaggaagcagaagcatcagatgagtctgaatcattgggtaccgatgcaggatcatgtgaggaccaattcaaatcagcataaaaggaagtttgaaattgaagaaatagaggaagggattaacgacgtggacggagatgtcgcgctatggctggctcgccagcatcgcctcgtgatgggtcacacccacactggtggcacctggattgctgtaaaacacatcaaaaagtgtcataaatttggcgtaaaacgcaaaacactcgatactacaaaccatataggcactgcatttgcttcactttttgaagctaggaactggagtctggaacatgagggccacagatcaataatgagagtaaatgaggggcccaagtcttga

SEQ ID NO: 543 - DNA, 393 bp, Zea mays
  Peptide Sequence Number=SeqID_42322
atgtccgcggcggcgacggcgggcgggcaggaggtggcgccggccaccgtggccgtggccgaggcggaggagtgggaggtgtgcgcgtgctgcgggctccgggaggagtgcacgccggcgtacgcggccggggtgcgcgcgcggtacggcgggcgctggctgtgcgggctctgcggcgacgccgtgggcgacgaggtcgcagccggagccgggtcggcgctggaggtcgaggcggcgatcgcggggcacgccgccttctgccgcgcgctcggcgggcgccggacgccggacgcggccgagcggctcatcgcggcggtgcggcggctcctccgcaacgcgggcggcagggaggacaagtccctggtgctggtggagttccaggaggcctcttga

SEQ ID NO: 544 - DNA, 348 bp, Zea mays
  Peptide Sequence Number=SeqID_42323
atggagaaggaggtggtggacagggcagcgttgctgcgattggtcgagttggtcgctctgcggcttataaagatttataaaagtcattggcggcttgcgctaccatcaccattgatgatcaaagctcgtaatgggggttacaagcgggcaagagagggaggagaggctctcaagtctcttatcgaggtggaagtggagctaaggccgagggaagggtcggccagcggtggcttccccaggaaggggccatcgagcaaagggtcgcctggttctctcgtattcttgatggtggacaacgtgagcagtgtggggcccgagcgccatcatttgggctatgccaacctctag

SEQ ID NO: 545 - DNA, 640 bp, Zea mays
  Peptide Sequence Number=SeqID_42324
atggccgagctccaagacgaccaccgccccgagctcattggcctgggaaagatggctgcagaagatagtttatcatctctggtctccagtgaggacgagccagatttggatcccgtgcattccaaagagactcagcttaatccaggatcggtttctgcttctacggtgtcatatcgcagacaaacatcaaaagagagagctattgggttggctcctgaatttgctttctttaaagcagataaagatgagcatagtgaagatgatgatgaagagccttgtcctgactctcaggactggccaggctcattcgtaactgctgtaaggatgtatgaagcaatagaagctaagttgagagctcgagagttgaattcttcaaagctgaacaaatctgcaaaacggcatctcagtgagtgttcatggctgagtgaggatgactttgagaaaacttttgggaaatgcagcattgaaagcttgcaggatctacatcttgatagggatgaaagtgtcaagcaggtggtcgatgtccctagcgtggatgatggtagcacagagtccaatctcctagaggtaggggaacacagcagtgcagccccgcgggagtacagtggtgtctgggaagcgccagaagccgaggtagagg

SEQ ID NO: 546 - DNA, 423 bp, Zea mays
  Peptide Sequence Number=SeqID_42325
atggcgcatccttggccgttgatcgtagatcctgtggccatgagggcttatctgtttggaattaggagtgatctaatcctgaccatcgagattggatcacacgactccagcgcccgtaccccttcggtcgtgccaatttgcaaaagagtcccttgggtcccttcagccccactaggcctttgctaccgcgcaacccatgtaactaaacccggtgctgacatgtgggtcccgttggtcagctctctcatcacttgcacgcggtctctggccagtggcccccactggtcggactcttcttccaccctggagttgcacggacatgaaaactgcctcgccgaagtcgtcaggtggttgaaacgatccagctcggactcccttgttcccatgcataaaaccaacgcgcgaccaccgggtctcacctag

SEQ ID NO: 547 - DNA, 255 bp, Zea mays
  Peptide Sequence Number=SeqID_42326
atggcgatggcgatgggcgtaccaccgcctgcccacctggtcggatggcgacggctgggcggccgcacgcgcatccgcatccatcgaccatcgcgcaggggctctttttcatgtagctgtactttcatcgactcccacaccatgaggcctcatcggtcagcactgtccctggttgatctgttgtacagattatttggtccacatgatccacataaggcttctcaaactgtacgcacagacagggtgacagattaa

SEQ ID NO: 548 - DNA, 363 bp, Zea mays
  Peptide Sequence Number=SeqID_42327
atggcgccctgtcgcccagcagccggtccagcccgacggcatggccctagcgcggcgctcgtccgcccctccccggcgcgtaccctgggggcgtggctaggtgcggtggcgcggcggtcggccgattggccaaaccccccacccccacgcgagttcgtgccctgcccggtggtgacgacccaagaggaagagagcctatttccgaaaaagcccctatctttttctgtgcatgctccgattcctaccggtgatggctgggatcaaactgtggcccctgttcctgtggatggcactgttcctccagtggtcgctcctactggttgggaatcagcagcccagcccactgcccaaggctgggagtag

SEQ ID NO: 549 - DNA, 748 bp, Zea mays
  Peptide Sequence Number=SeqID_42328
atggactctcttcctttcgagcttctcttgtcgctggcgtcaaacccctccttgcaaggcccgacgcaggcccccgcccgactggatctgcccccgtcgcccttccccttcatcgcctttgttggatccatcgttgccacagcttttccatccggattcaccgttcttgcaaccttcccggctagatccgccgtccttttggccgaatcgttgtcttcatggttggattcgtcgctatcgtggccttcccggccggatccgtcaacccccttctattctgtcgcgagcgcggccaccctgaccagtgcgggcgtggccaccctggcagtgctcctcgaccaccaggcacagaaagaaataataaggctacagccagtagccgcccgctacgtcggaagcgtgaatgatgaaggcagaacacatagccgcagaggaggggtggaaggagaaccaccgccggtctcatctcagacatataacttggatgcaaatctcagccttcttcgcttgtaccagtttgagcccgaaaggatgagcatacagattgtggcccacatactgattaaggctctcatggcaatgccagcccctgacttcagtttgtgcttattcttaatccctgaacatgtgcaaatgggggagcaattcaaggcattgatagttctttctcactacctagagactgctaggttcagtcaattttgggatgaagcagcaaataaccgccacatattggaagcagtgccag

SEQ ID NO: 550 - DNA, 489 bp, Zea mays
  Peptide Sequence Number=SeqID_42329
atggcggccccaggaggcagtgacacgttggatctagggagcacgagggaggagatgagcagggggctggaggctgcgtcgccaatcaaggagtctgctctagggaacatcccgaccattgccttctgcgacactgactctccgatgcggtatgtcgatatcggcatccctgccaacaacaaggggaggaacaacattggatgcctgttctggcttttggccaggatggttctgcagatgaggggcactatcctctctgggcacaagtgggaagtcatggttgatctgttcttctacagagacccagaggaagcaaaggagcaggaggaggaagctgttgcggcccctgagtttgctacagtaactgattaccaaggagatgatcagtggggtggtgaccagtggacctcggatgtggctgcatgtaaaggagaagaagtcgaggcatatctccaggagttccatgacttcgacgagttcgaggattag

SEQ ID NO: 551 - DNA, 240 bp, Zea mays
  Peptide Sequence Number=SeqID_42330
atggcgcactgtcgcccaggagccggtccagcccgacggcatggccctagcgcggcgctcgtccgcccctccctggcgcgtaccctgggggcacggctaggtgcggtggcgcgctggtcggccgattggccaaaccccccacccccacgcgagttcgtgccctgcccggtggtgacgatccaaggaggaagagagcctatttccgaaaaagcccctatctttttctgtgcatgttactaa

SEQ ID NO: 552 - DNA, 165 bp, Zea mays
  Peptide Sequence Number=SeqID_42331
atgagtcacttatgtgaggggtatggacctccggttcctaccggtgatggctgggatcaaactgtggccctgttcctgtggatggcactgttcctccagtggtcgctcctactggttgggaatcagcagcctagcccactgcccactacccaaggttgggagtag

SEQ ID NO: 553 - DNA, 858 bp, Zea mays
  Peptide Sequence Number=SeqID_42332
atgcggtgcagcagctggcagctgacaaacgactccatcgggagcttaactccctggcgcgacgcgacacagacgcagggtctgcgcgatctggagtccacgtcgacgagctgcgagccaactccaactcctgctagttccgaagaggaggaagaaaaagagagggaacacgtgttacaaaccgcgcgcacgataaccacccgaaacgggaagccccacccgcgcccgcgcgcgcttccaacaatcacacaccaggccaccaccaccaccaaccagggtccagactccagagacaatccagccatgccgcctccgtccaccgccgcggcagtctcctccattatccgcccgacgccgcctccggccgtatccttccaccccgtacccctcccgcagatcaggcggcgctcatcagctggcgccgcagccgcttcccggctcgccgtggcgcgcgccgccgcctcgggggcgcgcggcggcggcgacgccgagacggtgttcttcgacggcggcgcgcactacggcgacctggcggcgaacctgctcctggggctgaccctgctgtggctgccgctgacgctggcggccgtgtcccgcgcgttcatcctgcggtaccgcttcacctcccggcgcgtgacggtggtctcggggctctccggcgccgaccgcaccgacttcccctactcgtccgtcacgtccgtggtggtcgtgccgcggttcgtgggcgagtggggcgacatcgtcatcacgctcagggacggcaccaaggtcgacctcaggagcgtgcccaggttccgcgaggtcgccgactactgccgctccatggccgccgctgagggctccctcgtcgtcagctag

SEQ ID NO: 554 - DNA, 1272 bp, Zea mays
  Peptide Sequence Number=SeqID_42333
atggcatcctcctcttccttggcctccgccaaagccctagcacgctcccacgcgtccctcctcgcgccccaaacccagagaacaggattctctcgcccggtccctcagtccggtccgtgtctcgcggctccgtgcgaccgtgccgggcaattcaagctgctccccttcgacgatccgtcttccgccgtcactctgccgatggcttctgcacttcagcgccttggtcgcgccagcgccgtcgcgctcgcgccgcgcctccgtcaggatgcgcgcctctgctgccgcgccggcggagccgaagaagaccgtctgggtgtggaccgagagccggcagcaaccgctcgcataaatgctctcttcattgacggtccagggattttcgatgaggagaaccagaaggttgctgtaatttcacaagtctcttcgcccggtgaacttgaccttgtacaaccggacaacgccgaagccgagaacattgtcatagactttcgaggtggctggcaggttatacgggcagaaaatatagttgctgcattccaaggatgtaaaggaaatgtattggctgtatcaacgaacacaactgaggcgcaagtttttcttgaggccttggagcaagggcttgatggagttgtacttaaagtagatgacatggatgatatcattaagctcaaggattattttgatcgaaggaacgaggcaaagagtcaattaccattgacaaaggctactgtaacaaaggtcgaggttgttggtatgggtgatcgtgtttgtgtggatctttgcagtatcatgcgacctggcgaaggccttctggttggatcgtatgccagaggaatgtttcttgttcattctgaatgcttggagactaattacattgcaagcaggcctttcagagtcaatgcggggcctgtacatgcatatgtcaccgttcctggtggcaagacaagctacctctcagagttggggtcaggaaaggaagtcatcgtgatcaatcagagtgggctatggcgtactgcaattgtcggtcgtgtgaagatcgaatcaaggcctctgatccttgtagaagcgaaggataactctggagacgagacgtatagcatttttctacaaaacgcagaaacagttgcacttattacccctaacacaggatcaagtggaaggaccgccattcccgtgacttcgctgaaagtcggtgatgaagttctggtgaggaaacagggcgccgcccgtcacactgggatagagattcaggagtttattgttgagagatga

SEQ ID NO: 555 - DNA, 1341 bp, Zea mays
  Peptide Sequence Number=SeqID_42334
atggtgaggtcgaggcctagggtttggctagtggcgggctgcgccgccgtcctgctgtgggcctccgtcgcgcagctcgtcgccgtcggccgccttctcctcctttttggcctcgcgggcgacgcggtttcatcgccgccacctactgcgcttccgcccccgagaatatacaagagcaatggttatctgaagatatcttgtaatgggggtctgaatcagatgcgctcagagatatgtgacatggtagcagttgctcgccttctaaacctcactatggttgtcccagaacttgacaagagatcattctgggctgatcaaagtaattttggggacatatttgacgtgaagcattttattgactcattgagagatgaggtccacatcattgaacagcttccggagaagcttggtccaagagattcagacattattatacttgaaatgtcacctatcttaccactgttcagcaaatacagtgtcatccattttaacaaaacagatgctcgcttagccaataatggtatcagtacagagattcaactgcttagatgccgtgttaattttcatgccctgaaattcacacctcaaattgagggattagggaatgaactggtacataaactgcgagccaagggatcatttgtagccttgcatttacgttatgagatggatatgctggcgttttctggttgcaaccatggcctttcacctgaagaagctgaggagctcaaaaaaatgagatatgcttatccatggtggagagataaagaaattgattcccaagccaagaggttgcaaggactatgcccacttactcccgaggaggcatcacttgttttgaaagctcttggatttcaaaaggatgctcttatatacatcgcagctggggaaatttatgggggagataggagactagagccactacgggctgcttttccaaaccttgtacgaaaggtgatgctgctaaactctgaagttctgcgtcaattccaaaatcactcttcccagatggctgcacttgatttcattgtatccacagctagtgatgttttcattcccactttcgatggtaacatggcaaaacttgttgaaggtcaccgaaggttcctgggtttccggagaagtgtggtgctagaccgacggaaattagttgaacttctagacctgtacaccaacaagacaatgtcttgggacaattttgcatcttctgttcaggaagcacataagaactgtgtagctcagccatcctgcaggcgagaacttaaaaacagaccaaaagaagaggattacttctatgctaacccccacgaatgcctagccaattcaaccttgtgcagctaa

SEQ ID NO: 556 - DNA, 387 bp, Zea mays
  Peptide Sequence Number=SeqID_42335
atggacgaggctgcgaagattacgaggggctggtgcagcggtggccgctgcgggcctgcggcgtgcctagggagggggttgaaggcacataggcagcgccagcgccggccgcttggagcgctggagtggacgagcaggagctggtccggccgtccgcccaagagagaaggcgagggcagagcagggctagggtgccgccgccgcgaccttgacctggagtcccgccaccgcggcggcggcctggagagggtctcggcggggcggatacggcgtggggaggcgcgacagcgcgatggccagcaggatgactatggccaagctcttgctacaaatggtgaagctgctgcagctgcaagtgatgaggatgtgggtgtcataatgagatag

SEQ ID NO: 557 - DNA, 1593 bp, Zea mays
  Peptide Sequence Number=SeqID_42336
atggagttggaggggccgtgggcgcgggtgctgcacctgcacgatgcgtgcgagtggggccgggcggtgcgggcgcgcgcggtggcgccggcgctggaggccgcggcgtgggcgtgcctcgccatgtcggtcatgctcgtgctcgaggtgtgctacatgagcgtctccagcttcgtcgccgtcaacctgctgcgccggaccccacagcggcggtacagctgggagcccatgccctccgggaccgcccggggggacgatgaggaggcagcggtgggcgatggaggcggcgaggcgtacccgatggtactcgtgcagatccccatgtacaacgagagggagtttgtacattgtgtggggcccgcagtcctagcatcccaaaatgcagatcagactgtcttcgtcgtttacagttcagcaatgtcacaggtctacaagatctctattggagcggcatgtgccctcacatggccgcccgaccgtattataatccaagtattggatgattccaccgacccattcattaaggaacttgtggagtttgaatgcaaggattgggccagcaagaaaatcaacataaaatatgaaattcgggaaagtaggaagggatacaaagcaggagccctgaagaagggcatggaacatagttacgcccaagaatgtgattttgttgccatctttgatgcagattttcaacctgatcctgacttccttttaagaactataccatttcttgtgcataacccgaagattgctctagtacagacacgttgggagtttgtgaactacaatatttgcctactgacaaggatacagaagatgtcactagattatcattttaaggtagagcaggaatcagggtcatctgtgcatgccttctttggtttcaacggtacggctggcgtgtggcgggtatcagctatcggtgaagcaggaggatggaaggatcgcaccactgtggaagacatggacttggctgtgcgggcaagcctcaagggatggcagttcctgtatgttggtgatataaggggggcgactgtatggaagaagcttcaccttctgtacagcttcttcttcgtccgaagggtcatcgctcccatcctaacgttcctgttctactgcgtcgtgatcccactgtctgtcatggtccccgaagtcagcatccctgcctggggaatgttctacattcccactgccatcaccatcatgacagccatcaggaatccttggtctatccatctggtgccaatatggatcctgttcgagaacgtcatgtccatgcaccgaatgcgcgcggcgctgacggggctgctggagaccacgtacgtggacgagtgggtggtcaccgagaaggtgggcgatcatgtgaaggacaagctcgaggtccctctccttacaccggtgaagccaaccgagtgcgtcgagaggatctacttgcctgagctcctggtcgcgttctacctgttgctatgcgcgtcgtacgatgtcgtgctcggagccgggcactactacccgtacatcttcctccaggccttcgctttcctcgtgctggggtttggcttcgccggcaccgtgacgccctgctcttgttcataa

SEQ ID NO: 558 - DNA, 303 bp, Zea mays
  Peptide Sequence Number=SeqID_42337
atggagacgacgaggtcgtacggctggcaggtcgtcgttactcgtgaagcaccctttgcagagtgcatacacagcttcgccggggatcgtgcaggcaagaaaattgaccatcgtaaggtggacagagatgaagtcatgatacttaaagggcctatatccgatgcaaagagaattgcacttactaagttgaaggagtccggtggtcacaagaagcggggaaaagtgggagatgatgacgaagaggtggaaaatcattctcattctaaaagaccgaaatccttcaagaaatcaaacagacgatga

SEQ ID NO: 559 - DNA, 726 bp, Zea mays
  Peptide Sequence Number=SeqID_42338
atggggtgggcaaactggccagcacgtgcgccattccagctgggcgagattgggcctccgcgtgcacagcaaacgcctctcgacgatcgggcggcccccagcgagtggtatgcgcccgagccgaagggcgaaggttcatctgccgctgccagcgtcagccgtcagaggtcaaatatcgtatcggccgtgcacggtgcacctgtgccgaaggaggcgcaggcgcaggcgcagcagccggccagcgacagcgagtcggccggccggctccttgcaagcagtgcagtgctagtaagaaaacaagtcaatcccgaagcgcgcgcccttgttttccttgcacgcacgcacgagaaagagaaagaaaaaggagctgaaaaggtctcgacgagtggtggtgtggactctgaagcacggcgccaggtcattaatggcgggcacatgaggaagcaggcgctgctggacacaacacacatggacatgggtgacacacgcacgtacagtactgaactgtacgccgaatcacacaggcagcgatcggcgatcgggccggcccccgtgtcgtgtcatgctcacgcgcgcgtacccgcggccgcatttaataacgaacggcccgcgctccgttctgtttcgagactcgtctcgcccacccgacgccaccgcgaacagcacccgacgtccgagtccgacgaggcgaagcctgtccgtccccccgtcgtcctcatcccgtag

SEQ ID NO: 560 - DNA, 867 bp, Zea mays
  Peptide Sequence Number=SeqID_42339
atggcggcgcagatgcccttcctggcgttgctccagggcgcaggcgtcgtggtggagggggcggagacggagcagcagcagtacgagcacgagcacgacgggcgcaagcggcaggccttggcgcgcgccgtctccaaactcgacctgctcgagagctgtctcacgcaggcggcggctcccgcggcggcggcgtgtgcgccagtggccagcaggacgaccgagaggcggatgaagcggccgaggacccgcgcgcgagccgcgccaccgccggagaagcgcaggaagcccgaggaggccgagagccagcggatgacgcacatcgccgtggagcgcaaccggcggcgcctcatgaacgaccacctggcctcgctccgctcactcatcccctccagctatatcccccgcggcgaccaggctacggtggtgggcggtgcgatcgactacgtgaagcagctggagcagcagctagtggcgctgcaggcggccgcgggcgcgcggcgcggcagcagtgtcgtgtcggacgacggcgtgttcctcgtgtccccgcagtacgcgagctactcggggtcgcgcggcggcggcgggctcggcgtggacgtggaggcgacgggcgcggtgggcgggcacgtgcgcgtgcgcgtcgcggggaggcggtggtggcccggccggctcgtgcgcgccgtcgccgcgctggagggcctccgcctcgcggtcttgcacctcgccgtcacctccgtcgggcgtgacgccgtcgtgtgctgcttcaacctcaagatggaggaagggtgcgaggtggcgacggcggacgaggtggcgacggtggtgcaccagatcttcgcctactccgccgccggcgcatgctgctga

SEQ ID NO: 561 - DNA, 282 bp, Zea mays
  Peptide Sequence Number=SeqID_42340
atggctaaacgggtcgtctggcccaacatgggcccggtgaagcctggtccgttttttggctcgacccgctgcgggcctaaacagaccaggacgtacggtccgacatataccttgcatgcaaacctgaacgtcctttcgccgagctttgaaattgaaacatacctgcctgatcctgatcctaatcctaatcctgatcgatcgcatggccaacccggtccaccccctgcccgcacggtgtccgaggagagccccagccgggcagacctccctgcagcaggctag

SEQ ID NO: 562 - DNA, 549 bp, Zea mays
  Peptide Sequence Number=SeqID_42341
atgcatcatgctggggaggctgactgcagccggttgtggagtgggcggcgaggcacgtgcctatgcggggaagatactactgtggctgctcatgtggtggaaaccagttcaagccgtggtaattttgtcaaagatgttctttgcaggttgcagcactatgttttgctctgtaagagcaatgaatatttacaacatgaaatctgctacttttcagctacatccttgttcgctgcctttggtttccttctctatggagggaggttattcctgatgttgcagcgtttccctgttgagtcaaaaggccgccggaaaaaattgaatgaggttggctatgtgaccaccatttgctttggttgcttcttgatcagatgcataatgatgtgcttgagtgcttttaacaaagatgctgatcttgatgttctgaaccatccaatcctgaacttcttttactacctgctggccgagattgcaccctcatctttggtgctgttcatcttaaggaaactgccgccaaggcgtgggattgcacaataccatccaatccattag

SEQ ID NO: 563 - DNA, 1840 bp, Zea mays
  Peptide Sequence Number=SeqID_42342
cggctgcctccagtcctccgccctcccgctccagcggggctcgccattgatggagtacgagcgcatccacgggccgctcccgcgccatcaggtgcccgccttgccgcgatccccgcctcaattcggtgggttgtcggttcaattcgccttctgtttcaccattccgattctgcctccgccacatttcaccctttctctcgcgctcgcggtgtcactgactgaaccatttcttcttccgccctgctctgccccccagtccgggggattctctccagctaagctgcgagcaatgcttcgcgggatagagaaacgccagcgcaacaacggcgaggactcgtctccggaggccaacgactccggcgagctcgacgaccggaggagcttggaatgctccacctccaccgagatgtcgagcaacagcggccacaggtcaagaaaccgtgccccggacgacgacagcttcgactcggagagcagctcgtcggggccgccgacggtgaagaggtcggccgcggtggccgcgttgctgccgcccttctctcggccaacgccgtccaagtgggacgacgccgagaagtggatctccagcccgacgtcaaaccgtactggccgtacggggcctaccgctggagctgtgccgaagaagtctgcattggccttccctgactatggaggccgcccgccagccgttgctaaggtggtagcggatgtgcctaccaacgctggaccagatggtctcgcccatcctgatttacttaagcctggacacaatgcttcagtagttgttgacggaacagcacctgcagttaggtctgtctgtatgagagacatgggaacagaaatgactccaattgcgagccaagagccttctcggaccgcgactcctataatcgcatctagtccaacctcctctcggacaccaaccccgcaacgcaccgcagaattcagtgtgagtaatatagatcctaaaaagatcgagatgcctgaagaggaggaggtacagatgagtacgagacaggaaattatggatcttggtgaaaggttagggaagaccactatagccgcatgggcaagcaaggaagagaaatctgccgcacgtttcacggataccacagcctacaaggctgccgatatcggtagggagaatcgagccgcagattggcaggagacggagaaggcgaagtatcttgcaaggtttcagagggaggaagcaaagatccaagcttgggaaaatctgcagaaagcgaaaattgaagctgagatgaaagggatagaggccaagatagagcggaaacgggcgcgcgagcaggacaggctcgccagcaagctggcagccgtaagccaccgagcggaggcgaagagggagaccgcggaggcgaggcggaaccaggaagccgcgaggacggaggagcaggcggcccggatccgatacaccgggcatacgccttcgtccttctcctgctggtgctgggtggcgccacctgtcctcgtccaccttccacccctctcgcccggggctataaatgatacaccggccggcagcaaccaccctatggagtcgtcggcggcgatgacgatggaccaccaccgcgcggcgccgtcgctgtcgacggaagagaaacggcggatcgagcgggtggcccggtgcgtggcgcgggaccgggacggcggggacctcacggagaagctgctgctgcggctgctcggcctcacgcgcaacgcccgccgctggggcttcctcgcgccggaccacccgctccacccctactacctccagcacaaggtctccgagcgctgccggatcctccgcccgcgccacgccgccgccgaccggcggtga

SEQ ID NO: 564 - DNA, 1434 bp, Zea mays
  Peptide Sequence Number=SeqID_42343
atgaagaaggaagttgggttcagaaatgaaacagtggaagctgcttttgttgaacatctgcaggaggaagaagctcccacaagtaaagatggccaaaaggtccaagctgctagcactacagttggtgatcaagaaaatgcagccctgaagagcataggggaagatcatgtgcaagaagatgctggtgcaggaagcttgaatggatgtgacaaaagaaaaaatgaagatgggacagtgattgaaagtgaaactgcgaaagatgatgccagaacatatggagttaatttgtcagaatcagatgttgcagttggtattcagtctgcctacagagggtatgatgttcgaaaatggcaacctttggataagctctggaagatcaagcatgtgcatgaacagatgcaagttgtgaggaagcagattcaatgccttttagattcttgcagtaagccaacacaaaaagagcaagtggccataggtgaaactattatgaatttactcctgaagcttgacgcaatccagggcttgcatccaagtgtaagggaagctaggaagtctgttgctcgagaactgatttgcttgcaggagaagcttgatactttatgcaaagccgcatctggagacttgaatcacacagatagtaatgatgatgaatctgaggggaccaagaacattatccaaactgcagctcctactgtaataactgaagcttctgatagaaagagaactattgaactgggtaaggtacaagaaccatgttcagtggactccatggagccatgcaacgcagttccatctggagtttcctgggaggtgaggccagatgtagacgctagcgaggagaagaatgaaaacaagagtcatgtagcaccacagtggatgaagcacacgaagaatttagacaatttatcaagcacgctgagcacaaaaacaacaggggtggcgaggcctcaccaagggtgttgcgacgtcgcgggttggggctgcacaggtcgaggtggagctcactgcggtatttcatcgagcacttggcgagcgtcgcggacacgggtttggcaccagtatgctgctgtaccgttcgggctagtgctgaccggagaggcaaggggagccatgggggaacacggcgtggagaacggttggaacagaacagagggcgcactgggaacagaaagcaggggcgcggcagggctgagggcgagctcggcgagcaccaagggggaggtggaggcatcatccgccatggctgagggcgagctcactgtgaaggttgaacagagccagggcgctgggaggagcagaggtgagggcgccatgggagggatggggaagacgacctggcggccggcactagaggaagatggggaagatgacctcaggagcgcttgctcaggtgctcgagtggaggtcggcaatggggagcaggcggcgccgtga

SEQ ID NO: 565 - DNA, 258 bp, Zea mays
  Peptide Sequence Number=SeqID_42344
atgaagccatccagatatgctattaaaaatcctgctagtcattatggctttaaactgtaccacctaattgtatatgccaaaaagttagctcatgacttgacgtatatgaagaaggtgtcgacttcacatcgtggaagagacaaagcagctgatgcagcatctaatgcaagcaaatggacgacaagagaggcagatgcaagccagccagtccagtataagcaagctgtggagaacttgttctcaaatgctataagttaa

SEQ ID NO: 566 - DNA, 630 bp, Zea mays
  Peptide Sequence Number=SeqID_42345
atggccaacggaaaccacggcgacggctacaaacaccggcacatgagatggaagacttcaggttctgatcttaaggccagggtcactacagtgaacatcatagttaactctggaatgaaactccacttcaagcttcagaccaccgacgtggtgtggcctagccctgctaccctctgtcgccgtccagtcaccgacgactgctcaaagctccactgctccagtcacctgcgactggtccaagctccagtcacctgcgccgccgcggcgtctccagtccaccggaccaacagcagtgaccctcagtcgagatgggctcgtcatttgaagtttgatggtggctgtggacatgctaataatgttgaggtcatattccctgagtccaatgtggtcggcagtgcaagtggaagtgcttttgttcctcctcctcaacgaacctatgttaggacaaggaagcgttcaataaatgcagaagctcaagatattggagaagatgacagtgatgctcaagaagatggtgctgctgcagtacaagcagaagtagaacaacaacaaacacaagaaacagctggagatacggatgaagatggtgttgctgctgatgcattttgcttggatgctgatctgctctag

SEQ ID NO: 567 - DNA, 807 bp, Zea mays
  Peptide Sequence Number=SeqID_42346
atggcgagcacgacggcggggcggagacccgcgcccgtgcctagatggggaaggatggtcacgcccgcgactagggaggcgacaatgctgcggcttgagaaggggaggggcggcatcggccgccatgagggccagcggcggcggatctgggccggctgctggacccgcgtgcgcgttgccgtggctggcgccgccgtgggggagccatggccatctgccggcggtaggcgcgccgggggctgcgccggcgagcaggaggagggagccgacgtggtggagcgggtgttgggccgtgcccgcgccggcgttggggagggagggcgccgccaccatcgcgggaggtggggcgggcgggataggtgcgcaagggggaccgccgtgcgcggcggccagcggaggaggttgggggcaaggcacacgaacgcgcccgcgccgcgagcggggaaggcggggaggccagggctgccccagccagaggccgatggcggaggttgggagcggggagtagaggagagggggccagcggctcggatgtggccgcccctggtgcggcggcgcgaaagtcggtggcggctggacctgggcagagatggggtggcagctgtggggctgggagggaggaaactctatgtgggaaactctaatctgataccatgcgggaattgtagtgctcaatgtattgcacagagaaggagttacaatatagacttaaccctaatcctaatgggccggcagcccaacagtggtgccggcccacacacacagtctaacaaatcatcctatagatttatggacatatgtatataa

SEQ ID NO: 568 - DNA, 1179 bp, Zea mays
  Peptide Sequence Number=SeqID_42347
atggctgagaaggaggaaacaaagggccgctgccctgcctgccgcacacgctatgacaaggatatgatcgtcaagatggccgccacttgtgacagggttatccagagaaatctggtgtacataattgggctacctgcgcatttatgcaatgaaagcgtacttgagcgcagggagtactttggtcagtatggggaagttttgaaggttttagtttcccgtctgactgggcctccctctcagcaggcatcagcaaacagcagtattagtgttttttcccttaaggacaggcctggtgcagtggtgagaggcctttccactgagccaaagggcctgggtttgacgcagcctctgcgcaaaaatgtagggttaaggattgcctcggttattacttccccagacccgactcatgcgggagccgtcagcactggttatcggatcccgcatcgtggaatgcttgccaaagggaggaaggtagctggaaggcgtgaagaaatgtctgcaaattatgcgtttggaccacaggatgatgatgcgattattaaacacaggcttctgactaggacaacgaccaccaggggtgaaccgccactaaagaagcttcagaagaagttcatgtcctttgcaactgagatcgagaaggatgcagataacataagtgactgtgaaagactgtacaaggcctttctacatgaaattaacacctttgagctacctcttctgaaaagcaaggctgtggttgatgcaaacattagggagaaagaaagctttaatgagctgcaggttgagattgagcggcagatcttgcatgctaagactgatattgaggaccttaagaagcaacttgagcagagcaagattgagaggcagcacaaagaagagtgtgaagccatccggaagctgattagtttgcagcctccacggtcagaaactgaaaaactcattgcagaccttgagaaggagataactgatttgaaggcggagaatgtagcatgcataaggactttggaactgaggaagaagcagtttgcccttcttctacatgtggttgaggaattgcagatctcgattgaagatgagcagaagagtatagcagatgagctgagagctattgctggagagcagaagatgagcatggaagaagggagcgtcggtgcttcagattccatggttgttgactga

SEQ ID NO: 569 - DNA, 585 bp, Zea mays
  Peptide Sequence Number=SeqID_42348
atggaacgcacgctggtacggaacgtgggtatacctggctggggcttcctgagccctgggctctttttaagtaaaggaagccccgaccacctaccgatcagtttatgcatattacgtgcatcggacgcacgatgccacccactcgctcgcatttatccagttcacctcactcgcaacgcacgcggcggtggaaccctagacatacccgccgccgtcgcctcacctggatctgcctctcgcacaaccaactgcgccgctgtctctaccgtccccctccccgccccctcggatccctcctctcccgacgtggccgggctatcgctggccgagtcgggcgccttcgtcaaggcccctggcgacacgcccaccaacgtcgcgtgtgccatccccatgctcggcaggtgctccgcctctgtcgtcaaggtttccaagatcgaaggtaggttaaaaaatgggtattatgctcgccatggctttcataccatcaatgctaggccaagggcgctgcttcccccacgaggaacaccgcccagccggattccactggacccagcatctgacggcggcgacctacatcctggctag

SEQ ID NO: 570 - DNA, 552 bp, Zea mays
  Peptide Sequence Number=SeqID_42349
atgagggctgtcagccagcgcctggtggcgcaccggacattggtgtccggtgtgcaccggactgtccgtttatgcatattacgtgcatcggacccacgatgccacccactcgctcgcatttatccagttcacctcactcgcaacgcacgcggcggtggaaccctagacatacccgccgccgtcgcctcacctggatctgcctctcgcacaaccaactgtgccgctgtctctaccgtccccctccccgccccctcggatccctcctctcccgacgtggccgggctatcgctggccgagtcgggcgccttcgtcaaggcccctggcgacacgcccaccaacgtcgtgtgtgccatccccatgctcggcaggtgctccgcctctgtcgtcaaggtttccaagatcgaaggtaggttaaaaaatgggtattatgctcgccatggctttcataccatcaatgctaggccaagggcgctgcttcccccacgaggaacaccgcccagccggattccactggacccagcatctgacggcggcgacctacatcctggctag

SEQ ID NO: 571 - DNA, 762 bp, Zea mays
  Peptide Sequence Number=SeqID_42350
atggcccaggagagcatcactgcctctcagtctcagaagatgaaacaaaggagcggttgcaggaagacgggcggtggcgtcgatcgagtgggcgcgcgggatcgagtgcgagcgaggccgatctgtctgcagtgcacgcagcagcaaaccaaagatggcgccaagttcgggtacaccggctccgtcggtcccgaccactggggcgcactgagccccagcttcaggcagtgcgcgacagggacgaagcagtccccgatcgacatctccacggcccaggcggtctccaacccggcgctgcagccgctccacagggactacaccgtggccaacgccaccctcgtcgacaacgtcgtcaacgtcgcgctgcgcttcgacggcgacggcggcgccgggagcgtgagcgtcggcgggaagctgtacacgctgaagcaggtgcactggcactcgccttccgagcacaccgtcgacggccgccggttccccgtcgagctccacatggtccacgccagcgacgacggcaacgtcaccgtggtggccatgctctaccggtttggcaggccggatcctttgctctggcagatccaggacaagctggccgcgctgcacgcggagggctgcagagcggacaagggcgctccggtcgccgccggagacgtcagcctgtggtcgctcaggctctactcccacacgtactaccgctacgtcgggtcgttcaccacgccgccctgcaccgagaacgtcatctggagcgtcctggcccag

SEQ ID NO: 572 - DNA, 810 bp, Zea mays
  Peptide Sequence Number=SeqID_42351
atgtccaaggcggcgtgcgagtgcgagacggccaccgtgctccctgacgccggtgccgtccaactatgcgcccgcggtggtgctggtagcgccagccctcgtgccgacgacgcgggcgcgccagcggagtcggtcctgctccgggttccggacggcgtcggcttgggccatctgtttggcgcggcgctgcggcgggacgcgtccaccaagggcagctccaaccccaaggcggccgccgaggcggcggcgcgcaagggcgcgccgagcgcggactcgaggaggttgttgccggccacgacggcggcggccagcagcaagaccgccgtggtcatcggcgtcctgccggcgagcaaggtcaaggtggcggttgccaaggagcgtcgcgctcccggccgcgccgtcgtcgcccgcgcgtggcgccggccggcggcaggggccagggtcttcgcgagcgaggccgtggggccggagcccgtgtccccgaaggtgtcctgcttcggggccgtactgtcggagagatctgccgcggcgcggcgagaggggggagaggaaggggaagagagcggcgccggcgggtgctgggcgagcctgggggccgcgcttcttggcctatgttgcagcggcgatggtcgtgaaggccgccacctgtgccgcgctagcgaaccaaatccgaaggccacggctctggagcctcatcggcggcagtgcgtcgccgtgacgtcgccaccgcggccggtggcggggcttggagacgtgaagcgcctcgcttcgcggcgttggccagagaccatggcgcgggagacggtttga

SEQ ID NO: 573 - DNA, 378 bp, Zea mays
  Peptide Sequence Number=SeqID_42352
atgagccacgattcgctcgaggccccacttagtggtcgctcaaaactccgcctcgcccgagcctgccctcgggcgagggcagcgcccggggaaatcctcatctcgcccgagggcatggtctcacccttgggagggaactccgcctcgcccagagtcgacctcagtctcggagaaaactccaccactcccgagctcggcttcgaccaactgccccggcaacaagccaacaactccccacgaatcccacagaaggccactctaacaactgtattaactcctccatgtacgactgcatgccccgaggcaggctcggccaaggcctcgggaggagcatccgcctcgcccgagcctagcctcggcctagataacatcgcctag

SEQ ID NO: 574 - DNA, 357 bp, Zea mays
  Peptide Sequence Number=SeqID_42353
atggctgtttctcaggtacataatatgcgtgtcaatgattctggatacctggagtgttacttggaatatattgactatgatggggaggatctggattgggttgccgtcttccaagagaacccagcaagctcaagtcaaaattctaaaggaagtactgaagttatgataaggccttctttccctcaatggtattatgggcatgaacctgatcagctcccagttagtgatgtcacagcagttgttgatgaggcctggaaaataggcgatatggttgattggctcaaggacggttgctattggtctgggacaattactaagttactcaaaaaagatatggttaagctcaaaattatttga

SEQ ID NO: 575 - DNA, 744 bp, Zea mays
  Peptide Sequence Number=SeqID_42354
atgtcttcctgggacgctgacgactcggcggcggcgtccgcggccgaggcggccaccacggacgtcgagctgctcaagcgggcgtggcgcaacgagaaggccgcgccggagatcctccgcttcgactcgcccctcgtctctcgcgtccgcgagcagacccagctcctcgtacgtcctccttctcgccgccctcctcctccctcttgctacttctccggctctgatgcggattcgctcccgcggtgccgccaggaggagacgctggacgacttccccgacagtggcggcgacgacctgggggactcgctctaccagatggacctcgaccgcacgctcttcctcctccgctcctacctccgcctccgcctgcagaagatcgagaagtacacgatgcacatctcccgctccgaagacctcctcagccggctgtcccagcaggagcgccggtttgccaagagttgcgcggagatcatggagaagcatctggagcagtcggtgctgtcgaagctcccgtacgggtatgactcggtttccaggcagtcgctgtcgagcactgaggatgacatggtgccggagcctcagcttgacaccttcgtcttctgtaagaccaagggcgacgtaggtgcattccagctagatgacattggagaggaggttgtggacctggttgctgatgacttgtatgttcttcggtacaagtccgtcaagggactcatagagggtggccggatcgaccttatctga

SEQ ID NO: 576 - DNA, 1869 bp, Zea mays
  Peptide Sequence Number=SeqID_42355
atggacgtggcgttgccagcagccgtcgtcgccacaatcctctcccgcctcgacgtccgctccctcctcctcgccgccgccgcctgccgcggactccgtgcctgcgcctcccacgcgctcgtattcctcccctccttccacctcctcgaggtggctcttacgcacgaactgctgcgcccgctgctgccgccgaacccgagcctgcggagcctgcgcctcgactgcgctcgcctcgaggacgctgccatcgcctgcctcgcgcgcgccggcctgcacgagctcctcctcctcaactgcgacaacatcagcggccgcctgctctgcgaactgggcaccacctgcagagatctcagggtgctttctctcaactctcttggtgcacgtaggggactggtggtaaatttctctgatctacaggaattgctcaatggatgttctcagctagagaatctgagattggcacttgatttctcaacttttgatgaccccaactttggtcgtgtatgggcatctgcttctgaaaggctatcatctcttgagattggttatattcctatgacaatgttacttgaacttctggtagcagttacagaaggacaacaatgcatggattatgttaagacaccagttttctttcctagccttcaaaagttatgcctggctgtggatttcataaccgaccatctaattggttccatatcagtcgcacttccatcactgacacatctggacctgcaagatgcaccaattgtagagcctaattcgtcatcagatctcaccaatgctggtcttcagcaaatcaatccgcatggtaaactgaagcatatttctctcatgcgcagccaggaattcttagtaacatctttccgccgggtgaatgatctcggaatcctgttgatggccgacaggtgttcaaatcttgaaagtgtatgtcttggtggcttctcccgtgttacagacactggttttagggcaatcattcactcctgttctggtcttcataagcttcgggtttcccatggaagccatctaactgatttggttttccatgacattatagccacttctctttgcctaacccatgtgagtctgaggtggtgcaaactcctaactaatgttgggattgagagattatcatgcaacaaggatctcaatgtactggatctcagggactgccgcagtttgggtgatgaagctgttagggctctgagctgccttcccaagttgcagactttgacattggatgccactgatattagcgaccaatcattgaaatatctaggacttggaacatgccctctaacttccttgtctctgaggggttgtcggaagcttacaaacgattgtatcaccttattatttgctggtcatgtgaaacagagcctacagatgttggatctctccagaattccaagtatcacggatgatggtatcatgttattagcaaggagcagaactcctcttattgagctcagaatgcgagaaaatccgaaaatcggggatgcctctgtgatggctcttgcttccatgcaaatagatggtggaacctacggtagtaccttgcagctgctggatctttttgactgtggtgggattacaccccttgcagcacgttggtttaagaaaccttacttccctagattgcggtggctgggaattacaggtagcttgaatagggttatggtggatgcactgtctcgaagccggccattcttacatatggcttgccgtggtgaagaattagggactatgctctgggacacctcctctgactggtatcggcataatgacgacgatctcgacgagcttgaacagtggctcttggaaggtgaaccggtttcagatgatgacaccatcatggaagaatga

SEQ ID NO: 577 - DNA, 3741 bp, Zea mays
  Peptide Sequence Number=SeqID_42356
atggcaactccatccgatccagaatataataagcaccatgcattgtctgcaaagaaacatataatcagcatcactatgatgatgctcatcttccacatgctcgccttctccctaatttgcctcgccaaaaacgcagcccatggagatgcatcagcacacgccctccactcctccgacgagctcgcgctcatgtcgttcaagtccctcgtggggagcgaccatacgagagccctagcctcgtggggcaacatgtccattcccatgtgccggtggcgcggcgtggcgtgcggcttgaggggacatcgccggggccatgtggtggcactggacctccccgagctcaacttgcttggcaccatcacccccgcgctaggaaacctcacttacctgaggcggctcgacctttcatctaatggcttccatggaatcctgcctccggagctcggtaacatccatgacctagagactctacagcttcaccacaactccatatctggccagatcccaccgtcgctttcaaactgtagccacctgatagagatcatgctcgacgacaacagtttgcatgggggagtacccagcgagataggctccctgcaatacctgcagctactcagtctcgggggaaaaagactgacggggagaatcccttccactatagcaggccttgtaaatctgaaggaactagtcctgcgatttaacagcatgaccggagaaatcccaagagagataggcagccttgccaacctcaacttgctggacctaggtgcaaatcacttctcagggacgatccccagctcactaggaaacctgtcagcgttgacggttctttacgccttccaaaacagttttcaaggaagcattctaccactgcaacgcctctcgtcgcttagtgtgcttgaattcggggcaaacaaactccaagggaccatcccttcttggttaggcaacctctcttcattagtactcctagatctcgaagaaaatgctctagttggtcagatcccagaatcgttaggaaaccttgagctgctacaatacctttctgtgccaggaaataatctctcaggttccatacccagttcgcttggcaacctctactccctcactctactcgaaatgtcgtacaatgaactagaaggccccttgccccctctattgttcaacaatctttcctctctctggggtctggatatagaatacaacaacctgaatgggactcttccacctaacattggaagcagccttccgaatctgaactatttccatgtgtcagacaatgaactccaaggcgtgctcccgcggtccctttgcaacgcctccatgcttcagtctattatgacagtagaaaacttcctgtcggggacaattccaggatgcttaggagctcagcagacgagcctgtctgaagtgtcaatcgcagcaaaccagtttgaagcaacaaatgacgctgattggagcttcgtggctagtctgaccaactgtagcaacttgaccgtgttagatgtcagttcaaataatctccatggcgtgctgccaaattcgatcggtaacctctcgacacagatggcgtatctcagcaccgcatacaacaatataactggaacaataacagaagggatcggtaatctcatcaacctgcaagcactttacatgcctcacaacattctcataggctcgattccagcatctctcggcaacctgaataagctgtctcaattatatctgtacaataatgctttgtgtggacccttgccagtgactctaggcaatcttacacagcttactagacttctcctcggtacaaatggtatcagtggacctataccatctagtctcagccattgccctttagaaacattggatctttctcacaacaatctttctggcccggcacctaaagaactcttttccatatcaaccttgtcgagtttcgttaacatttcacacaattccttatctgggtctttgccatcacaagttggaagcctagaaaatctggacgggcttgatttatcttataacatgatatctggtgagattccaccctccatcggtgggtgtcaaagcctagaatttctcaatttgtcaggaaacaaccttcaggccacgattccaccgtcgctaggaaatctgaagggcatcgcacggcttgatctttctcacaataatttgtcggggactattcctgagacccttgccggactaaatggcctttctgtattgaatctggcattcaataaactccaaggtggagttccaagtgatggggtgtttctcaatgtagcagtgatcttaatcaccgggaatgatggtctttgtggtgggattcctcaactgggattgccaccttgccccacacagaccaccaagaaaccacatcatcgaaaacttgtcataatgacagtctccatatgcagtgcacttgcctgtgtcacactagtatttgcattgcttgcacttcaacaaaggagccgccacaggacaaaatcacacctacaaaagtcgggcttgagcgagcaatatgtgagggtttcatatgccgaattggtcaatgcgacaaatggttttgcacccgagaatctggtaggagctgggagctttggatcagtttacaaagcaacaatgagaagcaacgaccagcaaatagtggtcgctgttaaggttctcaacctaatgcagcgtggtgcatctcaaagttttgttgcagaatgcgagacattaagatgtgctcggcatcggaaccttgtaaagatattgactatctgttcaagcattgattttcagggccatgacttcaaggccctcgtgtatgagtttctaccaaatggaaatttggaccaatggctgcacagacatatcactgaagacgatgaacagaagacactggatctgaatgcaagattaaatgttggaattgacgtggcatcctcacttgattacctccaccaacataagccaacgccaataatccactgtgatcttaagccaagtaatgttctcctggacagttccatggttgctcgagtgggtgattttgggcttgcaaggtttctacatcaagatgtaggcacatcaagtggatgggcatcaatgagaggatccattggatatgcagctccagagtatggactgggcaatgaagtatccacccacggtgatgtctacagctatggcatactattgctagaaatgtttactgggaaaaggccaaccgacaacgaatttggtggagccatggggctccgcaactatgttctaatggcactatcaggcagagccctaaatcagagcttcttgctgacagcgagcagaaataatagtgatattgataaagcagaatatgcagcagagaggatattccaactggaacacaacaacacaggctgttatgttgttctgtcttccatgtatgctgatgccgggagaggggaggatgtggggaggataagatctccgataaaggagaaggggctccgaaagacagaggcaaggagccttgtcgatcttaatgcagtacttcccgataagcattgtgtaaggctggctgcttcctttggtctgatatcatctgaggctcggaccactgttcttgtccagaagaatgtgtgtttatgcaaccaaagccatcatgcacagaagttgatatcaaaatatttgagacagacaattgtagttggtgacacgaagatataccgcatattttcagatggctctggttgctgtggtgattactggtga

SEQ ID NO: 578 - DNA, 1515 bp, Zea mays
  Peptide Sequence Number=SeqID_42357
atggaggcggcgacgatggtgtggacggcggcggtggtcggggcggggctggtgtactggttcgtctgggtgatgggcgcggcggaggtgaagggcaagcgggcggtggatctcaagatgggatccatcacgcgggacaaggtgcaggacaagtacacgcagtactggtccttcttccgccgccccaaggagacggccaccacggcggcgtcggcggagaaggtgccggccttcgtcgacaccttctacaacctcgtgaccgacatctacgagtgggggtggggccagtccttccacttctccccgtccctccccggccgctcccaccgcgacgccacgcgcgtccacgaggagcgcgtcgccgacctcctcggcgccaggccgggccaccgcctcctggacgtcggctgcggcgtcggcgggcccatgcgcgccatcgccgcgcactcgggatccaacgtcgtcggcatcaccatcaacgagtaccaggtgaaccgcgcccgcgcgcacaaccgcaaggccggcctcgactccccgcgctgcgaggtcgtctgcggcaacttcctctccatgccgttcccggacgcctccttcgacggcgcctactccatcgaggccacctgccacgcgcccaggctgcaggacgtgtacggcgaggtctaccgcgtgctcaagccggggggactctacgtctcctacgagtgggtcaccaccccgctgtaccgcgccgaggacccggaccacgtcgagtgcatccacggcatcgagcgcggcgacgcgctcccggggctccgccgccaggacgagatcgcgtccatcgccaaggaggtcggcttcgaggtgctcaaggagcaggaccttgcgctgccccccgcgctgccctggtggacgcgcctcaagatgggccgcatcgcctactggcgcaactccctcgtcgtccgcgtgctcaccatgctccgggtcgcgcccaagggcgtctccgaggtgcacgagatgctctacgagaccgcgcagcacctcacccgcggcggcgagaccggcatcttcacgcccatgcacatggtgctcctccgcaagcccgccgccgccgcctccaccgaggaggccaactacaaggagatgctaccaagcaaggtggcacaagtggaggccgatggcctcaacaaagatgaaatggcgcttatcattaagcgcttcaagaccgctcttaaaggatgtaaggagtaccccaacaagaacaaaacaagggaaaagcgctcctgcttcaagtgcggtaagactggtcactttatagcaaattgtcccgataatgctaatgaccaggaacaagaaaagagcgggaagaaggagaagaaaaagaactacaggaaggcaaagggcgaggcacacctcagaaaggaatgggactcggactgctcttcttccgactccgacgatgaaggactcgctgcctcggccttcaacaagtcctctctcttccccaacgaacgacacacttgcctcatggccaagtag

SEQ ID NO: 579 - DNA, 228 bp, Zea mays
  Peptide Sequence Number=SeqID_42358
atggcgaagaagcgattgactgggcgagctacgacggagaacagaagtaccatgcgacgcgaggccaagaccaaatggtctgctaatgagccgagccaagataccaacattatattcaagacttcatgtcgagttgatacatacaccaatcgatcacacttctcacagacgaacgatgaccgtcagcagttaggaattgaagctgtttcccagtcaaaaaggtcctag

SEQ ID NO: 580 - DNA, 954 bp, Zea mays
  Peptide Sequence Number=SeqID_42359
atggcaatgacggccggggcgccgtccatggaggtggagcaggacctcccaggcttccggttccaccccaccgaggaggagctcctcggcttctacctctcccgcgtcgtccacggcaagcagctccacttcgacatcatcggcaccctcaacatctaccgccacgacccctgggaccttcctgcgatggcgaagatcggggagagggagtggtacttcttcgtgccgcgcgaccggaaggccggcagcggtgggcggccgaaccggacgacggagcgcgggttctggaaggccacggggtcggacagagccatccggagctccgccgacgccaagcgggtgatcgggctcaggaagacgctcgtcttctaccaggggcgcgccccgcgcggcaccaagacggactgggtcatgaacgagtaccgcctccccgaccacgccgccgccgccgcgccaccgcccaaggaggacatggtgctctgcaagatctaccggaaggccaccccactgaaggagctcgaacagagggcctctaccatggaggagatgcagaggcgcagcgacgcggccgaagcagcatcagcatccctggtccaggctgtaggctccgccgacgacaactacctgtcatcgggcgacacccacgacataagcgtcctgcagatcccagcctcgtcctcccccgcgccgtcgggcgacagctacggcgggcccgcgctcagggaggcccagacggaagccgcggacgccacgacggtcacggtggcgtcggcgtctctggtgcatgccgcatgcatggcaggcccggcagcgaggcatggtgacctgcccaccccgcaggtgccgacgcatctcggagtcgccgactggacgcagatgcaggacccgttcatgctgcgcagcctgtggcaggaccagctcttcttctcccccttagcccacctgctctactga

SEQ ID NO: 581 - DNA, 1521 bp, Zea mays
  Peptide Sequence Number=SeqID_42360
atgggctgctgcggctcctcgctacgggcggggacgcagccggagaagaagccggcggcgggggcgctgcccccgcgccgcccctcctactcgctgagccagaaccagaaccaggcgccgccggcagcccgcgcgggcgcccaccaggtgccgccgctcagggagttctcgctggcggagctgcgcgccgccacggccggcttcgcgccggacaacatcgtgtccgagagcggcgacaaggcgccgaatttcgtgtacaggggccgcctcgagcccagccgccgcgcgatcgccgtcaagaagttcgccaagatggcgtggcccgaccccaagcagttcgcggaggaggccaagggggtcgggaagctgcgccaccgccgcctggccaacctgatcggctactgctgcgacggcgaggagcgcctgctcgtcgccgagttcatgcccaacgacacgctcgccaagcacctcttccactgggaaaaccagacaattgaatgggctatgcgcctgagagttgcatactacatcgctgaagcactggaatattgtagcaccgaaggaaggcctttgtatcatgacctaaatgcatatagggtcctctttgatgagaatggtgatcctcgtctttcatgctttggcctgatgaaaaacagcagggatgggaaaagctatagcacaaaccttgcatatacacctccagaatatttgagaaatggaagagtaacatcagaaagtgtcatattcagctttggcactatactgctggacctcctaagtggaaaacgtatacctccatcccgtgctcttgatatgataaaaggcaacaatatccaagtactgatggattcacatctggagggaaactactcaacagaagaggcaaccacattggttgaccttgcctctcagtgcctacagtacgaacctagggatcgtcccaacactaaaaagctggtttccgtacttgagcccttgcaaataaaatcagaggtaccatcctacgagatgcttggcattccgaagcatgaagaagaagcacctccccctccacaaccgcaacaccctctttctcccatgggcgaggcctgttccaggatggatctgactgccatccatcagattctagtgaacacgcattacagggatgatgaagggagcaacgaggaatggacgcagcagatgagggacatgctggaagctaggaaacgtggggactttgctttccgtgacaaagatttcaaggcagccatagactgctacacgcagttcgtcgacgtggggacgatggtgtcgccaacagtgtacgcgaggcggagcttgtgccacctcatgtgcgaccagcctgacgccgccctccgtgacgccatgcaagcgcagtgcgcgtacccagattggccaaccgcgttctacatgcaggccgtcgcgctctcgaagctgaacatgcagagcgacgctacggacatgctgaacgaggcgtcgcagctcgaagagaagcggcagaagaacacgaaaccttga

SEQ ID NO: 582 - DNA, 828 bp, Zea mays
  Peptide Sequence Number=SeqID_42361
atggtgagagcaaggggcttgttctgcctcgtgtcgccggtccgcggcgaccccgccgaccgccgcagcagcgccgcgtgcatatgctgcgtgggccctcaccacaagccgtcgtccggcgctcccgacgccgacctgagcgcgaggctgccgctcaccgggtgctgcggcgcggacgtccgcggccggagcagcgccgcgcgcaccccgaggacgccgtgcacgcccaccgccaggcgcctctgcggcgtccgccctcgcacgccgcgccgcgggcaggtctgctgcttccctgccgccaccgtcgagccggcaggaccggaggccgccgccgccgtcgcgaggacgccgcgaacccctaccacgcaggcgcagcagggcccgggctggcggcgccgttggttgttccgctccgctcgccaggcggcggcgcagatgacgccgcgctttcggggcgccggccgcgacagcgcccacgctggcaacaacaacacaagtgcctacgacgcgcgcctcccggaggcggaggcggagacggagacgtgctccaacgacgagtatgcgctgctctgcagggagggcttctcccgggaggacgtggccgcggtcaccatccaggcctacttccgaggccacctggcgcggcgggcgttcatggcgctcaagagcctggtgaggcttcaggcggtggcgcggggcgcgttcgtgcggcgccaggcggaggtggccatgcaatgcatgcaggcgatggcgcggctgcatgggcgcgtgcgcgcccggcggatgctgaccaccaaacccgaggccgagcagctgttgcagagctga

SEQ ID NO: 583 - DNA, 1188 bp, Zea mays
  Peptide Sequence Number=SeqID_42362
atggcaggtgtctttggctctttgcggtgcagctgtgtgcgcgttgatgactacgaccgcttctggcgatggccggctcgtcggcgagcgaggtggtggcataaatggcagtgggcacggagacggagcgatgtgcgcgcctgcgtgcacagtgttgtggttctgccgcgagaccgcgatcgtccaccccacccgccccgccatcagcgctcggtcgacaccgcgccgccaccgatcaacgcccgcggatcctccaccctcctccctaccgctgccgcaatcaacgcggtcctccccacgcggatccgcgggccctcccccccaccgccgtgcaacagatccgcgggaccacagccgccatggaaggtcgtccgcgctgtggatcccaacctcaaatcctcccagatccgcgccccgcacgccgccgcctgcacccgccgtacgcctgcctccaccgcgccagcagtgctctcgccagaaccgcgcatgagcgcccgcgaatggatctcgcccgacgctcccgccacgcacgccgtgacctccgccgctccctcacctcctccgcaaccctgctccgagcccccgcgatgggatcacccatctgcatcgcacccccttctccaccaaccctccggcgtctccagagcgcccagatcccgctccggcacctcgccagcacacaccacgcgcgcgccgatctgctcgctcgcccgccccaaatcccgcccggttcctctaccttccccacatcgggcgtcaacgttcgcggaccaaccttcccacggcactgctctgtcgtcggcgagaccacatagatctactacgagctcgctcgcctcggcgcggacatgcgcgtcatcgaggtacctccgcgcggaccagcgtgggacgacgggagcgggtgggggcgtccgggctgaagtgcaggtgggagtccagggcgggcgggcggccttggcgaggaacgccacgagggccacggccgaggcgaccggtaacgggctcgagccctcgacgtcggtgccatggagggggcaccgcggtcaggcaacaccgcgcacctcctccccacgccgtcaacagaatctccttccaccatcagcagaaggtgtcgaggatcttgggcgagcaggagagggtgaaagggaaatgtgcctttgggccatttctaagtattttggtgattaa

SEQ ID NO: 584 - DNA, 648 bp, Zea mays
  Peptide Sequence Number=SeqID_42363
atggacatcgagatgtaccaacaggtgccacaaccgtcgcccatcgatgtcgagatgtgcgattatcggtcgcagccatggcccctcagggtggttgcatctgtcccggtgactcataaggatggtggcaccgccgccgaatgtaaggcctttgaggatccacatgatgttgatgatgcaatttatggtcgtgatgggtataactttgatggctacaggttgcgggttgacttagctcatggtgcgagaggccagtcttattcttatgatcgctcaagcagctatagcagtgcatgccatggaggtgaatctgatctgttgctgctggatgaggtgctgacacttgctattgaccccaccccttcctgttttgttctgcttgcggagctattggtttttgtaagtgtgcaactgaagatgggtgactgtattttggttttaggcccatcgaatccgtttcgactttcgagttccacaagggagcagccaagcacattttctctgcccaagaagggcgacatcgtggtcgtggatatctctgacctctgtcaggtggctatgctggccaatgatctgtttaggtcaaagagtgtgaacgacctatccttccccatcgtgccacaaccacgaggacaacgacaacaatag

SEQ ID NO: 585 - DNA, 1353 bp, Zea mays
  Peptide Sequence Number=SeqID_42364
atggccgcgtgctccaggggcctcgcgtggccgccgttcgatctgaccacggcgaggggggcggcgtcctggccgcgccgccgcgccacgatccggtgctgctgcgccgggacggacccagagccgcggaggcgactctcgagggcggccgcggccgcgcccgagcgtgccgaggagtggcgcgtcgatgggaacaagccgtctgccgcggcaccggcccggcggcgcgctagtctcaccgccatgcccccgctccccttcccggcacctcgtatagttctagaagacagttcaagcaacaggacttctacccacggtgcacgccgaggggcccggctcctcaatcctgtgattccccacccaagagagatctctgatttgctaaggaaatgcatgtgtttgtttggcacctgccttatagacactggtattgctagtgagaaggaatggggaatcaacttgctggacgaagccgtcaaggagtctggaataaatgaagatggaagcacttggtatagggagagtggagaagatactggcgagaatgggtaccgctgccgctgggcaagaatgggaggacagaaccatgatggttccaccgaatggaaagagacttggtgggagaaaagtgactggactggatataaggaattaggtgcagagaaatctgggaagaatgctgaaggtgattcttggtgggagaagtggaaagaagtactgtaccaagatgaatggagcaatcttgcaagaatagagaagagtgctgaaaaacaagcaaaatcaggtgcagaaaatgctgggtggtatgagaaatggtgggagaaatatgatgccaaaggctggacagaaaaaggtgctcacaaatatggaaggttgaatgagcagtcgtggtgggagagatggggtgaacattatgatggccgtggatttgttttgaaatggacagataagtgggcagagacagacttaggcaccaaatggggggacaagtgggaggagaaattctttgcaggaattggttctcgacaaggggagacatggcatgtatctcctggcagagaacgttggtcaagaacttggggagaagaacactttggtaacggtaaagtccacaagtatggaaagagcacaactggcgagagctgggatttggtagtcgacgaggagacatactatgaggcggagccccactacggatgggccgatgtcgtgggggactcgacacagctgctgtccatacaacccgtggagaggccaccgggagtgttcccggccatcgacttcagctcggcgcccccgccaaaggacgctccgccgggcatgcctccttcccctctggatggagggaactag

SEQ ID NO: 586 - DNA, 204 bp, Zea mays
  misc_feature (153)..(153): n is a, c, g, or t
  Peptide Sequence Number=SeqID_42365
  unsure (1)..(204): unsure at all n locations
atggagcgtcagggtgcaaagcgggaggtatggcaatggctgatcccttggatcgccaaggtgaagcgacaggagacacgtgtgcaacgtgatgtggatagggatgacaatggatcggattcggatcggatattgcaaatatccgtctgcaanccatatccgcggttgctaccaatatccgcccgcgaccttacccgcgggtag

SEQ ID NO: 587 - DNA, 1506 bp, Zea mays
  Peptide Sequence Number=SeqID_42366
atggccgagaccgtcgacgacaagatcagttacttccaggctgtcaccggcatctccgacacggacctctgcacggaaatcctcgccgcgcacaactgggacctgcagctcgcggtgtcctccatcaccgccaacccctcctcgccctccgccccggtttccacctcctcacgcgacccggccccttccgcccctttggcagatgcggagttcgtcgcgccaccgccgccgataccgccgccgcctcagcagcagccggggatcgcgtggaagctggtgacgctccccttctacgtggtctcgggtggggccagcctcgtcgccggctccttccgccttggcgcctgggtcgccgggggcgtgctgtcccgctccctctccctcctcggcctcgcggggcaggccggcagcggcgaccgcctgctagagctgccgccgtcagctgccgaggcggctgacttcgtcgccgagttcgagcgcgagtgcggcgctggccgcggcccgcgcttcgtggccgaggggttcgctgatgcgctgcagcgagcgcagcgggaattcaagcttctgttcgtgtacctccactcccctgatcacccggatacccctgccttctgcggcggctgcctctgtgctgaaccggtcgcggcctttatagatgagaacttcgttgcgtggggtggtagtatcagaaggaccgaagggttcaagatgagcacacagcctgaatgcgtcgagattcccgttttgtgctgtggtcatggcttctacaaaccagagaatcgtgctattgcagcagagttgttctgtattggttatattcaatgtttggcatttaaaaatgtcaggattgctaataaattatatattcatgttcctaaggttgaagggcccaaatcacctgaagagatgataacaattcttcaacgtgttgttgaagaatgtgctacatcactcgttgctgccaggattgaagctgaagagagactaaacaaccagcgtttgcgtgaggaacaagatgctgcttacagagctgcacttgaagctgaccagttaagaaagttgtaccttcaggccagggaacgtgaaaggatagaggaacaggaaagacgtgaaagggaggctgtagaggctgagaaaaagcgtaaagaagaggaggaagctgtagcaagggcagcccaagaagcagctgaaaaggaagctgctcttgcaaggaggaggcaagagaaggccatggctcttggagctgaacctgagaaaggaccaggtgttactcgggttctcataagattcccaacgggagagcgcaaagagcggagattccatagttctgcaaccgtcacttccctctatgactacgtcgattctttagactgcatgaaagcagagaattacagcctagtttcaaatttcccacgggtcacatatggtccagagaagcactccctgacactggaggaggcaggcttgcatccgcaggcgagcctgtttatcgagatagagcaatga

SEQ ID NO: 588 - DNA, 1263 bp, Zea mays
  Peptide Sequence Number=SeqID_42367
atggcgagccaaggcgagccgtcttcctccgatccgaaggggaagaaggattactctacggcgatcctggagaggaagaagtcgccgaaccggctggtggtcgacgaggccaccaatgatgacaactccgtcgtcgctctgcacccggacaccatggagaggctccagctcttccgcggtgacactgtcttgatcaagggtaagaagagaaaggacactgtctgcattgtgcttgcagatgagacatgtgaggagccaaaggtccggatgaacaagattgtcaggaagaacttgaggcttttcaagtctattggtgtgaaaccaccaaagggcatattgctgtttgggcctcctggctccggcaagacccttattgctagagctgtagctaatgagacagatgaagttggccgccttgaggttcttcggattcacacgaaaaacatgaagctggctgaagatgttgttgaagtcccaaatgtctcttgggaagatattggtggtctggaaaatgttaagagggagctacaggagactgttcaatatccagtggagcatccagataaatttgaaaagtttggcatgtctccttcgaagggtgttttgttttatggccctcctggctgtggcaagactctgttggccaaggcaatcgctaatgaatgccaggctaacttcatcagtgtgaagggtcctgaactgctcaccatgtggtttggtgagagcgaggccaatgtccgtgagatttttgacaaggctaggcagtctgctccgtgtgtcctcttctttgatgagctcgactccattgctactcagtccaggcttcagatcttcaaagcctgcctcaggaagtctcctgtggctaaggacgttgacttgcatgctcttgccaagtacacccagggtttcagtggagcagatatcaccgagatctgccagcgtgcgtgcaagtatgccatcagggagaacatcgagaaggacatcgagcgggagaggcgcaggaaggacaaccctgaggccatggaggaagacgaggtggacgacattgccgagatcatggctgcccacttcgaggagtccatgaagtacgcccgccgcagtgtcagtgatgccgacatccgcaagtaccaggccttcgcccagacactccagcagtcccgtgggtttggcagcgagttccggttctccgaccaaccgacggcagctgccggtgcggccgacccctttgcatccgcagccgacgatgacgacttatacagctaa

SEQ ID NO: 589 - DNA, 744 bp, Zea mays
  Peptide Sequence Number=SeqID_42368
atggcccaagggcacatttccctttcagaaatacactcgggggcttgcggtcaccacgcagcacctcgggccctcgtgggaaacaccttccgacagggtttctactggccaaccgcggtggtcaacgccactaaaattgtacgcacctgccaagggtgtcaattctacgcaaagcagacccgcctgcccgctcaggctctacaaacaatacccatcacctggttgtttgctgtgtggggtctggacctcgtcggtcccttgcagaaggcacccgggggcttcacgcacctgctggtcgccatcgacaaattctccaagtggatcgaggcggtggcattcttcaccaacatcatccatcgcttcggggtcccgaactccatcatcaccgacaacggcacccagttcactggcagaaagttcctggacttctgtgaggaccaccacatccgggtggactgggccgccgtagctcaccccatgacgaatgggcaggtagagcgtgccaacggcatgattctacaagggctcaagccgaggatctacaacgaccttaacaagttcggcaggcggtggacgaaggaactcccctcggtggtctggagtctgaggacgacaccaagccgagccacgggcttcacgccgttttttctagtctatggggctgaggctatcttgcccacagacttagaacacggctccccgaggacgagggcatacgacgcccgaagcaaccagacaaactga

SEQ ID NO: 590 - DNA, 477 bp, Zea mays
  Peptide Sequence Number=SeqID_42369
atgtctattatgttgtctgagattctaatacattatcaagagagtgaaaatgaatgcgatgacaacaagaacgtaaagaagaaagttttagcaagcatcaccatcaaccacaaaccatcactcttggactctccatcatgtttcgtggccaaaggccctaaggtacatttcaatgagaatgatagtgaggatgaagaagagccatgtaaggaagaactcattaagctattacaagaggctcatttattcttgaacaagaacatagtagagtataaagaatcaccaggtgacctagtgccaccgtcgtcgtggtcctccatcgttgtgctccacgtcgtccgtcaccggtgccgcaccacggccacagcgccacccggaaccacgtccagtgccgacatcgtgccaccacctccacctcgcgtcggcaccatagctaccgaggtcccgcctgacgagtgtcttgccattgtgttctaa

SEQ ID NO: 591 - DNA, 975 bp, Zea mays
  Peptide Sequence Number=SeqID_42370
atgggtgcgggaaagggaggagacggcgaggaggccgcgcagcccgtcgtgctgaagctggacctgcattgcgccggctgcgcgcacaaggtcaagaaggccatcaggcgcgtgcctggtgtcgggtcgatcgtgacggacgtcgcggcgaacagggtcgtcgtggcgggcacggccgacgcgggcgcgctcaaggcgcggctcgaggccaagaccaacaagcccgtggaggtcgtctctgccggcggcgtccccccaaagccccccgccgctgagccccaacaggacgctggcgccggcgagaagaagggggacaagggcgcgaaccccaaggaggaggctaaggagcaacaggcggcggaggaggagaagaagaaacccaaggaggagacggtgctgctcaagatccgcctccactgcgacggctgcggcgaccgcatcaggcgacgcatctacaagttcaaaggcgtgaaggacgtggtgctggagggcaatgccaaggacgaggtgaaggtcacgggcaccatggacgtcccggacatgctctcgtacctcaaggagaagctcaaccgcgacgtggaggccgtggcgcccgccaagaaagacggcgatggcaaggacgaggacaagaaggacggcggcggcggcagcggcggcggcgaagacaagaacaagggcgcgggcgcggcgggcggcgacgacaagaaagacaagggcaaaggggccgacgacgtgccgcgaagttctgtaacagacgcgatgaacaaactggtcgggaagtgcgactgcgtggtcaccgacgctgaaccaatgcgtcggtccgaggcgttatccgaacgggaaacgggcgggcttggagctccatttgatttgcgttgcgtgcgctctttttcgcacgcatttttcatgcccaaccaggccgcaccaccgaccaccaccgaccccgtcttgcattctctctgtgcctgcttctag

SEQ ID NO: 592 - DNA, 594 bp, Zea mays
  misc_feature (24)..(24): n is a, c, g, or t
  misc_feature (195)..(195): n is a, c, g, or t
  misc_feature (495)..(495): n is a, c, g, or t
  Peptide Sequence Number=SeqID_42371
  unsure (1)..(594): unsure at all n locations
atgacgcccgagtgctcaacgccncccaacgacctggattcgcttttccccgagcctcagcagcagcaacgcgtcgcgcgtgcatcacaacgagattcagagcccgagcccgagccccagccccagaccaacgacgagaaaggacaaactgcggcggacctacccgaagtcggaggcagggcaaaaggcccgatncccccctccccgccggttgccgcgctcgtgccacggtgcgctagaaatactggagggctgaacactatcagcaacgatagctctccagacgccagttcaaaggacttgcgtgctaagttggtattgctgggagactcaggtgttgggaaaagttgcattgttcttcgttttgttcgtggtcagtttgatcctacttccaaggtaactgttggcgcatcttttttatcacaaacattggcattggaggattcaacaatagtgaagtttgaaatttgggatactgctgggcaagagaggatngcgcaggactacgcagagaagaacaatatgtttttcattgagacgtcggccaagacagctgataatataaaccaactgtttgagaaaagatcaagctga

SEQ ID NO: 593 - DNA, 2238 bp, Zea mays
  misc_feature (595)..(595): n is a, c, g, or t
  misc_feature (606)..(606): n is a, c, g, or t
  misc_feature (625)..(625): n is a, c, g, or t
  misc_feature (627)..(627): n is a, c, g, or t
  misc_feature (631)..(631): n is a, c, g, or t
  misc_feature (648)..(649): n is a, c, g, or t
  misc_feature (652)..(652): n is a, c, g, or t
  misc_feature (659)..(659): n is a, c, g, or t
  Peptide Sequence Number=SeqID_42372
  unsure (1)..(2238): unsure at all n locations
atgggaacaatggttgcagcggtggcgttgcgagggggaagcagcgatagcggaggatttgataaggttcccgggatggactcgggaaaatacgtgcgctacaccccggagcaagttgaggtgctcgagcggctctacatagattgccccaagccaagctcctcacggcggcagcaactgctgcgcgagtgtcctatactctccaacattgagccaaagcagatcaaggtctggttccagaaccggaggtgccgcgataagcagcggaaggagtcttcgcggcttcaggctgtgaacagaaagttgacggcaatgaacaagcttctaatggaagagaatgagcggcttcagaagcaagtctctcagttggttcatgaaaacgcgcacatgcggcagcagctgcagaatacttcattggccaatgacacaagctgtgaatcaaatgtcactacccctccaaaccctataagggacgcaagtaacccttctggactccttgcgattgcagaggagaccttcacagagttcctctcaaaggctactgggacagctattgattgggtccagatgcctgggatgaagaaccaacaaaagngcatagagatncttgaaagatcgtccctcntnggtntccgtgatttgccgaannctngaagtgnttacaagatgtatgccccaacaactttagtccctgcacgtgatttttggacactacgatacacgacaacaatggaagatggcagccttgtggcatggagtgttcctgaagtgcttcgaccactgtatgagtcttctagagttgttgctcagaaaatgactactgtggcactgcgccaccttagacaaattgctcaagaaacaagtggagaagtagtgtacgccttgggaaggcaacctgcagtcctacggacctttagtcaaagactaagcagggggtttaatgatgccattagcggtttcaatgatgatggctggtctgtaatggggggagatggcattgaagacgttgttattgcttgcaactcaaccaagaaaattaggaataccagcaatgctgggattacatttggagccccaggaggcattatttgtgcgaaggcatccatgttactgcagagcgtcccaccggcagtactggtacgatttctgagggagcatagatctgaatgggctgattacaatattgatgcgtatttggcttcatcattgaagaccagtgcgtgctcacttcctgggttgcgacccatgagattttctgaggggcagatgatcatgccacttgctcacacagttgagaacgaggagattcttgaagttgtccgccttgaaggtcagcctcttactcatgatgaagctcttctttcaagggacatccaccttctccagctttgcactggaatagatgagaaatctgtgggttcctccttccagcttgtgtttgcaccaattgatgagcatttcccagatgatgctccattgatttcttctggctttcgtgtcataccacttgatgatggtgtatcctctggtaggacgctagatttggcatctagtcttgatgtgggctctgctgcaccccaagcctcaggggaatctccagatgactgcagtttgagatctgtgctgacaatcgcctttcaattcccgtatgagatgcaccttcaggacagcgttgcagcaatggcccgtcaatatgttcgtagtgtcatttctgctgtgcaaagagtgtcgatggctatatctccctcccaatctggtctaaatgctgggcataggatgctttctggcttccctgaagctgccacacttgctagatgggtttgccagagttatcactaccatctaggtatggaattacttaatcaatcagatggagctggtgaagcattgttgaaaatgctctggcatcatccagatgctgttctgtgctgctcctttaaggagaaacctatgtttacgtttgcaaacaaggcagggctggacatgttagaaacatctcttgttgccctgcaagacctgacgctagacaagatcttcgacgagtcaggaaggaaagcactattctcagacatctcgaaactaatggaacagggctacgcgtacctgccgtcaggcgtgtgcatgtcaggaatgggccgccatgtttctttcgaccaagctgtagcgtggaaggtgctcggcgaggatagcaacatccactgcctggcgttctgcttcgtcaactggtccttcgtgtga

SEQ ID NO: 594 - DNA, 1017 bp, Zea mays
  Peptide Sequence Number=SeqID_42373
atgcaggaggcggcagcaggcgcctatccctcctacatggagccggagccggagccggagcagacgggtgcatcggcgactacatcgatcagcgggtgcgcgcgctggcggtggacgatgccgcgccgcccgacggagcactccttcgcggagcgcgccgaggagtactaccagaagcggccgcagctgctggccctcctcgccgacctccaccgccgctacctctgcctggccgaccgctactgccaccaccagcacaagcgagagcagccctcgctgccggcgtctgcctcctccgactgcggctcgtccgacgtcgacgaccgctgctccgacgccggcagctcgctctccttccaggcccagcacgcgccgccgcgggccggactccccgccgacgaagaggaggagctgctggtggcggagctggtggccgcgtgggtggagcgcgacgtgctggcggacgaggcggcgcggcgcgcggcggagtcggcgcgcaggatccagctgcaggggagcctggtggaggtgctggagtcggagcgcctggtgctgctgggcgagaacgcgcgcctggggttccgcgcgacggcggccgaggacgaggccgcggcggcggcggccgacctgggctacgcgcgccgccgcgccgccgagatggcccgcctcgtgctcaggctccgcgaggaccaccgcgcctgcgtgctggggcgcagggccgaggcgctgcaggcgcgggtgtacgcgctggagctccgcaaccgcgagtgctgcgaggccacggcggcgtgggaggccgaggtccagcggctcagcgcagagaaccgacgcctcgcggaccaagccatgatggcgaggaggaagcgcaagggcggtggtggtgggtggtgggcgagggtcaggatggcagcggccgggtggacgccgtgtgcgcccgcggtcacggtcgccgagcagaccaaggggaaggaggacggcaagtaccaccactacggcggcggatgcttctgtgtctag

SEQ ID NO: 595 - DNA, 678 bp, Zea mays
  Peptide Sequence Number=SeqID_42374
atggccgagcgggtaggccaggcacggcgagaagcggaggaagcgaaggcgaaggcccagtcggctcgagagaaggtcgccagggccagggaagacgcgggcgtggccaaggcagccctcgccgccatggaggcgcggctggaggcggtgacgcgggagatactcgccgcggacacgtcggaggtgacgctgacggtggacgattacaacgagctgcgccggagagcgcaggagacagaggaggccgacagcatgcgggtggtcgaggcggtgaagctggtcgaggaggccaaggacgcggaggcgaggaagctggagaaggtcgctcggctggcgaagcggaccgagcagaggcggcaggcgctggaagccgcgacgctggaggccgacgaggcggagttcgaaaagctgtcggcggagcgggagctcaggcagtggcgcgccgagcacgagcagcagcgcgcgcccggcgagaccggctcgccccggccggacctcgccgagatctccgtgctcgacgacccggcggccggcgacgggcgcgggaacccgcacatagtcagcccgagaggagggtacatgtcggcggcggacgcggaggacgaggacgcgaggcagaggaagaccttcttcccgcggattgtcatgttcttggcgcgaaagagagctcagacttga

SEQ ID NO: 596 - DNA, 1080 bp, Zea mays
  misc_feature (1034)..(1034): n is a, c, g, or t
  Peptide Sequence Number=SeqID_42375
  unsure (1)..(1080): unsure at all n locations
atggaggaagctaacgtccacgggaccagcggccggccctccaccgctccttctgatgcatctccggactcggctgttccatccacttctcaccaaggctctcgatcctgtgaggcccagctagatgaaatgcaggagccagacgtcgattccgtcaagggcgccgtcggcaaattcggagtcggaggggttcttgactggagagagaaacgcaagaacgtccagaatgagctcgacaaggtgcaggacgaggtcaccgagtaccagaagagagtacaggaggcggagtccggcagagcgcaagctctggaggagttgggaaccgccgcccaggcgcggcagcaggcggagctcgccgagctacagctcgaggagttgcggcgcggcgtcgcggcgcaggcgaaggcggagctcggcgccgccatggaccgcagcgcggccgcgctcgcggacctgcgggcggcgcgagcggaagtagagtcgctggagaaggagcacgcgcgcgccgcggccgaggcgggcgcggcggtggcgcgggcgcgggaggccgccgcggcgtcgcgggaggctgggaaggccgtcgaggacctcgcggccgagctcgccgcgctgaaaggggagctggagtcctcgcgcgccgctcatgtcgaggcggaggagaagacgaggagcctggccgtcgcgtgggaggatgacaagacacggtggcagatcgagctggaggaagccgagcgggaggacaagaggctgcgcgaggtcgagatgaaggcggaggcagcttcccaactgatggcgagcctcaaaaccgagctgttcgcttgcgccgtcgaaggaacgcctggccaggaggagaagccggcggcgagcacccagtcgatgcaggagaagaccgagaaggagctggacgacgtgaaggcgagcattgagtgggccaaggacgaggtcaagtgcctgcgcgtcgccgccgcctcgatgcgcgatgagctggagaaggagaaagcggagctcaccgcgctgcggcggagggagagggnaagggctctcgccagcgtccattcccttaccccgaggaggagttga

SEQ ID NO: 597 - DNA, 162 bp, Zea mays
  Peptide Sequence Number=SeqID_42376
atgagctccggccgtgacgccatcgggccgttccctgctcggttctcgggtgagtccaccggctcgcagcccctcctcggtctcgcgccctactgcctgcccccaccggctagcgcccggcacctcgccgtcccgtcctccccctgcgcgctgaagctctag

SEQ ID NO: 598 - DNA, 411 bp, Zea mays
  Peptide Sequence Number=SeqID_42377
atgttccctgcaccgctggactcggacgccgctactagcgaggaggaggctagtgacgacatcatctcctacatgcccctctcggtcacctttgacgaaaccccagaggactgggcctgcaaacaccacgtgagctatgagagcctctctgccatgctcacccgcttcgccatcggtgggaggtccatcacgtcccacgccaccgacccggcccatgaggtgacctttctgggctacgtcgccctcttcgggtccaggacttccattcctctggacttaggtagacacgacgaacatcttgttgttcaatggtattggtggtctggagaagaagcttgcatggcatttctatccaagcgtcgtcgtgaagaggacactggctacaaccttggcactgactctgagtcctaa

SEQ ID NO: 599 - DNA, 405 bp, Zea mays
  Peptide Sequence Number=SeqID_42378
atggggcagaggactgactacagtgagatggtagtcaagcagtttcttgcaactgcaaagataaatattgaaggtcagctgattgtctggatgacaggatttaaaaggtatgtggccacctttgctgagtttgctactgcaaacagtttggatcatgttgtgatctcaactgggattgatttatatactgaggagcagtttgaagattatgtacagtattatgagcatgtgaggctagccatctgtcggtgtttgggacccgaccgcacacccggggttacccctcgagaaattaatgcttggttaacagcttatgctttagagatcaacatcttgtccttaggggttgaagattcattgggtgcaccagaggtgcacccaatgggtgtagcccccgagctttga

SEQ ID NO: 600 - DNA, 1305 bp, Zea mays
  misc_feature (92)..(92): n is a, c, g, or t
  misc_feature (117)..(117): n is a, c, g, or t
  Peptide Sequence Number=SeqID_42379
  unsure (1)..(1305): unsure at all n locations
atggagtcatctactgggtcgtgcgccgtcgtacctttggtatggcgccacgtcgtgtccgccttccgagggattcctgtagctgctccgantttagacgtggcagtgcttggtggngttcagttgattcagctcatggcgtggtttagggatgtcttcagcacaacttcatctttcgtcgtccccttagcgtcacctttcatcatgcgtaggcgtatgactagtacgacgtattgcctcatcccttccggcgttggtcggcagtcccgccttgctgggttgcttggcggtgtaaggggcagaccctttcctgcgatggttcgccacacactgggctgtaaggggcggactctttcctgcgatggtttgtcacgcaccgagcgtgagtctatcggcctctcggacgcacgtgatcgcatcagtcagatgttcgtggggaacagatcttcttctggtcttcgtgtagatctcctggactaccgtgcccttgcctcggatgctcaggcgatgtcgtcatgtcttctccacctgtcagccttcgccttggtacctcgctcactacagtggggccatgatggcagcagcccacacggtgcagagagtcaaaggtcccgcctcgttaatggtgaggcgcgttatactccggaggtcggtatcggtttccccggtggttcacactatgtgtcgcatgatacgtggcagcgccgggcttcgcctgaacctcagcgccggacgcaagcttcgtaccgaggccctgctgacgctgtttacatacatacatattgtgccgatcgacaggtgaagggaattgaccgagaagtgctgctgccaaaagatgggcaccaggaagtggctgaggtcgcgctgcagctggggaagtactgcatagatgaccccgtcaagtccccgccgggcggacggaggatggttattcgtactgccaaaagaatgggaggttgtgtactgctcggtgccaacctcgccgggcgggctctaccggacgcccttggccgcctggtattcaaaaccgacgagatggtccaggcggtggaagcgcctgacgtggtcaggaacaaggtgtcgttctccgtctttggcctagagggcgcagtgtcattgaaaggtaagctgaatgtgctggacagtaaatggattcaggtcgtgtttgaagcgccggaactgaaggtcggctccttggggtttcagtacggtggcgagagcgaagtcaagctggagaagggaaggagatgggagaagacaacagcgcgcggacggaggatagttattcgttctctcaacgattaa

SEQ ID NO: 601 - DNA, 750 bp, Zea mays
  Peptide Sequence Number=SeqID_42380
atgcagcgggtcgtcgtcatgcgccacggcgatcgcctcgaccattccgagcccatgtggcccgccaacaagccgcgcccctgggatccgcctctcgacgacgccggcctcctccgcgcctggaccgtcggcaagtgcatcagggccgccgccgccaagcagggatgggccctccaccgggtcctcgtctccccgttcctgcgatgccgacagaccgccgcgcgcgccgtcgccgcgctatgtgccgtccccgacgacgacgcgctgctcgcggtgtctatcgagtatggattgtctgagatgatgaacacccaagcaatgggcattactgttagcaagctggctcccaacgtcagcaagtggtttcctgacttgccagagcttgaagccgacttcccggctggaaccatcgaccattctgcagaaccaatctacccggagctaccaaagtgggaggaatccatcatggaggcaagaagcagatacgcaagcataatcaaagctcttgctgacaaatatcctcatgaaaacctgctattagtaacacacggtgagggcgttggtgcatccatttcctactttgagatgggactagagatctacgacgtggagtactgtgcgtactctgttctggagaggcaggtgactgcagagcctggtgatgagcatgggggctttacctttaccgcggatagcttcaaggtcatgaccaagagtggtagcacaggcatacgatacgccccggtgtga

SEQ ID NO: 602 - DNA, 258 bp, Zea mays
  Peptide Sequence Number=SeqID_42381
atggctcccaagaaagtaaacaccagggccaactccttcccagatgaggccgcgaaggcagccctcgacgccaagaaagggaaagtcaccttcgcggacaacatcccacccccacagtcgagaacaccaccaacgggaaacatgatacccccgccccactcgggtgtgcgccccttgggtaccaccaacagctcccagcatcacgaagacgacatcctgctggacggcgaagactttggcattaacatagaggactaa

SEQ ID NO: 603 - DNA, 960 bp, Zea mays
  misc_feature (374)..(374): n is a, c, g, or t
  Peptide Sequence Number=SeqID_42382
  unsure (1)..(960): unsure at all n locations
atgacggggtctctccctgtgcccagcgtgcaggccatggtggccgctggtcgtcatgcaccagtgccaccaaggtatctccgtccagatctggccgcggatgtcgtcgttgccgacgacgcgacgaccatccccatcatcgacttccagcgactgctgctggtcgacccagaggaatctgcgcgcctccatgcggcctgccaggactggggcttcttccagaagaagatgtgcacgcagctgataaaccacggtgttccggacgatgtgatggaggcgatgaaggccagcatccagtcattcttcgcgcttcctgcggaggccaagcagcagtaccgtcagcaggcaggccagctggagggccgcccgagcanccggaacctcagcttctggcctgctggtgagagcttcaggcagacgctggacacctactccgccgccgtcaagcacgtcgccgaccgcctgctgggagccatgtacatgaacctgggcctccagctgagcatcatggacatggacccggagcggggtgccgggatacagtcggtgaggatgaactactaccctccctgcgctgaagcggcggacaaggtcaaccagctccagggcctgcagatcaagaggccgcccgacggcggcggtgcctgggcctggcttcccgtcacgccgctgcagggcgccttcgtcgtcaacgtcggggacgtcctcgagatcttcaccaacgggaggtacaggagcgtcgagcaccgggctctagtcaacgcccacacggagcgcttgtccatcgcggcgttccactctcccagcatccatgccaccatagggccgctgccggagctcctcggggaccaggaggtgcccaagtataagacgctggaccaccaaagcttcattacgctcttcttctccgccaagctccagggcaagagcttcttggaacggatgaagaagctttcgtag

SEQ ID NO: 604 - DNA, 174 bp, Zea mays
  misc_feature (130)..(130): n is a, c, g, or t
  misc_feature (139)..(139): n is a, c, g, or t
  misc_feature (146)..(146): n is a, c, g, or t
  Peptide Sequence Number=SeqID_42383
  unsure (1)..(174): unsure at all n locations
atgggggcaaaccaaagggtgtcttcagttgctggcaaggaggcggagctcaccgaggcaacagacgcgataggagctcgacggagaacgcataacgaactcaaggtcacggtggacggtgatagtgctnccatgggcngtgcgcngcagtgcgagagagagttatttgcataa

SEQ ID NO: 605 - DNA, 129 bp, Zea mays
  Peptide Sequence Number=SeqID_42384
atggcgatcattgctctcttaatcagcaatgtggcagattaccttattgagaaacaggaggttggactgattgacagaaaggagaatttggtgctaggtatagttttaccagcaattctgctttcttaa

SEQ ID NO: 606 - DNA, 713 bp, Zea mays
  misc_feature (46)..(46): n is a, c, g, or t
  misc_feature (62)..(62): n is a, c, g, or t
  misc_feature (75)..(75): n is a, c, g, or t
  misc_feature (99)..(99): n is a, c, g, or t
  misc_feature (104)..(104): n is a, c, g, or t
  misc_feature (359)..(359): n is a, c, g, or t
  misc_feature (362)..(362): n is a, c, g, or t
  misc_feature (380)..(380): n is a, c, g, or t
  misc_feature (418)..(418): n is a, c, g, or t
  misc_feature (449)..(449): n is a, c, g, or t
  misc_feature (461)..(461): n is a, c, g, or t
  misc_feature (468)..(468): n is a, c, g, or t
  misc_feature (470)..(470): n is a, c, g, or t
  misc_feature (484)..(485): n is a, c, g, or t
  misc_feature (489)..(489): n is a, c, g, or t
  misc_feature (500)..(500): n is a, c, g, or t
  misc_feature (503)..(505): n is a, c, g, or t
  misc_feature (517)..(517): n is a, c, g, or t
  misc_feature (521)..(521): n is a, c, g, or t
  misc_feature (556)..(557): n is a, c, g, or t
  Peptide Sequence Number=SeqID_42385
  unsure (1)..(713): unsure at all n locations
gccgacaacgcctgcgtccagatcctccagtggccagtgatcgccnctcggcgtcgccctcnctcgccgtcggcnctcgcgggcttcgtggccgccttnctgcncgcctgccgtggctcctcctcgcctacctcgtcgccatctccgtcctggtcgtcgcgctggcctgcctcgccgtcttcgtcttcgcggtgaccacggggtcgtcgggccaccgggtgcccagccgggacttcctcgagtacgacctggacgactactccggctggctgcgcgcccgcctggacgcgccggggcgctgggaccggatcaaggcctgcctggccgccacgcccacctgcaccgacttcaacgccacnccntcttcacggccgctctcnaacaggatgagcccgctgcagtccggctgctgcaagcntctcaccaagtgcggctacaccttggtcacnccgacgtactgnatcagcncnatcagcgccaccgnngacnccgactgcgcngcnnnagcaacgaggangccnaagttctgctactcgtgcgcctcctgcaaggccgnnctgctccagaacctgcgaggggagtggcgccgcgcagacctcatcctcgccgtcgccactgccgcgctgctggctgtctacgccatgggctgctacgcgttccgcaccgccaagaccgacgaactctttcgccgctacaggcagggctatacatga

SEQ ID NO: 607 - DNA, 636 bp, Zea mays
  misc_feature (240)..(240): n is a, c, g, or t
  misc_feature (476)..(476): n is a, c, g, or t
  Peptide Sequence Number=SeqID_42386
  unsure (1)..(636): unsure at all n locations
atggacgagggagcacactacctggtcctggtcatcatgtgtgtcttcgtcgtcaggcaaactctcatgtatctggcacccaccgagatcggcccgctggagatgagagtaatgggaagctacaaggaaatttgctccagaaatttcacaaaatcaaggagatggcttgactttgtcaagttagctttctatacagacacaagcttggcatgtatcgagcttgtcaccaccgtcatcggnaaggtcggcaagttggataaagttcacacacacactgcttcatcaggttcacacacactaaacaggttgacacaatacataagattctttttccttgctcagtggctgctcttatgtgtgttgcgtgctattctgctgttccagacaacaaagcagacccgattacggaagggacaaagaacgcttggaaacacacagtctacgacaattgtgctagacctgacatggggggaggngagattcaacctcggacaccaagagagggatgctgaggatctcatggccatcgacgtcggggagctgtccagctattggggaggtgctgccacgatcgaggagctacgtcgtggccggggatgtgagctaccgctggatcgtctagaaggagggcgttag

SEQ ID NO: 608 - DNA, 327 bp, Zea mays
  misc_feature (124)..(124): n is a, c, g, or t
  misc_feature (129)..(129): n is a, c, g, or t
  Peptide Sequence Number=SeqID_42387
  unsure (1)..(327): unsure at all n locations
atggcccagacatccctggttgctgccgccaaagctcacgagacctccctcggctatcgcagaacacagatagcaccgcacagctttaacgaatggctggcgaaaggtggcatctggatcccgnagggnacagcgtcaacggcaagcggagatggggatcccgacggagatttatccccgtggagaacatggacaggaaagaaatgtctgccgcaagggcttctgaggatcccagcggggaaattttttcgtcacgaggatgatgatggtgagctaaaacccgacgaagaattctccatccctagtgatgacaaccatccgaactaa

SEQ ID NO: 609 - DNA, 190 bp, Zea mays
  Peptide Sequence Number=SeqID_42388
ggtgatgcagtatgtaggtggtaagcttcaccgccgtgaccttcggaggaccatctatgaagatgaattaccatttgatgtgctcatgacaacgtatgacatagccttgatggatcaagatttcctttcacaaatcccctggcactatgcagttattgatgaagctcaacgtcttaaaaatccatccagt

SEQ ID NO: 610 - DNA, 1107 bp, Zea mays
  misc_feature (1076)..(1076): n is a, c, g, or t
  Peptide Sequence Number=SeqID_42389
  unsure (1)..(1107): unsure at all n locations
atgggtgatgaagctaataaagcaaaaggccaattcaagatcattaaacatgtactcaaggcatttatgctacgtaggacaaaatttttactaatcgagagtggaattctggcgctgcctccactaactgagctaacagtgtatggttctttgcttcaggatggtgccgttgacacagttacaaaagaagctttacatgctagtggaaagctcattgtcctagatcttatcctgaagaagctccatgaatgcggacatcgtgttttgctatttgctcagatgacccagacactggacattcttcaggattttctagagctacgcaattacacttatgagcgcctggatggttcagtacgtgctgaggaacggtttgcagcaataagaaatttcagttctcaatctacaaaaggtcttatcagagatgataatcgaagtgaagcatttgttttcatgatatcaactagagcaggtggtgtggggcttaatctcattggtgccgatactgttatattttatgaacaagattggaatcctcaagctgacaaacaggctctacagcgcgctcaccgcattggacagctgaatcatgtcttgtcaataaatttggtgtcacagcgcacaattgaagaggtcataatgcgaagagccgacagaaaacttaagcttagccataatattattggagaagaagacgggactgatgggaagggaggagatccaggaattgaagctagtgacatgagatcaattatctttggcttgcacctgtttgatccagcagatacagctacagaaacaatcgatgaggatataactgctgagacattcagtgtcgagaaactggcaaagttaaaaacaatgtctgaaaaggttgtcatgatgcgtagccatgagtcttctgaaaaggatgaacgagcatttgagatcaatccaaatatgactgatgacagtggaactgtgattagaagggcttctgattctatccgcattgatcctgggctaaatgaagctgcatacctatcctgggtcaagaagttcaaagaggcttccatttctagtgaagatgccacagnttggatttggaaggcaaagagcagcgcctga

SEQ ID NO: 611 - DNA, 615 bp, Zea mays
  misc_feature (304)..(304): n is a, c, g, or t
  Peptide Sequence Number=SeqID_42390
  unsure (1)..(615): unsure at all n locations
atggcggaggatgctacgagcagccacccgtcacgctacgtcaagctcaccaaggaccaggacgcccccgccgaggacatccgccccggcgagctcaaccagccagttcacggtagggtatgtatccctcgtcctttgagtccgatggatctggatctcatccctactcccctgcccgacagcagctcgaaggccggaggtgtagcgagtgcggtcaggtcctgcccgagagctacgagccgcccgccgacgagccctggaccaccgggatcttcggatgcaccgatgacccagagacctgagnggatcacgctggcgattctgacggcgatatttcacggtgttgatccgaggacgtcattcctgattggagaaggtctggtgttcagctggtggttatgtgctacctacactggcatcttccgccaggggcttcagaggaaatatcatctcaaggagcatcgcgagaggacgggacggcttgcagagaacaacgcagtgcccatgacggttgtgaacccgcctccggtgcaagagatgagcatgctggaggaggtggaggagaagggagcagagaagagtgaacacgatgatgtggaggtcattcctctatag

SEQ ID NO: 612 - DNA, 855 bp, Zea mays
  Peptide Sequence Number=SeqID_42391
atggtgtcgttggcgcgccggccgctctccgccgccgtacctgcgggcaacctcctcggcatccatctcttccggtgccccgtgcgtacctctccctccctctgcggctctgcctgcttgcttgttacgcagggcagtgagtttacctacaatccaaggctctggccgcgtcatgagctccacaaggatttcctcaatctctcccgctgcttcaatgcgcaaacctccaccgtacgagttcccgatcttgaccccaaatacaacatctccatcctcgcatcaaagcaggaccactgcttgttcgatttgctctatagatggcaagaaggcaggcttccagtacacattaattgtgtcattagcaaccatgatagaccacaagataatcatgtacggcgttttctccagaggcatggaatcccataccactacttacccaccgcacctgccaacaaaagagagaaagagatcttggaattgatccagggtacagattttgttgtgctggcaagatacatgcagatactctcagaaaacctgttaaaagcatatggtaaagacattatcaatattcatcatggccttcttccctcatttaagggagggaatccttcaagacaggccttcagtgctggggtgaagttaatcggggcaactagccatttcgttactccagaacttgatgctgggccaatcattgaacagatggttgaacgagtctctcaccgagacacgttacagagttttgttgtcaagtctgagaaccttgagaagcagtgcttagcagaggctatcaagtcatattgcgagcttcgtgtcctaccatatgaactcaggaagactgtcgtgttctga

SEQ ID NO: 613 - DNA, 480 bp, Zea mays
  Peptide Sequence Number=SeqID_42392
atgggtatgggcatggtagatgtgggtggtagcaaggctgaggttgacggtggaagggctgctaggctgtcggtcataacatcttcaatcaacacgttctggtttcctttagagatctatcctcatggagcttctttgatcctccttgtatactctaaagaggggtggcagattataagattttgtatccgggttggttacaagatgaaggtggatcacgaccatatctcccggtctgataagatctttgccatgtttattcttctagaattcctttgccgacaggccttccttctggtcgtgactgtcgagtccatgggctcagagcccatcttataccttcggaagttaagaaaatggttcgaaggcagaaatgcagtgtatcttcgaaggtggagtaattatgatcccaatcttagtaaccgggaacttggccacgttcctcgttccgggaacgtgggaacaatctcgttccagtag

SEQ ID NO: 614 - DNA, 282 bp, Zea mays
  Peptide Sequence Number=SeqID_42393
atgccgcagatgacgacgctcctgccccaactctcgacgctgctcaacctccatgctcaagctgttgttgtgcccatcatccgagctcttgtatcgctcttcctcgacgtcaactccaccttctacgcccgatggtgcccgatgacggaacaacagtcacagagaagaggaatagagcgcacaacgcagagcgcactagggggaagggaggctgggaggggaggtgctcaccggaagcggaggggaatccaggaggggctcgtctcgaagaggagggactga

SEQ ID NO: 615 - DNA, 207 bp, Zea mays
  Peptide Sequence Number=SeqID_42394
atggctgctactaaggaggcagatcactgcatcaaatatctggactgttctgtgttgcaaggtcaggtcataattgttgagaagtgcatttctattttcactgatgaaaccaccatttctgttttcaatgaatctgttgaactgaactgcaaaaatagaaattgttctattttgtttgagtgcacaaacagaactcaacggaactag

SEQ ID NO: 616 - DNA, 315 bp, Zea mays
  Peptide Sequence Number=SeqID_42395
atggccgaacccaataattccacaagtaaaccaaaagtacaaaattgcaccaagtccaccccctcgggcagaataggcactaaggtatcctctgctgaagggatgaagtctgaaaataataatgctaaacggctaactaagcatcaagtgattgctgagttggagaagatgaaaggcatgactaaagaagaggcagctgcctttgctgccaaggcagttgctgaggtagaagtagcaatagcagaagctaaggaagcagcaagagttgcagaggctgcagaaaatgatgctgaagctgcaaaggctttttcttga

SEQ ID NO: 617 - DNA, 4134 bp, Zea mays
  misc_feature (61)..(61): n is a, c, g, or t
  Peptide Sequence Number=SeqID_42396
  unsure (1)..(4134): unsure at all n locations
atggtaaccaccaccagcagggcaggatgttcaagcttcaccgccaccgctcctccgaccngcgtcggcgagcgcttcgacttcagattctccaacttccgcgccgtccaggtccccgccatttcagacaggctcttcctttccatagtctccgtagacaatggaaaaacaattgcaaagtccactaaagtagcttctcgtagtggaatatgccagtggcccgacaccatcttggaacccatatggttctccaaggaccaagtctccaaagaatttcaagagtgccagtacaggattattgtttccctgggatcggcaaaatctggcattcttggggagattcttctaaatctctctaattttctgaatttggccgatccaaccgctatctctttgccactgaagagatgcaactctggaacagttttgcagcttaaggttcaatgtcttggcacaaaatctaagctgagtggtgtcagatcattgagggacatggctcctcgtcttgatgaccgtagtccaacgccaaccaatgacgagctggacaacaggtcagattgctctgatggtatgttcaacaagggtgttcattcttcatctgaaaatcatctgggtggaacttatcaagatgaatctggaaacatggaaacaggtttctcagcatcagggtcccatcggagttctaattctggagatagtactgcagatagaacaaacttctctcctagagtcaactctaatggagggctttttgtgggaaggcaggattctgctagttcctatgctagttatgttagtgccggcggtggtgatgatgggcttagatccaacaattcatcttttagttctcggacttcaggcccaaatttgctgcaagggagtactccaaaaacattttcgaatgacctttctcagttatctatgggggcgtctgactcatccaaagattttcttgaagctgctgaagaaacaattgaggagctccgtgacgaggcaaaaatgtgggaacgccactctcgcaagttgaaggctgatctagagatgctgaaaaaggagtgttctgaaaaatcaaagcaacatgctgaactagcagttgagctgtctgctgcacaagctgaacgggattcatataggcatgaaatagaagaattaaagtcatccttacaagatgtaaacacacgacagacaattacaggaacacctaaacgttcagactggatagacctgcagaaggaacttgaaggtgaggtgaagtttcttaaagaatcgaatacagacttaaccatacaactaaacaggactcaagagtcaaatatagagcttctttctattcttcaggaactggaggaaaccattgaagaacagagagttgaaatatctaagatttcaaaggtcaagcagactgcttatcctgagaatgggctgttagtaaaaaaagacagagagtgggctaagaaactgtcaatgaaagaggatgaaatcacaattccgagggagaaatcggatcgtgctctcaacattggaaatgcagatggtgcagcttccaatgccatttatcttgatttggagaaagaaaatgaaattttaagggctaaaatacaagagcttgagaaggactgctctgaactaacagatgaaaatttggagcttatatataagctgaaagaaaatggtctgacaaaaggtcaggttcctcatattgcaaacaacaatgagctgcaattcaaaaagcttacatcccggattcatcaactggaggaggatcttaggaataaggaaatgttaagagatgacagtttttctgagtcatcaatgtctaatgcagatgagatacagagaaaatgtgctgaccttgagctgaaggtgctaaattttaggtctcaaacctgtgagctagaagaaaagttccgaaaatgccaagaggagctggaacaaagaaatcttgagttatctgcgctgagaagaaagataaatggtttacattctaatgaactggaagtttgtgaatctggtgcgacatggaagtaccaagctagaatagcagatctagaggatactgaacctgagacagatacacttaaggctaggtttgaactgcagctacaggaaaatgatgaccttcgtcgttccaaggttgagatgcagaattttatttctgagtttcaggcagagaagagtcagcttgaggaacgcctgtccgcgtcgcttaaagaaagcagcatcacatctaaatgtctggatgaagtgcggaaagatatccttgtgctttccagcagtatagattcccatgtttcaaccaataaacttcttgagaggaacttagttgagctagagagctgcaaagctgaactagagttgcatgtatcggagctggaacaggaaaacatcgagttgtcagaacggatatctggacttgaaacacaactgacttacgtgacaaatgaaaaggagtcaagcgagctgcagttgcatgactccagatctctcatcatcaatctcaaagataaagtagagtgtcagcaatcagagatggaaactcaaaggctccagtttaagcagaaacaacaagaatctcaaagaagattgtgcgaagcacaagatgattctgaagttctgagaagatctaattgtaaactacaatctacggttgagagtcttattgaagagtgcagttctcttcagaatctaattgctgatctgaaaaggcagaagttggaattacatggtcatcttacgcaaaaagagcaggaattggatgagtcgaaaaaaaagaactttgagtttagcaaaacagtggagttccttgaggcaaaacttttgtcactacagaaggacatttcttctaaagaacaatctttattgtcagaattggagaatattttccaggagcacatggaacaagaagaaagaattaatcgcgcacatttcatgctcaataagatcgagaaagaaaagactcttgaagtagagaatcttgaaagggaggtcgtcagcctcgctgcacaggtctcctccacacacgaggagcgagaaagtgccactctgaatgctattcaagaggtatctgtcctgcgagcagacaatgctaaacttgaggctaatctccaagatgttagtgaacagctgagatgttacgagtctcaattggaagaccttcgtaaggagtctaaaagtaaaattaaaggattggttgattcccttaatgcctccaaacaaagcgaggaaatgttgacatcagatgctgaacatatgaaaaagttgatggaagctgctaaatccaatgaagatgcactaaggaagacttctaacgaactagaactgaagcttaaatccagtgattatgtgaaacaacaaatgctggaagaaatatctggcctgaaacttcaggttcagaaaataatgaatcttcaagatgaggtttccaaacttcagagttctcttgatgaggccaagttcgaaaaagggaaacttgaggagtttgtgcgctcggtgactgaggaatgtcaagaactaaaagcacagaaggctatgctaacagataaagtttcttatatgcaggagaccttgagaaatggtgaagaagaaaaccgaaacagaatagctatgcatgcaaagctcatgaggttggagagtgatctaacagcattagaagcatcacatgtacatgaagcagaattaaagaacgaactcagtaggatcaagagatcaaacagtgagtatcagaggaagatacaatctctcgggcaggaaaatgaggatctcactaggcgagttcaaattatggaaaagggttttgagcgaatgtcccacgctaaagagaaccttggaaagcaggagattggaggagataaccaggaagccatccagtcaacaattcagttactggaaattaagcttgcagaggcattggaggaaaataagatatacagagctcaacagaagagttcgatgtctgaggggcaacctgctggtggagatggcaaggagggcaataccgacaggattttgcagttggaaggagagctgagagatatgaaggaacgattactcaacatgagcttgcagtacgcagaggtagaggctcagagggaacggtgggcatcatcaagccgtgctatgctccagcaccagtga

SEQ ID NO: 618 - DNA, 324 bp, Zea mays
  misc_feature (177)..(177): n is a, c, g, or t
  Peptide Sequence Number=SeqID_42397
  unsure (1)..(324): unsure at all n locations
atgcaggccgaggagccggagctgcggcaccaggggcagcatctggtgctgctgattgcacagcatgtgtcgttggtgctgctactgctggcgcaacaggtggcgctgctgcgtgtgctggggcgcctggggtgccggtggcaggtggcacaacaggaggcactgcagctttgccanttttgtggtgagggtgtagggacacgagaggcgcagcgagatgccacagctagcgagggtggcgaggctggaggatccggggtgaccgaggcggtggtgccaaagcgtggcggtaacggcgaggctgcagtggtgcaccgatggtga

SEQ ID NO: 619 - DNA, 1188 bp, Zea mays
  misc_feature (759)..(759): n is a, c, g, or t
  misc_feature (773)..(773): n is a, c, g, or t
  Peptide Sequence Number=SeqID_42398
  unsure (1)..(1188): unsure at all n locations
atggagcccggcctcgcatcccgcgtcgcccgttcagccgctcagccgctttccggctgcctgtcgcggcactcgctctcgccgtggctcaagatccagaaccacatttatcctatgccaagtctctgtcacaaggttcctagcacgggaaaatgccacgcttctatgacaacaagttacatggaaacatcagatgtcactgatttggactgggaaaaccttggctttggcctcatcgagactgactttatgtatgttgcaaaatgtggaactgatggaatcttttccaaaggtgaagtcctaccatttggtcctatagcactgagtccttcagctggagtcttaaattatgggcagggattgtttgaaggcctaaaagcatataggaaaactgatgggtccatccttctatttcgtccagaggagaatgctataaggatgctaagcggtgcagagaggatgtgtatgcctgctccaactgttgagcaattcgttgatgctgttaaacaaactgttttggcaaataaaagatgggtgcctcctactggtaaaggttccctatatatcaggccactcctaataggaagcggtgcagttcttggtcttgcgcctgctcctgagtatagctttatcatttttgtatcccctgttgggaattatttcaagtggacagtgatacaggatagcttaatggtaatagtgtataatatgaactcgtccttacacgcatctaaaatagtttgtttcaacaatgccggnaaggtttatctccntattaatttgatcgttgaggataaatttcaccgtgccagccctggtggaactggaggtgtgaaaaccattggaaactatgcctcggtactgaaagcacaaaagattgcaaaggggaaaggatattctgatgtcctttatttggatgctgttcatgacaaatatctcgaagaagtctcttcctgcaatatttttgttgtgaaagacaatgttatttctacgcctgccattaaaggaacaatacttcctggtataacgaggaaaagtatcattgaagttgctcagagcaaaggtttcaaggttgaggagcgtctggtgtgtgtagatgagttgattaacgctgatgaagttttctgcacggggactgctgttgtggtgtcacctgtggggagtgttacatatatggggaaaaggtga

SEQ ID NO: 620 - DNA, 600 bp, Zea mays
  Peptide Sequence Number=SeqID_42399
atgaactacgagctcatcacagtgtaccactttgacctggcaggcacggcattcggcgccatggcctattcggatccttcactacctgtggcttctctcaccggctcttgcctcactcctcaaaaaatctcgccagctctctctccaatctcgcctcccccgcgtctccggctgcgtttgctccgccggcgctccactcgcctcccccgcgtctccggccgcgtttgcttcgcggcgctccaagggtttagggcttgcgaccgcctgcccaataagtctgcggcctcctccgtcctgcagaacccgtcgtcgcggcggtgtcctcgcgccatgcccttcttcctggaccagcgccgcgacccgcgcctgttgtcggtgccaccgccgcagtcccactcccgctgcagcaactggtgcagcgcgctgccgttgtcgctcgagctcagctgccccaggaagtgctcgcagctgctccccgctgctccccatcgatccactcccgctaccgccgcgaggaagaagcagcttcagctgaagctgtccgcaggagatgaccgaaggttcttcttcatgaagcttcggaattacaaaccgacttaa

SEQ ID NO: 621 - DNA, 654 bp, Zea mays
  misc_feature (393)..(393): n is a, c, g, or t
  misc_feature (396)..(396): n is a, c, g, or t
  misc_feature (422)..(422): n is a, c, g, or t
  misc_feature (457)..(457): n is a, c, g, or t
  misc_feature (471)..(471): n is a, c, g, or t
  misc_feature (481)..(481): n is a, c, g, or t
  misc_feature (489)..(489): n is a, c, g, or t
  Peptide Sequence Number=SeqID_42400
  unsure (1)..(654): unsure at all n locations
atgggggaagacgcaagcgccaccaactcttcaaccgaggcagtcgagagagtagtggcatcaactggtctcccccatcagaaaccgaggggtcactcagatgggagaacacaggcgccaacgactattcaaccgaggcgttcaggagagcaacgacatctactggtcctcccaccaccgaagacgaagcaaaatgaggtcccagtcgatcaagcaccaaggttcgaacagaggaaggctaacagtcctacaaacgcggtcgctgcttgtggtgcttcagatcgcgatcttcgtcatcatcatccggtgaagaaggcgggggttggatatgaacccgcaagtcatctgaacctccaaccttcattgatacacgtgcgcacagagaagatgctncancgtatgaattccccaaagatgcgcanggaagctccactaagctcaacgtcgaggagcaccnggcaggactccacncgccagcggnccaactcnctaacgacgccaccttttaaggtgcaaccgaaaaggaggaatgaaaagagattttcctccattgtaggcacgaacgacatgatcctcagaggggaagaagaccaggaaagagttggacgcagcacgctggagttggagcacatcagcttcaaggccaagccttga

SEQ ID NO: 622 - DNA, 210 bp, Zea mays
  Peptide Sequence Number=SeqID_42401
atgacccctgaggcctccgtgataagcccctggatggcctcggtcgccctctccaccaacgaacttctccgacgcgtgaagggaacggtgcggaaggcggattattccgtcgtggtgccgatgcggcccgagcaggggctacatgtccctggcccatcctgcgacccggcagttgatcaccatggcatctgcatgtggcgcactgcgtag

SEQ ID NO: 623 - DNA, 384 bp, Zea mays
  Peptide Sequence Number=SeqID_42402
atggtggtggtggtggattttggtgatgtggtggtggtggcggtgggggttggacttcttggtgttgctggtacatatggttttgctggtggggatggtgtgggcgacaactctttggttgtcagccggttgatttctggccatcctatctttggaggccttggttttagggcaatccctggtgggatgtgtcgagtcttcgccatggaaaagatagtaaaaccttcgctgttgcgggactcggccattgcctctgcctctagtgttgctgttgcggccctgttgcgtggggtactcatggcgacgagcagtgtctccagtctgctactgattggcgatggtgttcacttgggactggttacggtttggccgaccaaagtctga

SEQ ID NO: 624 - DNA, 204 bp, Zea mays
  Peptide Sequence Number=SeqID_42403
atggctgccattgccgcgcacccgaggatctcgcgggtggttcgtgctcgacctccggggtaccttcaaactcgagttaaaagcatatacgatgtaaaaagcaagatcgtgacgaaggctggaattgctctgaagctacgcgcaggggagcttcggctaaaagtcggaaaaaggaaccgacttaaagggaaaaaggctatctag

SEQ ID NO: 625 - DNA, 507 bp, Zea mays
  Peptide Sequence Number=SeqID_42404
atgaaaagaatcaggagctatttccggaagagactactggacaaagtgattgctctagaaaataagaaggttgagtttggagagaagagaagtgttgctaaccaggggcaggctagaagtagttcccctccccgttatgctactactcaaagtacacctgttggtggcagttctgggcagcaaactcaacagacacaaactgctcctcctcaagcaagcaccccagcgggacctgttgctcctaatacatccacaagcaggtcatgcttcaagtgtggacagtctgggcactataccaactactatcccaacaaggatgcttatactactttagctccgatgaagcatggtcaggcctcaggaggcaagagtcagcccttattcgtcaaccgggggcaggtcaaccacgtgaaagtagaagctaaacctggtgaacctgaaaaccaagaagagatgtcggttgaaggagaagaagccggtgaagaagttaacgggcagcaagattag

SEQ ID NO: 626 - DNA, 399 bp, Zea mays
  Peptide Sequence Number=SeqID_42405
atggcaggtcaaaggatggatgcttcaattgcggcgaccccgacgacttcatcatcagttgcccccaagaagggcaagcaagaggatgcctctcgtgaccaccactctagtcagtgcaagggcaagcgggagtactcctatgataagtacaagtccaagggagggttcgagaaggaggcgctcaagaagtacctccaaaaggccaagatcaaaaagtgtgccttccttgcctccctcattgacctcgaccacgactccaacgatgtagtgtcttcctcgagtgatgaggagactgataggcaggccgaggataagctaaacgggttgtgcttcaacgtcgacaccgcaggtagcctttgcaccatggcccttggtgatgatgttgtgggcggtgattag

SEQ ID NO: 627 - DNA, 1812 bp, Zea mays
  misc_feature (50)..(50): n is a, c, g, or t
  misc_feature (1405)..(1405): n is a, c, g, or t
  misc_feature (1606)..(1606): n is a, c, g, or t
  Peptide Sequence Number=SeqID_42406
  unsure (1)..(1812): unsure at all n locations
atggtgttaatggccgttggcatgaaatctctgataatgttgcaagtggnaaatttccttggtgctaagaggcgaggggttgttggtggcattgattatggattcaccggtgaagttaaaaaaatagatgtttcacggataagagaaaggcttgatagagacagcatagttgttgtgagcaacatggggtactccagcgcaggagaggtcttgaattgcaatacctatgaagttgctacagcatgtgctttatccatagaggcggacaagcttatttgcattgttgatggccaaatatttgatgagcatggtagagtcaatcgttttatgtctattgaagaagcagatatgttgatcagaacacgtgctaagcagagtgaaattgctgcaaattatgtgaaggttgttgatgaggaggacatcaatcatgtccgctgcctcccaatgaaacatggtacagaacatggtatgaatggaagggaccatattaatgggtatactgcatcttttcggaatggtgtgggtttcaatgatggaaatggtctgtctggtgagcaagggtttgctattggcggggaggagcgcttgagcaggtcaaatggttacctatcagagttagcagcggcagcatacgtatgccatggtggtgtccaaagagtgcatatcatagatggtactgttggtggagcattgttgctagaactattcactagagatggtgttggaacgatgatagctagggatatgtatgaaggaacaagaatggccagagaggaagatctttctggtattagaaagatcattcgtcctctagaagaatctggtgtcctgcttcttgaagcattgacatcatttattgtcgtggaaagagatggctcaatcatagcgtgtgctgccctcttcccttttcttgaggataaatctggggaagttgctgctattgctgtatctgaagaatgtcgaggccaaggtcaaggagacaaattacttgtcacaacgggagcaccgcaaacgatgagactagagcagaagccgacggttggaatccccccgcagtcgcagcgtcgtgagagtgcgagtgttgtgtcgttggggagccccgttagggagactgacggcaacgcgcgcgtctgcgctggtcagggtggccacacccgcggcagagtagaagaggtaaagacggatccggccaggaaggccacgacaacgacgaatccagaggtcgcaacaacggtgaatccggccgggaaggccgcgacagcgccaaatccaatgaaggtgacgaagaagggggaaaggcgatggggcggttctagccggacaggggcctgcgtcgagcctggcagggggtttgacggcgaggacaagagatgcttaaagagccttgggaaggagggggctcgcnaagggatccctggccgggccagggcgagctcactgctgcgcaggtcggagggcggtgacggtgcggctctagaggacggcgcgtcaggtcccggcgacacgccggaggagacaggcgaccccaggacggcggcgtgccagtgcgggggagggggtgtggacaccgaggagggagcggtcgcgccaccgtttgcaggggagngggcagcgtcccgaccaggcagaaaaggggggggcgccagcgtcaaggatgaccggggccggctgcggtggccagaggtaggaggtggggttggccgcgtcgtcctggaggagaggtgcagggaggcgaggggctccagcggggggaggaagacgccatgggagaccccgcacgagctcaagggagcaagggcgccctctgtgtga

SEQ ID NO: 628 - DNA, 444 bp, Zea mays
  Peptide Sequence Number=SeqID_42407
atgggcaagaaaaacaagcgcaagcgtgagccaactcctccatcggaggagtttggtgactcggagtactcagaggaggagttctcctctgagtctgaggggtctccggctcccatccccctgcgtgagtcgtctgacgactcccaggggctcgcggtggaggtctggacgtacatccgggccgtcgagcgctccaggctcgagggctcggatgagtcggagtactcctcggatgaggaggactcggacagcggcagcgaggacgaggacgaggacgacgacgacgacgacgaagacggtggcggcggtgacggtgacggcaacggcaggggcggcggcagcggcaacaaggacggtgacggtggcggcagcaggggcggcagcggtggtggcggcagcagcagaggcagcaccaggggtggcagcaacagggccagtggctag

SEQ ID NO: 629 - DNA, 369 bp, Zea mays
  Peptide Sequence Number=SeqID_42408
atgacaagtagcgatctgcagcagcagcagcagcacgtaacattgagagctattcatagcctgaaccaacagtcaccagttcggtactctcgccagattgcaaacaaatgctggctgaagaaacagaaggatgtcatggcccctgctgttattgcaaagggggaggacgtcatgtggacttctggtctaatctttggaaaaggagaggggattgtggggcttgaaacaaatttagggacacttcatattcaatccaaatatgctacagtggtattccacgacaacccaaatagaattgggaacatatctggtgcaaatcaaacgcttggtgcaaaccgtgcgttggtggaggtgagagggtgtatttaa

SEQ ID NO: 630 - DNA, 426 bp, Zea mays
  Peptide Sequence Number=SeqID_42409
atggcccagacatccctggttgctgccgccaaagctcacgagacctccctcggctatcgcagaacacagatagcaccgcacagctttaacgaatggctggcgaaaggtggcatctggatcccgagggacagcgtcaacggcaaggtgaagcaggtggtgaatgccaggctccacaacgtccagcgcggccagcttgacctccctctgtttgtgatggctagagatggtaatgtgactgggatccgatccccgatttgcggggaaattcttccattagaagatgtggatagagaagttccttctcccacaaggaaaaattattcactaacgggtaaacggggacaggatggggaagcattctccatccccgttccctgcggaaacccgttaaacatatacatgacgtcgttttcatgtaatatctaa

SEQ ID NO: 631 - DNA, 810 bp, Zea mays
  Peptide Sequence Number=SeqID_42410
atggcgggagccgacgacctgaaggtgctgggcctgtggacgagcccgtttgtgatccgagtccgcatcgtgctcaacctcaagggcctggcgtacgagtacgtggaggacgacctcagcaacaagagcgcgctcctgctcagctccaacccggtgcacaagaccgtgcccgtgctgctccacgcgggtcgccccgtaaacgagtcccagatcatcctgcagtacatcgacgaggtctgggcggggaccgggccggccgtgctgccgcgcgacccctacgagcgcgcggccgcgcggttctgggcggcctacatcgacgacaaggtgaagtccgcgtggctgggcatgctgttcgagtgcagggacgagggggagcgggcggaggcggtggcgcgggccggcgaggcgctcgggacgctggagggcgcgctcagggggaagcccttcttcggcggcgacggcgtcggcttcgtggacgccgtgctcggcgggtacctcggctggttcggggccgtcggcaggatcatcggccgcaggctcatcgacccggccaagacgccgctgctggccgcgtgggaggaccggttccgcgccgccgacgtggccaagggcgtcgtgccggacgacgtcgacaagatgctcgcgttcctggagaccctgctcgcgaactactactccaagaagacgacgaggtggcagtgctgggtgtcggcgtgcggcacgttttacatcgaggaaggtgctggtggtgctcatccgcaggccgccggcgagatgggtgggactctagctcccacgctatcgctctag

SEQ ID NO: 632 - DNA, 438 bp, Zea mays
  Peptide Sequence Number=SeqID_42411
atggctaggatccgtgagagaaagacaagggacatcaaccaaatcaaatgcatcaaggatgaggcagatcgacttttggtaaaggataaggagatcaaggacaaatggcgagaatacttcgataagttgtttaatggggagaatgaaagttctacccttgtgttggatgactcctttaacgacaccaacagacgctttgtgaggagaattcaaaaggcggagatcgttgaggctttgaagaggatgaagggaggtaaagcgattgatggcatccccatggagcaattgatggagagatatagagagcagaaggacttgcacatggtctttattgacctcaagaaggcgtatgacaaagtacctagaaatgtcatgttatgggccttggagaagcacaaagtaccaactaagtgcattaccctcatcaaggatatgtaa

SEQ ID NO: 633 - DNA, 789 bp, Zea mays
  misc_feature (24)..(24): n is a, c, g, or t
  misc_feature (82)..(82): n is a, c, g, or t
  misc_feature (378)..(378): n is a, c, g, or t
  misc_feature (719)..(719): n is a, c, g, or t
  Peptide Sequence Number=SeqID_42412
  unsure (1)..(789): unsure at all n locations
atgaagttgttaaccatcgtcgtngttattccatcatccgtagcagctcgatcaacatcaccatggcgctcaactacatggnccgtggccgccatcaacttggtcgccgcgctgctgtccgtccccgtgatcgccgctggcatctggctgtccacgcaggccgacaacgcctgcgtccagatcctccagtggccagtgatcgccctcggcgtcgccctcctcgccgtcggcctcgcgggcttcgtggccgccttctgccgcctgccgtggctcctcctcgcctacctcgtcgccatctccgtcctggtcgtcgcgctggcctgcctcgccgtcttcgtcttcgcggtgaccacggggtcgtcgggccaccgggtgccncagccgggacttcctcgagacctcttcacggccgcccccaacaggatgagcccgctgcagtccggctgctgcaagcctcccaccaagtgcggctacaccttggtcaccccgacgtactggatcagccccatcagcgccaccgccgaccccgactgcgccgcctggagcaacgaggaggccaagttctgctactcgtgcgcctcctgcaaggccggcctgctccagaacctgcgaggggagtggcgccgcgcagacctcatcctcgccgtcgccactgccgcgctgctggctgtctacgccatgggctgctacgcgttccgcaccgccaagaccgacgaacntctttcgccgctacaggcagggctatacatgatcgatcatgacgacgatgatatgtactgtattaattaa

SEQ ID NO: 634 - DNA, 366 bp, Zea mays
  Peptide Sequence Number=SeqID_42413
atggacgagggagcacactacctggtcctggtcatcatgtgtgtcttcgtcgtcaggcaaactctcatgtatctggcacccaccgagatcggcccgctggagatgagagtaatgggaagctacaaggaaatttgctccagaaatttcacaaaatcaaggagatggcttgactttgtcaagttagctttctatacagacacaagcttggcatgtatcgagcttgtcaccaccgtcatcggaaggttcacacacactaaacaggttgacacaatacataagattctttttccttgctcagtggctgctcttatgtgtgttgctgctattctgctgttccagacaacaaagcagacccgattacggaag

SEQ ID NO: 635 - DNA, 216 bp, Zea mays
  Peptide Sequence Number=SeqID_42414
atggtgcagagtcaaaggtcccgccttggtaacgcgcaagccactatgtgccccatgtacttcggtcgtagcgcccatctcaggagtgggcaggtatacgtctcgtctgcagttaatgttgaggcgtaccatactccagaagttgacaccgattttccccgatggtcctcattatgtgtcacagaacacgcggcagcgccaggccttgccttatga

SEQ ID NO: 636 - DNA, 660 bp, Zea mays
  Peptide Sequence Number=SeqID_42415
atggcggtgacctttccctctcccaccccgcggtccccgcgccggccggatgccattgtggctcctgacccctcgtctgctgacatgtcgccctccctcgacttcggcgacccgacctccttcaccgcgctgcgcgtcctcaccgacgggggtgccgccacccgccttctccacgagtgcgtggcctaccagcgcgccctcgacgcccgtctcgacgctctcctcgcccgccgcgccgacctcgaccgcgccgctgcttcgctcctccgctccgccccaccactgctctcgctcgcggcctccgacgccgccgcgcttaaggagtcctcctcctccaccgcggcgcttgccgacgcgctctcgtcccgcgtgcgccaccttgacgcggcgcactccagggcggacgccgcgctggcgcgcgccgaggccgcgctcgaccgttcccgcgcgctcgaagcaacgcggagggccttggccgctgacgacctcgccgctgccgccaccgccgcgcacgaattcctcgctatcgacgctcggttccccaccgacgacgatctccgccgcgatctgattgacatcaaacgtcgcctcgaggggctcgcgcgtcggaggctagcggcggtcgtcgacgcacaggaccaccctgccgtgctccgcctc

SEQ ID NO: 637 - DNA, 966 bp, Zea mays
  Peptide Sequence Number=SeqID_42416
atggccggcaccacactcctggcgcgcgcgacttggaagaagaaccttttccttgcaagaatgcccaaccctcctcctccttgcaggcaggagtcgctctggggaaggaacgccacagactccgggaaattgccgttgcatttgcagcaggttagacatgtcgtcgtcgtcgtcgtcaatgctacgccttcctccatgccgtcccgcagtccatccaggggtgctggatcatcaggagggagcagtagcacgcacccactccgatcaagctcaagatcaaggccgtcgtcgctcaccgctgcgtgcgctctcaagacgccctcgaatggcggatcgagggggaaggtcaaccccagggacctcttcaccttctcccacaagttcagcaccgacatcccgatgagcgaaacgcaaggggcgtccatcgatgagtacctgcggaacagtcccaggatcgtcggagcggtgtttccggaccagcgcaagagaaggaagatcaacgacgaagaatggagcgtgcagctcctgcccatccggttcctgttcctgtcggcgtcgccggtcatcgtcatgcgcttcgtcagcaagtccggcgggaaggagtacccgcccaacgtccccgtccacgccaccagcctcctcctcatggaagtgacagactacaagctgaatggtctggacagcaacgccatgccgtcgcacctggccctcaccgtccgaggcctcatgtacccgcagcggcagcgggaggggaggaagagcctcaagggccacgtcgagatgaccgtcggcttcgacctcccgccggtgctcgccttggtcccggcgagcatcatcagaggcgtcggcgagacggtgctgaggcagatggcggagcagatgaagcaggacatggacacaggacttgcagcagatttcaacaagtacaggagggagaagctaacagagaggcgctcatcgccctga

SEQ ID NO: 638 - DNA, 1299 bp, Zea mays
  Peptide Sequence Number=SeqID_42417
atggcatcctcctcttccttggcctccgccaaagccctagcacgctcccacgcgtccctcctcgcgccccaaacccagagaacaggattctctcgcccggtccctcagtccggtccgtgtctcgcggctccgtgcgaccgtgccgggcaattcaagctgctccccttcgacgatccgtcttccgccgtcactctgccgatggcttctgcacttcagcgccttggtcgcgccagcgccgtcgcgctcgcgccgcgcctccgtcaggatgcgcgcctctgctgccgcgccggcggagccgaagaagaccgtctgggtgtggaccgagagccggcagcaaccgctcgcataaatgctctcttcattgacggtccagggattttcgatgaggagaaccagaaggttgctgtaatttcacaagtctcttcgcccggtgaacttgaccttgtacaaccggacaacgccgaagccgagaacattgtcatagactttcgaggtggctggcaggttatacgggcagaaaatatagttgctgcattccaaggatgtaaaggaaatgtattggctgtatcaacgaacacaactgaggcgcaagtttttcttgaggccttggagcaagggcttgatggagttgtacttaaagtagatgacatggatgatatcattaagctcaaggattattttgatcgaaggaacgaggcaaagagtcaattaccattgacaaaggctactgtaacaaaggtcgaggttgttggtatgggtgatcgtgtttgtgtggatctttgcagtatcatgcgacctggcgaaggccttctggttggatcgtatgccagaggaatgtttcttgttcattctgaatgcttggagactaattacattgcaagcaggcctttcagagtcaatgcggggcctgtacatgcatatgtcaccgttcctggtggcaagacaagctacctctcagagttggggtcaggaaaggaagtcatcgtgatcaatcagagtgggctatggcgtactgcaattgtcggtcgtgtgaagatcgaatcaaggcctctgatccttgtagaagcgaaggataactctggagacgagacgtatagcatttttctacaaacgcagaaacagttgcacttattacccctaacacagtctctctataattcgggtctattcggtggaccgaatagaccgaaccgaaactcgggtctattcggtggaccgaatagaccgaaccgaaactcatacaattgtgagattccattgcaacgtacaataatagatcaagacattgatgccaagtga

SEQ ID NO: 639 - DNA, 696 bp, Zea mays
  Peptide Sequence Number=SeqID_42418
atgaccggaggaggggaggagcaggggaggtcgctgttcggcgtgtctctgacaaacaggcctaggtggcagcagttcatgatctgctcctcgggcttcttcttcggctacctcgtcaatggcatctgcgaggggttcgtgtacctggcgctgatacggctgcaggggttcacggtgaagcagatggtgaacccgtggcggacctacgtgcgcctctcggcggtgctcatgggctccaatggcctcaccaagggatccctcgccttcctcaattaccctgcacagatcatgttcaagtcaaccaaggttctaccggtgatggtgatgggagccttcatccctggtctgaggcgcaagtacgcgttccaagagtacgtgtcggccgtgatgctcgtcgtcggcctcatactcttcacgctcgcggacgcgcagacgtcgcccaacttcagcatggccggcgtggccatggtgtccggggcgctcgtcatggatgctttccttggcaacctgcaagaagcaatcttcaagatgaacccggacacgactcagatggagatgctgttctgctccactgtcgttggccttccgttcctagcggtgcccatggtgttaacaggagagctcgtgacggcttggacttcctgctcccagcttgttgctgaaaagggtcagacgattgaccaagccgatcgatga

SEQ ID NO: 640 - DNA, 1590 bp, Zea mays
  Peptide Sequence Number=SeqID_42419
atgggtagaaagaaagacgcggaggaagaagagtcgtctgtgtacaacgacaaccgcggctgccgcgagcatgggctcccgccaacgacgtggctgtccacgtgcttgcacccgtggcgatactaccgaggcccgagggaaaaggacagcgagcccggacagcccagcgtcaacgtcagcggcggagcaggagagatggcgtcggaggccaaggacgtgggcatcctcgccatggacatctacttcccgcccaactgcgtgctccaggaagagttggaaacacatgatggcgtgagcaaagggaagtataccattgggcttgggcaggaaagtatggcattttgcactgaagttgaggatgttatttcgatgagcttgacagtggtgaagtccctcctgaaaaattataacattgacccaatgtgcattggacgtttggaagttggcagtgaaacagtaatagacaagagcaagtctataaagacatggctgatgcagatatttgaggaatctggcaatactgatattgaaggagttgactcctcgaatgcatgttatggtggaacagctgcattgtttaattgtgttaactgggttgaaagcaagtcatgggatggtcgctatggacttgttgtttgcacagacagtgcggtttacgctgaaggtccggctcgccctactggtggtgcggctgctattgcaatgctgattggaccaaatgctcctatttgttttgaaagtaaatatagaggatctcatatggcccatgtatacgacttttacaagcccgatcttgcgagtgaatatccggtggttgatgggaagctatcacaaacatgctacctcatggcattggactcctgctacaatgtattttgcaaaaagtatgaaaaacatgaggggaagcagttttcaatttctgatgcagattatgttgtgttccattctccatacaacaagcttgtacagaaaagcttcgctcgtttgtactacaatgatttcttgagaaactgcagcacggttgatggagagtcaagggaaaaattggcaccctatgcaggcttgtcatctgaagaaagctaccagagtcgcgaccttgaaaaggcatctcagcaagtcgccaagaatctgtacgagaccaaggttcagccaacaacattgatcccaaaacaagttgggaatatgtatacagcatcactctacgcagctcttgcatcggttgtccatagtaggcatgaaactctggcaggccagaggattgttatgttttcgtatggcagtgggttgacatcaacaatgttctctttcatgattaatgaaggccatcaccctttcagtctgctaaacatcgcaaacatactggatatttccaagaagctgaaggcaaggcacgtggttcccccagagaaatttgtggaggcactgaaactgatggagcaccgctatggggcaagagatttcgtgacgaatcaagatacaagtctgctatccgcaggcacatactatctcacgcacgttgactccaagtacagaaggttctacgacgtgaaaggtgacggtgtcgccactgcaatgtccaacggccactga

SEQ ID NO: 641 - DNA, 255 bp, Zea mays
  Peptide Sequence Number=SeqID_42420
atgtcggctggccacatgcggttcgtctccgaggacggcgtcgtgaacgcccgcgcgcgcgtgctcggcggcggcagctgcctcaacgccggcttctacacccgtgccagcggtggctacgtgcgcgccgccgggtgggaccaccgcctcgtcaacgcgtcctaccgctgggtggagcgcgcgctggtgttccgcccggccgtgccgcagtggcagcgcgcgctgcgcgagggcctcctccaggccttcatttga

SEQ ID NO: 642 - DNA, 1329 bp, Zea mays
  Peptide Sequence Number=SeqID_42421
atggccaacggaaaccacggcgacggctacaaacaccggcacatgagatggaagacttcaggttctgatcttaaggccagggtcactacagtgaacatcatagttaactctggaatgaaactccacttcaagcttcagaccaccgacgtggtgtggcctagccctgctaccctctgtcgccgtccagtcaccgacgactgctcaaagctccactgctccagtcacctgcgactggtccaagctccagtcacctgcgccgccgcggcgtctccagtccaccggaccaacagcagtgaccctcagtcgagatgggctcgtcatttgaagtttgatggtggctgtggacatgctaataatgttgaggtcatattccctgagtccaatgtggtcggcagtgcaagtggaagtgcttttgttcctcctcctcaacgaacctatgttaggacaaggaagcgttcaataaatgcagaagctcaagatattggagaagatgacagtgatgctcaagaagatggtgctgctgcaccccacagctgccaccccatctctgcccaggtccagccgccaccgactttcgcgccgccgcaccaggggcggccacatccgagccgctggccccctctcctctactccccgctcccaacctccgccatcggcctctggctggggcagccctggcctccccgccttccccgctcgcggcgcgggcgcgttcgtgtgccttgcccccaacctcctccgctggccgccgcgcacggcggtcccccttgcgcacctatcccgcccgccccacctcccgcgatggtggcggcgccctccctccccaacgccggcgcgggcacggcccaacacccgctccaccacgtcggctccctcctcctgctcgccggcgcagcccccggcgcgcctaccgccggcagatggccatggctcccccacggcggcgccagccacggcaacgcgcacgcgggtccagcagccggcccagatccgccgccgctggccctcatggcggccgatgccgcccctccccttctcaagccgcagcattgtcgcctccctagtcgcgggcgtgaccatccttccccatctaggcacgggcgcgggtctccgccccgccgtcgtgctcgccatgggctccctccccctcttcgtcgtccgtccccagcccgacgcagctggcgcggcggcccctcctccggctccttctacccccgcgcttccccacggtggctccctcccctgtcacctccggcgccgcctctccatgcggccatcttccccggcgcagcgctcaagcctctagggccccgctcgggctcgccctaa

SEQ ID NO: 643 - DNA, 957 bp, Zea mays
  Peptide Sequence Number=SeqID_42422
atggcgccagtcagtttgcctcctggtttcaggttccaccccactgacgaggaactcatcatctgctaccttaagaggaagatcaacgggagacagatagagctcgaaatcattccagaggttgatctttacaagtgtgagccctgggatctgccagaaaaatcatttcttccgagcaaagaccttgaatggtacttcttcagccctcgggaccgcaagtacccaaatggatcgaggacaaaccgcgcaacaaaatctgggtactggaaggcaactgggaaggacagaaaagtgaactcgcataggcgtgcagttggtatgaagaagaccctggtgtactatcggggccgagctccacatggttctcgcactgattgggtcatgcatgagtaccgcctcgacgagagggaatgcgagactgacactggcttacaggtggatgttgcactggaatgtgcaaggcttcagcacaggctctcattacctcccctggaagtggaagacttcccacacgacgtcagcctcgacacaaaggcgagcgtgctccgcagcagcaaccccaacaacgaggttgacatccttcaagagttcctctccgtggcgtcggcctcccaggagctaatcaacggaaccagcagcagctacgctgcagaaatgtgggcaggcgctggcacgagcagcaccagcgacacccactacgtcaacgaactatcttccctctttgagtttggggtgaaggctaaagaggaggccgacaatttctaccacatggactgcattggcacatcttcaggcttctcaccgaagccggtccgtgtcgatgaaccggttaggttggttgagatcgctgacatggaggagttcaaggaagagaagaggcgagtagagaaccttagaggagtgaggctgcacaacaatgacgacctaggagaggtaattagttactcgacttcatga

SEQ ID NO: 644 - DNA, 300 bp, Zea mays
  Peptide Sequence Number=SeqID_42423
atgaggaggattgactgcaattgcgatgggcatggcgacgaaccaaccatcgttgggtcgagccataaagaaatgtgtcggtccatgggttatagagtgatagctagggtggagggcaccgacctcatggttgccaaggaactgttcctcgatagcaacctaggcctagtgagtagcattgtcacaattgtggacgatgtcctgcaactcgactatgattgtgctaaggatctagaagagtacattgttcacccgtgcaaagacgggatcgtcaggcgaacaacatcaatgaggacgtga

SEQ ID NO: 645 - DNA, 240 bp, Zea mays
  Peptide Sequence Number=SeqID_42424
atgtctgggggaatcgcccgcggccgccttgccgaggagcgcaaggcctggcgcaagaaccacccgcacggtttcgtcgcaaagccggagtcgctgcccgacgggacggtgaaccttatgatttggcactgcaccatccccggcaagcaagggccttacaaaacagtccacacaaagggtacctacactgtcttcactgtgttgtataggttctatgatgatgttattgtaaagtgctag

SEQ ID NO: 646 - DNA, 459 bp, Zea mays
  Peptide Sequence Number=SeqID_42425
atgggcaagagcaagaaaggcgagagctcttcacaccattccggcgataagcggaaacgcgagccgactcctccctcggaggacttcggcgattctgagtactcggaggaggagttctcctccgggttcgagggatcgtcgttccctgcctctccctcagcatcgtctgatgacttagacgactcccaggggatcatcacggaggtgtggacctacatccgggctgttgagcgcgccgggctcgagggctcggatgagtctaaggtctcctcggacgaggagaactcctcggactcgtccgaggagagtggcggtggcggcgatggcgagggtgatgacgacggcggaggcgacggcaatggcgacggaggcgaaggtgacgacaagggcgacggcggcgacggcagcggcaagggcgacggcggcagcggcaagggcagcaacaaggccagtggctaa

SEQ ID NO: 647 - DNA, 675 bp, Zea mays
  misc_feature (184)..(184): n is a, c, g, or t
  Peptide Sequence Number=SeqID_42426
  unsure (1)..(675): unsure at all n locations
atggatggcggccgcatcctcgacccgctgctctcgggcgccatggattccgcctccctcctgcgttctcatcccgctcggccccctcctcgcacagccagccgcatgccgagcatggcggacccgcctccccatccgcaccctaaccacttgctcctcgtggcctccaccatcccattcgtgnggagccgcatccacggccgggccagcctccctcatcatcggcccctacttagtaccgttcctcctccccacttccgcctccgcctcgccggccacgctcgcggatctcagccgcgctcgcggatctcagccacgcctaccaatcttgcccagccccgtcgtgcccccgctcgcgattgtcgttcgacattctcgcccgcgagatgcgttgtgccccccctaacccaagcgaggcatggcgacacagagctagatgggcgctgctgcgaggttgtccttggcgagagggtaggggctgggagatcggttttcgatgggggagccagcgcggtggctaccggggcggagtactcgcgcaagcgctacttcgtgctcgaggacgccgtgctccgtttcttcaagtccatgtcgtcctccaaacgcgagtatctgatggcgaaacctcgaaacaatcttaggacacctttggacacattgctagcagcactttga

SEQ ID NO: 648 - DNA, 273 bp, Zea mays
  Peptide Sequence Number=SeqID_42427
atggcgctggtttgggacgaggcagaggtgggggatgaagtagggctggcggctgtggtgggtgcggcagatggaaaagcagcagtggatgcagcggatgaactggaagagtttgatcgacgtgaccgtgataccaggttgtcaagggccttagtgtctagagtaggaggccctcggctacgcagatcaactttgcatcgtgttgttgcaatcggtaaagagcggtattcgccttgcatatatgaacatattctgcctactcaaagttcatag

SEQ ID NO: 649 - DNA, 795 bp, Zea mays
  misc_feature (130)..(130): n is a, c, g, or t
  Peptide Sequence Number=SeqID_42428
  unsure (1)..(795): unsure at all n locations
atgagaatcgtgctattgcagcagttggtgctggttataataaggaaggagaatgctgttgcctctggcaagatagcaaatgttagattgtcttataaagttataaatgctaatgtttacatagctaaanttaggattgctaataaattatatattcatgttcctaaggttgaagggcccaaatcacctgaagagatgataacaattcttcaacgtgttgttgaagaatgtgctacatcactcgttgctgccaggattgaagctgaagagagactaaacaaccagcgtttgcgtgaggaacaagatgctgcttacagagctgcacttgaagctgaccagttaagaaagttgtaccttcaggccagggaacgtgaaaggatagaggaacaggaaagacgtgaaagggaggctgtagaggctgagaaaaagcgtaaagaagaggaggaagctgtagcaagggcagcccaagaagcagctgaaaaggaagctgctcttgcaaggaggaggcaagagaaggccatggctcttggagctgaacctgagaaaggaccaggtgttactcgggttctcataagattcccaacgggagagcgcaaagagcggagattccatagttctgcaaccgtcacttccctctatgactacgtcgattctttagactgcatgaaagcagagaattacagcctagtttcaaatttcccacgggtcacatatggtccagagaagcactccctgacactggaggaggcaggcttgcatccgcaggcgagcctgtttatcgagatagagcaatga

SEQ ID NO: 650 - DNA, 480 bp, Zea mays
  Peptide Sequence Number=SeqID_42429
atgtcgcctcacttccaaggcgatcagcttctgcggaggatgcgttctacggtctccaagctcctgtcggctcggtcgaaggccgcctcgataaggtgccactcctccgcttccatctcattcccttctgagccctcaaggatgaaaggggaggtccccgagggctccttcgggagcgggcagcgcgggcatcacgaccctaggggaggaggagcgatcgccgtgggcaacagcgccgcctcggactacccaaccgttgtcgcggtgcctggagactcagagggccaggggcggcagcaacgaagaggtagccaccgtgttcgccgtgggggtcccacccgtggcgacatccacgaccgcttggaccacctcttggacgtccgaggcccagtaagaggcatgtcggcaacagacgcgcccgacacctctttagcgatcaaggaggatgacacgcttgtgtcaggagagacggacatgtag

SEQ ID NO: 651 - DNA, 342 bp, Zea mays
  Peptide Sequence Number=SeqID_42430
atggagaaaagcgcgatcgacgacgacgaacggaagggggagataagaaaacaaaaggctgctgccccgcgacaaagctgcctcctcctccgcctctcccactcgagcgagtcgttgggggattttattattccgctgcttcgaaacgaggtgtttgaattcgggggcgtgtgggggcccggtagacaggcgctgtggctgctggctggaatcgaccgtttgttgagtgaggctgcgctgcggcggcggaagcacggggagcattttgaaatgggttgggaacttgggatggacagaaacgtgcaaagagatggacagagcaggatatgtttctttttttga

SEQ ID NO: 652 - DNA, 759 bp, Zea mays
  misc_feature (699)..(699): n is a, c, g, or t
  misc_feature (716)..(716): n is a, c, g, or t
  misc_feature (728)..(728): n is a, c, g, or t
  Peptide Sequence Number=SeqID_42431
  unsure (1)..(759): unsure at all n locations
atggtgggcttcgaccgcgccggctacggcgagagcgacccgaacccttgccgctccgtgcggagcgcggcgctggacatggaggagctggccgacgcgctgggcctgggcgacaggttctacgccgtgggcgtctccctcggctgccacgccatgtggagcgcgctccgctacatcccgcacaggctggcgggcgccgccatgctggcgcccgtggtcaactactggtggcccgggctccccgcgggcccggcggcggaggcgtacgcgcggcaggcgcgcggggaccagtgggcgctgcgcgtggcgcaccacgcgcccgggctcctccactggtggatggcccagcgctggctacccacctccaccgtcgtcgacaacaccacccacctccccaacgggcgcgacgccgaggtccgccgcgcgctcgccgccgacggcacgctccggcggaagcgggaggcggccacacagcagggcgtgcacgagtcctaccaccgcgacatggccgtcatgttcggcaggtgggagttcgaccccatggacctgccggaaccgccctgccccgtgcacctgtggcagggcgacgaggacggcctcgtgccggtcgtccttcagcgccacgtcgccggaaccctcgcgtgggtcaactaccacgagctccccggcaccggacacttcctgtccgccgtccctggncctcggggacaccgttnctacggacactncttcggttcatcagccgccctggtagcgtag

SEQ ID NO: 653 - DNA, 222 bp, Zea mays
  misc_feature (35)..(35): n is a, c, g, or t
  Peptide Sequence Number=SeqID_42432
  unsure (1)..(222): unsure at all n locations
atggcgggtagctgcgggcaaagccccgtggaaancccccccattgcgcccacttcagtttgcaccaggttgcgtgggggattagctccggaaagcgggggattggatccccggcgatggcgccgtcgtggtccggcggacgagcaagccactgtggaatctgaggttcaacaagtagagatagctgagcaggagctcattgaaggcaagttgtgcccttga

SEQ ID NO: 654 - DNA, 357 bp, Zea mays
  Peptide Sequence Number=SeqID_42433
atgacctgcaactgtgcaaaggctacttcaaagattggcaactggagagtggagactctaattgaggtcttcctgattagatgccttttcaaaagagaggtttttttgcaaaagagaatagtgctgggcacaatttccacttggttcttggtatgttggaggttgccaccttctttctggtttgattttttcttcggtgggagcgtcgtcaacgcgacgcctcgagcgggggacaagtcgccaacagagctctcattccgagtgatggggtttgtggtggagcatgatttcaaggccttctcagccgttggcaagaacaagaccgcgcccgtcgaagaggtggtggatcctaactag

SEQ ID NO: 655 - DNA, 675 bp, Zea mays
  Peptide Sequence Number=SeqID_42434
atgcaggaggcgtgcaaccgcaccacggttgtgcacccttttggctctatcgcatccggtggggaccgggaaaggggatatttcgaaagggatccttctccacgaaggaagcaggccccgagccctcctactgatcaggggttcgaaggatggcccctcggaagggttcgacagccgccccagagcacttgggctccgcgcccactactgatcaggggttcgaaggctggccccttggaagggttcgacagccgccccagagaacacagagtgagggatgactctgggtacgtccgttacatgaccgaggctcgggctacgctcccgagcgccgctcaccccgctccgactgctgtgccagccacccgggcaaggttgacaacagcaagttcagcctcaggcacaacaggaagctccgcctcgcccgaccttaggcctcggcctcggaagaaggtctccgcctcgcccgaccccggggctcggcctcaacctcggcctcggaaggtggtctccgcctcgcccgaccctagggctcagcctcaacctcggcctcgggaggaatcgcgtcctcgcccgaccccggcctcggcctcaggagaagtctccgcctcgctcgaccttgggctcggaccgaccgcgccacgggggatacatcattaccctacccctaactag

SEQ ID NO: 656 - DNA, 942 bp, Zea mays
  Peptide Sequence Number=SeqID_42435
atgaacttttgtgagctcactcttgcgataacctcccccataggtgaagaccaggtgccaccaaaggaggactatgatgacgagttcgacgagctcgacgacgacgtcgccgacctgcgggcgctggtgggccgcctagcgtcgccggcctccgtgaaggccgtggcacggctgggccgcgtgctcgtgtcgctctccggcctgttgcaccaaccacaggcgcaggacccgctgcgccgcctcggcccgtccccgttcgcggagcggacgacttcctccgcctcgtcgacgcgcacggcagcttccgcgacgctctggtcgcgctcgccgcgctccaggttgaggcccgcgtcgcgctgcgcaaggaggagccggcccgcctcgcgtcggccgcgcgcgctgcgctggtccgcgcgggacctcccgcgggtcgcctcctcggcgcgcgccgtggccgccaggcccccgcccaccccgcccgccgacctccgacgcgtcggcctcggcggcggtcttctccggtgtctcctcgctctccgtcgccgccgccacggcgcgcgtcgaggtcgacgccacgccgtgctgcatgtcctcccccgcgaggttaagcgcgccgtccgccacgcccagacacgtggtcgtcaccaccgggtcctcctcctcgacctccatgccatggatctggtgggtcgccgacctcatgcggtggatgtcgcgtgcgaagcgtcgatcggccaagaggcagcacgccgccacgtctgccgtggggcccagatggaggccgccgcggacccggaggagcgagagcggaaggcggcgtttgagcggctggacaatctaggacggtgcatcgcggacgtggagagcagcggcgagaaggtgttcagagccctcgtcaacaccagagtctccctcctcaacattctcagcccagccttctga

SEQ ID NO: 657 - DNA, 234 bp, Zea mays
  Peptide Sequence Number=SeqID_42436
atggctagggcatgccgttggcggcgcaaccattccgcagcaacctcgagccccgcggcgttagtgatggcgacgacgtttgaggatacggtggtgagcacaccacaaaaactcaacatttttaaaaaaacctataaaaagcccggtaggctcagccagtcaggcttattacagctacacctccactcgacgcaagaaagcaggtacctcacggttgcggcctcggatctgtga

SEQ ID NO: 658 - DNA, 660 bp, Zea mays
  misc_feature (101)..(101): n is a, c, g, or t
  misc_feature (211)..(211): n is a, c, g, or t
  misc_feature (257)..(257): n is a, c, g, or t
  Peptide Sequence Number=SeqID_42437
  unsure (1)..(660): unsure at all n locations
atgagctacggcaccgaaggcgtcaaacttcgtacaaatgctgggggtcgagagacgagatgcacacaacaaaagcgggggaacaacttccgagagcggtngggaaggagaaatgtagtagtaaagctagaactggagttgcccaaaacaaacgagccgaaattgtacgaaaacgattccgagaaatggcaggcagctgaagcgatcaaantcggcagcatcggtgagcacgcagagacttcaaaagcgggacagantccacacagcagaggcaagcaggaagccaaggagggcaagcaggcacctactccggggctccggcgcgcggtgctagctagggttcggaggggtgcggttgtgacgccgtggttgattgttgagtggggagagtgcaggagggcgcgcaggggatggggaaaggtgacagccttaaaagcggagacagagacgtggaacagcggcaccagcaatagcaagcttgcacagtcgcggctcgcgacgcaggcgaggagggagacggtggacacggcagtgcagagctctggcacagtgctcgctggcaagcactgtggtgccgaggcagacggcctacgtatataccaccggtcggactcggagcggaggacggaggagagagagacgatggctgcgccgtgccgg

SEQ ID NO: 659 - DNA, 2214 bp, Zea mays
  misc_feature (391)..(391): n is a, c, g, or t
  misc_feature (430)..(430): n is a, c, g, or t
  misc_feature (442)..(442): n is a, c, g, or t
  Peptide Sequence Number=SeqID_42438
  unsure (1)..(2214): unsure at all n locations
atggactcgggaaaatacgtgcgctacaccccggagcaagttgaggtgctcgagcggctctacatagattgccccaagccaagctcctcacggcggcagcaactgctgcgcgagtgtcctatactctccaacattgagccaaagcagatcaaggtctggttccagaaccggaggtgccgcgataagcagcggaaggagtcttcgcggcttcaggctgtgaacagaaagttgacggcaatgaacaagcttctaatggaagagaatgagcggcttcagaagcaagtctctcagttggttcatgaaaacgcgcacatgcggcagcagctgcagaattcgatagtgccaggctgccagcaaattaatgccgatgagatgttaagacttcattggnccaatgacacaagctgtgaatcaaatgtcactacccctnccaaccctatangggacgcaagtaacccttctggactccttgcgattgcagaggagaccttcacagagttcctctcaaaggctactgggacagctattgattgggtccagatgcctgggatgaagcctggtccggattcagttggtatcgtggccatttcgcatggttgccgtggcgttgctgcccgcgcctgtggtttggtgaatctagaaccaacaaaaggcatagagatcttgaaagatcgtccctcttggttccgtgattgccgaagtcttgaagtgtttacaaggtttccagctggaaatgggggaacaattgaacttatttacatgcagatgtatgccccaacaactttagtccctgcacgtgatttttggacactacgatacacgacaacaatggaagatggcagccttgtggcatggagtgttcctgaagtgcttcgaccactgtatgagtcttctagagttgttgctcagaaaatgactactgtggcactgcgccaccttagacaaattgctcaagaaacaagtggagaagtagtgtacgccttgggaaggcaacctgcagtcctacggacctttagtcaaagactaagcagggggtttaatgatgccattagcggtttcaatgatgatggctggtctgtaatggggggagatggcattgaagacgttgttattgcttgcaactcaaccaagaaaattaggaataccagcaatgctgggattacatttggagccccaggaggcattatttgtgcgaaggcatccatgttactgcagagcgtcccaccggcagtactggtacgatttctgagggagcatagatctgaatgggctgattacaatattgatgcgtatttggcttcatcattgaagaccagtgcgtgctcacttcctgggttgcgacccatgagattttctgaggggcagatgatcatgccacttgctcacacagttgagaacgaggagattcttgaagttgtccgccttgaaggtcagcctcttactcatgatgaagctcttctttcaagggacatccaccttctccagctttgcactggaatagatgagaaatctgtgggttcctccttccagcttgtgtttgcaccaattgatgagcatttcccagatgatgctccattgatttcttctggctttcgtgtcataccacttgatgatggtgtatcctctggtaggacgctagatttggcatctagtcttgatgtgggctctgctgcaccccaagcctcaggggaatctccagatgactgcagtttgagatctgtgctgacaatcgcctttcaattcccgtatgagatgcaccttcaggacagcgttgcagcaatggcccgtcaatatgttcgtagtgtcatttctgctgtgcaaagagtgtcgatggctatatctccctcccaatctggtctaaatgctgggcataggatgctttctggcttccctgaagctgccacacttgctagatgggagaaacctatgtttacgtttgcaaacaaggcagggctggacatgttagaaacatctcttgttgccctgcaagacctgacgctagacaagatcttcgacgagtcaggaaggaaagcactattctcagacatctcgaaactaatggaacagggctacgcgtacctgccgtcaggcgtgtgcatgtcaggaatgggccgccatgtttctttcgaccaagctgtagcgtggaaggtgctcggcgaggatagcaacatccactgcctggcgttctgcttcgtcaactggtccttcgtgtga

SEQ ID NO: 660 - DNA, 234 bp, Zea mays
  Peptide Sequence Number=SeqID_42439
atggctcttttggatattgatcccttggctttgggacatccctcgccccttgggcctttaagacacaaagggctctcagggccatcaggggttcttgggtgcgttgcgctgtccaaggcccttaatgaggccctgtccaaaggtgtcagggttgttggtccgtctaaggctgatgtggctaccgtggaattatctgtgaccatgcgatatgggtgggctagttttgccacttga

SEQ ID NO: 661 - DNA, 276 bp, Zea mays
  Peptide Sequence Number=SeqID_42440
atgttggacgaggccgcaagatgggacgacctcgtcacaggcctttgttcggcgacgcgtgggacgaagggggcacgcatcgcagcaatcatcacaacaccatctagagcaaaatacagatatgccacccacctcagcttcacccttgagttagacaaaagcacaaacaacatagtagaatacaaagttgtcatcttagggctctacaagcagagacctcaacgtaaagacttgtgtagtaaagacggactccaaaactatcaccgggcaaaatga

SEQ ID NO: 662 - DNA, 411 bp, Zea mays
  misc_feature (30)..(30): n is a, c, g, or t
  misc_feature (35)..(35): n is a, c, g, or t
  Peptide Sequence Number=SeqID_42441
  unsure (1)..(411): unsure at all n locations
atgtctcttggaggaggcctaaatatgtangtttntgtgtcatcggctatactctgttgcttcctgagttatgggatatacttcaagaggaagaagacgggtgggatttctttcaataccactgttcctttgactcatattgatgagaagctgtgctatcagattctgcacgagtacaaaattcacaatgctgaggtgggtggacttgcttttggccgggtgttattccgtgaagatgctactgtggatgatctcattgacgttatcgaagggaaccgaaagtacataaagtgcgtctacgtatataacaagatcgatgttgttgctgaacttggacagactacttgcgagaatgtgggaggagatgggcctagtgagggtgtatacaaagccacagggccagcagcctga

SEQ ID NO: 663 - DNA, 306 bp, Zea mays
  misc_feature (227)..(227): n is a, c, g, or t
  misc_feature (258)..(258): n is a, c, g, or t
  Peptide Sequence Number=SeqID_42442
  unsure (1)..(306): unsure at all n locations
atggactccaaaggaaagagaaaggtgactgatgataaggagaatatccccatcgacgacatacccaagggaggagaaaagcctatcgagtcgggatcaaacaagaagaaggatgggaagaaaaaggagcgcatcaggaagatcatctactacgagatcaacgcttcttcctcttcacacaaggataacgatgactcctcttccagcaagaaaaagacggtcaaacnaaaaatggaggagtacaataaagtgaacggntttggacaatgccaaagaaatttgggacacattgaaaaacgctcatga

SEQ ID NO: 664 - DNA, 576 bp, Zea mays
  misc_feature (534)..(534): n is a, c, g, or t
  Peptide Sequence Number=SeqID_42443
  unsure (1)..(576): unsure at all n locations
gtccccgccatttcagacaggctcttcctttccatagtctccgtagacaatggaaaaacaattgcaaagtccactaaagtagcttctcgtagtggaatatgccagtggcccgacaccatcttggaacccatatggttctccaaggaccaagtctccaaagaatttcaagagtgccagtacaggattattgtttccctgggatcggcaaaatctggcattcttggggagattcttctaaatctctctaattttctgaatttggccgatccaaccgctatctctttgccactgaagagatgcaactctggaacagttttgcagcttaaggttcaatgtcttggcacaaaatctaagctgagtggtgtcagatcattgagggacatggctcctcgtcttgatgaccgtagtccaacgccaaccaatgacgagctggacaacaggtcagattgctctgatggtatgttcaacaagggtgttcattcttcatctgaaaatcatctgggtggaacttatcaagatgaatctggaaacatnggaaacaggtttctcagcatcagggtcccatcggagttctaa

SEQ ID NO: 665 - DNA, 1266 bp, Zea mays
  misc_feature (628)..(628): n is a, c, g, or t
  Peptide Sequence Number=SeqID_42444
  unsure (1)..(1266): unsure at all n locations
atgggagatcccaggccgaggagaagcccagcagcccccactctcgccgacaagctgcggaagcactccacgtggctcctcctcctgctctggttcgccgtctccctcgccctcttcctctccgccacgccgcccgcagctgctccgctccgccgctcctccttcctccgctccaagccccgcgccctcgccgccaccggcgcagccgcggcgccccccgtccgcatctacgtctacgacctccccgcccgcttcaaccgcgactgggcggtcgccgacgcgcggtgcgcgcgccacctcttcgcggccgaggtagcggtgcatgaagcgctgctcgcctacaccggccgcgccgcgcggcccgaggacgccgacctcttcttcgtccccgtctacgtctcctgcaacttctccacgcccaacggcttcccctcgctgtcgcacgcccggggcatgctcgccgacgccgtcgacctcgtccaggccgggatgccgtattggaatcgctccgccggggccgaccacgtcttcgtcgcctcccacgacttcggcgcctgcttccatcccatggtgagcgtgtccggcgaaaagctcccgactttttctgggctcagtttgttgcgggccnatcacacatgtcaggaggtggagcatgtcgtgatcccacctcatgtgccgccggaggtggagcatgaactaccagagccagagaaggctcaaagagacatatttgccttctttcgaggcaaaatggaggtgcaccccaagaatattagtggccgcttctacagcaagaaggtgaggactgagcttctacaacattatggtcgcaaccgcaagttctaccttaagagaaagcggttcgacaactaccgatcagagatggctcggtcattgttctgtctatgtccgctgggatgggcgccttggagtcctcggctcgtggagtcagtcctcctaggctgcattcctgttataattgctgataacatacgtatgccgttcccttcagtcctccagtggccggagatctcattgcaggtggctgagaaggacgtagccaaccttgaggtggtgcttgaccatgttgtggcaaccaatttgagtgtgatacagaagaatctgtgggatccagtgaagcgaaaggctctggttttcaaccgtcccatggaagtgggagatgctacatggcaagtgttgagggagcttgaggttttgctggaccagtctcaaaggaggagatacggtggatcctggagggcgtga

SEQ ID NO: 666 - DNA, 1917 bp, Zea mays
  Peptide Sequence Number=SeqID_42445
atggaggtggcgggggctcaggcccgcgcggttcccctcctgctccgcaacaccgcctccctgcggacctccgtctccgtctcctgcacgggctcccgccggagctgggtggcggcggccacggcggagggggacgagacccgcggcttcgacaaggtgcccatggacacccccggcgcgtaccgcctggtagaccgggacaccggccgcagcgtcatcgtgtggggcggcaccgacgacagcgacgaggcctccatgccgtccccggcggtgctctcccggaccaccgaccgccgccacagccaaggtgttgggggaggtacaggtatcgggaatttcggcaggttcaaggcacagaaaataaaatccttggtcacgaggtcagctcaccgcaagagggagagttctaatcgctcaagcactgcctggtctgatgaatcttctttcaatggctctgatgatgaagaggaaagctattttgagagaagaaagcatgtctcagactctgaacgccacccgaagatgagcagtggctccagagatggaagaactcgaagtgcacattctctgagttctgttttgagccaatacagaggcgatgatgatacagacttccctggttcagaggctacttctggttccaaacgatggggtaatgttgccgatgttacttatggacggcagaatcagaagcaaagggagcctctgaatttccctcaaagaaaagggcctctggacggcggatttttcagtcgcagatctttcaaggagattggctgcagcgatgaaatgctaggtgcgttgagaaattttgatttccctcgtccgtctcatatccaggctatggcatatgggcctatcttagaggggaggagttgtgttgttgctgatcaaagtgggtctggcaagacactggcatatctttgccctataatacaaaacttaaggaacgaagaagttcaagggctccataaatcatcccctaggaaccccagggtgatagtattgacccctactgctgaacttgcttctcaggtccttaacaactgccggttgatatcaaaatctggggttccatttaggtctatggttgcaaccggaggatttcgacaaaagactcagttagagagccttgaccaagagctcgatgtaattatagcaacacctggccgtttcttgtatctgcttcaagaaggctttgtgcaactagctaacctcagatgtgttgtgttggatgaagtggacattttatttggtgaagaaggtttcgagcaagtgcttcatcagttgatcaccgtggcaccagtgacaacgcagtatcttttcgtgactgccactcttcctcttgacatctataacaaggtcgttgaaacctttcctgactgtgagatccttgtggactgcagcggagatgacaacgaagaaaagaatccagaaaccgccttttcgaacaagaaaacagcgcttttgaagattatcgaggagtctcctgtccgcaaaacaattgttttctgcaacaagattgagacatgtagaaaagttgagaatgcgctgaggcgggtggacaggaaggcctcgcagatcaaagttctccccttccatgctgcgctggatcaggcccagcgcatcgcaaacatcaaggagttcctgaacaagcaaacggctgactccatgttccttgtgtgcacagatagggcgtcgcggggcatcgactttgcgaacgtgaaccacgtggtgctcttcgactacccccgcgacccgagcgagtacgtgcggcgcgtcgggcggactgcccgcggcgcgtccggcaacggcaaggcgttcgtgttcgcggtgggcaagcaggtgtccctggccaggagggtgatggagaggaacatgaaggggcacccgctgcacgacgtgccgtgcgtctag

SEQ ID NO: 667 - DNA, 2670 bp, Zea mays
  Peptide Sequence Number=SeqID_42446
atgaaagaggatgaaatcacaattccgagggagaaatcggatcgtgctctcaacattggaaatgcagatggtgcagcttccaatgccatttatcttgatttggagaaagaaaatgaaattttaagggctaaaatacaagagcttgagaaggactgctctgaactaacagatgaaaatttggagcttatatataagctgaaagaaaatggtctgacaaaaggtcaggttcctcatattgcaaacaacaatgagctgcaattcaaaaagcttacatcccggattcatcaactggaggaggatcttaggaataaggaaatgttaagagatgacagtttttctgagtcatcaatgtctaatgcagatgagatacagagaaaatgtgctgaccttgagctgaaggtgctaaattttaggtctcaaacctgtgagctagaagaaaagttccgaaaatgccaagaggagctggaacaaagaaatcttgagttatctgcgctgagaagaaagataaatggtttacattctaatgaactggaagtttgtgaatctggtgcgacatggaagtaccaagctagaatagcagatctagaggatactgaacctgagacagatacacttaaggctaggtttgaactgcagctacaggaaaatgatgaccttcgtcgttccaaggttgagatgcagaattttatttctgagtttcaggcagagaagagtcagcttgaggaacgcctgtccgcgtcgcttaaagaaagcagcatcacatctaaatgtctggatgaagtgcggaaagatatccttgtgctttccagcagtatagattcccatgtttcaaccaataaacttcttgagaggaacttagttgagctagagagctgcaaagctgaactagagttgcatgtatcggagctggaacaggaaaacatcgagttgtcagaacggatatctggacttgaaacacaactgacttacgtgacaaatgaaaaggagtcaagcgagctgcagttgcatgactccagatctctcatcatcaatctcaaagataaagtagagtgtcagcaatcagagatggaaactcaaaggctccagtttaagcagaaacaacaagaatctcaaagaagattgtgcgaagcacaagatgattctgaagttctgagaagatctaattgtaaactacaatctacggttgagagtcttattgaagagtgcagttctcttcagaatctaattgctgatctgaaaaggcagaagttggaattacatggtcatcttacgcaaaaagagcaggaattggatgagtcgaaaaaaaagaactttgagtttagcaaaacagtggagttccttgaggcaaaacttttgtcactacagaaggacatttcttctaaagaacaatctttattgtcagaattggagaatattttccaggagcacatggaacaagaagaaagaattaatcgcgcacatttcatgctcaataagatcgagaaagaaaagactcttgaagtagagaatcttgaaagggaggtcgtcagcctcgctgcacaggtctcctccacacacgaggagcgagaaagtgccactctgaatgctattcaagaggtatctgtcctgcgagcagacaatgctaaacttgaggctaatctccaagatgttagtgaacagctgagatgttacgagtctcaattggaagaccttcgtaaggagtctaaaagtaaaattaaaggattggttgattcccttaatgcctccaaacaaagcgaggaaatgttgacatcagatgctgaacatatgaaaaagttgatggaagctgctaaatccaatgaagatgcactaaggaagacttctaacgaactagaactgaagcttaaatccagtgattatgtgaaacaacaaatgctggaagaaatatctggcctgaaacttcaggttcagaaaataatgaatcttcaagatgaggtttccaaacttcagagttctcttgatgaggccaagttcgaaaaagggaaacttgaggagtttgtgcgctcggtgactgaggaatgtcaagaactaaaagcacagaaggctatgctaacagataaagtttcttatatgcaggagaccttgagaaatggtgaagaagaaaaccgaaacagaatagctatgcatgcaaagctcatgaggttggagagtgatctaacagcattagaagcatcacatgtacatgaagcagaattaaagaacgaactcagtaggatcaagagatcaaacagtgagtatcagaggaagatacaatctctcgggcaggaaaatgaggatctcactaggcgagttcaaattatggaaaagggttttgagcgaatgtcccacgctaaagagaaccttggaaagcaggagattggaggagataaccaggaagccatccagtcaacaattcagttactggaaattaagcttgcagaggcattggaggaaaataagatatacagagctcaacagaagagttcgatgtctgaggggcaacctgctggtggagatggcaaggagggcaataccgacaggattttgcagttggaaggagagctgagagatatgaaggaacgattactcaacatgagcttgcagtacgcagaggtagaggctcagagggaacggtgggcatcatcaagccgtgctatgctccagcaccagtga

SEQ ID NO: 668 - DNA, 564 bp, Zea mays
  Peptide Sequence Number=SeqID_42447
atgtcggcgtccccggagttgtacaggcccgcggaagcgccggccttctcgccgtcctgcgccacgcagccgctcgtgttcgccggcgacgactactgctgcaggacgccgacgggcagcgggatctgctacctgagggagcccaccacgtgcccgcccgcgccccggaagccgccgccgccgccgcccatgtgcaggaagcgcctcttccaagcggcggatcagcagcttgctgaggcgggccccgtccctgttatcagcatccgcctcgacgagctggagcgcctcttccgcccctgtccgccgccgaccaccaccaccaccgacaagcggcgccgctccggctccggccccagccccagatccgccacgaaacatggtcagagcagcccccatttagaggagctcgcttcgtaccctgctggcaccgcctccagcaccaagttccagccgctgttcacgctagccaaccacttcttcgcgctgttctcccagtcgtcgaagacactcgacatcgaagctgaaggagagcaagtgggagaggcgccgtggggcaaggtctga

SEQ ID NO: 669 - DNA, 483 bp, Zea mays
  Peptide Sequence Number=SeqID_42448
atggaggcccaggcccacgcgtcatgcaaccggcgcgccgaatgcttcgtgcatgcaacagcaccgccacttgcgccactaccgcgcctcctcgactgcggaaccaataccgcgggcaggagcagcggccccgtcgtcagccgagctcacgtcccgtccgggggcaacgagagaaccctctctcacggcgtgaagacaacacgccccgggacaggcggcacctctggcaggagaagcgggcgacgcttcgccttcgccataataaccgcgtcaaaaaaggctggcccctcggaagggttcgacagccgcctcagatcgcgtgggctctacacccactactggtcagaggttcgaaggccggcccctcggaagggttccacggccgcctcaggctactcgggctccgcgcccattactgatcaagggttcgaaggctggcctccgaagggttcacagccgcctcagacgccgagcgagggatga

SEQ ID NO: 670 - DNA, 417 bp, Zea mays
  Peptide Sequence Number=SeqID_42449
atggttgcgttcttccacggtgcgacacacgggggtggaccagggcacgacgctgctctggtcgccgcccagactgcggcactaggcacactagtggctggtgcagggcacggcgaggccctggctgccgcccaggctgcggcaccaggcacaccgatggctgtcgcaggtcatcgcccacccatggacaatgaattgcccgcgtggtttcaaggtgaaacaacaacttttggagcagattggatgtccggagactctagccatgttgcagcaactccatcgaccacaattggcgaacagaggacatttgaagttgtgccaactcagcgcaagggtggacgtgttcctcgtcctccactagtcgcaacccgctcgcttgatgtcaacctcactgataatagcatgtcatacaaatga

SEQ ID NO: 671 - DNA, 714 bp, Zea mays
  Peptide Sequence Number=SeqID_42450
atgtatatcattgttctggactcgatcccttcttatatggccgcaaatccaacgtcttctaaggactttgctgatgtccatggacttgtcatgcatgcttacaacccaccaaatgcagattcacttgttgatcatcttggtttgcacaaggcattgtgtgttcttatgggatgggattatacaaaagtccctgagaactttaagggctaccaatcattaccttctgaccttgtccaagcaagtagggaggacctcattgtctggccgcctactgttatcattcacaatacttcgactgggaggaagaaagatggtcgcttggagggtttagggaacaaagaaatggataaaaaaatgacagaactagggttttctggtgggaagtcgaagtccttgtatggaaaggaaggacatatgggtttgacacttatcaagtttgcaaacaactcatctggcttgaaggaggctgagcgtcttgctgagtatcttgagaggcaagatcgtggacgtataggttggtcacgcgctcatgccagtcgttctgtagattcagatcagaaccctttgttggtcgagacggataccaggacagctgagaaaaagaggatactttatgggtacctagcaattgcatccgatctggacgaactagactcagattctagaaaaagggcttccctccagagcagaagagaattcgacccaaacgaatga

SEQ ID NO: 672 - DNA, 309 bp, Zea mays
  Peptide Sequence Number=SeqID_42451
atggctgtggcgtggtcaaaggctctggccttggttcaacctctgttgtggagctttccacccactccctctgggagcacacatactgatgtctccatcatgctcgacaacgaggccatctacgacatctacaggcactccctcgacatcgagaggttcaatggtgccttgaatgagttccagatcaacctggttccttaccccaaggatccacttcatgctctcctcctatgcactagtgatctcttcggcgaaggtcttgcacgagcgattgtcgtctatggcagagatcaccaacaacatgtttga

SEQ ID NO: 673 - DNA, 1608 bp, Zea mays
  Peptide Sequence Number=SeqID_42452
atggcgctgtcggcgtcttccaacagcgactgcgcggggggcctggacggggagcagatcaggaaggccaagctcatgagcctcgatcgcttcgccgcccaccgggacgagacccacaccgcggagttcctctcccgccgatattgggattataactttcttgattaccatgagaaagttattgatggcttctatgacatctttggctcctctattgaatcctctaggcaggggaagatgccatcattagcagatctccaaacaggcataggggacctaggctttgaagtcattgtagtaaaccgagccattgatagtaccttgcaggagatggagcaagtggcacagtgcatcctgttggacttccctgttgccaatattgcactcttagtgcaaagaatagctgagcttgttacagataatatgggtggacctgtcaaagatgctaacgacatgctcacaaggtggctggagaagagtactgagctgagaacatcgctacaaacaagtttgttgcctattggttgcatcaagatagggttatcacgtcaccgtgccctacttttcaagatccttgccgatagtgttgggattccatgcaaacttgtcaaagggagcaattatactggaggcgatgatgacgatgctataaacataattaagatggacaatgaaagggagtttttggttgatctgatggctgctcctggtgctcttattccagcagatatcttaagttggaaaggcaattcgttaaattctaatcgaaaactcggcctgaatcgaacagctggatcatcaagtactgttgatgctaatgtggatcctactgtattgccacttgaacctaaaggtggccaactgcctttgttcagcagtggtgattggatgtcagacattgattctggatatgaggcagcagaaattgcagcttctactcaaacctcttcgggtgtcacaccatctgtttctgctggaagtgtttttggcagttcatggatgctggttaatcatgaccaatcagatggaccatcaacttctgctggtacatcatcgcagcagaaagttgtacctcaaagcgagcatcagcggaatttaaaccgccttccagatctgcaggaaattccagagtcaaaatacctttttgctgatcttgttccttctggggataataagtctaagaaaacttcagtaccattcaaaggaccagatcataggaacaatgagttgcaaaagcgcagagagaacattgtccctaatgctggaagaccacagcagcggttagttatgaagaattggtctccttacaatgatgtttccaacaacaaacagtacaattatgtcgaggattcgtttgctcgtagaaatgttggtaataatgctgcatcatcatcatcccagatgccacgaccagccgtaagatctaaccttaattctggattgcataatgatgcatcatatcataattatgatagcattatggctggtacctctgccatgaagattacatctacagctgagaccgggaaggttcctgaaagggttctgcgtggtgatttggacaagggtcaagacataattatagattggaggatcaacatgtcatag

SEQ ID NO: 674 - DNA, 153 bp, Zea mays
  Peptide Sequence Number=SeqID_42453
atggcggcggtccgcatgctatggatcgttgacctgcagtactggaccgacgagaactacctatacagttgcttcacccacatcggggaggagattcttcattttattaatgtttcttttcatggatttattgtagttgtcttcttatgttaa

SEQ ID NO: 675 - DNA, 426 bp, Zea mays
  Peptide Sequence Number=SeqID_42454
atggcgacctcccacgcaacggcagacgtactggcagtgtgccagcagtggtcagcacgcatccagatgcgcgtcagcaagatgttactagaaaggaaagaaaaaaaaaagccaagacccaaaccccaaaaatggccagcgcaatcacgcaccgattttttttatattgtcatcaaaactactaccgcatccaggtcgttccactcagcagaggacgtgcccaaactttcgcgtgatttcccgcgagatggtcaaatcactgtcatagttgaggtcaactatccaggcacgaagcttctttcatcgttcctctgcaacgcgagtgggcaacacatggcatcatgccatgccactaggtctaggtcgtcgtccttagcttccaagaaccacctggagcttccaactgtgggggacatatatcagtag

SEQ ID NO: 676 - DNA, 1998 bp, Zea mays
  Peptide Sequence Number=SeqID_42455
atgttcgcaatccgttcgacgaaatgccctgtggcatttgtgggcgtagctggcaccttggtggtgcttatcaccgctgtccatgtgttcatggtgccaatacttcctgcctccttctattacttcggttctcgcagcagtataagccacccaaagaatgtcctcccagccgtcgaggtggttgactcgcgcctcaaggggtgtttcccttctgattcatatggtgctgtggcattccgaggcgcgccatggaaggctgagattggtcgatggcttgctgggtgtcatgctaactcttcgtctgttgatgttactgaggtttctcttctgcgacaggccatgggtgcaaaacgctgcgtgaaagactgcagtgctcgtgctcactgtgataaaacaagggcaatgtgcttttgtgggcctgggacaaaatacccagatcgtcctgtggcagaagcttgtggttttaaaacaatttctgtgagacacgtgctgaatgcagctgcatcaaccagtgctctggacatgggcattgccgtggtggtttctgtaaatatcccatcagcatattcgcttgcatatgactggccctcgtggctccagacaccagtgaatttaccagatctgaaaactttgaacagtaccaccattggtgttaaggccgttgttcagaaaaaaaggccactgatatatgtatatgatttgccagctgagtttgacagtcatcttcttgaaggacgacattacagattccagtgtgtaaacagaatatatgatgacatgaatagaactatatggacccagcaattgtatggtgctcagatagcacttcatgagagcattcttgctagccctcaccgcactcttaatggggacgaagctgattatttctatgtgccagtgcttgactcatgtctaataactagatccgatgatgctccacatcttctattgccgagggacctgcgccgaaggagctaccatgcacttgagtactatagaatggcacatggtcacatagctcagcagtatccttactggaaccgcacttcgggaagagaccatatctggttcttttcatgggatgaaggtgcctgctatgcaccaaaagagatttggaagagcatgatgcttgtccactgggggaacactaacacaaaacataagaattcaacgacagcttattgggcagataactgggatgatattcctttggataagagaggcaaccatccatgttttgatccaagaaaggatctagtgcttccggcatggaaggaacctaacccaggggccatatggttaaaactgtgggcaaggtatagcatggggattcggcaaaagctagcagctgaatttggttccacaccaaacaagcagggaaggcttggacggcagcatgcggccgatgatggaatttttctgccatatgagaacgtgctcaactacaatagttttgcagtccgcatacaggaagatgacatcccaggcctcataagcacactccgaggaataaacgatacgcaagtagagtttatgctgggaaatgtccgccagatgtggcagaggtttttctatcgagactctatattgttagaggcgcaaagacagaaaaaactcttctctgaagaggcaccctggtctgttgaggtatcgaaacttcctgatgacgacgatgtctttgcaacgtttatacaggcaggactcgatcaagaagctgagctcgtggttacctcgcgccttgatcggaaacgtgggacccattggtcagctccatcgtcgtccctgagtccgaatcgcaacaaactcgagtcatgggccaactgcgagctcgccccgcatccatccgtaacgaaatccctggcaaatcgcgggtcgttggtggtggttggtccaccgtcggggtcctcctttgtgggcgccgtcgaggggtcgaaggagggcctaggcgtgccaccggggagccttgatgaagttcgtagcttaatctggagggaatga

SEQ ID NO: 677 - DNA, 933 bp, Zea mays
  Peptide Sequence Number=SeqID_42456
atggcctccgcccccaactcctccttccgcccagaggaggcgcgctaccctcccgccctcgagctcccgatcccgcggctctccaagttcaaggtggcgctgtgccagctctcggtgacggcggacaagagtcgcaacatcgcgcacgcgcgagcggccatcgagaaggcagcctccgacggcgccaagctcgtggttctccccgagatatggaatggcccttactcaaatgacagctttccagagtacgccgaggacattgaagctggcggagatgcagccccttcattttcaatgctgtcagaggttgctcgcagtttacaaatcactcttgttggtgggtccatagctgaacgttctggcaacaacttatacaatacatgctgtgtctttggttcagatggccagctgaagggtaaacatagaaagatccatcttttcgacattgacattccaggaaagatcactttcaaggaatcaaagactcttactgctgggcagagccctactgttgtagacacagatgttgggcgcattggtattggtatatgctatgacatccgtttccaggaactagcaatgttatatgctgcaagaggtgctcatttgttgtgctatcctggtgcattcaacatgactactggaccactgcattgggagttgctgcaaagggcgagggctgcagacaatcagctgtttgttgcaacatgcgctccagctcgagataccagtgcaggctatgttgcttggggacactccactcttgttggacctttcggagaggtgattgctacaacggagcatgaggaggcgaccataatagcagatattgactactcactgattgagcagaggaggcttgctcgtactacttcggctctgcaggcttgctcgtactacttcgttcatgagatgcatgtctatgggttctag

SEQ ID NO: 678 - DNA, 1092 bp, Zea mays
  Peptide Sequence Number=SeqID_42457
atggacgacgcccacagtttccaccggcagtctccggtcgccccggccccctcgcgcaacgaggagcttaattggaaggaagcagtactggaggaaacgatgagcttcggtactgtgggcatggaggaggagagcggcgccgcggcggcggccgcagcggcggaggagatccggcggctgccggccgaggtgaactgggagatgctcgacaagtcgcggttcttcgtcctcggcgcggcgctcttctcgggcgtgtccgcagcgctgtacccggccgtggtggtgaagacgcacctgcaggtggcgccgccgccacaggcggccagggcgacggccgccgccatcctacggcgggacggcctgcgggggttctaccgcgggttcggcgcgtcgctgggcggcacggtgcccgcgcgcgcgctctacatggcggcgctcgaggccaccaagagctccgtcgggccggccgccgtccggctgggcgtgtccgagcccgccgcgtcggccgccgcctccgccgcggcgggcgtgtccgcggctgtcgcggcgcaggtggtgtggacccccgtggacgtcatcagccagcggctgatggtccagacccccgcgtgctgccgctaccgcggcggcgtggacgcctgcaggaagatcctcctcgcggacggcgtccgcggcctgtaccgcgggttcggcctgtccatcctcacctacgcgccgtccaacgcggtgtggtggtcgacgtacgccgtggcgcagcggtgcctgtggcgcgccgtcgggcccgagcgctccgagagctgcgcctccctgatggccgtgcagggcgcgagcgcggccgtggccggtggcgccgcggcgctggtgaccatgccgctggacaccgtgaagacgcggctgcaggtgatggaggcggacgcggcgcggcccacgctcgcgagcaccgtgcgcgggctgctcagggagggcggctgggcggcgtgctaccgcgggctggtgcccaggtgggggtccatgtcgctgtccgcggccaccatggtgaccacctacgagttcctcaagcggctctccgccaaggacggctccttgggctag

SEQ ID NO: 679 - DNA, 570 bp, Zea mays
  Peptide Sequence Number=SeqID_42458
atggcgtcggcgtcgcgtgcgctcctcctctcccgtgcgctccaggccggcgcgtctcgccgcgtccccgccctcctgcgcccggtcgctgcggccgcgagcctcctcccagcggtggcggggccggcaggggccgccctcggcgctagggtgcggtgcttcgcgacccagccggcgacgtcctcgctgcgggactcgtccccaaactggagcaatcgcccgcccaaggagacgatcctcctcgacggctgcgacttcgagcactggctcgtcatcatggagccgccgcctggtgacgcctccaaccccgacatcacacgcgacgagatcatcgatagctatatcaagactctcgcccaagtcgtcgggagtgaggaagaagctaggcaaaagatatactctgtatcgactcgtcattactttggctttggtgctcttgtatctgaggaactttcttacaaactgaaagaaattcccaaggtccgctgggttcttcctgattcatacttggatgtcaaaaacaaggactatggaggcttgagatgcaaggatatcactgtccctggatga

SEQ ID NO: 680 - DNA, 315 bp, Zea mays
  Peptide Sequence Number=SeqID_42459
atgacattacatccctttgtcgtcacgtacaagatgcagatggccatcatctacgccttcccgccgcctgccccgtcgacggcggccatcgagaacggcctggccgcggtgctggccgagtaccgcgcattcgcgggggagctcggcgaggcccccgacggcacgcccgcggtgctgctcaacgaccgtggcgcgcgcctcgtggaggcgaccgcggacgctgacctcgtggacatggcgcccgccaagcccacaccggagctgctccggctgcacccggacatcgagcgggagctccgatccaagaggtgctga

SEQ ID NO: 681 - DNA, 1338 bp, Zea mays
  Peptide Sequence Number=SeqID_42460
atggaggtgaaggtgctgagctccaagctcgtgaaaccgtcctacccggcgggcgcgccgcggccggacaccacggagcacgtgccgtcgtcggtgttcgacaaggccacgtaccacatgcagatggccatcatctacgccttctctccgccggtcccgtccccagacgccatcgagcgcggcctcgccgcggtgctgggcgcctaccggctcttcgccggccaggtccgcccgggcccggacggcgcgccaggggtgctgctcaacgaccacggcgcccgcctcgtggaggcgtccgtggacgcgcgcctcgccgacatcgcccccacgaagccgtcccccgccgtgctgcggctgcacccggacctagacggcagcgacatcgaggagccagtggtgcaggtgcagctcacgcggttcgcgtgcggctcgctcgccgtgggcttcaccgccaaccacgccgtggcggacggccacgccaccagcgacttcctcgtcgcctggggccgcgccgcgcgcgggctccccgtcggcccgtcgccgccggtccaccgcccgggcctcttcccgccgcgccacgacccgccgcgcgccgggttcgagcaccgcggcgtggagtactacaagcccgcgccgtcgtcggcccacgtccacgtccacggccacggcgacactacgacccagcacagcatcgtgatccacaaggctcacttcaccaaggacttcgtggcggggctccgcgccagggcgtccgaaggccgtggccgtcccttcagccggttcgagacgatcctcgcccacgtctggcgcaccatgacgcgcgcgcgcgggctgggcagcaacccgctccagacctccaccatccgcatctccgtggacgggaggccgcgcctcgcggcggcgccggcagactacttcgggaacctggtcctctgggcgttcccgcgcgccacggtggggagcctcctcggccggccgctgaagcacgcggcgcaggtgatccacgacgccgtggcgcgggtggacggcgcctacttccagtcgttcgtcgacttcgcgggctccggcgcggtggagaaggaagggctggagacgacagccctgctcaaggacgtgctgtgcccggacctggaggtggacagctggctcaccttcccgttctacgagctggacttgggcgccggcaacccgagctacttcatgccgtcctacttccccacggagggcatgctgttcctggtgccttcgtacctgggcgacggcagcgtcgacgccttcgtgccgatgttcgagcaaaacctggaggcgttcaagcagtgctgctactccatggagtag

SEQ ID NO: 682 - DNA, 165 bp, Zea mays
  Peptide Sequence Number=SeqID_42461
atgacgatatccacgtcactctttggtttcaagccgtgcgatcctttccaaagtggattcttttcgagagccaatacctgcaatgccttctcaaacaccactgatgatactgaaccactctcacagtttgaatgtccgcttaaggtttctaatgactcaggataa

SEQ ID NO: 683 - DNA, 414 bp, Zea mays
  Peptide Sequence Number=SeqID_42462
atggcaatgcaatgcagcacgatactcgctttcctcgtcctcaacgccttcaccagcacggccgccgcgcttcccgcggagctgccaagctgctcggcaacggcgcagcatcaccagaggactgctgtctcaccctgctcggcgccgcatgaggcgacgctcagccagaggaaatggatgcggagaatgcggtcacagaagccacagggagacgatgagaggcactgtaactctgctaggtcggcgcgcgggcgaagcaagctacgtcgtggcgtggacattcgcaaggcgatgtcgcgcggcaaggtggcgacgtgtccacggccgggggtgaggggatctggcggccacgtgggcttcgcggcggcgtttgaggagggagggccggagggggctcctggcggcggcgtctaa

SEQ ID NO: 684 - DNA, 1146 bp, Zea mays
  Peptide Sequence Number=SeqID_42463
atggagaggccgtggagggacaaggacaagggagcggcggctccggcggcggggagggcgcggcggtacggcgaccagccgtccttctcgtccacgctcctcgacgccatatacaggtccatggacgagcctgacgacggggtaacatcgtcctcctcaaccgccgccaagaagcagaaccaggacctgcgccacagctgctactactacaaggcgtcgctggcggcggggagctaccgcggcagcagcagggcggcggcgccccgggggccacaggccgccaccacgtcgagctcctccgatcagtgctccagctacggcgggttctcgtcgtcggaggcggagtcgtcgcagcaccggcgcctgcggcccatacgcacgagcctcgccaccaccgcggtggccgtggccgcgcccgcactcgcgccggagaagaagaaggccggcgtcagcatccgcgccaggctgagggacctccgccgcaagccggcgtcccccggccccggcgcgcggctggcggggttcctcaacgccatcttcagcggcaggcgcgcgccgccgtcggcgtcctcctgctcgcgctcctgcctcagcgagacgccgtccacgcggggccagccgaagcggaccgtgcggttcctggacagcgacggcggcggcgagcgccggaggacggtgccggtcggggtggcgccggagctggagcagatgctgctccaccggatggaggtggacagcggcgacgacgacgacgacgagagcagcgacgccagctccgatctgttcgacctcgagaatttcgcggccgttgacccggacggcggcgccgcgtacagtgacgagctgccagtgtacgagacgacgaggctggtgctgggccaccgcgccattggccacggagcacgcacgacgtgtgcaaaaagagatgtgcagatccgtggatcgctatggtgtggtacgatcggcgaggcatctcatcggtttgacacgcgcgccgtctcctgccgccgatgcgctagtgctctgcaacgcgaatcgcccggtcaggaatcattcccagtcccccagcaggggttgtcacttggtggtgtggtgactagtaaaaatcaaaaccactctggatttttttttaactataaggactag

SEQ ID NO: 685 - DNA, 1041 bp, Zea mays
  Peptide Sequence Number=SeqID_42464
atggaggaaggaaatggggataacgaaataaacgaacgcagaaaggaaccatgggatttcagggcgtcgtttaggcattgggttagtttggttcagttgcatcttcacgctatagactttgtgactggaaagaccacccaatcagttcaatgcaggatcacactgtctccatttcctttctttgcgcaaaatttggctgagctagcgtcgagcataacttcatgcttggatcgtatgcttattgttcctcaatttcacgcacagtcatttttctctcccaggaaagatgaatctgtgatttccacagatggtggaaatgaggagacagacactgacagcctccatgttgctagaggattgtctcatcctgggctttcgtcaagtttatccaataaggcatcagtggtcccaacccctttgcttccttctggacaatctgatctccggttcaatcgtcttcgaccctcaattgatgaaagtgattgcaaatacaaaagattatttggctgctatgttgctcgtgaggctgtgatcgatgaggaatactggatcgctgcatggttgagagcagaagatcagtatgaaaatgagtcaggcaatcgctatgttgaaagctttaaaagaaagtttgcatcaaaggaattccatgcattaaagaagagatgcaacacacaacatagagagaagtatatctgtcttgtcgcggtaaagaacgatgacatcaggcgaactgtcctgaatagtgttgttggtaccttagatgtatgtgtaaggcatcctctatatggggagaaatttcctgagaagttatatctagaagttattcacaggagcctggaaaaccgtctcttcactgtcgaatttatcagcctgatcagccaaaatttgggtgctgaaaatatttacattcatgtgcataaagataacttaccagcatggaggctctatgatcagattggattcaagtacaaatgtaccttcggtcttgcggaaggcaaaaagtacgaatgtgatgcgaaggcaaaaagcaggttcgcgtga

SEQ ID NO: 686 - DNA, 1470 bp, Zea mays
  Peptide Sequence Number=SeqID_42465
atgactccctcctccgttgcttttctcttcttctgcgtgcttattattctgcttcctgctcaacatgggcatgccgcctcctcccatgcaagctacaagctagggtcaagacaaatctttttcaagacacccagcaagtcacctgccaactcaaagcaggcctccactgcaaccacctgctcgtccttcgcaaatggcctcgccaacaacaagctacccgtggtacaccggcagagcccatgctcgccgttgcacgggctgccgtccctaacagcggcagatgtcttgcgtcgtgacacctctctcatccggcgccgtttcgccttgcaatcctctgcggtgtctgctccggcatcagccccggccccgtcgccggcacccaccataatcccagtaaacggctcgtcggacgggaggacgctgacgggcgcgctggactacagcgtgctcgtcagctatggcacgccagagcagcagttcccggtgttcctggacaccttcctcgacgtgtccctgctccggtgcaaaccgtgcgcctcaggttccaacagctgtgacccggcgttcgacacgtcacggtccacgacgttcaccaatgtcccctgtggctcgccggactgtcccacgaccaactgctctggtggctccgtctgtccgtacgacaacccgatcttctccatcgagggcgctttcgctcaggacgtgctcacggtggcgccgtccgcggccgtccacgacttcacgttcgtctgcgtggacgtagaccatccttctgatgacatgccagaggccgggatcctcgacctcagccgcgaccggaactcgctgccatcgcggctgcccggccccgccaccttctcttactgcctaccgcattccccgagctccccgggcttcctctccctcggcggcgacgccaccgtcggagaagacaaccgcacctcgcacgcgccgctggtgagcaacggccaccccgagctggcgaacatgtacttcatcgacctcgtcgggatgagcctcggcggcgacgacctcccgatcccgacgggcacctttggcaacgccagcaccctcctgaacgtggggaccaccttcaccatgctggcgccggacgcgtacacgcctctgcgcgatgccttccaggaggagatggcgcagtacaaccgctcgtcgccggggttcgccggcttcgacacgtgctacaacttcaccgggctagatgtgatacaagtgccactcgtcgagttcaagttcggcaacggcgagagctttctcatcgatggggaccagatgctgtacttcgacgaccccgccgtcggtccttttggtatgacctgcctcgccttctccgccttgaaagacggcggcggtgtcctgtccgccgtgattgggtcgtatacgcaggtgtccacagaagtggtgtacgacgtggccgcaggaaaggttggcttcatcccagggagctgttaa

SEQ ID NO: 687 - DNA, 693 bp, Zea mays
  Peptide Sequence Number=SeqID_42466
atgccagaggccgggatcctcgacctcagccgcgaccggaactcgctgccatcgcggctggccggccccgccaccttctcttactgcctaccgcattccccgagctccccgggcttcctctccctcggcggcgacgccaccgtcggagaagacaaccgcacctcgcacgcgccgctggtgagcaacggccaccccgagctggcgaacatgtacttcatcgacctcgtcgggatgagcctcggcggcgacgacctcccgatcccgacgggcacctttggcaacgccagcaccctcctgaacgtggggaccaccttcaccatgctggcgccggacgcgtacacgcctctgcgcgatgccttccaggaggagatggcgcagtacaaccgctcgtcgccggggttcgccggcttcgacacgtgctacaacttcaccgggctagatgtgatacaagtgccactcgtcgagttcaagttcggcaacggcgagagctttctcatcgatggggaccagatgctgtacttcgacgaccccgccgtcggtccttttggtatgacctgcctcgccttctccgccttgaaagacggcggcggtgtcctgtccgccgtgattgggtcgtatacgcaggtgtccacagaagtggtgtacgacgtggccgcaggaaagattagaaaagactctagtgaagctccataa

SEQ ID NO: 688 - DNA, 327 bp, Zea mays
  Peptide Sequence Number=SeqID_42467
atgcccaatcgggagctctatcttgatcaatatggtgtggcatggccgcgtagggttgtgatccagcttggcgctcgagcatgcagggtgggtgtgcgcgggtattgcagctcgcgatcgcggcggctttggccatttgggtgggggtgcggggtgcctgtgttcgtgggatcgtgggagcaaatggcccgtttgatccgtttacacgaaagagatctcttttgtttgatgccaactggtggtggaaagtccatgtgctatcagatttcagctctggtgaaaacatgcattgttcttgtcatttcatctatgataggtcacatgtga

SEQ ID NO: 689 - DNA, 185 bp, Zea mays
  Peptide Sequence Number=SeqID_42468
atgggatggagttgggaatatttcatatttatttacacatttacagcagaccctgagaggcagtgggcagccgaccccttgctgtcaatgggagctgctctgctgctcctcacagctgacgaggggtggtacgccacggagcacttcggcctcgacgtcatcttccacagccggatgaggcagta

SEQ ID NO: 690 - DNA, 1740 bp, Zea mays
  Peptide Sequence Number=SeqID_42469
atgaggcggcgaccggtgctaccgtcccaccacgacgacacggacaagggcggcgggaagccggcgccggcgcgcctctgtttcctcgccacgctctgcgccatgttctgggtcctcatcttctacttccacttcgccgtcctctccgacgagcccgccgccgaggcccgcattgcgcgcgcccacacccgcgttcccgaacaggacggcgccggcgccggcgcgtcccgcgtcgaccttccccgcgcagaggagccggaggacgagcgcgccgccggagtccgccgggaggtggcgccggcgtcgtacccgttcgagcgggcgctcaggacggcggagaacaagagcgacccctgcggcggccggtacatctacgtgcaccacctgccgccgcggttcaacgaggacatgctccgggagtgcgagaagctcagcgtctggaccaacatgtgcaggttcatcaccaacgacggcctcggcccgccgctgggcaacgacgagggcgtgttctccgaaaccggatggtacggcaccaaccagttctccgtggacgtcgtcttcggcaacaggatgaagcagtacgagtgcctgaccgaggactcgtccgttgccgcggccgtgttcgtgccgttctatgccgggtttgacgtggcgaggtacctctggggctataacatcacgacgagggatgccgcgtcgcttgatttggtggagtggctgatgaagaagcccgagtggagcgtgatgggtgggcgggaccatttcctcgtcgcggggaggatcacttgggacttccgaaggctgacggaggaagagtcggactggggcagcaagctgcttttcctgccggctgcaaggaacatgtcgatgctcgtggtggagtcgagcccgtggaactcgaatgattttgggataccatatcctacgtacttccacccaggcaaggacgccgaagttttcctttggcaggatagaatgaggagcctggaacgcccgtggctcttctcgttcgcaggcgctccacgtcctggcgatcccatgtccatcagagggcagctcatagatcagtgcagggtctcgagcgtttgtaagttgttggagtgtgaccttggggagagcaagtgccactccccgagcacggtcatgaagatgttccagagttctttgttctgcctgcagccccagggcgactcctacacgagaagatctgccttcgactccatgttggctggctgcatacctgttttcttccatcccggttcagcgtacgtccagtatacatggcatcttccaaagaactatacaaggtactctctgttcatccctgaagatgacatccgatctagaaatgccagcattgaggagaggctgaagagtgtccacccagatgtggtcaagcaaatgagagaagatgtcatcaacctaataccaaaggtgatatacgctgatccaagatcgaaactagagaccttgaaagatgcattcgatgtttccatagaggcgatcatcaacaaagtgacaaagctgagaagagatatcatcgcaggacaggaagacaaaggttttgttgaggagaatagctggaagtatagtctgttagaagacggacagcggacaattggacctcacgagtgggatccattcttctcaaaacccaaagataaaggtggagattctggcggtccatctgctgaagctgccaagaattcttggaaaagtgaacaaagaggacataattga

SEQ ID NO: 691 - DNA, 3200 bp, Zea mays
  Peptide Sequence Number=SeqID_42470
gagaagaaggaggcggcaaaggagcgaaggagaaggggagagcagaagaaccgagcatggctagtgctactccaatgcttggtagcactgcacgcctgctcttccccttatccttctccttggcgctgctgctcctgtgctgcagtgccgtctgcaacgccgccggcaatgacgatgagtccacggcgttgcttgccatcaaggcgtcgttggtcgaccccttgggcaagctcgcgggctggaacccggcgtcggcgtcgtcgcactgtacctgggatggcgtgcgatgcaacgcgcggggcgcggtcgccggcctcaacctcgccggcatgaacctcagcggcaccatccccgacgccatcctcggcctcaccgggctcacctcggtcgtcctgcagagcaacgcgttcgggcacgagctgccgctggcgctcgtgtccgtcccgacgctccgggagctggatgtcagcgacaacagcttcgacggccacttccccgccgggctcggcgcgctcgcctcgctggcacacctcaacgcgtcgggcaacaacttctccggccctctcccgcccgacatcggcaacgctaccgcgcttgagacgctcgacttcaggggcggctacttctccggcacgatccccaagtcctacggcaagctccggaagctcaggttcttgggcctctccggcaacaacctcggcggcgcgctcccggccgagctgttcgagatgtccgcgttggagcagctcatcattggctacaacgagttcgtaggcgcgatcccggccgcaattggcaacctcgccaacctccagtatctcgacctggcgatcgccaagctggaaggccccatcccgccggaactcggcgggttgtcgtacctcaacaccgtcttcctctacaagaacaacatcggcggccccatacccaaggagatcggcaacctgacctccctggtcatgctggacttatccgacaacgcgctcaccggcacgattccgttggagctcgggcagctcgccaacctgcagctgctcaacctcatgtgcaacaggctcaagggcggcatcccggcggcaatcggcgacctcccgaagctggaggtgttggagctctggaacaactccctcaccggcgcgctgccgccgtcgctcggcggcgcgcagccgctgcagtggctcgacgtgtcgacgaacgccttgtccggaccggtgccggccggcctctgcgacagcggcaacctgacgaagctgatcctgttcaacaatgtcttcacgggcccgatcccggcgggcctgaccacgtgcgcgacgcttgtgcgcgtgcgcgcccacaacaatcggctcaacggcacggtgcccgcggggctcggccggctcccgcggctgcagcgtctcgagctcgccggcaacgagctgtccggggagatcccagacgacctggcgctctccacgtcgctctccttcatcgacctctcgcacaaccagctgcggtccgcgctcccgtcaagcatcctgtccatccggacgctgcagacgttcgcggcggccgacaacgagctcaccggcggtgtaccggacgagattggcgattgcccgtcgctgtccgccctcgacctgtccagaaaccgtctgtccggtgcaataccggccagcctcgcgtcgtgccagaggctcgtctcgctcaacctccggagtaatcgcttcaccgggcagatacctggtgcgatcgccatgatgtcgacactgtctgtgctcgacctctccagcaactccttcaccggcgtgataccgagcaacttcggcggctcaccggcgctcgaaatgctcaacctggcgtacaacaaccttaccggtcccgtgccaacaactggtctgctgaggacaattaaccccgacgaccttgctggcaacccgggcctgtgtggtggcgtgctgccgccgtgcggggctagcgcccttcgggcctcctcgtctgagtcgtacggcctccggcgctcacacgtgaagcacatcgccgctggatgggcgatcggcatctcggtctcgattgtggcatgcgtcgtcgtcttccttggcaagcaggtgtaccagcggtggtacgtgaatggcagatgctgcgacgaggccgtgggggaagacgggagcggtgcgtggccgtggcgcctcacggccttccagcggctgagtttcaccagcgccgaggttctcgcctgcatcaaggaggacaacatcgtggggatgggcggcacgggggtggtctaccgcgccgacatgccacgccaccacgccgtcgtcgctgtcaagaagctgtggcgcgcggccgggtgccccgaccccgaggaggccgccacggccgacggacggcaggacgtggagccgggcggcgagttcgccgccgaggtgaagctcctgggccggctccgccaccgcaacgtcgtgcgcatgttgggctacgtgagcaacaacctggacacgatggtgctgtacgagtacatggtgaacggcagcctgtgggaggcgctgcacgggcggggaaagggtaagatgctggtggactgggtgtcgcggtacaacgtcgcggtgggcgtcgcggcggggctcgcgtacctgcaccacgactgccggccgccggtcatccaccgcgacatcaagtccagcaacgtgctccttgacatcaacatggacgccaagatcgccgacttcggcctcgcccgcgtcatggcgcgcgcggaagagcccgtgcccgtgtccatggtcgccggatcctacggctacatcgcgccagagtgcgggtgcaggctgaaggtggatcagaagagcgacatctacagcttcggagtggttctgatggagctcctcacggggcggcggccggtcgagccggagtacggcgagagccaggacatcgtcggctggatcagggagcggttgcgcagcaatagcggcgtggaggaactgctcgactccggcgtcggcggtcgcgtcgaccacgtccgggaggagatgctcctggtgctgcggatcgcggttctgtgcacggccaagtccccaaaggaccgtcccacgatgcgggacgtggtgatcatgcttggcgaagccaagccgcgccgcaagagcagcagcgccacggtggccgccaccgtcgtgaacaaggacaggccggtgttcacgacgtcgccggactccagttacctatag

SEQ ID NO: 692 - DNA, 216 bp, Zea mays
  Peptide Sequence Number=SeqID_42471
atggcggcctcacgtccacacgagttcaagaagtcaatcattgatgcaaaggatttgacaatttttacggtgatgaagcttcttcgaaaaaagacatcatccaatggaagcttcctggcaagacagaacccttccctatgcctgatgtcgattagacagttgttttttatcaacacttccttcatgggttggctatcccaacaattgctttcttga

SEQ ID NO: 693 - DNA, 321 bp, Zea mays
  Peptide Sequence Number=SeqID_42472
atgaccggggataaacaaaggcaaaagctcaagcaaaagccatcaagcaaaatctccaacacctacatcaaaaaggtggataaaaagactgctacaccatacttaatcaaaaagaagaagaatggaaaggtgatagcaatcaaggccaacaagcaagccaacaaaggaaagggggccaaacgcatctgggtgccaaaggagataatttcaaccatgaaaagcaccaagaaggtttggatcccgaaagagaagcgccaacggtcggctgctacaggcgccaacggtcggctgacatggcgtgcaccggacactgcacagtag

SEQ ID NO: 694 - DNA, 849 bp, Zea mays
  Peptide Sequence Number=SeqID_42473
atggcgttagccttaactttggtcgttactggcttgaaggggagggaagtgggggagggagaggaggagatggcggcggctgtttctagcgcggggacccgagtagccgaggagaggaaggggcacggctggctcgaccggttgggcgcgtccaaggcacggcggcggcggcccaaggtggaagaagagccgcggggccgaggcgggcccacgcctgttcaaaaggtcaatgtaagcaattctgtcatgtttgctgatgacgatgatgaattacctttctcacatgatgctgaagataagtctcaaagttgttggaatgatttcaacgttctgagcaagttggcaagtcgtgaatgcaaggattggaaatgcgtgcctttgttgtggtatcttacaatggttcagttggaaccctctaagctacccgtagcattttcaaaagctgtcctttggggtttatctcatatttctgttttagagcctggattagctacagagttgtcaatgcctgtgaatacttggttatcatcacagactggagaagtttcctcagcatttacatggcaagttccaaatggtgctgatgatggtggtggtggggattgcattaatgttgtcaaagtgtcacagttatgcaccctcttactgagaatatttaaaagaaagataaatgggaaacaccacacaaccttaggtgagggtgttatggtcgctagatcggtgagggactggagaggggtatcgatgggcaggaacgtcggctgggggcttctgcccacagccgagcaagaggagagtttctcccttctaattcttgcctactttatttctcatccattgattacataa

SEQ ID NO: 695 - DNA, 807 bp, Zea mays
  Peptide Sequence Number=SeqID_42474
atggcggcggcgcggcggatcgacctggccgaccgttggcgcaggatgcaggaggacgaggacgccgatgacggcggcgagtcgtccgccgccaagcaccggcgactcatccgcgccaaggaggagtggttttcacattgctatacctttctgataaatttaccaaaagaagatcatatttggtgtggatatgctgatatcatgagccccttcatggagacattccatggcttctttgatgatgaagatgagaactcatctcttcgaataatgtggacaagagtttcccgagaaatgggcatttgcacacaatgtgtatgtgaacaccaccaggcacaaggatttttcaataccgaatatcagtcagatactgttgatccccttctgaaagtattgcggcttcttgatgaagagaggataacaggacatcttatacatatcaacacaaagcttcagctcaaagaatatgacccttcatgccatggtgcagaagttgttagcataatgtttgaagttctgatgtatcctgttctgttggatgaccaatcattggctaatcaatttcagatgttcattgaaaaaattgatgagacgtacgaagtgagcctttcaactaatcagcaataccccggtgtctatgccctacttttcttcaaaagctgtaaagctcgggctattgggcttcgattagctcgatccatggggaagctgagctccacactggagctggaacttgaagccatcccaaacgcccccttagttgttcctcaactcttgtcacaaaaattaagagaatcgcttgcataa

SEQ ID NO: 696 - DNA, 489 bp, Zea mays
  Peptide Sequence Number=SeqID_42475
atggccttgttcagccaaagccagctcagtctgggtgcaccggactgtccggtggtgcaccggactgtccggtggtgcaccggacagtgtccggtgtgccaggctggctcaggcgaacttgccgctctcgggaataaattaccggcgtacgggtataattcaccagactgtctggtgtgcaccggacagtccggtgagccaacggtcggccaggccaacggtcggctgcgcgatccgcgcgagacacgtggccgagccaacggtcgagagggggcaccggacagtgtccggtgcgccaacggctccaaggctgccaatggtcggcttcgccaaataaggaaggaaatccgcaccggacagtgtccggtggtgcaccggactgtccggggtttccgcataaaaaccattgttcgggaaaacaccaataaaactggccaaaaaaggccaagagggtctggggcacaaaaagtttcacaaaaacacccatga

SEQ ID NO: 697 - DNA, 363 bp, Zea mays
  Peptide Sequence Number=SeqID_42476
atggggaagaggaacttgttcaccttctgcgccaagaataaggattcacatgacacgattatctttggagatgggaaccaaggcaaggtaaagggaataggtaaaatagcaattcctaccgagcattccatttctaatgtctttttggtagaatcgtttggatataatttgctttatgttagtcagttatgtcacatgggttacaattgtttatttacaaatgttgatgtaactgtctttagaagaagtgatggttcattagcatttaaaggtgtatctggcaggtgttggagctcatggatagcaatccagatcaagtcaagacgacttgagggtttggagttcaaccccaacctcaaatag

SEQ ID NO: 698 - DNA, 570 bp, Zea mays
  Peptide Sequence Number=SeqID_42477
atggatccatatgaagacgaggagatcgtctactgtgacaaccacataacactcaccgtgatcctacgctctgtgctgcccaacatgctagccagtcttcgaaagagaagaacagagacaacaatgtggcgggtccagcgggtgtgtgaggcgtaccagctccactgtcaggtttggagtttggagttccgagagacagttgaagcaaagactcaacaaaaaggagcaaatggatttagaagatcaaaagagctactgacccagcaggtgaacattgtcatatttgatgcaccatcaaatgtgtccagtgttaccgtagactgtgcaattttgctaagtgtcaaagagatgcaaatagaaaagcaagaaaccttgtcaaaacgagagaaatcggattggagaagtttggttaagttcagccaaacctgcaccagcctgtggggcatcggactgttcggtgtgcaccagacagtgtccggtgctcaggctggcgcgctcagcaaactggccgctctcgggaaaaactcagggagccgcggctataattcaccggactgtccgatgtgctag

SEQ ID NO: 699 - DNA, 591 bp, Zea mays
  Peptide Sequence Number=SeqID_42478
atgaagatgaagacgatcaaccagctagaagcacgggcggcacgaataatccttctcaacaaacttacccggcacaaatccgatccaatatatctgttctcgcgccgcggcaagcaggaaccccaacggagaaggcaagctccggccggtctgatcctcgcctgcctgcgcgttatagatcgtgtggcgtggcggtgcgcttggtggtggtgccttggtgctgctaatggtggagtgcagtttgcttctttaaatggtgccgcccagctttgcgcgctccaatgggacggccggggagaggccagcgggaaaagcggcggccccgggcgcaccagtaaaccgtatatgcccctctccactccaaaagcggaggccgtgtgccgatttaacaacttgcacacgcaaaaggaatcacagatggatgaccgacggatggaggaggtggtctctgttggagttcaccggaggtccggagaggcagagacgagagcttcagctgctgcctcctcgctgctaatacaggggaaggggaagccaccgcccaccagcggcgatggcctccgaacaataattgccactattggtttctag

SEQ ID NO: 700 - DNA, 660 bp, Zea mays
  Peptide Sequence Number=SeqID_42479
atggaggaagatgcatggagaacgaacgatacaggagcaaagaagtctgggactgggaaaaatcccagacggtttcgtcgagatcgagacgccgtcgatcgcaacagccccgtttcctcgccctccaggttgccgctccgccacagcgtgagtcagcaattagcgggagccgccatgcaggggcttggccactgcaccctccgtcacaggcgtgacctccagcgcggtgcgatttccggcgcgagcgcggctccagcaaggcacgcgggcttctccggccttgcaggagagaaagggagagaggagaaaaaggctgctgggcgcgagcgagtggcagccacgctgacagaatccacttggggcacggagattccagaggccacccaggcactgttccctcccagtctttccccggcagacctgcgcttgcccctgcgactctggacatggatccgatccgcccaggcggggggccgcgcgattccatatattcgccggcactggctgggcgccggcacctgcgcaagcggcggctgggcgtctggcactagaaaaatacccaaggtgagcggcactagctgggcgccggcacctgcgcgagccgcggctgggcgtctggcactagaaaagggcgtctggcagctgggcgtctggcactag

SEQ ID NO: 701 - DNA, 561 bp, Zea mays
  Peptide Sequence Number=SeqID_42480
atggcatcgcggctcgctgtacaggcgctgtccgcgagcctgttgtcgcttgcggaaactacgtcccccaaaccaccgaagcaacagtcgcagaggccaagggcagccagcagcagcagcagcagccggaggaggctagcagcgacggcgggggcgataatcctggcgtcccagctactgccgcccgtggcgagtagcgccgccggcacgttcgacctgcagctcatgctgccggagaagtccagcgaggaggccgaggccgtggtgcggatccacgcgcgcaacctgctgggggtgaagcgcttcatcgacgccggggcgtggcgggagctgcaggcggcgctgcgctccaatgcgtccaacctcaagcaggacctgtacgccatcatacaggcgaggcccacggggcagcgctctgagctccgcaggctctactccgacctcttcaacagcgtcaccagcctggattacgccgccagagacaaggacgcgctccaggtgcaggagcactacggcaacatcgtctccgctctcgacgagattttctccaagatcacgtag

SEQ ID NO: 702 - DNA, 366 bp, Zea mays
  Peptide Sequence Number=SeqID_42481
atgacgaagcagcaaactgtgagaactctgcagttagcacaagcagatatcggaatggtcatgaagattttccgcgctaagagagattggaagacaggttggaaaaatgaagattgtatcgaggacattgctgtatgtgttggttccgatgatgaagagggttcaacagaagaagagcaacagaatgctgctgagctcgaggagaagcagaacatgaagcggaaaattcttggatacaacgaaaggaaagagccacctcagtatcgttccatgaacgtatttgcatcaggagttgtgcgacgtgagaacggtttgcatcaggagttggctcgtgatgtcaggatgcttatggcgcgcatgatctga

SEQ ID NO: 703 - DNA, 1269 bp, Zea mays
  Peptide Sequence Number=SeqID_42482
atggagggcaaggtgctgtgcacgtacgccgggatcgtggccctactgctctgctcgtcggtgaatttcatacagagcccctccgacgtgttcggccccgtggcgctgctggagccgacagcatccgcggcacgcgacttcggcggcgtggtctcggaggcggccatcgcggtcatgcagcccgggtcccccgccgacatcgcgcggctcctgggcgcgctgtcgtcgacggggccggggccggggccgaaggcggccgtggcggcgcgcggcgcggggcactcgctccacgggcaggcccaggcgcgcggcggcattgtggtggagacgcgcgccctgccgcgcctcgtggaggtggtgcgacgcggggacggggacggcggcggcgcggcgtacgcggacgtgggcggcggcgcgctgtgggtggaggtgctggaggagtgcctgagggccgggctggcgccgcggtcgtggacggactacctgtacctgaccgtgggcgggacgctgtcgaacggcggcatcagcgggcaggcgttcaagcacggcccgcagatcagcaacgtgctgcagctggaggtggtcacaggcacaggggaggtggtgacatgctcgcccacccagagcccggagcttttcttcgccgtacttggtgggcttggccagttcggtatcataacccgcgcaaggattccgctgcaagttgctccgcccaaggtgagatgggtgagggccttctacgacagcttcgagacgttcaccaaggaccaggagctgctggtctcaatgccagagctggtggactacgtggaggggttcatggtcctgaacgagcagtccctccgcagctcctccgtggccttccccgcccaggtcaacttcagaccggacttcggctccgacgacggcaccaacaagaaggttgtggacctggtgtcggggaagctgagctatctgaggccccacgcgtacagcgtggaggtggcctactgggatttcctcaacagggtgcggatggaggaggagagcctcaggaggcggggcctctgggacgtgccgcacccctggctcaacctcttcgtgcccaggcatggcgtcgcgcggttcatggacctgctcatggccaccatcgcgcagggggacttcgaggggcccgtcctcgtctaccccctcctcactcacagaaaagaaaagaaactatacgtagccatttcttctcgcaaactttgcactgcagtgtacgctgctgctatagtagtgcacaattag

SEQ ID NO: 704 - DNA, 873 bp, Zea mays
  Peptide Sequence Number=SeqID_42483
atgactaaggatgaatggagaactggcctgaaagctcttcgagctgacagtattagtaaactgaagaaagcatttccagaactggtccaagagtgtaaccttgctgaccactttcatatgtttataaatccaggtttcaaggccatccaatttccaggatttctacatatatgcatttcgttattgcctcacaggcaccgcggagcacggctgcgtacttcgaggtccacagaagaggagagcactgacctggctaacggcgaagcgccggccgcaacccacgcgccgtccttggccggcgtcactccgtcgcagtctcacagacccgatcgcccgcgccgttcgtcgcagatcacggcaccacgcacgcccgacagccgacgaccgtcctcgcgcgcggacaccggcgcgctgccgttggcagccgcgtcgcagccgagatctgcatcgcggtctggggctgtgtcgcaatcgagctccacgcgaagcgccgggcgggcgcaacccacgcgccgtcacgcgctgtcgctggctgtcgtggctccgtcgcgagctgagaggagacgggcgcccgcgccgtccgtcgcagatccagccgcccgcgccgcccgtcgcgtcgtgctgttgccccacacccacgcaaggagacgggacgacctgagaggagacggacgcgtcgtgctgtcgtcccactgcgggcccacacccacgcgaggagacgggcgcgtcgtgctgtcgtcccactgcgggcccacacctacgccgaccaacagccaaacgggcccactgtaccgcacgcacgcgtcgctgcctaaaaggatggagtcgcgtgaaacgctctgcgcgcagcgttcccgtgtaacttttaactag

SEQ ID NO: 705 - DNA, 1071 bp, Zea mays
  Peptide Sequence Number=SeqID_42484
atgctgtcacgtgtgcccccatccatcattggcagtgcacacaaaaacatggatacaaaactaatagggtcgtggtcgtatggaagggaaggtgtaaatcagggccctcacaggaaaggcacatgctatgggcaaaggcaccgcagagcacagcgacgttacaaggccatccaatttccaggatttctacatatatgcatttcgttattgcctcacagttgcgcgagggatgccaaattatatggcaacatgatttccaagttgagcaagcttgaagacacggaagataatggccaaatgagtcagacagtaaacaagaagcgtgggctcttatggccactgtcggaaatggttaggagattcttcagtgccgatggtagcaagggttccacgctgtggcctgcgctgaggctattgatcccggtaatagcattggttgcagtttgtgtgggttactacatgcacaacagtgttgaagagatagactgcaccaactgtgagtgtttatcgttgtatagatctgatgagtactacacgtatttgttggctgtgtgggttgaggacttgagggcgaagtattcacgttacaaggccatccaatttccaggatttctacatatatgcatttcattattgcctcacagttgcgcgagggatgccaaattatatggcaacatgatttccaagttgagcaagcttgaagacacggaagataatggccaaatgagtcagacagtaaacaagaagcgtgggctcttatggccattgtcggaaatggttaggagattcttcactgccgatggtagcaagggttccacgttgtggcctgcgctgaggctattgatcccggtaatagcattggttgcagtttgtgtgggttactacatgcacaacagtgttgaagagatagactgcaccaactgtttgttgagcagggtatctgtgcttaccttctgtcctttttcaggtgagtgtttatcgttgtatagatctgatgagtactacacgtatttgttggctgtgtgggttgaggacttgagggcgaagtattcacgtgtactgtactgttaa

SEQ ID NO: 706 - DNA, 840 bp, Zea mays
  Peptide Sequence Number=SeqID_42485
atggttcgtgcgtcctgtttagtcaccttctccttaaggattgagccgtgtgcgagaaaaatttacccacaacacttgcttcactcgctctgccttgttgttgaattccttttcgtcccgatctactgcatcgggggggggggggggggggcgccgcaggggggtgcggggttggctgacgacgagctgttcgacgtcccagcgctgccgccgcctttccggctcaggctgtcgcgtaggctgctcccgccgcatttcatgccgaccacttccgtcgacgggaaggcgctgccggggatccgggatttcgacgtggccgcggacggcttcctggtgcacaccttcgattatttggagagcggctcgacggcgctactcgcggaggcgacgggcaaaaaggtgatcgccgttgggcccgtctcgctgtgctgcgcgccaagcctggatcctccgctcgtgtcaaacgatgatgcaacgcgatgcatggagtggctggacgcccgggcgcccaagtccgtggtgtacgtgagcttcggcagttacaggcgcatgccacccgctcagctcatgcagctcggcatggcgcttgccccatgcccatcacctgtgctctggctcgtcaagggcgccaactccctgctccacgacgtccaggattggctaagagagactaccgacccagactgcgacccaggcaacaattgtctggaggtgcgcgggtgggcgccccaggtggccatcctggcccatcccggcccttgccggcttcgtgaacaactgtcgattggggctccatcatggaaagctggttggcccccggagtgcccctggcaaccctga

SEQ ID NO: 707 - DNA, 210 bp, Zea mays
  Peptide Sequence Number=SeqID_42486
atgaagctgtggaaggagacttccaggagttccaagattacgacgagttctaggcgtgggttagcggcaacccccagtcggctgcctgtgaaggccacgtttatctacgtttcttttccgcactttgatttattgtgtgcttcagctatgcagttcagcagcgtgcttcccctagggggaaactccggacgactacaacgatcgccctag

SEQ ID NO: 708 - DNA, 594 bp, Zea mays
  Peptide Sequence Number=SeqID_42487
atggcgagccgcaagtgtctcggaggcgagggaagcgcgccggcgccgcacgtcctcgcggtggacgacagctcggtcgaccgcgccgtcatcgcaggcatcctcaggagctcacagttccgcgtgacggccgtggacagcgggaagagggcactggagctgctgggcaccgagcccaacgtgagcatgatcattaccgactactggatgcccgagatgactggatacgagctcctcaagaagatcaaggagtcgtccaggctgaaggagatccccgtggtgatcatgtcctcagagaacgtgccgacaaggatcaacaggtgcctggaggaaggcgccgaggatttcctgctgaagcccgtccgcccgtccgacgtgtcgcgcctgtgcagccgcgtcctgcgcggcattccgaagctctgtgtcttctcatcgagcatggggctcatcctggatgatcagggaaatgacgtcctccttgcaaatctcaagggttatttgcaggactgctcttcatttggttcgacttctccatcaccaaagatcaacaatctcaaggatgacatatttttgtcgatctcttccagagtctaa

SEQ ID NO: 709 - DNA, 399 bp, Zea mays
  Peptide Sequence Number=SeqID_42488
atggaagagagaggaggagaagaggagggtgttgagcgggaagaggacgaggtcgagccggccgggcgcggccgcacagggtgcgcagggcgcgggagcgcggtcgccgccgtcgaccaccgctgccgccgggagggggaaaggggcgcctccgggaggggaaacggagggggaggggtgttgccgtcggtgaagtacttgtgcccagaccccattgacggcacgacggcgaatcccactacacctcaagtttctctaattaatgagctaaaggacataatgggtcagaggacacttgccttcaccaggttgctgcttagggaaatctcctacaacacactcgggaaccacggactcctcgttgtctatgcaaagcaatcatacattcaacacacttag

SEQ ID NO: 710 - DNA, 2022 bp, Zea mays
  Peptide Sequence Number=SeqID_42489
atggggcccatcaaggacttgaaaggcgtacagagagtcatgggatgccttgcggctctgagccgcttcatctcacgcctcggcgaaagaggcttgcctctgtaccgcctcttaaggaaggccgagtgcttcacttggacccccgaggccgaggaagccctcgggaacctgaaggcgctcctcacgaacgcgcccatcttggtgccccccgctgccgtagaagccctcttgatctacgtcgccgcgaccactcaggtggttagcgccgcgattgtggttgagagacgagaagaagggcatgcattgcccgttcagaggccagtctacttcatcagcaagaagctgctatacgcggtgatcctgacgcggcggaagttacgacactacttcgagtctcatccggtaactgtggtgtcatccttccccctgggggagatcatccagtgccgagaggcctcgggtagaatcgcaaagtgggcggtggaaatcatgggcgaagcgatctcgttcgcccctcggaaggccatcaagtcccaggtcttggcggacttcgtggctgaatgggtcgacacccagctcccaacggttccgatccagccagaactctggaccatgttcttcgacgggtcgctgatgaagacaggggccggcgcaggcctactcttcatctcgcccctcggaaagcatctacgctacgtgctacgcctccacttcccggcgtccaacaatgtggctgagtacgaggctctggtcaacgggttgcgcatcgccatcgagctaggggtccgacgcctcgacgctcgcagtgactcgcagctcgtcatcgaccaagtcatgaagaactcccactgccgcgacccgaagacggaagcctactgcgatgaggttcggcgcctggaagacaaattctacgggctcgagctcaaccacatcgcccgacgctacaacgagactgcggacgagctggctaaaatagcctcggggcgaacaacggttcccccagacgtcttctctcgagacctgcatcaaccctccgtcaagatcgacgacacacccgagcccgaggcaccctcggctcggcccgaggcaccctcagctcggcccgaggcacccttggttcagcccgaggtaccctcggcccccgagggtgaggcactgcgcgtcgaggaggagcggagcggggtcacgcctaatcgaaactggcagaccccgtacctgcaatatctccaccgaggagagctaccccttgatcgagacgaaattcggcggttggcgcggcgcgccaagtcgtttgtcctgaaggcacccgggggctacacgcacctgctggtcgccatcgacaaattctccaagtggatcgaggtccagcccctaaacagcatcaggtccgaacaggcggtggcgttcttcaccaacatcatccaccgctttggggtcccgaactccatcatcaccgacaacggcacccagttcaccggcagaaagttcctggacttctgcaaggatcaccacatccgggtggactgggcagccgtggctcaccccatgacgaatgggcaagtagagcgtgccaacgacatgattctacaagggctcaagcctcggatctacaacgacctcaacaagttcggcaagcgatggatgaaggaactcccctcggtggtctggagcctaaggacaacgccgagccgagccacgggcttcacgccgttctttctagtctatggggccgaggccatcttgcccacagacttagaatacggttccccgaggacgagggcctacgccgaccaaagcaaccaaactagtcgagaagactcgctggaccagctggaagaggctcgggacatggccttactacactcggacgcccgaggccggcacaagctcacgcctccctgggaagggccgttcgtcatcgccaaagttctgaagcccggaacgtacaagctggccaacagtcaaggcgaggtctacagcaacgcctggaacatccaacagctacgtcgcttctacccttaa

SEQ ID NO: 711 - DNA, 246 bp, Zea mays
  Peptide Sequence Number=SeqID_42490
atggctgcccaaccaacgcgccaacagggccgagtcgagggaaacaggagaagggacggttgccagcatcagggagaggaacgcgtcatgggaaagcagggagaaaagatgggaaatggagagagaacgtggggcgcgcggctgcggggatgtggagatcggcgccctggcgcatgcccatgcgcgggaaaaagaaaagaaaagcaaggaaaacagagggtaacacctgaatttgatggatattag

SEQ ID NO: 712 - DNA, 351 bp, Zea mays
  Peptide Sequence Number=SeqID_42491
atgaccttagagtctggagctggactgctaaatgatttctcttttcccgctcgcttttccgccgctgcacgtgaggaaagactgaaagagcagctaggggacagaatcactgcgctccagcaactggtctcgccttttggaaagaaacacatggcatttgaggttgaggaagatgatgcacatcctagaggtcgttcaaatgcaaatgtgacagatgaacaaggcgattgccatcgcaaaggaaagcatgtcattggaggagcatcaagcagcgttgctagtatgagcacaatgcctgaaaatactattcaggtggtcacactgttggggacttgttctcaaatgctatga

SEQ ID NO: 713 - DNA, 249 bp, Zea mays
  Peptide Sequence Number=SeqID_42492
atggctgatacagagaaagggatgcgggtgctggagcaatcgtcgtcgagcacctccactaccgttgtggaggctaggctgggcggcggaaagagaactgggagggcgatagagtatattaagcatctcaagatccttggcgtgcgaggtctcctgccgaatgatgaatacttcctcgccggcgcacgctgcgccgccacgggccccaatgcgtggcggtcggcttcaccaacacccaaatcatggtaa

SEQ ID NO: 714 - DNA, 567 bp, Zea mays
  Peptide Sequence Number=SeqID_42493
atggagaagccatgcccatggcttagtcatttcccgaagccgggtataagcagtgctcacaatctccatagaacatctggccatctgcaacaaaattgggaacagaaccctgagtactgtaatcccgtcgcgcatggacacgtgtggtcgtgcccctcagctcggacccaaaaatttcataggtcgtgcgcgtcgagtttcgtcacgtccgcccctccacgcctctgcccactcgtcctccgcatcgcccgccccactcgtcatccacctcatctgtccccaccacgtgaggggcgtctccccttcccagatcccccaacgacatcctctgtctcgccctccttcttcgcgtcctgcatgccggacaagtgggagccgtcgtcgtcgcaaatgctggacaacgaggacatgtgggagccggatctgaggggtggcagcggcgggggtgataggcgagcgcgcgccgcagcaggtgttgtggaacgtgacgtagaggaagaggactccgactcgccgtcgtcggagatgtcggtggatgagcccaacggcggggcaggtgggagctag

SEQ ID NO: 715 - DNA, 270 bp, Zea mays
  Peptide Sequence Number=SeqID_42494
atggcgaagaaccggaacaagaagaacagggccaagagcggcggcctcgccaccatggacacctctgagggcggccccgccacatccactgccgcagacgtcccacaaccaatggatacgtccgagggaaagcagccatcgtcaccaccgcggcgctcggttcgatcaacaaaggctcgtttcgtcaattattatgtcggcccttcagtaatgtgccttcttattgtgacattgcttttcgttgaacactggaacccaatccagcagtaa

SEQ ID NO: 716 - DNA, 1070 bp, Zea mays
  Peptide Sequence Number=SeqID_42495
cctcgctcgcacgcccagaccagaccacccctgcgccctggacctgggactgggagaccgcgacctacagcgaggcagggaagactacgacgtcagagaatttccagcagcagcgcagcagcagctcactcactcccctccccctgctccctccactctcgcagtcgcagcgcaagtctcttcagttcagcttctcttccaaaacccaagcaccagcacgtggtaccatcccaaaccacaaggctccagccatggcggccgccggagcagcgatgcgtctgcggctcctgtaccggatgctgcgcgtgggggagctcctcgcgctggtggcgttcctgtcctggtcgtcgtcccgcgtgccttccgccgccgccgccgcgctgcgtctcgcggggtcgctcctcctcaacgcccgcttcgtcttcgtcctcgggaacgccatcgtgctcctcctcctcgcgctgtcgcggcgcgagcgcgacctctcctcgtcgtcgtcgtcgttctcctccgcctccggcgggcagcagacgagcacgaccgccggcacaccgccaccgcaggacgccgccagcgccgtattcccttcctcgttttccgatgctcctacagctccaccggctccctccacatcgctggaagccttcagcgcgcccccaccggccccggcgtccgacgacaggcccgggagccccgcggcggcgcgggcgagcaagctggcgcgcgccgcgccgcggcggagcaggtcggagaagatggcggcgggcccgcggctgctgcaggttcggcgcgcggcgtccccgccggcggcccccgagctgcggcggacggagtcggagaacgggcggcggcggcggtcgtccgtgtcggcgcgcgcgtgccgctggggcgcggacgacgccgacgagttccggcgcacggtggaggcgttcatcgacaagcacaagcggttccaccgccaggagtcgatgacgctggccgtcgtcgcggggaccgggtccgggtccgggtccggcgggcactgcgaggccgccccggccttcactggcgccctggccgtcgtggagtag

SEQ ID NO: 717 - DNA, 303 bp, Zea mays
  Peptide Sequence Number=SeqID_42496
atggcgaagaggccctcgcccccgccctcctacgggggtgatgacaagaccatccaagccaaggagttggaagctcgacggctgatggcgcttgcggaagaagggagccaccagctcatgcggaaggcagaaccacaactcgactcgctctccacccctgcaaggttgatgaacatctttgaagttgagggaagggggaggccgcagcccggctcgcttctcaccaccacaaggctggtggtcatccttgtagatgaccactggtgggagatcgtagctcggctgcgtgatgaaaatccttga

SEQ ID NO: 718 - DNA, 321 bp, Zea mays
  Peptide Sequence Number=SeqID_42497
atggcgcggctgtcatggcgatcttctttcggagagctggaggttgcgcttctccgagttccctctttgtctcctatggatgagatcgttccaaagcagaacatggatccaggacggagggtgatcttgctgtggaagtggacccgggggatatctgtcccccataagggcgacgacgacggcggaggcgatggtgatggcgacggcgacgacagcgaaggtgacggcaagggcgacggtggcgacgatagcggcaagggcgacggcggcgacagcagcggcatcagcaacgacaggggcagcaacaaggccagtggctaa

SEQ ID NO: 719 - DNA, 969 bp, Zea mays
  Peptide Sequence Number=SeqID_42498
atgacgttgcgactgcggggggatttcaacccgtcggcttctaccttcggcctctactccagtctcatccatcttgctgcaattactgaaagttctcttgcagggggaccagaggaccaagaggaacagaagatgaagcagcaaccaccgaaagcatcaaagcggaaagcacgttgggaagtcccacgagtaattatggacaataaccagatgatgatcccaggaaacatatatcagacatggctgaaggatgcatcaagccttgtctcaaaaaggcgtaaacttaacagcaattttaattttattcgatcaaccaagataagtgatctcatgcacatccccccggttgctctaatatctcatgacaacttgttctcagaattatgttatcctaagccacttatgcagctctggaaggactgcactgaggtcaagtccacaaaagcttcttcaggagggcagcgatcatcatcacaagaaccacaaccgaaaaactcaccacctcaggctgggggagagtatgagatggaaacaggtggtctgccgatggatttaacagatggcattgaaaaactcagggcaaacatgagtgcaaaatatgacagagcttacaatattcttcacagtgaccatagtgttactcctggaagtcctgggttaagtcgcaggtctgcttcaagctctggtggctctggatcggcgtttatacaattggatccagaagtacaattgccatcaggaagtggaaggtccaaaagggggcagcattcatctgcaagaagcttggggaatcttgatactgttgaggaagattttccactggagcaggaagtgagggacttcaagatgagaaggctttcagattatgtgccaactcctgacctactggaagaaactgaaccgactcaaaccccatatgagaggcgctccaatccaatggacaagatcacagaaacaatccagtcgtaa

SEQ ID NO: 720 - DNA, 201 bp, Zea mays
  Peptide Sequence Number=SeqID_42499
atgcgccccacaccgccagcccgcgcctccaccccgtgcgccgcgccgcccgctcgcacctaccattctggagaggaggtgatgcaggagcgcctggacgaactcatctgcggatacgccacgctcgtcggcgtggtcccctccatgaaggccttctcgtccttcccggactccatgtctcactgtcacacccggttttag

SEQ ID NO: 721 - DNA, 333 bp, Zea mays
  Peptide Sequence Number=SeqID_42500
atggagtccgggaaggacgagaaggccttcatggaggggaccacgccgacgagcgtggcgtatccgcagatgagttcgtccaggcgctcctgcatcacctcctctccagaatgggctcctaacggcttcagctctggctcctctggcttcttggcttctctagaggagccagagccgttttgtaattcatttggcaaaacagtttctcacaaggagacggtgacagagactcagctggaggtcgaggtgcccgcccgcccctacgacgagctgatggtgctggagtttggccgatggtgctcgtcggtgatgcaccatagttaccatctttag

SEQ ID NO: 722 - DNA, 558 bp, Zea mays
  Peptide Sequence Number=SeqID_42501
atgtgggggagtagcgatggtgcggacagacggggcagatccagcgacggaaggggcgaggccggtgaccagggagaagaagagaccgacgcgttcgcgtcggggacagaaggtgaatgggaggccagtagactgattgatgatcttggtctacaagacaaacagcagtatcctaactcccaacacaagcgttacattgtcaaagatggagcaccagcactgattgcgttattttttgaaccatttctctacaagaaagctaacacaagaaactctggaaaagtgtctgaggagcacttgagtgagagtgttgggagcttctgtgaacgccactttggaagagaagttgttgactattttgttgatccatttgtagctggaacaagtgcaggagatccagagtcactatctattcgtcatgcattcccagcattgtggaatttggaaagaaatatagttgtcatggtcatattcttccttttgctatctctgggtctttccgtgcattcttatattagcacaagcataatgttgtacgatgtcatcatatcagtttga

SEQ ID NO: 723 - DNA, 812 bp, Zea mays
  Peptide Sequence Number=SeqID_42502
ttattgttggtgccatcttgtctaagctagcagctaaaggtgatccagtaaagacaagacatgattcatcagggaaaagaaggaatagacgagtgtcgttttcatttcatggtggaatgcagtcactaataaatgcacttcacaatgaagttggagatgataatgtgaagcttggtacagaagtgttgtcattggcatgtacatttgatggagttcctgcactaggcaggtggtcaatttctgttgattcgaaggatagcggtgacaaggaccttgctagtaaccaaacctttgatgctgttataatgacagctccattgtcaaatgtccggaggatgaagttcacaaaaggtggagctccggttgttcttgactttcttcctaagatggattatctaccactatctctcatggtgactgcttttaagaaggatgatgtcaagaaacctctggaaggatttggggtcttaataccttacaaggaacagcaaaaacatggtctgaaaacccttggtaggtctattctgaaacaacttgtgacctctgaccttaaaaaactcttgggcgtagaggggcaaccaacttttgtcaagcatgtatactggggaaatgcttttcctttgtatggccatgattatagttctgtattggaagctatagaaaagatggagaaaaaccttccagggttcttctacgcaggaaataacaaggatgggcttgctgttggaagtgttatagcttcaggaagcaaggctgctgaccttgcaatctcatatcttgaatctcacaccaagcataataattcacattga

SEQ ID NO: 724 - DNA, 441 bp, Zea mays
  Peptide Sequence Number=SeqID_42503
atgactccagcaaaatactcccatattttgcttgaagatttactgacaattaatatagaaaaagtcatggaattggatgtacccattttgctaaatatattgcattttcagaagatgacaatagtgtactcaagcaaatctctggaacacaacttcctcatgaaagaaatattgtcacaggctcaagaaatattgtcacaggctcaaacaaattcgattctgcagatccacttacatgacaagatgaagtgtgtttggaacttcttatacctcatattttatggttcggtggagatcgccgccgttgacgtttcgatcgccatatttaaccagctctccaaggaacaccataatcaatgcgaaccgttgcccgcacatggatatgagatggtaatttcgttgactgtacttcaaactgaagttgcggataggttattgtaa

SEQ ID NO: 725 - DNA, 207 bp, Zea mays
  Peptide Sequence Number=SeqID_42504
atgacggcagtcggggtcagtgagacattgtacgccaaggcaactcagctagtgcttttggcaaaccaaacccctcagccaaacaactacatgtctagaggttctctggaggacatggttgctggagtgacttggccgtccatcttgccaccgggttggacagtcgagtgggaccctacctctatcgaggaggagcatgaggagtga

SEQ ID NO: 726 - DNA, 324 bp, Zea mays
  Peptide Sequence Number=SeqID_42505
atggcaccgggaagcagcattgtgactgtagtccccgagtcggactgtggagatgacaatgggctttctgagtcgattgggggtatcaggcttgacgtagactctgcaagtaaaccgtggtctacatcggcatcgctagccaatgttgcattgtcatcgatgtgtggcttgaatgatttgctcgaatgcccagtgtgtaccaactcgatgcgcccacctatactccagttgcacaattgcagtgaagatgttactgagcttgatgttaaacctgatgggtcatggcgtgtgaagggtgatgccgctaccagagatctatcttag

SEQ ID NO: 727 - DNA, 531 bp, Zea mays
  Peptide Sequence Number=SeqID_42506
atgaaatatgttgatcatcctccctccaatccaaagaaaattacaatcaaatcaagtcaggaagtattcactgttgaaatccctcgccctaggaataatgccaacaagccgaggcagtcgattgctccagatgttgatacaccaaaacaaatgaagcaactttatgttaggcgtaatacaaagcggtctgcaggacgcgggaaaaacaaactgacaatcgacatgtcagatttgatgagaaaccaatgtctcctcagcgacaatcgccacatatattatctagaccatcttcatcacgaggcaactccagagaacaaatatgacacttcacgtattaaatactttgataaagagacaattgatgcactgaccaaggctgacaggaggaagcctcgtcatgctggcgaaacgtatggtcattgtcatttttgtagcaggacagacacatgctatgttgctgctcctaaacagccagcaaatgatacgttccatattcatgttcctcgcatgaaagatttgatctctagcaag

SEQ ID NO: 728 - DNA, 162 bp, Zea mays
  Peptide Sequence Number=SeqID_42507
atggcggcgactggatgcgtgctgcgtcaaggatgtgtgctgcgtcgaggatgcgcgctgcgtcggggtaacgactgggatgcgaagaggacgacggtggcctgggcgtctaggaccgatctggcctacggcggcctagccggcggcaatagaatgagttga

SEQ ID NO: 729 - DNA, 840 bp, Zea mays
  Peptide Sequence Number=SeqID_42508
atggcggccgagtccgccaggccgccctcgccgccgcgcgactccggctgccccgcgggcgcgggagactccaccagctcccagctgaccgcgacctacctcggcgtcagcttcgcgctcttcctcgccacgctcccgtcgggcaccgcggcgcgccacgtggcctcgctccagtcgcggggccgcctcctcgcctcgcgcctgctggccgccgaggaccagctgcggcagctgcgcgcgcgccgccgcgaggacgcccgcgccaacgcccgcgccgccgagatcttcgcgggccaccgcgccgcctggatggaggccgagcgccgcctgcaggcccgcgccgccgccgccgcggacgaggccgcctccctccgcgcgcacctcgccgacgccgaggccgacgccgctgcgctgcgcgcccgcgccgagcgactcgagcgcgaggccgccgagcgggatgagctgctcaccgcgctcctcgcggccacctcgcgcgccgggtactccggcggcgggcccctgccccgcgtccacgacggggaggagcaggaggaggaggagcgggcgcgccacgacgcgcgtggggagcgggagccggagcacgagcaggacccgctgcccgcgccgccgttggaccacgccgctgacaccaccgacgccgaggccctcgctgccgccgccgcgctctacgctcagcagcgccagaagcacgacgacgacttctacacggcggccatggccgcgtcgggaatgccgccgtggatggagatggaccgatcaaaagcctggcagatgagctttggttcatggcttcatgcaagttccagtatccttcaatag

SEQ ID NO: 730 - DNA, 780 bp, Zea mays
  Peptide Sequence Number=SeqID_42509
atgaccaccagtactaagttgctaaatgtggatgtaatggacctaaagtatgatacaattgagtcaacgtacaacacaaagcatgctgtaccgaggagagaatcaccctggaaagtggatgtagaatcttcaggagttccagcaaaacttaggttgctggagcaggaattacttaacctggaaaaggtagtgaatggagatttgtccaagattccattggtgatgagaaaacaagtgaaaagataccaaactctagctgggaaaattgatgatctttgcaaacgaatgaaggtgaaacctaacggatatgtatttgtgcagcaaacaagtgacccttgtgattcaacacttaactcggagtttagaacacagcggcaaacagaattcttgctggaagcgtttcaccttcagcatcgtgcaactgaaaccaggcagaagctcggcacactgcaagcagagaccgcaaaaggcagctttggagatgagctaacagcagaagccaaaatgtgcacaagaagagcacttagttcaataaggaataacttcaaggaaatccagcgaagcttggagatttggctggcaagaattcttggagacctcgagggcatgctagccagggatggggcctcacgcattagggagtactttctgtctccatacacgtctgctgttcgtgactgcatgcgcatgaacaccctggagaatccctggatacacggtcagcagctgttgagaacatttgccgtggcaatgcctggttgtgggtttttcttcgactga

SEQ ID NO: 731 - DNA, 1161 bp, Zea mays
  Peptide Sequence Number=SeqID_42510
atggccatgggggatgggaatgaggatgatgatgggatgagcgccgcgcgcgcgtgtcggcacacagaatcatgcccagttggcccaccttacactcgcatggattggatactggtgctcaaggacatggtgctgaagctgtcgggcacccaccaccgccagcacggcgcgcagcacaggcgcggcgggtcgccgccgccgccacggggccgggccacctccctgtaccgcagcggctactaccgccccggcgtcgtgcaggacgacatggccgtgcccccggccacgtacctgggaggtggaggcgccggcgcgtcgagcgcgagctccaccccggcgtgggacctgcccgccgccgcccgcgcggacggcgaggcctgcagggagtgggtggcgcaggtggagcccggcgtgcagatcaccttcgtgtcactccccggcggcgccggcaacgacctcaagcgcatccggttcagccgcgagatgtacgacaagtggcaggcgcagaagtggtggggcgacaacaacgagcgcatcatggagctctacaacgtccgccgcttcagccgccaggtgctccccacgccgccgcgctccgacgacgccgagagggagtcgttctactcgcagtctcaggtagggagcccctcggccaccccgtcgccggcgccgctcacgccggagaggatcagctggggcgcgttcgcgcggcaggtggcagcgccgccagcatcatcaggtgccaccggcgccgcgcggcagcacagcttccggccgatgtcgccgccgccgccgtcgtcctccaacccttcggagcgggcctggcagcagcagcagcagcgacacatcggtggtggtggtggcggtggagcggccggcggcaagagccccgccgcctccgaggccgccgccgccgccacggaagcggcgcggaccaccacgtcgtccagggacgacgtgtccgtcagcaacgccagcgagctggaggtgtcggagtggatcatccaggaccagcccggcgtctacatcaccgtcagggagctcgccgacggcagccgggagctgcgccgcgtcaggttcagccgcgagaggttcgcggagctcaatgccaagctgtggtgggaggagaacaaggagaggatacaggctcagtacctttga

SEQ ID NO: 732 - DNA, 603 bp, Zea mays
  Peptide Sequence Number=SeqID_42511
atggcaggccatccgttgcgtggtccactggtcagagggcccgaccgccaccgtacccaccccccggcgacgaagcagcggacgacgctggtgttcacgtacgggacgctgaagcgcggcttctccaaccaccgcctcctggaggagctcttcgcgagcggggacgcgtcgctggtgggccccgcggtgacgtcggcgcggctgccgctggtgtgcgggccgtaccgggtgccgttccttctgaacctccccggcgccggcgccggggcgcaccgcgtgcgcggggaggcgtacgcggtgacggcccgcgggcttgcgcggctggacgagctggagggcgtggagacggggcactacgagcggctggccgtggccgtggacctcgagggcggcggcgcggtggatgcgatcgcctacttcgcgcaccggagctacgccaacgacatgtggcggcgcagcggggagaagggcgtccccgagtacacccacggcgtggcggccgggtatgtccggcgcaaggaccggccgcaggggcagacgttcctggagcagatccggatcttcaattcgtctcctcccaatccgcttaataatccctcctag

SEQ ID NO: 733 - DNA, 495 bp, Zea mays
  Peptide Sequence Number=SeqID_42512
atgactggatgggctttgtgtggggggctgcgttgtctgggttgtttggcgtcacttcttccaccttgctttgattttatagctaacatcttcatcaatctctatctctctataacattaatcctaaatactgaaagggtgttttgtgtgaagtacacctatgatgggacctatttagtctctggcagtgatgatacaaatcttcgtctgtggaagtccaaagcttcagaacaacttggagttcttcttccacgggagcgcaaaaagcaagagtaccaggatgctttgaaggagcggtacaagcatctcccagaagtcaagcggattgtaaggcatagacatctaccgaagccaatctacaaggcagccaacctacggcgtacgatgatcgaagctgaaagccgtaaagaggaaaggaggcgaaagcacagtgctcccgggagcatgcctgtgcagcccttcaggaagcggagaatcatcagagaagttgagtag

SEQ ID NO: 734 - DNA, 963 bp, Zea mays
  Peptide Sequence Number=SeqID_42513
atggcgcctcctgttgacgtggtcggtccgcgccctaggttgggcgatgtggaggctcctccgaggtcgaggtcgagtctgtctttcgtggctgaggtcgagtccgagctctgggtcgggcgaggcggagaccgtcggctgaagccagggctgagtccgagccctggggtcgggcgaagcggagttcgtcgtcttatggggctgagcccgagtccgagccctggggtggggcggatcggagctcgccgtcttccggggctgagcccaagtccgagccctgggtcgggcggagcggacagttggagcggcgcaggcggcgctgtccttctgtcaggccggtcagtggagcggcgaagtgacttcggtcatttcggctccgtcgactggaggacgcgcgtcaggataaagctttgtgctgatgggggttaccagctgagaattaggagccttgagggtgcaacataccaaaggtgcatgaaccacgtgttcagagagcacatcgaccgaacggtcgaggcttacgtcgacgacatcgttgtcaagatgaggaatgcctccgacctcctctctgaccttgaaacgacattcaagtgtctgagagcgaaaggcgtgaaactcaatcccgagaagtgtgtcttcggagtccttcgaggcatgctcctggggttcatcgtctccgagcggggcatcgaggccaacccggataaaatcgtcggtcccttgcagaaggcacccgggggcttctcgcatctgctggtcgccatcaaaaaattctccaagtggatcgaggtccgacccttaaccagcatcaggtccgagcaggcggtggcgttcttcacaaacatcatccatcgctttggggttccgaactccatcatcaccgacaatgcacgcagttcactaggaagaagttcctggacttctgggaggaccaccacatctgtgtggactgggccgccgtag

SEQ ID NO: 735 - DNA, 333 bp, Zea mays
  Peptide Sequence Number=SeqID_42514
atgagggtgaaggtgatttcgcgttccaccgacgactacacgcgcgagcgcagccaggacctgcagaaagtattccgcaactatgatccagcgcttcgtagtcaagagaaagctgttgagtatactcgggcactcaatgctgccaagttagagaagatatttgctaagccatttatcggagctatggatgggcatattgacgcggtatcgtgcatggccaaaaaccccaatcatttgaaagcaatattttctggttcaatggatggagatgttcgcctttgggatattgctgcgaggtactgctacagtattggggactacctcattccttaa

SEQ ID NO: 736 - DNA, 375 bp, Zea mays
  Peptide Sequence Number=SeqID_42515
atggggttcaactacgcgcaccgctctgcggtggtcggcaccgacacagacggcttcgcgagcgcggcggccacgaaccgctgcctcgttggcttcggtcccacggccacaaactgctgcctcgtttgcaatatattagcggcggcggcagattgcgcgctagcgaccgagacgcaagaattctgcgtctgttgctgcatgtttgaatgggtgcagaatggcacaagttctagcagtgacactgatcctcttcccaacgagttgaacattatgagcataagggatgataaagacgtcaaagatattgtagtcaatggcaacagggcggagcctggtcatatcataatgaccagcattgatgggagaaatgggtag

SEQ ID NO: 737 - DNA, 300 bp, Zea mays
  Peptide Sequence Number=SeqID_42516
atggggttcaactacgcgcaccgctctgcggtagacgtcgtcatcgtcgatgtcctcctccgctacatcacccacctggactggcctgccgccttccatgccaaccttgccggccgcacactcgccaacgagctcgacgtcaatggcacaagttctagcagtgacactgatcctcttcccaacgagttgaacattatgagcataagggatgataaagacgtcaaagatattgtagtcaatggcaacagggcggagcctggtcatatcataatgaccagcattgatgggagaaatgggtag

SEQ ID NO: 738 - DNA, 429 bp, Zea mays
  Peptide Sequence Number=SeqID_42517
atgcagcaacagacgcagaattcttgcgtctcggtcgctagcgcgcaatctgccgccgccgctaatatattgcaaacgaggcagcagtttgtggccgtgggaccgaagccaacgaggcagcggttcgtggccgccgtgctcgcgaagccgtctgtgtcggtgccgaccacctgcgagcacatgtacgacgtcgagctcgttggcgagtgtgcggccggcaaggttggcatggaaggcggcaggccagtccaggtgggtgatgtagcggaggaggacatcgacgatgacgacgtctaccgcagagcgtcgcagatcccggttggggggagcaggggcggcgggagggggagcgcgtggggcgagcgggtgcggcgtgcggcgtctgcgcggcgcctatcgcggcggagaggcaggttgatagtcgcctag

SEQ ID NO: 739 - DNA, 156 bp, Zea mays
  Peptide Sequence Number=SeqID_42518
atgggctggagctctgaaaagattcaattaggtataggagctggtcacaattctagagaggttgctggaatgtggaagcactccatcaaagtttcttatgaagcgacaaaggcagatactacaaggcgtctgatcaactgcaagtttttcccataa

SEQ ID NO: 740 - DNA, 213 bp, Zea mays
  Peptide Sequence Number=SeqID_42519
atgccggcctcgcctccccttcacctcgcgcttattctggtggccttcctcttcctcaccgactctggccttgtcgtcacgtgcgccagcaccccatgtgtgcgctatcctctccctccttcggccatccgtgcgctactccagtctccaggggcgccaccatgggggctaatgagctatgaggtggagatgggatgtgacgagatgagatga

SEQ ID NO: 741 - DNA, 411 bp, Zea mays
  Peptide Sequence Number=SeqID_42520
atggaggtggagctggagcacggcggggatgaaggcggcgacagagggagcgagtcctcctcctcctcctccaagaggagcttcggcgcttcttcggacgcaaccgtcagcagcacaccaagcaagctgcaagccctgaggtttgcagaggacctctcgctgccgtcggtgcaggtggtggtgatgagcgccaacatggggtgttcgcactgccggcagcgggtcgccaacgtcgtctccaagatgaacggcctgctggactacatggtggacttcgggaagaaggaggtgacggtgcgcgggaaggtggtgcataccaagaagaagaagaagaggcacatgagggcactgctgggtgcagcaggagcagcagcggagccctccccctccaccagtccaccccccaattaa

SEQ ID NO: 742 - DNA, 213 bp, Zea mays
  Peptide Sequence Number=SeqID_42521
atgtcggtgtcgcctaggcgaggcctaggtgtccaggcgcccggccaggctcatcgtgatgcggcacctcgcctgaagatggctaggcggacgcctgaaggacctagaagtcatccttgtctagcaatccttggttgtgtcttggcagcagcagccagaggtatacctcagaagttgtcaatgatggctgaccctcaagccgcttcaacttaa

SEQ ID NO: 743 - DNA, 981 bp, Zea mays
  Peptide Sequence Number=SeqID_42522
atgcgcggcgcgtaccctgtcctgcctactttgctctgctctcgacgctttgctctcctcccttccccacccgcccacccggacttggttcttccgccattcccgttatcgcggagcgcaggtgctcctcgtcttttgcggcggcatcgagagggtgagctcctcgtctctcttgctgagctcgacgcggcggtccggtgctcgctgcgaagctggtggatggcgaatatggattcggttgttgtgatggaggtggcgccggtgccgatcccgacgttcatggacgccactcccctgaaccccccactgccgcttgtggtggaggagctcgtgctgcgccgcagtgctcgttacctcaacaggccaacccggcctaactacgcggaccaggagcctccaaaaaaccccggcggccggggccggggcaagcgaaagagggatgaggagaagccggagctggcggcgcagcagggtaccaagaccccaggcaggaatgactccaatgttgaggcgggtgagaggaagccgatgcccgtgactgcggcggtgccggcctgttgcgctggcgttgctgcggaagacgatgcgacgccgactgggaagagcgccaagctgagggtgaaggagacactgagggcgttcaacagccactacctccactttgtccaggaggagcagaaaagagctcaggctgcgatacaggagattgaggctaagggtggcctcaaacgtcagaccaaggggggtaaaaagaagagcagtaagcaagaggctgaagctgaggagaaagagaaacgcccatcaaagcgacctgacctgaaggcaatcaccaagctgtatccctgtctgtacgagcttgctatgtttgctggtcttattcttaatgtcgaaatccagatgcaagaaatgaatgccgtgctttatcaggagaagacgattgggcatctaccaggagggctgcgtatcattgaattaaagtag

SEQ ID NO: 744 - DNA, 330 bp, Zea mays
  Peptide Sequence Number=SeqID_42523
atggtcttcttcctctggctctggatacggcagtgcccacgcagccccggacgacgagctcgccggcgcgaccacagtggcagagctgagttcgcactgggtggaagacaggagcccagcacacggttttatacccaggcggccaaggacttccgtccaggaggtgtcatgcaccatgaacggactccgcgcatcgcgggcgagtccagcgcggttctgttgatagagatcgggtggttgcgtacggaaatttgtttgagcagattgttaagagagcacgtcaaggaagcagatatggtcatgggctccacacatcagtggattaagtga

SEQ ID NO: 745 - DNA, 1209 bp, Zea mays
  Peptide Sequence Number=SeqID_42524
atgaggaatttctcgttggcgggccgtttgactcttgttaaaacggtgatcacctcgcaagcaatctacatgctatccgtccttaacgcgcctaaggaaattataaatctccttgactccaaaagaagacagttcctttgggtgggttcagacaggctaactggaggaaaatgcaaagttaattggaagcgtgtggcgaggccaaaagccctcgggggcttgggggtcctgcatttgggtgcttttgcgcgcgccttgcgcttaaggtggttatggcaaatttgcacatatcataataacgccttgggaaatttggaaacgccttgcactaatgttgtttgtctgctttttgcggcatcaacaaatattaagattggagatggctccaagatatcattttgggacagcgcttgggcagggggaaggaggccgaaagacttggcacctagtctattctccatatcaagacataagggcaaatcactggcaagggcggttagggacaatgcgtggatcgcagatctcgcactgctaggcagtgtaattacgacccgtcaccttcatgagttctttattctttggtccgaggttcaaaagatccagcttgacccaggggctcaggatatcatcacctggaaattcactgcagaccatcgctactcagtgaaatcagcatatttggcgcagtttttaggctcagttcgcactaacttagacctcatcatttggaagaattgggcgcccccaaagtacaagtttttcagctggctagcgattcaaaatcgcatttggactaccgaccgtttagctaccagaaattggccccattccccgacttgtgttctttgtcaaggtgttctggaatcaggtcttcatctatttgtggaatgccggttcactaaacggatttgggaggagattgctgtttgggttgccattgaggatttgaagccgtctaactgggagctatctcacacgctgatgcattggtgggagaacttggctatgatatcggggtgtagcagaaaggggctcagatcattgctgatccttattaattggataatatggcgggaaaggaatgtgaggacttttgatcgcaggttttcgactagtcagcagatcataactctgattaaatgcgacgcggcagcctggattgcagccggggctagacaattagctaccctcttatcctcgtcaacttag

SEQ ID NO: 746 - DNA, 1113 bp, Zea mays
  Peptide Sequence Number=SeqID_42525
atgcaacggaacggggtggtggaatgcagcgtgtgccgctcccgggtggtggtgccgagcccccggagcgtgtccagggcgtacgacaagcaccgcaacaagatgtcgtccaagttccgggcgctcaacgtcttcctcgtcgtcggcgactgcatccttgttggtctccagcccatcctagtgttcatgtcaaaggttgatgggaagtttcagttcagtcccatcagtgttaactttctgacggaggttatgaaagtcatctttgctgtcgtcatgctcataattcagtctagaaagcaaaaggttggagaaaagccacttttggcacgttcaaccttcatacaggcagcccgtaataatgtacttctagctgttcctgctcttctatatgcaatcaacaattacctaaaattcatcatgcagttgtacttcaatcctgcaactgtgaaaatgctaagtaacctaaaggtactggttatagcttttcttctgaaatttataatgagaaggagattctcagttattcagtgggaagctcttgctctattgcttattggaatcagcatcaatcaactccgaactgtacctgtgggcaacacagcatttggtcttcctgtcactgctattgcgtacatatatacattgatttttgtaactgttccttcagtggcttctgtctacaatgaatatgccttgaaaagtcaatatgacactagcatctatctccagaacttgtttctgtacggatatggagcaatattcaacttgcttggcattcttgggactgtcctattccaagggccagagagttttaatattcttcgaggccattcaagggccacaatatttctcatatgtaacaatgctgcacaaggcattctatcttcattcttctttaagtatgcagacacaattttgaagaaatattcgtcaactgttgccacaatatttactggcctagcttctgctgcatttttggggcattccttgaccattaattttctcctgggcatatcagtggtgtttatttcaatgcaccagaatagatgtgtcattttagaggctacatctaagttggccttcatttcaggcaagccatcggattggaactga

SEQ ID NO: 747 - DNA, 315 bp, Zea mays
  Peptide Sequence Number=SeqID_42526
atggagatagtgttaagggaggccaccattggtgactcgaatcctcggagagatctcgaccacgattgtgacctggggggagaatcgcggaccggcgggcgtgttcgcgaagaaatcaagaggcggagcatcgggccgacggggcgaatttcacgccgatgtgcatcaccatcgtcgtgtcgccattactcgtcggtggagctcggctcttcacaatctaaggtattatggcagggaatgggtttgggaagttcactgcatcacgtagtagggattggattgggttatggaacacttgggtgtgtgatgaggtag

SEQ ID NO: 748 - DNA, 240 bp, Zea mays
  Peptide Sequence Number=SeqID_42527
atggcatggatcaagagggagcgcaagaacaagagggaagggaggaggaagaagtaccacatgcacctccaacccaagtatgcaccaacattgtcacacccggttttggaaggcaaatcgaatgcgaaccatgtccttacggagaggtactcaggaaacagcctgagtcccctaaattatcacaagatcatcatcaagataacatcatcgtatcatagatatccgcatcatgttcgttga

SEQ ID NO: 749 - DNA, 288 bp, Zea mays
  Peptide Sequence Number=SeqID_42528
atgaggagagcacgagcaagggtgtcgacggaggacgcaacggagagggagaaggcagtggtgggcagaggcctgctgcggcggcgggcagtgacgcgcaggaaggccgaggagggcgctgcgcgtgggggcggctggcggatggggtcgaagccgtgcgccaggaccaccggcctggagatggggtatgcgaaaagggcctctagcctaacggttaaggacttccgagtagcacctccaagtcctgggttcaattcctatcgggagcgaattttcaggcttggttaa

SEQ ID NO: 750 - DNA, 905 bp, Zea mays
  Peptide Sequence Number=SeqID_42529
atacttatgtgctgatatcactcagcataaaaaagttgatgcctatcttggaaacgctatataatgcatcaaggaagacttcaaatcagatttacatgctgttgattattctcctgatcctcagtcaagattcaaccttcaatgctagtgtgcacaaattggtgcttcctggtgttccttggtaccatgaacgcctgatgcatcaaacttctatgggatctttgatggttgtaatactaattcagaccatcaagtacaacctctccaagctaagagatgtctaccttcacacaaactgtcttgcaattttagcaaatatggctccgcatgtgcataggctgagtgcttatgcatcacaaaggctagttagtctctttgacatgctttctcgcaagtatgccaaactagctgagttgaaaaatgacaagtctctgaaagttatatctgatcagatggaagcagacaacatcgcagatgatatgtctacagagcttcacatatatacagatttcttgagaattgttctggaaataatcaatgcaatccttacatatgcattgcccagaaatcccgaggttgtatatgctgtattgcatcgacaagaggtttttgagccatttaaaaatcatccacgttttaatgaactgcttgagaacatatacactatgtttactcagttgcggtttacatatgagcaagaaagccaccctgaggaattctttatcccatatgcatggcgccttgtcctgtcacggggattctccttcaatcccagcgccataaatctcttccctgtggagattcaccttgaaggggaagagggtggacgaattgtgcaagggttcagagattgtgctattataggtggtagattactatgtaggctatacacaattctttcataa

SEQ ID NO: 751 - DNA, 210 bp, Zea mays
  Peptide Sequence Number=SeqID_42530
atggtggtgacgtggggtggtcggggcagtggtcggagtaggggactcagcgggcagcagtgtgaggtggacggggtcgagcagagcaggactgggccgacgatggcgcgggcgaggccgaggcgcggcgacacgaccaaggagcggccgagggctggcggcaacgtggtttctacacatagtgcgataaaaattgacattgtttcatga

SEQ ID NO: 752 - DNA, 1583 bp, Zea mays
  Peptide Sequence Number=SeqID_42531
ctctgaattctactgacaaaaacaagcattctggtacagatgatgaaccattgaggaaagaagcaactgaaacagccatattttcttccgaaacaattgctcttgtcagtaccactgaagatgtgacaagctacaaggatagctcaatctataacgaagaaattgtaccacttatgcatgggactacagaaacaagtgaagaaactatccaaggcaactacaaatcattgttacaagaaaaaatagaaggttcactagaagaactggaagaatctagcagtcatgacaattcccccatgggtggtagtctagctggtgaaaatacaactgagaacacagaacaaggatacattgaggtggcaacagtagaggaaattttggtggtaatgcaaggagaaactacatcatcaactgaatcaattgtcagcacttatcttgatgctgatgactctgagatcaaggaagtggttatagaagataagcctgtacaaaaagagagtctaccagatgtgcaaccatcagatggcacaaacctagagatatccaagaatgacaacatgcaaatacaaataccacatgaccaggaagaaaacagagcaataagcaaaattgcaacagtaaatataatgactgaaagtgatgaggcatttgaggatgataataatatccttgcattaggaaatcaggatgaagataatgcagtaagtacattatgtggtaatctctataatgatgaagttgttgcaaagtgtcaaccatatctaaaaaatccaacttcgatgaatgatccagaactggaaaatgaacaaaatgaaagggtagttggttcaagacgacagagttcagtttctgttactacaacaatgaagcataatggcataggaacaatatacaaggaagaaggaatagctgagaaaaatatcacggcttggaatctagaagataattttgcaacagagaacaaacctgaagaacattatggtaacttagtcagtattactgaggtcaatggaaaggattttacaggcttacaatcatctttgtcagatcatcattatattgggaatgaagagatacaaagaaaagtcagtggagtatccggaatagtagagtttgataaagagacagtaaaggaaattttagaagaagataaggtaaataatgtagaaggtctaggcctccattttgatgcacatgtagtgacaaaggagggaggagacttatccaatttaccaaaggccataccattaattcctcttcaatcactagaagatattgacaggaaggtatatagaaccagagataagcaagaaactattacaaactcgcaagttgaccaatctcaactgatactgcttgaaaaatacgaggttttgaaacttgagaatggcgagattcttagaaagtgtatgcagttggtggaagatagctctaatgtagtcataatctctactgatggtatcaaccatgagaaagtagatacaaacactacatcttcagattttacctttgaagccaaccactaccaaaaggaagtcacagaaggcatttcagctgcagcctttactgctcaatgcaatcag

SEQ ID NO: 753 - DNA, 507 bp, Zea mays
  Peptide Sequence Number=SeqID_42532
atggagcatagcggccgaaagctggcggagggcttgctcgtgcttggctactggatggctatgtccacctcaaataccaccgtgatctgcacggggtcgccgtctgcggccccaaacatgacagagcctggtcgtgcttgtgggcctcgttgcccctatggggtcgtccactgggtcgtgtgccaccgtacctcgggtatggcgttgcgtctcgtctgccttccaatgggttcctgttgctactttgatttagacgtggcagtgcttggtgggtcctatcgaggcagctcaaggcatattcctggtacgacgtattgccccgtcccttccgccatatgggtcactgtagaaaccccgatgttgaagtccctacgactggtgttgtccggtcccactgctcagcgaggatacatatctggcgtcgtgcttgatagggaccctacggaacggtttccacggtctaggcatggctcggtgatgtcccatcgcatcgacgtggctcgatag

SEQ ID NO: 754 - DNA, 183 bp, Zea mays
  Peptide Sequence Number=SeqID_42533
atggagattgaaggatttgttgaaggtcacattcacctcgagacccacggccaccgtttcccctggaccaggctaagcggtaaacggctccgaaccacccctgagaacgtgttccttcccctggacctagcccttcgtgacctaatccttacccgttacaaggggggtcccgaaaccgagtga

SEQ ID NO: 755 - DNA, 255 bp, Zea mays
  Peptide Sequence Number=SeqID_42534
atgggaaggagtccgacttggaggtggtggccgaggagggtgttggagctcacatgtggttgtggagctgggaggccgcccccgggagggaaggtagggcctcccgggggcagcgatggcaggcggcggctgtgggggtgggagggagacgccggcggctgtgggaggtgggaggaaaaccctaaacctagtctgataccatgtagaagggagagaattgttgtattgataggagatgagctctttggtgcttga

SEQ ID NO: 756 - DNA, 389 bp, Zea mays
  Peptide Sequence Number=SeqID_42535
caagcgcccaagctccactcctccttgttcgtcttcaacctccagccggccaccatctctcgtcgctccctgtccgcggccgtcggcgccgccgcgtctccaagcgggctcgggcgcagccatggcgcggctcctccggccgggggcggccctggcacggcggccccgacgcggcgcgccaggcccaacaagagctgcagcgccgcgaccgcctccgcggtgagcgactggtgcaccgtgtacgcccgcaacctccttcgtggcgcggctcctccagcagcaatcggccagcccgacgctgtccaacgcgctcgcggcctcgctcaagcgcctgcaggccaaccagcgtcgcggctgcgtccacaagccgcggcccagatccgccaccg

SEQ ID NO: 757 - DNA, 1050 bp, Zea mays
  Peptide Sequence Number=SeqID_42536
atggcgtcgggcagccgcgccacgcccacgcgctccccctcctccgcgcggcccgaggcgccgcgtcacgcgcaccaccaccaccactcccagtcgtcgggcgggagcacgtcccgcgcgggcgggggagccgcggccacggagtcggtctccaaggccgtcgcccagtacaccctagacgcgcgcctacacgcggtgttcgagcaatcgggcgcgtcgggccgcagcttcgactactcccaatcgctgcgcgcgccgcccacgccgtcctccgagcagcagatcgccgcctacctctcccgcatccagcgcggcggccacatccagcccttcggctgcacgctcgccgtcgccgacgactcctccttccgcctcctcgccttctccgagaactcccccgacctgctcgacctgtcgcctcaccactccgttccctcgctggactcctctgcgccgccccacgtttccctgggtgccgacgcgcgcctcctcttctccccctcgtccgcggtcctcctagagcgcgccttcgccgcgcgcgagatctcgctgctcaacccgatatggatccactccagggtctcctccaagccgttctacgccatcctccaccgcatcgacgtcggcgtcgtcatcgacctcgagcccgcccgcaccgaggaccccgctctctccatcgccggtgcagtccagtcccagaaactggcggtccgcgccatctcccgcctccaggcgctacccggcggggacgtcaagcttctctgcgacacagtcgtggagcatgttcgcgagctcacgggttatgaccgtgtcatggtgtacaggttccatgaagacgagcacggggaagttgtcgccgagagccggcgcgacaaccttgagccttacctcggattgcattatcccgccacagatatcccccaggcgtcgcgcttcctgttccggcagaaccgcgtgcgaatgattgccgattgccatgccaccccgtcatcattagcagtggcggtgacgatgagcaaacaggtcggggtggcatctcgtcggcaatga

SEQ ID NO: 758 - DNA, 471 bp, Zea mays
  Peptide Sequence Number=SeqID_42537
atgcaggcggcatgcaaccacgccaagtgggcgtgcccctccgacttccaacgcacccagcgcgggggcccacgcccacgcgtcacgcaaccggcgcgccggtcgctacgtgcaagcaactgcaccgccactcgcaccactgccacgccttctcgactgcggaaccagtaccgcgactcgaggcaaccctgcggaccgggaaagggggataccccgaaaaggatccttccccgtgaaggaaacaggctccgagcctccctactgatcaggggttcgaaggctggcccctcggaggggttcaacaactgcctcagagcgcgtgggctccacacccactactggtcagaggttcgaaggccagcccctcggaagggttcaacggctgcctcaggccactcgggctccgcgcccactactgatcaggggttcgaaggctggccctcgaaggtttcacagccgcctcagacatag

SEQ ID NO: 759 - DNA, 768 bp, Zea mays
  Peptide Sequence Number=SeqID_42538
atggccgggagcatgcaggcggcggacgcggcgggccggctgagcgcgctgctctcgctgctcgcgctgcgccggctcctcgccgtgctgcagccgctggccctgctcctgctcctgcccttccggtggcgctcgcgcccgggggccggggccgcggcctccgcgccgggggctagcgggaagaaggggaagtcggcgtcgtcgtcgtcgtcgtcgtcgtcggtggttctgcgggtgccggccgggtcgcccatggtcgccgcgcggaggcaggcttccgcgcggagggaggtagccatgcgccgggcgcgggaggccgggcgggagtacgagctcatccccaccgctcgcggcgagacgctcttcacgcagtgctggtggccgcgcccgtcctccaccgttaaaccaagggcgctagttgttgtcatgcacgggctaaacgagcacagtgggaggtacgatcatttagcgaggcgattgaatgatatcggcatcaaggtgtacgggatggactggactggtcatggtggaagtgatggtctacatggatatgtgcaatctcttgaccacgctgtcaatgacttgaaaatgtacctcaagaaagtgtcagccgagaaccctggtcttccatgcttctgcttcggccattcgacgggtgggggtatcattctgaaggctgcacttgatccagacgtagaaacgctcatcagcggtgttgtcctgacatcaccagctgtccgtgttcagcctgcccacccaatcatagcg

SEQ ID NO: 760 - DNA, 2589 bp, Zea mays
  Peptide Sequence Number=SeqID_42539
atgccggagaacattgatctggtgcttgagttcctgcggaagaaccggttcgccaaggcagaggcagctctccgtggggagctcaccggctgcgccgattcgaacggcatgaccgtgcagaggtgtgtcgctgagctgaaagaagacgacgagcaggaggacttggtgagctccaatggagggcccaacggtgctgtgacagagaggagtgcggactcatcgagggagttcatcgtgaaggaggttgatgttggagccctgccgaacggtttggatggaaagaagggctccgggattggccagcctcaggagaacaacgtgggggatctgtatccttggaccttcagcatagcaaacagcacggcagaacagctagctgagctgctggtgtcggaggaggtgccaagacataggcgtgctgcgatgttggcagagaagagggatcgaggcgttgggactgaacagcctggcccattgctggagcaaaaagtctcttctggaagagggaaaggaaaagttgatgctgctgggagaactgcaatcaatgaacagggtcattccagggataaaaatctagtaccagaaaaggaggagatgttaaatggttgcacagttaagacagtgcttccattccctggggaaaacccgtcatctagttacaatagcacgcaccatgaaaacgagaggaaagaggtaaggaggagcattaatgcagatggtgttggaaaaggggcaaaaggacatttcgacgaggggaacagacaaaattacttcgaaaaatccctagatacagatcaggtgtctgaccgatgcttcgatttacagcttgttggagataatcagcgtgaggagcttccaaagttacctcctgtgaggctcaagtccgaagataagctagtcaacatgaactgggaggacaagatcaatcaccatggatctggagccaagcaatctagtgctgatcatgcctttatgattgggtcttatctcgatgttcccattgggcaagacataacatcttcagggtttttcccctgtggaaggcgtacaattggcagtagttggctgtctgtcagtcagggtattacagaagatacctcgggttttgcaagacttgatgatgattcacttgaatatccaattggtgaatactgggattccgatgagtatgatgacgatgacgatgtaggctacacccgacaaccaattgaggatgaaacctggtttttagcacatgagattgattatcctagcgacaatgagaaggcaaccgaccacacaagagggcctgatcgtcatgatcgccctacaaaggatgaagatgatgaccagtcatttgttgaggaagattcctacatatccggtgagcaatattttcatggaaagaatattgcacaaataggtacttctgagggtccaatggtcaatgggattcctgataatgatatgatagctcagtatgatgggcaacttttagatcctgaagagcttaatttgatgcattctgaaccagcctggcagggctttgtattgcagaacagtgaactaggtatgttagggaatgggaaattccttaatgattctgaacgacctcatcctgatgacccttttgtggaggatgatcagcatggctctgttaggtcaattggtgttgggataagcagtgatgctgctgacattggcagtgaggtgcgagaaagtctgattggaggtagtagtgagggggatattgaatatttcaatgagagcagcttgagtgttagtggaaagagacattctcagcaggatcctgaaaagaagagagtaggtgctaaaggagtaaaacatgaccaaatcaattacgctgctggtatccagaagggtaatctactgccaggagcggctgatggtggattttcttttcctccacctttgcattctgtgaaaaatcatgactctgatactaaaactttgtggtcaaagaaggatgaaatgtattgcattaacgatctggatgattgccaaaatggcgtggcatcagatgatatgcttgctacatggaagaaaaagaatagtgagtcttctcttaggagctctagagatgaaatgacatctgatgttgttagatcaagaaattcaagtccatcgtatggcgaaacagaggacacaacgaatgttcggcgtcacaaactagatgacgcacaagaagacactggaaccaacttggatgatgaggaagcagcagcattgcaagagcaagtcaggcagataaaggtgcaggaggaagagtttgaaactttcaatcttaagattgtgcatagaaaaaacagaactggctttgaagaagacaaaaatttccatgttgttctcaattctgtcattgctgggcgttatcatgtatcagagtatttggggtcagctgctttcagcaaagccatccaggcacatgatttgcacacaggaatggatgtatgtgttaaaattataaaaaataacaaagattttttcgaccagagccttgatgagatcaagcttctgaagtatgttaacaagcatgatcctggtgacaagtaccaccttttgcgtctgtatgattacttctactatcgg

SEQ ID NO: 761 - DNA, 294 bp, Zea mays
  Peptide Sequence Number=SeqID_42540
atggccggcggccgtacgtcgtctgaagctctgcatgaattcagtcgcctaattaattacgcaacaaaatcctggctgctcgtacgtccacaggccactccgaggctgagcgaggacaaagtgaagcagtgcgtggaccccaagctcaaggacgactacccgcccaaggccgtggccaagctcgcggcggtggcggcgctgtgcgtccagtacgaggccgatttcaggcccaacatgaccatcgtcgtcaaggctctgcagcccctcgtgaacgctcggccaggaggagagtag

SEQ ID NO: 762 - DNA, 318 bp, Zea mays
  Peptide Sequence Number=SeqID_42541
atggtgtcaggagtcaccgagacagggtcacaggaggcggtgccactagtaagcacgtacggtacggtacctccggcggcgccgccgtgccgcgcgcctcatgcttccgtccgttacacgatccccgggctcgtccagcgcggtcgcggtcgtggcgggcgtgtttggctgtggcgtggcgtcccggcggtccgtctcggctcccctttgattccattttcgtcgcgtcccgtcatgttcccatgccgggacacgcgcagtgcgatcgagtttcggcccatggatttcgcggccagggaacggatggggatcctctag

SEQ ID NO: 763 - DNA, 825 bp, Zea mays
  Peptide Sequence Number=SeqID_42542
atggcggggagggataagaggcgacgagcggcgccgctcgaaggcgacgagcagcagttgcggcggaggctggaggaagcggcgctcctcctccgcaggatcaaagatgtgctcctgagggtgctgttcgtggtgcagcagctcctgcagcagaacaagcactgctccaagagggacatctactacatgtacccctccatcttcgtagaagtagcagttgttgaccgtgccatcaacgatatctgcatactcttcaagtgcagccggcacaatctcaacgtggttcctgtagtgaaaggtttggtgatgggctggataagatttatggagggcgaaaagaaagtgtattgtataacaagcgtcaatgctgctttctccattcctgttgacattgaggcaatcaaagatgttgttagtgttgcccactacatacttgtggttgagaaggagacagtgttccagcgtttggccaatgacaagttctgtgaaagaaatcgctgcattgttattacacaattggcacatgatgcaaacttgttgcgtgtccctgatatacggtggcttggagttttcacatctgattttgaagaatattgccttccagactgctgcctacttcgtttgtcacctgaagataggaggaaagctgaaggcattcttgctaggtgctatttacacagggaagccccagaatggaggtcagagttggaagcaatgctgcaaaagggtgtcaagtttgagattgaggcactatccgcaaattccatttcctttttatcgcatgagtacattccccagaaaatcaaacaaggcatgcatttataa

SEQ ID NO: 764 - DNA, 327 bp, Zea mays
  Peptide Sequence Number=SeqID_42543
atggcggccctgagccaatgggctcagagctcgtactgggtgtgggtgggtggtgggctggtggcatgggcaggcagggagcagggaccatctgaatccctacagcgtcaggtcaggatcagagggctgccacggaaggtagaggacgaaggatatgatgatcccaagcagtgctccacacgtaagcaccactggttgaagaggaggcctctgttgcaggacagtcatgacgagtatatacaatacggcaagctgtctggttttggtttcgtgccgtcgcttggttttacggtatcgctgaactgtatagatctcaatatctcatga

SEQ ID NO: 765 - DNA, 645 bp, Zea mays
  Peptide Sequence Number=SeqID_42544
atggaagtcaagaacagcggcaacaacgccaacacgcggacgctcggcatggtgctgcgcagcgagcgggagctcctggcgcagaccagggcgcaggaggacgagatcgccgcgctccgcctgcagctcgagaacaaggaccgggaggtggagcggctcaaggacctatgcctgcggcagcgggaggagatcaggacgctcaaagacgccgtcctgttcccggacgtggagccggagccagagcccgaccgccgcctccgacacgagatttccacgctcaccgaccagatccagtgcctcgcgcaggaggtcgcccaggttaaggccgagaagcactcggcaaggtcgtgctttgacgaggatggatacttctcttcccctaggacgcctgggtttaacgaggagaccgctttctctctggagtgcagcattggggaagctgagacgccgaactacggtagcccagacgaaatgttcagcaaggatcttaatccttgcttgaccccgtgcattgccaagagcagatctgatgtatccgcacaattccagtcgtcttcctcccagttcacaaagcttgcccagctatttggaatggaatgccagtttggctctgctatgtcatcgataggtgaatgtagcatgtga

SEQ ID NO: 766 - DNA, 195 bp, Zea mays
  Peptide Sequence Number=SeqID_42545
atgcaggggaaggcgaactgttgctgcctggccagggtgcagttgtccatcctccacccgagcgacggtcatgccgcgcgcgggccgaccacgtccagatcgggacaaccgcccagggcgctgccgacgtctaagtctaggtaccattgttaccccaagtatgggagtctgttctttgtggctgctgaggcctga

SEQ ID NO: 767 - DNA, 975 bp, Zea mays
  Peptide Sequence Number=SeqID_42546
atgagctcgctacacgccacacgagcggagcttggcctggttgtcctgtacctgaacaaagccgaggcccgggacaagatctgcagggcgatccagtacggctccaagttcgtaagcaacgggcagcctggcactgcgcaggaggtcgacagatcgaccaccttggctcgcaaagtcttccggctcctcaagtgggtcaatgatctgcatgctcttatcagcccgccggccaaagggactccgctcaccctcgttctgcttggcaaatccaaaaacgcgctgctttcgacgttcttgttcttggatcagtttgtgtggctcggacgaacggggatcgtcaagaacaaggaggcgacggaccgcgttgccaggttatccctgtactgctggatggcttcttctgcctgtgcaggtctagttgagcttggagagcttaaaaggctatcgagatcgatgaggaagcttgcaagagagctgagggacacagataaatatgagaacgagcagtaccaggacaaaatgaggcagtcagatgaacggctcctggccctggtcaaggcggccatggacgtggtcgtggccgtcgggcttcttcagctggcgcccaagaaggtcactccgagagtgacaggagcctttgggttcgtcacctcgcttatctcctgctatcagcaaaaggcatacaggaaacaacgtggaaacctaaaatgggcaacatgtgctgatgcggggaccaaaattttccacgccaacaccactgtcagacagaggttaaactcaatagccacgttgcgcaactcttctaggcatcacatttctagccatgaagggaaagcaaagatattgtatgaagtgtttaagaaaagacttgagacatctgattttactaacatgggttttgatctgaacactttgattcaagcaacagaagacctatcttgtttggaatcacctttcactgaggaaagaggttaa

SEQ ID NO: 768 - DNA, 984 bp, Zea mays
  Peptide Sequence Number=SeqID_42547
atgaaccaggtgcaaggaaactggacaaatgcaaaacatgcgacgaagttggacagcatgatcccaactgtggctggcattggcgaacgttcatttgccctgctgtgccatgatgatgagtgtcgcgcgtcgggctatacgccggccgtcttgatcgcggctctgctggggctggggctctgcgtcgccgtcgttgcggcggagaagaggcggcggctagtcggcgtcggcgccaccggcgacgaccacgcggcggcgtcggccggactaagccagggaactgtccaagtccaagatcacggcgggcactggtgcagcaatagcaaccgggtccaagtccaagaaatgagctcgcggggtcccgacccggcgccgcccggggaggagcaggagacggcggaggagctgctggagcgcgtccggggcatggtgccggcggcggcggccgcagcgcgggcggcgggcgggttcccgggccggtggaaggcgatcgccgcgaagctggacgcgctgccggcgtgcctgtccgacctgtccagccacccttgcttcgccaggaactcgctgtgccgggagctgctgcagtcggtggccgccacgctggccgacgcggccgagctcgcggcgcggtgccgggagccgccggcggacgggaagctgagggcgcagagcgccgtcgacgcgctctccgggaggctcgacctcggcctccgggactgcgcgctgctcgtcaagaccggcgtcctgtcggacgccgccggcccgtcaccgccgccggaggaggcgcccgacgtccgggagctgctcgcgcggctgcagatcgggcacgccgaggccaggggccgggccgtggacgcgctgctggacgcgctgcgcagggacgagcggggcgtgctggcggcgctcggccgcgccagcgtcgccgcgctggtgcagctgctcacggcgtcggcgcccgcggtccgggagaaggccgccacggcc

SEQ ID NO: 769 - DNA, 702 bp, Zea mays
  Peptide Sequence Number=SeqID_42548
atgccgccgccgccgccggcggccacggctgcccagagcacgatcaaggtcgttatcgttggggcaacgaaagagatcgggaggacggccgtcgttgcggtgagcaaggccaggggaatggagctcgcgggcgcgatcgactcgcagtgcattggcgaggacgcgggacagataagtggcatggacgagccgctggagatccctgtgctgaacgacctcaccatggttctgggctccatagcgcagtcgagagcaaccggcgtggtggtcgacttcagcgagccttcagctgtttacgacaatgtcaagcaggcagcggcgtttggtctgagcagcgtcgtctacgttccgaaaatcgagctagagacagtgactgaactgtcagcgttctgcgagaaggcaagcgtgggctgcttggttgcgccaacgctgtcgattgggtccgtgctccttcagcaagcggctatacaggcctcgttccactacagcaacgttgagattgtggaatcgagaccaaacccatcggatcttccatcgcaagatgcaatccagattgcaaacaacatatcagaccttggtcagatatacaacagggaagatatggattccagcagtccatgcctgatgccaggactgatcctggcgatacggaaggtggtgcggttcaagaacttgatttatgggctagagaagttcttgtag

SEQ ID NO: 770 - DNA, 996 bp, Zea mays
  Peptide Sequence Number=SeqID_42549
atggagacggaggacagcgtcgggtgggacttcctcgactggctcggcccggacatctccaccaccatcttccagctcctcgacgaccccgcggacctcgcccgcgtcgccgccgtctcccgctcctggcgccgattcggtacgcttcctgctccccagttccccgttatcgtccctgtccttgggccggtcgctgagctcgacgcctccgctgttttgctcccccctctccccgcctcccgtgcagtcgccgtgaacaaattcagcaagcacctgtgcaggcagatatgtccggaggccgccagcttcacccgcgcggtcgtggtggcccgattgccgccgccgccgccgccggcggcgcacgccgcgtgcgagtccagccaggtcgccgagtgcagggcccgcgatggggagcacgcggcctactcctacctcgccggcgcgctcgtctccggcaagcccgccacggacctcgtcatgcgctgcgtcggcgcctccagcaccgacaacttccccgacgagaccatcgagaacacgctcgtgccgcacgacatggttaacttccgcccctcctactggtccagcggcggcgaggacgaccccgatgtccccgagagcttgacctacacgctcgcctctgatctctgcgtcatcgaggagatcaggatacgcccgttcgaagctacttttcagcatggccatccgatttactcttcgaaggcggtgagaatccggctgggtcattccaagcttgaccctggaagagagacttttgtttcggatgaggatgagaacctgactgcgatcgctgatgagaactacatgtggacatacacgtcgccagagtttcctatgcttcaggaaaatgtgttgcaaaccttcaagcttccacgcccggctctttgcattggtggtatagtgaagattgaactactggggaggatacagaaacaatttacagatgataagtattacatatgtttcgcgctgggatag

SEQ ID NO: 771 - DNA, 2520 bp, Zea mays
  Peptide Sequence Number=SeqID_42550
tcgtggacgcccgcgggggacccctgcggcttcgtcggggtcacctgcgacgcgtccacgggcgccgtgcagcgcctgcgcatccacggcgcggggctggcgggcacgctcgcgccctccctcgcgcgccttcccgcgctcgagtccgtctcgctcttcggcaacgccctcgcgggcggcgtcccgcccggcttccgcgcgctcgcgcccacgctccgcaagctcaacctcagccggaacgcgctcgccggcgagatcccgccgttcctcggcgccttcccgtggctccgcctgctcgacctctcctacaaccacttcgccggcgggatccccgccgggctcttcgacccctgcctccgcctccgctacgtctcgctcgcgcacaacgacctgacgggccccgtcccgcccggcattgccaactgctcgcgcctcgccggcttcgacttctcctacaaccgcctctccggcgagctcccggaccgggtctgcgcgccgccggagatgaactacatctccgtccggagcaacgcgctctctgggcaaatatccaacaagctcacctcctgcggcggcattgacctcttcgacgtcggcagcaacaacttctccggagctgcgccctttgcgctccttggctcggtaaacatcacctacttcaatgtctcctccaacgcctttgaaggcgaaatccccagcattgcgacctgcggcaccaaattctcacgcttggacgcgtccggcaaccggctcacggggccggtgccggagagcgtcgtgaattgccgcggcctgaggtttttggatttgggggcgaatgctcttggtggagctgtacctcctgtgattgggactctgcggtcgctctccttcctccggctcgcgggcaatcctggcatttccggttcgattccacctgagcttggagggatcgagatgcttgtcacactcgacctcgcgggccttgctctcacaggagagattccagggtccctcagccagtgccgattcttgcttgaactgaatctgtccggcaacaaactgcaaggagctatcccagacacactcaacaacataacctacctcaaggtgcttgatctccacaggaaccagcttgatgggggcattccagtcacacttgggcagctcacaaaccttgttcttctagacctctcggagaatcaactgactggggcaatacctccacagcttgggaacctctctaacctgacacatttcaacatgtccttcaataacctatctggcatgattcctcctgagccagtcttgcagaaatttgattacactgcctacatgggcaaccagtttctatgtggctctccattgcccaataactgtgggaccgggatgaagcaccgcaaacgagtgggtgtgcctgtcataatcgccattgttgctgcagccctcatacttattggaatatgcattgtttgtgctttaaacatcaaggcttatacgcgtaagagcacagatgaggacatgaaggaagaggaagaggttcttgtgtctgagagtactcctccaattgcatctccaggctcaaatgccatcatcggaaaattggtgcttttcagcaagagcttgccatcaaggtacgaagattgggaaactggaactaaggcgctacttgataaagactgtctcattggcggtggatcaatcggtacggtgtacaaggccacttttgaaaacggcatgtccattgctgtgaagaaactggagacactagggagcgtgagaggccaggatgagtttgagcatgagatgagccagcttggtaacctcagccaccccaatctggttgcttttcagggttactactggtcatcctcaatgcagttgcttctgtcggaatttgtggccagcgggagcttgtatgaccacctccacggtagccatcctcatgctttctctgagagcagcagcagaggtgctggaggtgaactgtcttgggaacagaggttcaacgtcgcacttggagcggcccgtgcacttgcttaccttcaccatgattgccggccacagatcctgcacctcaacatcaagtcctccaacattatgttagatgggaaatacgaagctaagctatctgactatggattggggaagctgttgccgattctaggaagcattgaattgagtagaattcacaccgcaattgggtacattgctccggagctgtcatctccgactttgagatatagcgacaagagtgatgtatttagctttggggtggttttgcttgagaccgtgacagggcggaaaccggtggacagccctggggtagctacagctgtggttctgcgtgattatgtaagagaggtattggaggatggaactgcatcggactgctttgatcgaagcctgaggggaattgttgaagctgaattggttcaagtgctcaaattaggtctggtatgcacttccaatacaccatcaagccggcctagcatggcagaagtggtacagttcttggagtcggttagaattagttcttga

SEQ ID NO: 772 - DNA, 825 bp, Zea mays
  Peptide Sequence Number=SeqID_42551
gtttcgaagtttttagtggaaaaaggtagtacaaacacgcttcatggtcaagttacaattgggacgctaatacttcaggattgtgcagttggcctgctgtttgcactccttcctgttcttggaggtgctagtggcatttttggaggagtgatgtcaatggcgaaactgttgctagtgctatccgtatttgtagctgttacatatatgatgacatggtcaattgttcctcgattcttaaaactgatgattcagttatcttcacagtgcagtgactattgtggattgagtcttgagttggggtcatttcttgctggtgttatgatatcaaccacagattttgctcatcatactatggagcaggtggttgaagccattcgcaatctatttgcagcactcttccttgcaagcattggaatgctcatacatgttaagttcttgtggaatcatgttgacatattacttgcagctgttatactggttataatagtaaagagtattgtcgtagctattgttgtaaaggcatttggatacagcatgaggaccgcttttgttgttgggctgtccttggctcagataggagagtttgcttttgtgcttttgagccgggcctcccatctccatcttgttggggggaaaatgtatctattattactgggaacaactgcccttagcttggtaacaactcctctcattttcaaactaattcctgtggtaatgcaccttggcatccttatgcgttggttcccctcggaaaacagtatgcagagtgagcttccattacaggaaaaggcggttatgcttgaagcccacaacagatcactctaa

SEQ ID NO: 773 - DNA, 399 bp, Zea mays
  Peptide Sequence Number=SeqID_42552
atgcctggtgtgcctttctgtgcactggttgttctggcctctggtgatatcatcgaagatttgtacagtccccgaacagctgctatggactttgtgagtgaattgattagaaagcgagggaaaaacaatctccaaaagttcattcatttcattgtggatatttttaggaggtatgatgaagcacctgctgatcttaagccatatcgccaaaaagatggtgctcttctcgctattgggacactctgtgataaactgaagcaaacagatccatataaaacagagcttgagagtatgctggtccgacatgtctttcctgaattcaacagtcgtgttggacacttgcgagcaaaggtggaatatattagctcttcactggtcaataatgatatagaatactaa

SEQ ID NO: 774 - DNA, 603 bp, Zea mays
  Peptide Sequence Number=SeqID_42553
atgtcggagaggagggcgcgggcgcgctgcgcgagctcgacaccgtcgaggagcgccgggaggtggagcaggcggcaggaggtggcgggccatggagagagcgcgcgccatctgggagctacccgctgcggggccggccagggcgtttctcttcgtcgcccacggctgccgctgctgcccggagaacttctggccgccgtccccgcgctgcccggggtgcgtcggcctgccagaggtcgtcgccatcacggaccgcgcgctgcggaggcggttcgccgtgctggccgttgcgagcgccggggagtgctagtcgccggggaaggaggtcgacgtcgccaggcgggtgatccggtcctgggccgccaagaacgggctcgaaggcctgccggtagccgccgtcggcgcttcgtccgcgggtacttcgtgtccaggctggcggccaagatgagcctcgccgccgtcgtgattatgatcgccgagggcgcattcggcagctcagctggcgcgcttccggcggcttacccgtccgcatggtcagaagcagcggcgtccttcattcggacgggtatggaggagaacgcgacgggtatggaggagacctag

SEQ ID NO: 775 - DNA, 231 bp, Zea mays
  Peptide Sequence Number=SeqID_42554
atggccgccgtaaggtcgctgctccgctcgtcggcctcccttcttcgcgccgcccccgccctcgcgagatcctcggctaccacgcgtccgtctcttcggcgcgcattggctgctcctcctcgccttctccggtacggccccgcccgccgctactctgctgcctgcctgcttcctgatactgtagatctgatgaaactagatgaagagcagccggggaaaggtgaccactag

SEQ ID NO: 776 - DNA, 807 bp, Zea mays
  Peptide Sequence Number=SeqID_42555
atggggagccctctgggcgggtggccgtcatacaacccgcacaacttcagccagttggtccctgccgacccctccgcgcagccctcggtcgggcgtgttatttgtgagcaactggacaattcaaaacatctgaatgggtacttcagccacagacttctggtgagtgataaccacggaggccaggaacatcctgctgaggcacttgtaccagaaatccgaggagaagctgaggccaaagagagctgcggcggacaacctcgctccggagaacaacaacaagaagcagcccaggggacctgtgggcgacgtcgggggccagtcgagcgcaagaagctgaagacgcacagctggtggccgtcctcccctgcttctcatctatcggtgtcatgcagcctgcatctctcactcacagctgagctgcgtcagttttgggagtcggacgcggacgcggacgcggcaagccgccgaaaagaaggccaagacaaacccgaagcgacaagaactgacctaaatgctattgccagatgcgagtctgcaggacaaaagaagcacagccagaagaatatagtaataaaaagctccgagcatctgcacaaacacggctcatggggtgaccctaatcaaacagacgcagtgcaggtgcagcgatgggattggaagtgtgctgcggacctgcagtggcatgtggcctcatgtgcaggcagctcacaacaaagcactgaccaaccagcaaaagctacaaagcagaagggatcagttgttcttccagggcggcaacaccagacgaatggacgaccagcggagtag

SEQ ID NO: 777 - DNA, 1590 bp, Zea mays
  Peptide Sequence Number=SeqID_42556
atgggggcgcggaggaggctgctggcggacacgccgccggagcatcgccacaggcagggcgcgccggcgtcggactggagcgcggggtacctcaacgggtggctgtcgcagccgacgccgatcttcggcctccgcctctgggttctcgtcggcatcgccgtcggcgccgccatcgtgctcgtgctcctcctcatcttcgtctgcctctcccaccgccgccgccgccgcggcgacctgctcgccgccaatctctaccccgccggcgacaccaagcttctcaagcagcacctccagcaccaggccacgcccaccaaggacatccaggagattgtccgccgccagcaggcggagacgccgcctccgccggcggtgcagctcgccaaggccgtggcggagccgaagacgcctcctccgccgccgccgccgcagcacaggcagccggcgcggaagacgcccggcagcggcgggagcgaacgggacggggccacgcctaggagcacgggaagcgcggggatgccggaggtttcgcatctcgggtggggccactggttcacgctccgtgagctggaggaggccaccgacggcctcaccgaggagaatgtcatcggggagggtggctacgggatcgtgtacaagggcacgctgcacgactccactttgatcgccgtcaagaatctcctcaataataggggccaggccgagaaggagttcaaggtggaggtcgaagcaattggtcgtgttcggcacaaaaatctcgtcaggttgcttggttactgcgtagaaggtgcttacaggatgcttgtgtacgagtatgtggacaatggtaatcttgaccagtggcttcatggtgatgttggagaagtaagcccactaacatgggacgtcaggatgaacattatgcttggaaccgccaaagggttggcttatcttcacgaggggctggaaccgaaggttgttcaccgtgacatcaaagctagcaacattcttcttgaccagcagtggaacgctagagtatccgattttgggcttgcaaagctattgtggtcagagaaaagctatgttacaacccgtgttatgggaacatttgggtacgtggcgcctgaatatgccagcaccggaatgctgaacgagaggagtgatgtatatagctttggcgtactcataatggagatcatcactggtagatctcctgtagactacacaagagcagctgggagaggttggcacagtcgccatcttcataactttctttatcaagaatatggaggcccagcaaagctgaattctctacctgtctaccataggaaagcggaggaagttctggacccaaagatggctgaaaagccttctcccaaaacgctgaaacgggcgctcctggtcgcgcttcgctgtgtcgaccctgatgcgaacaagaggcctaaaatggggcatgtgattcacatgctcgagatggacgatctcctcttccgagatgataagaagcccgggagagacgttcatcctcacggttcagacagatacagctccaaggaggaagggagcatcagcaagcgcgagcaccaccaccaccaccaccatcggcacagatga

SEQ ID NO: 778 - DNA, 1308 bp, Zea mays
  Peptide Sequence Number=SeqID_42557
atggctgcgccggcgacgccgaggcagtcgctgatcctcccacgtgcctcctcgcactcgcactcccaacccagcgccggcgggctcacctcttaccgcgtcaccgcctcccaccgccggcgcggcgatttcgttttcgtcgtcaaccccttgggcgccaatggccgcacgggaaagcagtggaagcagttgctgccgcttctccgcacccgcctcgctgaccagtgcaacatttgcgagtgcatcacttcgggcccatcccatgccatagatgtcacaagggaggctataaaggatggggttgatgccgtgatagctgttggaggtgatggtacacttcatgaggtggtcaatggtttcttttgggaaggaagtccactcattccacttggaactggctcagattttgctcggacatttggctggacaaatgatccccatgacgcgattgatcgaattgtgagaggagtaaaatcaaaactagacgtaggcgtgatggagggtccaaacagagaaccacacttctttgttaatgttgctgatatccatttgagtgctaaggcaggttattttgcttctatgtataagagttttggtaacttatgctatgtatttggagctttaagagccttttggggacataataatcaagatatgagaataaaggtaaatgggggagaatggagaactgttcataacgtcacagccctgtgcatagggaatgccaaatacttcggtggtggtatgaagataactccaacagctgatccgtttagtggcaaccttgaggttgttattcttcaagatttcaaatggtacgactttattctgaagctacacaggctctatggaggtacacatctatcagtgaatggtgtttcgtcaatgaggttgagaaaaaccctgaacccctactccacctatacaaagcgacacctagcccatgcgattgacaagcgaaggagggggttcctttggaaggggcagaataatgcaaatgggggcagctgcccttttgcctgggaggctgtagcccgtcctattcagtttggtggactgggcattcctaacctggagcggttcgggtggaccttgcgtgccgctggctttggatgcaaaagaccgatccttcccgcccttgggctgagtatgactatcgctgaatggtgccccactctgatcaagttgattcccaaaagagctatgaagcacaggacattagcgcaagggttgataaatcgcagttgggtggaggatattacaggggccctgtcagtgcaagttctggtcgaatatttgcaactttga

SEQ ID NO: 779 - DNA, 255 bp, Zea mays
  Peptide Sequence Number=SeqID_42558
atgaagctatccttatccccatacacattgggagggagagcggcgcgggtgagggaggtcacggggaggacgtcgacgttcagcaaatcagtacccgatgggaagaggatgcgtcggcgtccatctccagcagtcgcagatgcacaggaggcccagaaggcctacctcgttgggcagttatgggggccatcaccaacccaccaagcccgaatatcgaggcaaaatccacggcctcaaaacggcctacccgcatag

SEQ ID NO: 780 - DNA, 192 bp, Zea mays
  Peptide Sequence Number=SeqID_42559
atgggaattgctcgtcggacgtcggtggtttacatcggaccgtcgtgtgtcggtgccaggggtgtctgctctgcgccggagttgtttagagcgcctgagagtcggccatggccgccgtcgcggttcagagcacgccaccgtggtgtctggtcagtgagggagaagggtgaggagatcgtcgtgagccactga

SEQ ID NO: 781 - DNA, 2028 bp, Zea mays
  Peptide Sequence Number=SeqID_42560
atggctccgttgcatgggggcttcggcgcgggaaagtcggatttaaagaagaagcattcactaaagtgcaactattgtgacaagttgatcaatgctggaattacaagagtgaagtaccatcttgctaacattgcaggctttaatgtttctaagtgcaagaaagtgccaactcctgttaaagaagacatggtagctttgcttacaaagaactgtgatgcaaaggagaaaaaaagaaaggaaaaacaaagggaaagagatgaaattgatcttgataattcaggaggtgataattcaagtgaagaagagagtgaacatgggaatgatgttattgtgctcaagtcaacaaaaggtggcagtagctctagattagcaactagtggcactattgataaattctacaaacctgagtcaattgaagaatctatccaaaagaacaaaagaggattaagcactagccaaaaaattcaaacacaattgacaactcagaaaagagaggagaggagggatagagcttgtgagtatatatgtcaattcttttatgaagctggtattgcacataacacagtcacccttcctagctttgctcatatggttgaggcaattggagcatttggtagaggtttgagaggtcctagttcctatgagatgagcggaccattcttgaaaaaatgcaaagaaaagaaatggcccaagggcacatttccctttcatcactgccttgatctcatgcttgaggaccttgcaaaaattggagctgttgaggaaacaatttctagtgcaaaacatgtgactgccttcttatatgctcatacaagagtgttagatttgatgaggaaatttttggggaaagatttggttcgttctggagtgactcgttttgccactgcgtatttgaatttaaaaagtttacaagataacaagaaagatatctcaaggctctttagatcagatgagctcaatgagttgggttacttgaaaaaggcgaagggcaagaaagccaacaaagtggtgagatcagaaggcttttggaaaaatgttgacatggccgtcaatttctttgagccattggctaatgtattgaggagaatggatagtgatgttcctgctatggggttcttgcatggatgtatgcttgaggcaaagaaagaaattgctatgaggtttgacaataatgaaaatagattcaaagttgcttgggacataattgacaaaaggtgggacaacaagctgaaaactccactacatttggcagggtattatttgaacccctatttttattacccaaacaagtcagaaattgagcttgatggttcatttagagctgcagtaattgcttgcattaccaagacagttgaagatgaagaaactcaagataatataattgaagagctaaatgtatatcaagaacaacaagggacatttggacatgacattgcagtaaggcagaggagaaataagaacttcaatctagcaaaatggtggctgaatcatggcacaagcacaccaaatctgaggttattagcaacaagaatactgaatttaacatgcaactcctcaggttgtgagcggaattggtcggattttgagcaggttcacacaaagaagagaaataaactgctgcatgacagaatgagagatcttgtttttgttaaatttaattcaagactaaggcaaaaaagagagaacaagagcaaagatccactagagagggaaatgaatgatgttcttgaggatgatgccaatgagtttattactgggcttgtaccaaatgctaattcagataaagatgaagaacatggggatgcacaagttggagcaacaatacatgaaccacaactgtcgcagccacaaccaaaaagaaaaaggcttgtgcgccctaggaagaagaaaattaggagcctacattccctgttgtatggtggtttagagaatgaagctgttgcctcatcttcggaatctgaagataatggagatggtgacatttcaatgcatcaatattcagattcagatgatttaggagatgaatag

SEQ ID NO: 782 - DNA, 2526 bp, Zea mays
  Peptide Sequence Number=SeqID_42561
atggagaggaagagcgtggtgatgtcggcgctggggatcgggatcggtgtcggcgtcggcctgggcctcgcgtccgcgccctgggccggcggcgcctcagcctccgcctccgccagggccgcgggggtcaccgtcgagagggtggagcaggacctccgccgcctcctcgccgacggcgccgacagcaaggtcaccttcgacgagttcccgtactacctcagtgagcaaacgcgtgttgtgctgaccagcgctgcgtacgttcacttgaaacaagcagagatttccaagtacaccaggaatcttgctcccgccagtcgtgcaatcctgctgtcaggtcccgcagagctctaccaacagatgctagccagagctcttgcccactattttcaagcaaagttgctcttgctagatcctactgatttccttataaagatccataacaaatatggcacaggtggcggcacagagaagacatttaaaagatcaatctccgagacgacgcttgaacgtgtgtcgggattgtttggatctctttcaattcttccacaaaaggaacagcccaaaggaactatacgtagacaaagcagcatgacggatgtcaaattaaggagctctgaaagtacaagcaacttgccaaagcttagaagaaatgcatctagttcctctgatatgagtagcatggcttcacaaggtccttcaactaatacagctcctcttagacgcacaagcagttggacttttgatgacaaaattttagtacaagcgttatacaaggttcttctttcagtatcaaagagctaccctattgtactctatataagagatgtcgagaagttccttcacaagtccccaaaaatgtatctcctgtttgaaaaactattaaacaaacttgatggaccggtgttagtccttggatcaaggattgtagatatggagagtgatgaggagttggactacagattgactgttctgttcccatataatatagaaatcaagccacctgaaaacgaaaaccaccttgtaagttggaaatcccaattagaagaagacatgaagatgattcagtttcaagataaccgaaatcatattatggaagtccttgcagaaaatgatcttgaatgtgacgatttaggctcgatttgcctatctgatactatgtgccttagtaagtatatcgaggagattgtggtgtctgcggtttcatatcacttgatgaataacaaagatccagattaccgaaatgggaaattagttctatccacaaagagtttgtcccatgcgtcggaaatttttcaaggcaacaagatgactgataaggacagcatgaaattggaagtgacagatggcaccttaaaggcttctgaaaaggcaattgctccaaccactgcaaaatcagaaacaaaacctgcatcatcgctgccacctgttcgacccccagctgctggtgcccctgctccaagggttgaaagcaaaacagaactggagaagaaggataatccacctccatctgcaaaagtcccggaagggacagcagataatgagtttgaaaagcgtattagaccagaagtgatacctgcaaatgagattggagtttcatttgatgatattggtgccttggatgatatcaaagaatcccttcatgagcttgtcatgctgcctctgagacgacctgacctcttcaaaggtggtcttcttaagccctgcagaggtatattactctttggtcctccaggaaccggcaagactatgcttgccaaggctatagccaatgaagctcaagcaagttttataaatgtctctatgtcaactatcacatcaaagtggtttggtgaagatgagaagaatgttcgagcactgttcacgttagctgctaaagtatcaccaaccatcattttcgtcgatgaagttgatagcatgcttgggcagcgtaacagagctggagagcacgaggcaatgaggaagatcaagaatgaatttatgacacactgggatggcctcttgtcaaggtcggaccagagaattcttgttcttgctgcgaccaacaggccttttgatcttgatgaggctattatccgtaggttcgagcgaagaatcatggtaggtctgccatcaatggaaagccgggaactcataatgcggcgacttctgtcaaaggagaaagttgatgaaaggctgaacttcaaggagctagcaaccatgacagaaggatatagtggaagtgatctcaagaacctgtgcacgacggcagcatatcgccctgtgagggagctaatccagaaggaaagaaagaaggagctggagaagctgaagcgtgaaaaaggcgagactccatcggatcttccaaagaagaaggaagagaccatcaccctaaggccgctgagcatgacagatctgaaggaagcaaagaaccaggtggctgcaagtttcgcttccgaaggtgtctgcatgagcgagctgaggcaatggaacgagttgtatggtgaaggaggctccagaaagaaggaacaattaacatacttcctctga

SEQ ID NO: 783 - DNA, 921 bp, Zea mays
  Peptide Sequence Number=SeqID_42562
atggcggagcagacgcagccacaaggggaaggcggcgctagccccaagcacgagtccctgatggagaagctcgccgacaagctccacgtcggcggcggcaaggccgactcctcctcctcctcggactccgacagtgacgagcggccccgcccctcggcaccgcctgccgacgagctcaagcagccctccttctccgacgccgccgccacggcggccgccgaggccaaagccaaggtgttccgccttttcggccgcgagcagcccatccacaaggccctcggtggcggcaagcgtatggttctgtttcccacgctcccgatgctgcttgctattaggcttgagatttctagatcggatctggctgctgatgtgttcttgtggaggaacaagaacatctctgctggagtacttggtggtgccacagcaatctggatcttatttgaattgcttggctaccatctccttacttttgtttgccatggtctcatattcgccctgggtgttctctttctctggtccaatgcttcatcgtttatccacaaggctccaccaaagatcccagaggtgatcattcctgaagatttagttgtcaacattgcgctatccactcgttacgagatcaacagagcctttgccaatctccgccagattgctcttggccgggacctaaagaagttcctaatggttattgctgggttttggttgctttctgttcttggaagctgctgcaacttcttgaccttagtttacattgtctttgtggtgctgcacacagtacctgtcctgtacgagaagtacgaggatcagattgactcgtatggcgagaaggggtgggttgaaattaagaagcagtatgccgtgttcgatgagaaggttctgagcaaagtacccaggggtcctgcgaaagacaagaagcactag

SEQ ID NO: 784 - DNA, 1518 bp, Zea mays
  Peptide Sequence Number=SeqID_42563
atggcaacttcgaagaaggaggagaagaggtgggagaagatgtggcgcattctggacctgctagaccaccaactcgagaatagggatgtgggacaacatagactgcagggccaggcagaactggttgcagctaccgtgcggaagacggaggagcgtggtagtcacaactatgttccagtgatacttggaggtaccaatttctcagtgtttggtgaaaattatgctgagaagatggtatggggtagggtatttggttcagattcacatggcctagtgcaacagctagctcatggggtgggtgatgagtggcacaataattgtgaccaagatgttgtgcctaatgtcccatggatgtttgttggaatgccacagcaagcaagtacatacccagtgtctagtgaaatgggtcttaaagtggcatgggacggggagatgcaatttgaaacacacacacatgagggattactgcagcaacttgctcaaggtggagaagccttagaagaattggctaagaagaagggtgatgttgtagatgagaccagcaagtctgaccaaccaagtgagacagttgctatggttatgaatggtggaagcatggaggggcttcttcctgctagtgttattagtgtgcttgaggaaggccctgagaaggagcagaatgttgaaaatgctgatgctactagtgctggtggtatcctttctcaagatttggttccagaattaacccatgaaactaatggtgcaagcgagattataagtgcccctaaggttgatgatgaggattgggagatactacaggttagagaaattagtgaagaagaggtggaagattaccttgtggtatctaaagaaggggttgtggatgaggtgatgcaggttgagttagcagatggtgggactggggaagaggaaatgctctttggaaaagaagtagcagggaatttggtgcagtgggatgaggagttttcatctaacctgagtatgcgcagaggtttaattagagatatggttgtggaaaggagttatctcaatgttttccattcagtggttgtggcaacggtaggagctgttagaataattcctggagttgtattgttcgagccaaacaagaatgtggtggcattagtggatgcctcttcctctccacttttccagccatcaccgtttcctcgaagcattggtactgcaatggaagatttggagtatgttgaaggtgaggctgtagtcaagaattattatctatctattgaagatgtgcagataagagttgtggatgacatagatttggtggatatattattcgactttgatcatagtttgtcgttatttgggtactcttttaagcaaatacttgaagcaatggctgacatatggattgggatggatgggttcagggttatgatgagtcactgcctagatattcatggggatggttgtaaggagcttccaaacatggaattccaggagttgtgccatctttactgcagaagcaaatggaccacaattgttgcattgtga

SEQ ID NO: 785 - DNA, 276 bp, Zea mays
  Peptide Sequence Number=SeqID_42564
atgtctggtgcaccaggggccgtacactctgaactcctcaccttcgggtttctcagggcgcactccgctaaaattcaccggaccgtccggtgtgctagtggagtaatgtctatccagcgcaacggtcgtctgcaaaagcgtgaacagtacgcgcagaagtcagagcaggcgtcagaggcgcaccggacagtgaacaacacctatccggtgccgcaccggactgtccggtgcgacataaagtcagcgctccaacggtcagaatcttcagaaccctaa

SEQ ID NO: 786 - DNA, 603 bp, Zea mays
  Peptide Sequence Number=SeqID_42565
atgccttctatgacgacacattgcaggcgtcatagatcagcgacaaccttcaatgtcactgatttcccccaaaacgtcattgggaggtgttttgagacacggtgtgacgccctgaatttgggggtcttagagacggtgatcgctggaatttggatccccgagcgcgcgcacccctgcgcggcctcggcccccggccctcccccggcggcgcggcccctgctccccggtggcgcggcccccagccctcccccgcggtggccgctgctcccccgtggcgcgcccccgcccctcggtggcgcgggccccagctcccccgacggcggcccctggttcccccgtggcgcggccccctgctcccctgcggcgcggccccatgccccccacggcgcgcccctgctcccccacagcgcggcctcgacgcccccgcgcccgcgcccctacgtgtccgcgccccggtggcctcgcgccctcgtgccccgccgtggcctcgcgtgcccccgacgtggtgacgaggatgatggttttggttatgactatggtaatggtgaagatgaagttgtggaggaggacttccaggagtttcaagagtacgatgagttctag

SEQ ID NO: 787 - DNA, 273 bp, Zea mays
  Peptide Sequence Number=SeqID_42566
atggagtacaaaatggagaacaggagaagacctgtacgaaagtcgtgtccaaagttttgccaaagcacaatatgttccttcaaaatctgggcctctagtctgcttccaagaagagaaccagagtttcttatcaggtacatgaacgtgaagcccaacttgagaatgagaagcaagaatttgcagttctctaagatcagcttcaagagttgcttgcacaatctgagtactctgaaaaagatagggctaagcaggctgaagaaatatagagcttga

SEQ ID NO: 788 - DNA, 150 bp, Zea mays
  Peptide Sequence Number=SeqID_42567
atgagtagcaacaaatctggtggaagcaagcttcctggcgctagaaccctgatttcctcaccctcatgtgccttggctgaaagttgcaggcggtatgccatagccccaaccattgccaacactttgtatggtctagagcttgctctttga

SEQ ID NO: 789 - DNA, 1038 bp, Zea mays
  Peptide Sequence Number=SeqID_42568
atgaagaaggcgtccgcggcgtcgcgctacgcggcctacgactccccgtccccttcgccgcgccgcgcggcgccttccgcggccgccgcgaccccgggagcagcgcacggcagcagccgcgccctggtggtcgcggggagatccggccgcgatctactgggcgccaagccgcaagcccacggcaacctaggctccgtgctacggcggctcatctccatggacaagaagccgccttcctccaagaaccagctcccggttccccctgccgccgccgccgcagcagcagcagcagcgaagaacaacggtggcgggaagctgccggggctgtcgcggaagttgttccagaaagcctcgtccaccgaggcggcggcgcccaggaagacgaaggccctgatggaagtcaagaacagcggcaacaacgccaacacgcggacgctcggcatggtgctgcgcagcgagcgggagctcctggcgcagaccagggcgcaggaggacgagatcgccgcgctccgcctgcagctcgagaacaaggaccgggaggtggagcggctcaaggacctatgcctgcggcagcgggaggagatcaggacgctcaaagacgccgtcctgttcccggacgtggagccggagccagagcccgaccgccgcctccgacacgagatttccacgctcaccgaccagatccagtgcctcgcgcaggaggtcgcccaggttaaggccgagaagcactcggcaaggtcgtgctttgacgaggatggatacttctcttcccctaggacgcctgggtttaacgaggagaccgctttctctctggagtgcagcattggggaagctgagacgccgaactacggtagcccagacgaaatgttcagcaaggatcttaatccttgcttgaccccgtgcattgccaagagcagatctgatgtatccgcacaattccagtcgtcttcctcccagttcacaaagcttgcccagctatttggaatggaatgccagtttggctctgctatgtcatcgataggtgaatgtagcatgtga

SEQ ID NO: 790 - DNA, 168 bp, Zea mays
  Peptide Sequence Number=SeqID_42569
atggcaacttcgcagaaggaggaggagaggtgggagaagatgtggcgcattctggactggctagaccaccaactcgagaatagggaggccaatgacatgcccagaagaaagcaacaatccttttcaaaaagagttgttgctccccaaacatcaaccaccacctactga

SEQ ID NO: 791 - DNA, 1245 bp, Zea mays
  Peptide Sequence Number=SeqID_42570
atggctcctccaagcataaccaagaatgccctggatgcaatagggctagctgatgatcatgtattcatgtcaataaccttgaaaggaacaaacttccttgctaatggccaaccaattctctccaatgtccctcaaaacattgtagccaccccatcaccgttttcacctctagacaaatccaagggcgcagtaggatgctttgttggattcgacactgaggaaccagaaagtcaacacgtagtgtccataggcaagctcagtggcataaggttcatgagcatattcaggttcaaagtctggtggaccacccactgggttggaaacagtggaaaagacttggagcatgagactcagatgatgatgttggacaaaaatgagtctggacgtccttacgttctgctccttccacttcttgaaggccctttcagggcttctctccagccaggaattgatgacaatgtagacatctgcatggaaagtgggtccacgcgggtgtctaggtctactttccggagttgtctgtatatgcatgttggtgatgatccgtataaactcgtcaaagaggccatgaaggtggccaggcaccatctggggaccttcaagcttctcgaagagaaaactccaccaggtgtcgtagacaaatttggttggtgcacttgggatgctttttaccttaatgtacaccctaaaggtgtttgggaaggggtgaagggcctagctgaaggtggttgccctcctgggatggtccttattgatgatgggtggcagtccatttgtcatgacgatgaccccatcagcgataaagaaggcatgaatcgaacttcagctggtgagcaaatgccgtgtaggctcataaaaatggaagaaaattataagtttagggagtatgaaagtattaagttaggtaataagaaggggatgggtgcctttattagggacctaaaagaagaatataagaccatagaacatgtgtatgtgtggcatgcattatgtggatattggggtgggataagaccgaatgtccaaggaatgccacccgcgaaggtagtaacgcctaaattgtcgcaggggttgaagatgacaatggaagatttagcagtagacaagattgtgaataatggggtaggcttggtccggccggaagtagtccacgagatgtatgaaggacttcactctcatcttcaatcggtggggattgatggcgtcaaggttgacgtaatccatgattattataaatttgaataa

SEQ ID NO: 792 - DNA, 282 bp, Zea mays
  Peptide Sequence Number=SeqID_42571
atgaccttgtcttgtgaatttatatcacgattgtgtttggtttgtggatccagcttatcctcatctccgtgtgatgtgctatcctcctttgcagttgatttgctgaagcccgatgccacggtgatcttgcgcaatgccaaaatcgacatgttcaaaggatcaatgaggcttgcagtggacaaatgggggcggattgaggctacagagccagccagcttcacagtgaaggaagacaacaacttgtcccttgtagagtatgaattggttaacgtggctgaataa

SEQ ID NO: 793 - DNA, 747 bp, Zea mays
  Peptide Sequence Number=SeqID_42572
atggccatcactatgcctggcgttgagaaacaaattcgacatgagaagcactatcgctatgttagttctcatgatgttgcttattggtcccagagttttatgcaagatttggaaagggcatgcaaagagcattacaacagacattgttggggttttggttttggactgagtttcaggatattgtccatttctccaagttttaggaagctttccatagatcatatcctctctgttcatagaaggacttgcagaagggccatatttttggattatgatgggacggtggtgccccattcttctattattaaaagtcccggtcctgaagttatattgttcatgaacagtatatgcagtgaccccaagaatactgtctttatagttagtggtagggggaaaaactccttgagtgactggtttgctcaatgtgagaatctaggtatagcagctgaacatggatacttcataaggtggaataggaggtccgagtgggagacttttccaattgctatagactttggttggaaaagaattgctgaaccagtgatgcagctgtatacagaggcaactgatggctcctttatagagtccaaggagagtgccttggtatggcaccaccaagatgctgaccccgactttggatctagtcaagcgaaggaactactggatcatctggaaaatgtccttgccaatgagcctgttgttgttaaaaggggccatcaaatagttgaagtgaagccgcaggcataa

SEQ ID NO: 794 - DNA, 426 bp, Zea mays
  Peptide Sequence Number=SeqID_42573
atgggggataccaaaagaaaaagaggccgaaaacccaaaaaccctaccccctcccaacccttacaatcgcctccttcctctccttcggacgatgtcttctctctcagtaacatcgaaatcatcccttctacctcctccgccgtcgaaatcactaccaccgcttcccgccctcgtggtcgccctaagaaactccccaaactccccgataaccccgaccctcttccccctcccccaatcctatctccttgccgccatgtttccaacggcaccgccattggagttggaggaggaagtggaggagggggagttggccgtggatcctattggtgctcgagtggtgccggcaatggatgcagtggtgaaggtgttttgcgttcacaccgagcccaacttctcgttgccttggcagagaaaaagacagtatag

SEQ ID NO: 795 - DNA, 1161 bp, Zea mays
  Peptide Sequence Number=SeqID_42574
atgcttacagttaacgatgatgagttctgggaaggtgtgtcaccagtggaatttggagaattacctgctcttcaagatgctgtaactgttgttggttaccccattgggggagatacgatttctgtaacaagcggagttgtatcacggatagaaatcttgtcttatgttcacgggtcaacagagctccttggcttgcagatagatgctgctataaactctgggaactctggtgggcctgccttcaatgataaaggcaattgtgtgggaatcgcatttcagtctctcaaacatgaagatgcagaaaatatagggtatgtaataccaacaccagtcatccagcattttatccaagactatgagaagaatgaagcctatactgggttccctattttggggattgagtggcaaaaaatggaaaacccagatttgcgtaaagcaatgggcatgaaacctgaacagaaaggtgttcgaatcagaagagttgatcccacagctccagaatctggggttttgaagtcatcagatattgtgctcagctttgatggggttgatattgccaatgatggaacggttccttttaggcatggagaacgcataggttttagttacctagtgtcacaaaaatatgctggggatagttcagctattaaagttctacgtaattctgagattctaaatttcaacatcaaacttacatcacacagaaggcttattccagcacacaacaagggcagacctccttcatattatataattgcaggatttgtgtttacaactgtatctgttccatatttacgttctgagtatgggaaggattatgaatatgaagctccagtgaagctattggacaaactcttgcattcaatgctgcagtcacccgatgaacagcttgttgtggtgtctcaggttcttgtatctgatatcaatattggatatgaggacattgttaacactcaggtcgttgctcttaatggtaagccagtgaagaatttaaggagattggctgagatggtagagaactgtgatgatgagtttctgaaatttgacttagaatatgaacagatagtagtgcttagaacaaagacagcaaaagcagctactccggacattcttgcaacccactgtataccatcagcaatgtctgttgatctcaaggcatga

SEQ ID NO: 796 - DNA, 738 bp, Zea mays
  Peptide Sequence Number=SeqID_42575
atgggcatgaaacctgaacagaaaggtgttcgaatcagaagagttgatcccacaactccagaatctggggttttgaagtcatcagatattgtgctcagctttgatggggttgatattgccaatgatggaacggttccttttaggcatggagaacgcataggttttagttacctagtgtcacaaaaatatactggggatagttcagctattgaagttctacgtaattctgagattctaaatttcaacatcaaacttacatcatccagaagggttattccggcacacaacaggggcaaaccaccttcatattatataattgcaggatttgtgtttacaactgtatctgttccttatttacgttctgagtatggggacaattatgaatatgaagctccaatgaatctattggacaaactctatcatgcaacgctgcagtcacccgatgaacagcttgttgtggtgtctcaggttcttgtatctgatatcaatattggatatgaggacattgttaacactcaggtccttgcccttaatggtaagccggtggcgaatttatggagattggctgagatggtagagaactgcgatgatgagtttttgaaatttgacttggaatatgaacagatagtagtgcttcgaacaatgacagcaaaagcagctactccggacattcttgcaacccactgtataccatcagcaatgtctgctgatctcaaagcattgagaccatggacttaa

SEQ ID NO: 797 - DNA, 276 bp, Zea mays
  Peptide Sequence Number=SeqID_42576
atggatgcagtggtgaaggtgttttgcattcacaccgagcccaacttctcgttgccttggcagagaaaaagacagtatagttccagcagtagtgggttcgtgatcagcgggagaagggttttaacaaatgcgcattcagtcgagcattacactcaagttaaagttaagaaacgtgggtctgataccaagtacttggctactgtcctttctattggaaccgaatgtgatattgatggtggtgtatgtctatacatactagctaggtttcatgcatag

SEQ ID NO: 798 - DNA, 474 bp, Zea mays
  Peptide Sequence Number=SeqID_42577
atggaggctgcagttgaagaagctgcactttctagttctaagagaactaaatggcagttcatgggagctagagatgcagggtctagagatgagctacgtcttgtctatggtgtttctgagcgtacagaaagcgatggtgcagctaatttaattcagaagttgagagctataaactatgctctgggtgaactaggacagtggtgtgcttacaaggttgcactgtcattcttgacagcactacagaatgatgaaagggccaactatcaggttgatgttaagtttcaagagtcatacttgagaaaggtagttgatttgttacactgccagttgactgaaggggctgcaatgaaaagtgacagtaatgatgttgaaatgcataattctgaaaaccccaagccaaatgaacttgaggagggagagctacctgacagtcatggtattaatagtcttcttgcaaaatgtgttatatggtga

SEQ ID NO: 799 - DNA, 1137 bp, Zea mays
  Peptide Sequence Number=SeqID_42578
atggcgggagggccaggaggaggcggcgacgccggcggcgagcacgcggcggcggcgtactggtacgacgcgtgcgaggacagcgcctccctgctctgcggcatcgacttcgccgcgtccgccgacttcgacccgggcctcataccggccatggactgcggcgccgatgacggcttcgtcgccgagatcgaccggatactcgagagcatcaacgccgaggccacccccgcaccgccgcctcctcctcctgcgcctgcgcctgcgccagcgccagcgcctgtggctccgctgcagccacagccgcagttgcaggaggcggctgcgaccgtggcccacaatgcggtggcggtgtcggacgtggcgcagagggccccggccgtggaagcgaggaaggagcccaggagggagttcccggtcgccgcggccaatggcggcgacgactgcagggacagcaagcgccagcgtctccctgcgggtggtaccgggggaccacgccacgactggcggcggcgtccgatggcgcccccgcctccatcccgtgggtgggaggaccgggggcgcggaaggcgggagtacgacaggcctcgtaagcgcgaccgcgacggccactacggccaatgccatgatcaccaccgacgcgaccctcggggtttctgggagcgcgaccgcggcggcaagatggtgttccgccatggcatgtgggaggctgaggcggaccgccagggaaagcgtgccaggacgaaggatggatgccctcctgcggagaataaggcggaggtggatcggtcggggaaggagaagcctgccactgaggagaaggcgaggcagtaccagctcgaggtgcttgagcaagcaaagagcaggaacacaattgctttccttgaaactggtgcggggaagactctcatagctgtgttgctcatcaaaagcatctgtgacaaaatgctcaaggagaacaagaagatccttgctgtcttcttggtgcctaaggtgccccttgtgtatcagcaagctgaagtgatacgcgagaggaccggctatcgtgttgggcactactgcggggagatggggcaggatttctgggattctagaaagtggcagcgcgagtttgagtcaaaacagattatgaatttctaa

SEQ ID NO: 800 - DNA, 228 bp, Zea mays
  Peptide Sequence Number=SeqID_42579
atggagaaccacccgggaaaacagtgctaccacaaggggagcgaccatgctgcccacgacgaacagcagcacgacatgctactggtaaattggcaagaaattcccgccggtcctggtgacctccatcacgacggcgctactacaccgggggtcgatggcgaggatgtcgtcaggtttggcctcgcccagcgtggcaacagggagccacggcagcgcgaccgagagtga

SEQ ID NO: 801 - DNA, 162 bp, Zea mays
  Peptide Sequence Number=SeqID_42580
atggcgaaatctgtccaagttggagcattagaggcaccgtacttatgttggatagactccctgagttttcttgcactatgtatgttcatgtacacatctcaaagcttgtcagacaatacactcaagatgcaacctagtgctatcacattatccttgtcttag

SEQ ID NO: 802 - DNA, 342 bp, Zea mays
  Peptide Sequence Number=SeqID_42581
atgcgctggaagcgacaagcttttcccgaccccgtgacctatctattcagccagtgcgtgcccaaagaaggcaacaaggacaagttagacagtcgagcttcccagctgtgcggctacagtcaagtcttgtacgtgtctggtaggccgaaagcaagggcgccagctagcgtcgccacgccaccctacagggtcggtcggtcgcggtcgcggcgcagcgggattcacttcaccatcgccgtgggccggtggccgcgccgcgcgggagctggatgggccgtcgtgtcgtggtcgtgggcaggtaggtggaacggccccaactaccagcgccacctccacacctga

SEQ ID NO: 803 - DNA, 1770 bp, Zea mays
  Peptide Sequence Number=SeqID_42582
gttacctgtaattatggccaccccccctcaaccaacgagcacgccaggcgagtaggcgaccgtatacgcaatgccgccgtcacggtggcgtcggtcaggagaggagggtgccccgtcgcgatccctcgccggccggctggaccaccaaagcgccgcgcgtccttctcggggtctcagtcgggcgcatcgcacgtctacgggatccgcatccgccggcgccggcgccaccacgcgcgccagagcccggccccccggccgtcgcgtggctgtcgtccatgcatgtccctcctcctcccggccggccgggcgcctctcatgcttatccccggcgacgtacgtgcggacgacgggaccgagtttctgctccatgtcgacgacaaacccgcgtcacgggagaacgacagaagagatcgatgtgaagagaagaggcacggattcggctggcatccaccgcacgtgctcggattcgtttatctgctgctaaaaggatacttcgctgtcactgggacgaccgcgtcaatctccgcccccacgtgtccaccgccatctgcggcctcgtgccctcctcctctattaaccgagcccgcctccacacccggaccacacccgcaccagcctcttcagcgccctgcgcccaagctccagctccgatccgtaacccaaacaaacgacaccttgggcttggagcctactgtgccaccggcccgcccacgagaccccgcggccatgtccatcccgcggctcctcctcctcgccgtcctcgccgccgccgctgcgtgcgcgcccgcgcacgccgccggcgccggcgcctgcgcggcggagaagttctcgggcaaccgcgcgttcgcggcgtgcgccgacctggcccgcctgggcgcgtcgctgcactggtcctacgacgccgcggcggcgtccctgtccgtggcgttcctggcggccccgccttccgcgggcggctgggtcgcctggggcctcaaccccagggcgcagagcatggacggcacgcaggcgctggtcgccgtccccagctccggcggcggcggcgcgtacgaggtgcagacctacagcatctccgggacctcgctcggcgccccgggcccgctctccgcctaccggacgtcgggcctcgccgccgaggtcggcggcgacggccgcgtccgcgtgttcgcgaccctcgtgctccccaacggcacgggcgccgaggtcaaccacgtctggcaggtcgggccctactccggcgggatccagatacacgacaccaagggcgacaacatgaacgccaaggggacgctcaaccttctaaccggcgccactgccgccgccagcggagggggcagcatcatcaggaagaaaaatactcatgggatcctgaatgcggtgagctgggggcttctgctgcccatgggagccatcttcgcgagatacctcaagacgttcaggtcggctgacccggcgtggttctacctgcacgtcgcttgccagctgctcgggtacggcgtcggggtgtccggctgggcgaccggcatccatctcggaaacctgtccaaggggatcacctactcgctccacaggaacatcgggatcacagtcttcgctctcggcactctgcagaggtggaagacgggctacatcgccgccatctccgtcctcggcgccgtcgccgtggccctggaggccgtcacgtggggcgtcgttctgaggcggaggaaggaggaaagcaagagctacaacggcacctctaacggcggccgcttgccgctgtctatgtag

SEQ ID NO: 804 - DNA, 297 bp, Zea mays
  Peptide Sequence Number=SeqID_42583
atggacacagacccccttacccctgtgttcgtacttcaccactccgcaaggaatttgcgccgccattaccaccgcgagggagccattcgcgcagccacctcgattgccccattaacaccgtcactccaagaaattgggggattggggattgaagccagtgtttgggggtgctctcggaccggttgccgcaaggaattacggcctctgacgccatcgattgctcaccggagtcggagctccgcctcggttccgctcaacaccgtcgaccggccgcaacacggtcccaatcgccggtga

SEQ ID NO: 805 - DNA, 423 bp, Zea mays
  Peptide Sequence Number=SeqID_42584
atgggtcacaacactggtccggtgctgtcgccgcgcttggtgggccgtagagtaaaaaggccgaatgctcggtactctggtccggagtggacattgctgctaacaaattggtatcaaagactaccgatcttggcactagagattcccccttacttcactcgcttggcaaaaatggcgggcgcctccgatcccaacctggcggctgctctgaatgcccaatccaaacagatcaaagcccaatccaagagcctaaccacccaatccaagctacttcagcagttatgcgaccgattggaaacccaggatgcacggtggcgccatctcgagaagtctgtggccgccaattccgatgacatcgtcgcgatccaggtgcaggtcgcaaattgcgacaccacgccggataccataggggcgctcggctag

SEQ ID NO: 806 - DNA, 831 bp, Zea mays
  Peptide Sequence Number=SeqID_42585
atgccgcgccatctcgcgctgctcctgcccctgctcctgctggcctcgccggcggccacgcgcctggcgtccgccgcctgcgcgggcgagaagttcccggcggggcgtgcgtacgcgtcgtgcgaggacctgccgaagctgggcgcgtcgctgcactggacgtacgacgcgtccaagagctccctgtcggtggcgttcgtggcggcgcccgcggcggcgggcgggtgggtggcgtggggcctgaaccctacgggcgagggcatggccggcgcgcaggcgctggtggcgctggcgggggccggggccgcggcgcccgccgtgcggacgtacaacatcacggggtacgtcccgctgggcaaggcctccacgccgctggacttcccggcgaccgacctcgccgcggacgccgcgggcggcaagatccgggtgtacggcaagctgcagctgcgcaaggggatgaaggccgtgaaccaggtgtggcaggtcggcgcgtcctccacgggcggcgcccccgacaagcacgcgttccaggcggacaacctcggcgccaagagcaagctcgtcctcgccggcaaggcccccgcggcggccgaggccccctcgcccgccctcgcgcccgaggccggcggcccgtccgcgggcggcgacagcggcgcgggcgcgtcctcgtccacggcgccgtccaagtcccccaacgccgccgtgcccgcggccggcgtgtccgcgcccgcgctacttgcgctcgcgctggtggggtttttggcggcgcaagatgagctggcggccggcgctcttcagtcgccggcgatgcaggcaacgccggccggttga

SEQ ID NO: 807 - DNA, 447 bp, Zea mays
  Peptide Sequence Number=SeqID_42586
atgggcaagagtaacaaatgcaagcgcgagccgactcctccgtctgaggacttcggtgactcggaatactcggaggaggagttctcctctgagtccgagaagtccccggctcccgtctctcccccggtgtcgtctgacgattcagatgactcccaggggcttgccacggaggtctggacttatatccgggccgtcgagcgctccgggctcgagggctcggatgagtcggagtactcctcggacgaggaggactcctcggactcgtccgaggagggtggtggcggcgatggcagagacgacgacgacgacgacggaggcgactgtgacgacgacgaagatgacggtgacggcggcggcaggtgcggcagcaagggcggcaacggcggcagcagcgggggcagcaacggcgacggcagtagcaagggcagcaacaaggccagtggctag

SEQ ID NO: 808 - DNA, 210 bp, Zea mays
  Peptide Sequence Number=SeqID_42587
atgatggccgcggcggcgctgaggccgcacaagtcttcgccggcgcgggtgcccacgcggtgcgtggccgcgctctgcgccgcctgcttcctcgtcggcgtcggcgtcgtcaacaggtactggcctgttcctgagcctcatcccggttgcccagacaagggcgttggacaagacgatatccgacatcgagatgcgcctggctgcggctag

SEQ ID NO: 809 - DNA, 312 bp, Zea mays
  Peptide Sequence Number=SeqID_42588
atgttcgagggggtggtaagccaggtgctctatggcctcctccgccgctacgtcaagggcatccagaaggagcagcttaagatcggcatctggaaggaagaaatactgcttgaaaatgtagagctgattctggaagcctttgactacctgcagctgccattcgcgctgaaaaatggacgaattgggaagctaagcatccggattccttggaaaaagctaggatgggaccctatcattattgtcatagaagatgtctatgtttgcgcatgcccaagggaggactctgaggcatgtcaccgaatttggtcatag

SEQ ID NO: 810 - DNA, 180 bp, Zea mays
  Peptide Sequence Number=SeqID_42589
atgtctctgaccttgtcagctaattgttcagactgcgaatggaaagggcaggccgggaacccatgtgcggcgtccttcgactggaactgcactggcatctgcaatccggtggagaggatgacagagatgtgcagcaatggcatcgtttcctggccagttcgcgtgcggaaactggggtag

SEQ ID NO: 811 - DNA, 1602 bp, Zea mays
  Peptide Sequence Number=SeqID_42590
atggcggcgagaggcgtgcaggcgccggcgccgcgacggccggtgacgctgcgggacttcctggagctcggctgcgactccagcagcgacggcttccgctcctacccgcgccgcctgctgcccctccctcccgacgccgtgctgcacctgcagcagcagcaggcgcccccgaccccgcgggcggaggccgcggccgcccagcggctgctcaggcggagctcgtcctcgctcgcgctcgcgctcttctcctcctccctccccggctccggctccggctccggcccagctggcgcgctcgccaggatctccagcatctccaggagcttctcgcggcggatcaaggaaggcttctggaggcgccgcgacgaggacgagggcgacggcgacggcgacgacgactacgacggcgactacttcgacgaccgggactcgtgcggcttcccctcgcctctcgtcagcagctgctccgcctccgactcggacgagtccgaggcggacgtgacgacggcgcccgagcgcaacaaagccaccgcttcctcctctacgtcgccgtcgccctccccaagctcggcggaccacgaccgcacgcgcacggacgccgccgttgctgacggggacaaggcggagacggcggcggtagaggacggcgactcgacgacgggtgcgcccagcacggtgggggacaagcagcaacagctcagccccgtgtccgttctggatttcgccttcgatgacaacgacggcgaggaggaagggagcgacgccggcaccagctgctcctgctcctcccccgccttccagttccagcgctgcacgccgccggcggtggacctccacgggacgaagccgcaggcgcagctgctgcacaagatcagacggtacgacggcgttgcgcagggaatcgaccccgtggacctcgacgcgcggttcacggcggccacctcggagtccggggagtccgccgacgccagcacgcgtctcgcaaccaccaccagcagctcgagcacggacaccagcagcagcagcagcagcagcgcggagacaacggcgccacagcacgacgacgaggaggcggagcaccagagcgccgagcgcgcgctctcgccctcgccctcgctccactaccaggcagaccaagaagagcccgacgacgagtaccgcctgctcgcgcggctgctggagcacgacgcggcggcggcggagtgcctggacgacgaggtcgcacgggtgctcgtcctcgacttcttcgcggagggcgccgaccgtcgtctcacccgttcggcggcggccggcggcaggccgctgcacgacgaccgaagcgagtcgctgctagtgagggccgccgccgcgtggctgcgtggcgcggggccgcggtggggcataggggacgtggcgcgctccggaaaggcggcgctggacgacatggagcgcagccggcggtggatgtgcgtgggcgaggaggagtgcgacgtcgccgcggacgtggagtgcgacgcggtcgacgccctcgtggacgagctggtcaccgagctagccatcgtgctgccccggtggccgcgctgtgacgtggccgtcgatgatgataatgtgctcgttgactga

SEQ ID NO: 812 - DNA, 303 bp, Zea mays
  Peptide Sequence Number=SeqID_42591
atggcaagaaaggacggcagtagcagcgaaaggctgtcgttgtcggaaaagccggtggcctccggctgcttcgccgccaccgaggagatccaggaggtggagtctgccccggccgtcgacgtcaagcccaagcgggaggaagcaagtgaagctgctgatgcgaagagcgcgcaggcgcaagagcaagcgcaagagcaggtggttgtgctcaaggtatccctgcactgcaaagcatgcgccggaaaagtgaagaagcacctctccaagatggaaggatctgaaacttctgttcggagttcatag

SEQ ID NO: 813 - DNA, 2022 bp, Zea mays
  Peptide Sequence Number=SeqID_42592
atggccgccgccgtcgccgcccccgcgccatcccgcaagacggagacctacaccgacaccaagcgccgcgacgacgtgcgcggcgccaacatcgccgctgcgcgcgccgtcgccgacgccgtgcgcacctcgctgggcccccgtggcatggataagatgatcgcttcgggcgaccaggctcaggaggtcatcatcaccaacgacggtgccaccatcctttcccgcatggcgctcctccagcccgccgcgcgcatgctcgccgagctatcccgctcccaggacgccgccgctggggacggcaccactaccgtcgtcgtcctcgctggatccctcctccgccgcgcccagtcgctcctctccgccggggctcaccccaccgccgctgccgacgccctccaccgtctcgccacgcgcgctgttgagatcctccacgccatggccatccccatcgagctatccgaccgggaatccctcgtcaagtctgcgtccacggctctcaactccaaggtcgtctcccagtactccacccttctctcgcccctcgccgtcgacgccgccctctctgtggtggaccccgctcaccctgaccttctcgacctccgggacatccgcatcgtgaagaagcttggtggcaccgtggacgatactgagctcatccctggcctcatctttgacaagaaggctagccatgctgctgggggcccaactcggatggagaatgctaagatcgctgtcatacagttccaaatctcaccacccaagactgacattgagcagagtgtcattgtatccgactacgcacagatggaccgcatcctacgtgaggagcgcaattatatccttgggatggtaaaaaagatcaaggcggctggatgcaatgtattgctcattcagaagagcatcttgcgtgatgcagtcactgacttgtctctgcactatcttgctaaggcaaagattctggtggtgaaggacgtggagagggatgagatggagttcatcaccaagaccctaaactgccttcccattgccaacattgagcacttccgcacggataagtttgggtatgcagatgttgttgaggaagtctctgttggagagggcaaggttgtgaagatcactggaatcaaggacatgggtaggaccgcaactgtacttgtcaggggatctaaccaattggttattgatgaagctgaacgcagtctccatgatgcactctgtgtcataagccgcaaccaaaatggcagggatgctgtccttggcgttgatgttgcgtcgtgcgagaccttatgtgatgctagtctgaagtactggctggatgaaacccatggaacaaacgccaggtgcttggtcagcaagagatttttgattgctggtggtggtgctccagaaatagagatgtcaatgcagctggctgcttgggcaaaggagcttcgagggatggagagttactgcatcaaggagtttgctgaggcgcttgaggtcatcccttacacattggctgagaatgctgggctcaacccaatctccattgtcaccgaactcaggaatcgccatgccagaggtgagaagaacactggcatcaatgtgaggaaagggcagatcacaaacatcctggaggagaatgtcgtgcagccgttgctggtgagcacaagtgccattacgttagcctgcgagtgtgtcagaatgatcttgaagattgatgacattgtcactgttagatcagtcgttgcttcatacccccccacccccaaaagggccaacgtggcagcaccattccaccccgcgacgtcgcaagccctcacatcagcgctcttcatatcgctgcaggtcctctccatcgaagctgctggggaggaccatattgccgacctccctaggagctcctcgccctccttgtcacacccgtttttacaagacaaaccaaatgtgaaccatgtacgtgccagaattagcaatttacacgtcgagggcgcctcctccctaggattcgacagccacgacgcctcctccctgcgtggctag

SEQ ID NO: 814 - DNA, 309 bp, Zea mays
  Peptide Sequence Number=SeqID_42593
atgtcggcgaggttgaccacactcgtgcgtcgctttcgccccagatgcgtctaccacacatgcagcagatcgacgccgcgttgggagctacatgcggtgacgtccttcattgacagcatctctactcctgtcgcccaacctttattgcattcgcacgatcaacggtatgagctccccaagaaggcacaaagaagtttcaagtgctacttcaacatattcaatggtccgttgagccacctagccaccaaggctttggtagctctatgtgaattggaagaccctaacgaggctggcctgcagtcatcttga

SEQ ID NO: 815 - DNA, 1252 bp, Zea mays
  Peptide Sequence Number=SeqID_42594
gcgcctcgctggggctgcgcgcgcgggactggccgctcagggccgacccgtgcgcgcgctgggcgggcgtggactgcgcggcgggccgcgtcgtgggcgtcaccgtcgcggggctccgccgcacgcgcctgggcgccgcccggcccccgcttctcgcgctcgacggcctgcgccgcctcaccgcgctcgcccgcttcaacgcctccggcttcccgctcccgggggagatcccgccgtggctcgccgccggcctgccgccgccgctcgccgtgctcgacctcacctccgccgccgtcaacggcacgctgccgcccgacctcggcgcctccgggaacctcacggccctgctcctgtccgggaacacgctcacgggccctgtcccgcccgcgctgctctccgccgcgggcctccgcgtcctcgacctctcccgcaacaatctctccggaccgctgcccaacgtctccgtctccctcggcgccgccggcgcctccgtgtttaacgtctccgggaattctctgtatggcgtcgccgccgacgccattggggcgctcaggagacggtttcaggtcgtcgacgtgtccagcaactacctggacggagcgtggaacgggtccgacacaacagtgcttgccacgacgaattgcttctacggtgtaccggcccagcgtagccgtgcggactgtgaggagttttacaggaagcaaggcgtcaagcttgttgatcctccagcgccctcgcctgtgccttcgtcagagccaccgccttcaccctcaccagagaagaagaagaagaagaagcacgggatctccaaaaaactactcattggagtccttgtagccgccggaacactggttgctgtgttttttatcgcactgctgttctgtttagtgaagaggagaagcagaggaaggaggggagggagagggaggggagtggcgccaaacgaggaaggcacgcgctctgtctccgtgcggaggagggacagcagcgtcaatccggtggtgttatcgccatcggcggtgtctccaagtgccaacgatggacctaaggatgcgtctgccgttatcggtgagatcacctacgagcagctggtccttgccaccggcggttttggcgacgaccagctcatcaaacacgggcattcgggggacatgtaccatggtgtgttggagaatggctcccatgtcattgttaagaaggttggcgcaaagggcgccaacagacatgcgagtgaattggatttctacgtgag

SEQ ID NO: 816 - DNA, 870 bp, Zea mays
  Peptide Sequence Number=SeqID_42595
atgtggcgcagctgcgtctcgcgaggcctctccagggccaaggcctccgcctccaggctcctctccacggcgtcgtcgtcctacacggtggtcgaccacacctacgacgcggtggtggtgggggccggcggcgcggggctccgggcggcgatcggcctctccgagcacggcttcaacaccgcgtgcatcaccaagctcttccccacgcgctcgcacaccgtcgcggctcagggaggcataaatgctgcacttggaaacatgagtgaagatgactggaggtggcatatgtatgacactgttaagggaagcgattggctgggtgaccaggattctattcagtatatgtgcagagaggcaccaaaagctgttatagagcttgagaactatggactaccattttcaagaactgaagagggaaagatataccaacgtgcctttggagggcagagcttagattttggcaaaggtggacaagcctaccgttgtgcctgcgctgctgacagaacaggacatgctatgctgcacacactatatggtcaagcaatgaagcacaacactcaattttttgtggaatactttgctttggaccttctcatggacaatgaagttagtcctataatagtgaaggttttctttactgagaatgttcccgtggtgaaggtggtatccttagaaatagtgaaggagcccattccagttttgcctactgtgcactacaatatgggcggtattccaacaaactaccatggggagaggctcggaaggaaagcagaggagctcatgctcgtgaggatttcacggtttgaagctattcttttgactctatacactttgatgacgcacttctatgttataagcaataacttctag

SEQ ID NO: 817 - DNA, 1959 bp, Zea mays
  Peptide Sequence Number=SeqID_42596
atgatctcgtccagcaagctcaagtccgtcgacttctacaggaaaatacctagggatttgaccgaggcatcactatctggcgctggattatccattgtagcagcattagcaatggtttttttgtttggaatggagttgagcagttacttagcagtcaatactaccacatctgtgatcgttgataggagttcagatggggagtttttacggatagatttcaatatgagatgcccgaacctacgaaccaattcagtccacgaagaaggggtctcgacaggtgtcatcgttgtcgagccacaacctctgatgcagcattttcgagttcacgctgcaaaggcccaccttcacctgcatgccagacgccgagaagcgaaagcaactaccgaaggcgaatccgaggccgagacaaacttcaggaagggagtgacgttggggacgacaccgtcgcgagtccgagatggatcgggctttctcccaaggaagacaatgctggggaatgtgacgcccccaacaggggaagcggcgcccacgggtgtcgccgttgccgaggcttttgcccaagaagcccccccagcaccaacgtccggccaagaaccactgtcgccgccgtccatacatcccgcaagaaaccctccagaggggcgtcgacgcgatggatgccgcaccagccgcaaagccgtgtcggccgccacccccactggcctggcacacagaaccggacaactccttgccacctttcctgcgctttcatgtgaatttgcatcagttgatgttagtgacgtgctgggaacaaacagattgaacataacgaaaactgttcgaaagtattcaattgatcggaatttagtaccaactggatcagaattccaccctggccctatccccattctcaataagcatggagatgatgttgaagaggatcacgtggatggtgcattttcattgtcatctcgcaattttgatagcttttcacaccaatatcctgttttggttgtcaacttctatgctccctggtgttactggagcaatcgactgaaaccttcatgggagaagacagcaaaaataatgagggagagatatgaccctgaaatggatggtagaatccttctaggcaaggttgactgcactgaggaagttgaattgtgtaggagaaaccacatacaaggatacccatccattcgtgttttccgtaaagggtctgatataaaggagaatcagggtcaccatgatcatgaatcatactatggtgaacgtgatactgagagtttagtcgcggcaatggaaacatatgttgcaaacatcccaaaagaggctcatgctttggaagacaaatccaataagactgttgatcctgcaaagcgccctgctccaatggccagtgggtgcagaatagaaggctttgtgcgtgtcaaaagggttccagggagtgttgttatctcagctcgatctggatctcactcgtttgatccatcccagataaatgtttcgcactatgtgacacagttctcatttggcaaaagactttccccaaggatgctgcatgaattcataagacttactccctatcttcgtggataccatgatagactagctggccagtcttatactgttaagcatggtgaggttaacgccaatgttactattgagcactacctacaagttgtaaagactgagcttgtaacacagaggtcctcaaaggaactgaaagtgcttgaggaatacgaatacacagcacacagcagcttggtgcacagcttctatgttcctgttgtgaaattccattttgagccttctcccatgcaggtcttggtaactgaagtcccgaaatccttctcccatttcatcacaaatgtctgcgctatcatcggtggggtcttcacggttgctggaatactggattccatctttcacaacacactcaggatggtgaagaagattgagctaggaaagaacatttaa

SEQ ID NO: 818 - DNA, 408 bp, Zea mays
  Peptide Sequence Number=SeqID_42597
atgttcggctgcagcgacttcaaccagtctcggctcagccgttttacagtttatttattaattgctgcaagggtgaacgttcctaagaccaagaagacgtactgcaagaacaaagagtgcaagaagcacacactccacaaggtgactcagtataagaagggcaaggatagcctgtctgcccagggaaagcgccgttatgaccgcaagcagtcaggatatggtggtcagaccaagcctgtcttccacaagaaggccaagaccaccaagaagattgttctgaagctgcagtgccagagctgcaagcactactcacagcacgccatcaaggaggataatcttcaggagcataaaacatctataccagcgttgctaggaactgaactcatcgatacagaactgaactcataa

SEQ ID NO: 819 - DNA, 162 bp, Zea mays
  Peptide Sequence Number=SeqID_42598
atggatttggaaactggaaagtcaagagggtctcttgatcttagatgcatgaatgtcagtctcttgactaaatggatttggaaactggaaagtcaagaaggagtttcattgacaaagttcctttctagttcaattggaaagctaggattcccccaaaaataa

SEQ ID NO: 820 - DNA, 309 bp, Zea mays
  Peptide Sequence Number=SeqID_42599
atggcgcgacttaccggcggcgaggaaggtccgacgaggggcggggttagctccgggaggtcctggcggtcacgtcgagagcgatcaccagtgaacttgcgctccggcagggtggagagcgagcgggggtgtacggtcaaggcctcggtcggctttataggcgcgggcgtgggcgtgggcgtagggtcttgcttagcgcggcgcggggtcgagcgtcggggcgtgctctggcgttgccagggcgcgtcgaacgcgtggccatttccttctgcccatgttctagctcctattgagcagccaaacgtgtga

SEQ ID NO: 821 - DNA, 777 bp, Zea mays
  Peptide Sequence Number=SeqID_42600
atggccgcctccgccccggccgtgaggcctctcgcccgggccgcaatccctatcccgctctctgcgcggccgcggaccgccagggtctccttgctccccctggctcctcttgctccggcccagcgcctcgctctcgggcggaccgggcaagcgcggctgccagcgcgcagccggtcggtgcggtgcctggcggcgctgagcccagagatgcgggagacgctggacaaggtcgtggggtccagcaaggtgttgctattcatgaagggcaccaaggactttccgcagtgcggcttctcccacaccgtcgtgcagatcctgcgctcgctcgacgtgcccttcgagacgctcgacgtgctcgctaacgaggcgctccggcaggggctcaaggagtactccagctggcccaccttcccgcagctctacatcgacggcgagttcttcggcggatgtgacatcaccgtcggtaaactcctatatgttttgtcacttcattcacagatgctcgagcctgtacgctttactgagctcacgatctcgtgcggtgcccggacgctggagcgacctcaagtgctcgacaggcgtcacgggacacgacgctcaccgctcgctgtcgctggtgagaagcctgcccttactctgtccacctctgtcctctgcccctcacatcctcactcacctcaccggagttgttgctttctgtatgcattttgttcttgttacaatgtgcattcagatacggagaggcatacaagagtggagaactgcaggaaactctag

SEQ ID NO: 822 - DNA, 831 bp, Zea mays
  Peptide Sequence Number=SeqID_42601
atggcggagcgggagcagcaagagcaggtggctagggacgacgcggcggagtggaagcaggtggcggagctgagggctgtcacccaggcccaggacccttcctgcaagagcaaaagaaaaagtcaagacgcgcgcacacatgacagattgacagtgacgcaggatgaggacgactacacgctccggcgcttcctccgcgcgcgggaccacaacatcggcaaggcgtcggcgatgctgctcaagtacctcaagtggaagcccgcggccaagccccacggcgccatcgccgcggcggaggtggcgcgggaggcggcgcaggggaagctctacctgcagggccacgaccgggagggccgccccctcatctacggcttcggcgcgcgccaccacccggcgcgcagggacctcgacgagttcaagcgctacgtcgtccacgtcctcgacgccaccgtcgcgcgcctgccccctcctcctccgggagatgttcgccaggagaagttcgccgccgtcgccgacctcgccggctggggctacgccaactgcgacatccgaggctacctggcggcgctcgacatcatgcagagctactacccggagcgcctcgcccgcgtcttcctcgtccacgtgccctacgtcttcatggccgcctggaagatcgtctaccccttcatcgacgacaacaccaagaagaagttcgtcttcgtgccggacaaggacctggacaggacgctccgcgaggccatcgacgactcccagctgccggagatctatggtggcaagctcaagctcaagctcgtcacgccgcctgcaaataaattaccaagccactag

SEQ ID NO: 823 - DNA, 729 bp, Zea mays
  Peptide Sequence Number=SeqID_42602
atggccgatctccgcccgccggagccgggcacgaacgggtccagcgccgtcgtggtcgccgcgctgccggccgtggaggccgcgaaggccgccgccgccgccgctgcggccgcgtgcggagcgcagccgcccgcgccgccctactccaagcgccgccgccgccccagcgtccgcctcggggacatcgacgcccctcccccgcgccggaaccacaaaccctcctcctcgtcgcattcgcgcccgccgcgccgcccgcacccggacgacccggacacgcacggcggccgggggcccaagccgcccgcgcagcgccgccccaggaccgcctggattcccgcggggcccgccgagggctgctacgacgacgaggagcgctactacgacgacgaggaccagtccgactccgcggctgccgctgccgccgccgccgcgatggctagggtttcgggcagccgcgacgccggcggtgacgagtctgacggggtggcggactggggcctccccaacggccgcctctcctccgcgatgcggcatggccgcgtcaaggcctggctcgatgggctggggctttctcggtacgcgccggtctttgagatccatgaggtggacggcgaggtgctcccgctgctaacgctggaggacctcaaggacatgggcattggcgctgttgggtccaggaggaagatgtatgccgccatcctcaagctccggagcgacaacgcgtcctga

SEQ ID NO: 824 - DNA, 462 bp, Zea mays
  Peptide Sequence Number=SeqID_42603
atgatcaatagtagcacacttgttaagaaatggtatatttgcaatttatgccctcaggtgtttcttgaaggggaccgaatacgctatctatcagaagatgataaaactaagttgtgtcgtgggtctacagataagattactgcaatttactatgacttggtctctgaagttgtcactgtgttactcagatcaatttatttcaattctctgaaggcaaggaaaaccgagtcttcgttgcaaagactgcgccaaggtgcacaaaggcgagtaggagctagtacagatgcctcagataacatcatatctgatacagacaagatctgtatgcagctatttcttgatattcaggagtacgcacgaaaccttcgtgcgataggaatagacgcgagagagattgattcctacagagctctatggcagtgtgttgccccaaaagacagacaagagaacattcagttttga

SEQ ID NO: 825 - DNA, 927 bp, Zea mays
  Peptide Sequence Number=SeqID_42604
atggcagcgtgtgcttcacctaatagattatctgtactgggtgtttgtatcaatttgctgacgtggatctatctgttccagcatcaaggaccaggagtgcctaagtttggaagttgggaggatgagggcgatcacccctacacacagtacttcgaaaacgctcgtaagggcaaatctccaggcagatctgctactcagaacgagcacagaactggagatccggaagcgctcttcaaagaagacacgacgccatctgctaaagcttctcccctgcggactgggtcggaggatcctgtggcgccaaagcccaaggacgcggcctttgctcgaggcaagccgtatgctgagccagcaacccataaacacggtgctaataccagctatgaaagaaaaaccggcatggagagatcgcctctgcatcctcaccaccaagcaaggctcgtaaacagaggaggtgtttcgtctccttcatgggaacgcaggggttcgtccgaaggaaaccgtggagctgcgcccaccacacctgggaggtcgtccaagatgaggccaggcggccgtggagacgagacgcctgagagaggatctgccgtgcccaagtttggagaatgggacgagaaagatccctccacaggtgaaggcttcaccgacatatttaacaaggtgagggaggagaagcagtccggcgatgctcctgtcatcaccagcggcaacgcaggtggtggttatagccgctccaaccaaggccgcaaatacgaatcttcagtgagtcaactccagacttgttgccataatgctggttcaaactattttcttggcctaaagcatttatttgcaggcttgctcatgcttcagttggttcaggaactgatgcttccttgcatggttgctgatgcttctgctggttcagcagctgataggtgccgttga

SEQ ID NO: 826 - DNA, 582 bp, Zea mays
  Peptide Sequence Number=SeqID_42605
atgagcacccaccaggccaatacgctgcggttgtacctcacctgcatccggaacactctggaggcggcgatgtgcctccagaatttcccttgccaagaagtcgagaggcacaacaaaccggaggtggagctcaagacaagccctgaacttctgctgaatccggtactgatatgccgcaacgaagcagaaaaatgcttgatagagacttcaatcaactccatacgaataagcatgaaggttaagcaggcagatgaattggagaacattcttgccaagaagttccttaggtttttgtcaatgagggcagaggcattccaagtgttgaggagaaaaccggttcagggctatgatatcagtttcctgataacaaactaccattgtgaggacatgcataagcacaagctcatagatttcatcgtgcaatttatggagatgcaacgttgtttgtatgttggcagcgtactcacactattctgcttacatgaaccccaggatattgacaaggagatcagcgagctgaagctgtcagtaaacactcgtggccggctagtggccactgaattcttgaagcagttcttatga

SEQ ID NO: 827 - DNA, 1608 bp, Zea mays
  Peptide Sequence Number=SeqID_42606
atgcgtggctgcacctgccatttcaccatcaagaggctctatgctcgcccttccctgctgctcatcatctaccacgagaggcgccatgtcaacaagtccggcttcatatgccatgggcccctcgacagggatgccatcgggcctggcgctaggaaaatgccctacattgggagtgaaatccagcagcagaccatgtcattgatctacctcggtgttccagaagagaacatactgcagacacatatcgaaggcatacagcgctactgtagcaaggatgccaaggttgataaccttgcctctcagtatgtccagaaacttgggatgatcatcaagagatcgacacatgagttggatctggatgaccaagctagcatcaggatgtgggttgacagaaataggaagtctgtattcttctaccaggattcaactgaggcagatgcctttattttggggattcagacacaatggcaattgcagcaaatgatgcgctttggccatcagagtcttttggcttctcattcctcatttggtgtaagcaagctaaagtatcccttgcacacgctccttgcattcgactcaaggcagcacgctcttccagttgcatgggtcataacccgctcagttactaagaaggacacattgaaatggatgagcacacttactgatcgaatacattctatagattccacatggggaattggtggttttatcattgatgacccggcttcagagctgggtccaatcagggaggtgttcgcctgcccagttctgttctccatgtggcacatcagaagaacctggcttaaaaatgtaatcaagaaatgcagcaatgttgaggtgcagcgggaaatttttatcctacttggcaaaaccatatgcaatatatggagtgagaaaaaccctatggatgccctagggcaattgtttcaagactttgttgatcaaacagcattcataaaatatttcaagtcattttgggttcccaaattggagatgtggatcgactccatccgaaatctgccattagcaagtcaggagtcatgcggtgccattgaaggttaccatctgaagctgaagctcacaacagagctgcattcgagctactggatcaacctatttgcagacgaaagcgggtcatttcccgaggtgaaagcagactatatcgcatccacgtcatggcaaagggcactccagatacctgacgatgctgttaccttcgacgacaaggatcctcttgtagctagagtggtcagccagaaggaaaccagccagacacggactgtgtggagccctggttctgaattctctctttgcaattgctcgtggtcgatgcagggtaacctatgcaagcacgtgctaaaggtcaacatggtctgcggagcacgcaaagactttcagccctcgctgtcgttccagtcgttccagcatgtcctgcttgatctgtggcagaaaccattggacgattcgttctcgcttgacctctcggtagcgcgggtcatgcagatgcaggagaagatcaaacatgtggctgagctcgccacctccagtggtatcgcccaagttgcagggaagttgccgatgcaatggacaaaaaagagagggagaaga

SEQ ID NO: 828 - DNA, 2073 bp, Zea mays
  Peptide Sequence Number=SeqID_42607
atgagaggccggagggcatgcctgtggtggttcctggcgcaggacgactcacattctattgggggatacggtgccagggcagtgattaacatagacttggaaagagcttgttttgctgaattagtattcaatacttcactaaggagtgtccctgtttatgagaaacaaaaggagaagaagcataagaaggacaagaaggacaaagttagaaaagaaggtaaagaaaagaaggacaaggacaggagtaaggataagcacaaagataagaaagaccgaaaagaaaaacacagagacaagaaaaaagacaagagcaaagataaaagcagggattcaggtgaaggaattgaaagaaatgacgaggctcaccatggtcagaaggttggagagagcagcaggagatccgaagaaattaaggatcttaaattcagggaggacttggtcagagacgtacaggatgagaaaggggcggcgagtcgacctagtgaaaattatggtgtttcaaatgatcgaaatcgcaaaggcttcagtgcttcacccgcgatggagactgaaaggtttgcgcttaataaagtgcatattcagtctagtaatgctccaaggaaaaatgagggactggtacaacagagcatcagtgccaatcgacaaaagaatgggacatcaatacggcattctgaaagcctcaccacttttgctcaaagaactgtgggtggctttccaccagcaccttcaacggaggaaaaattcaaagctgcaaggcctttatccaatactgaagctgcacccagaaaagaggggattggacagcgaatcagtaacattagcatattggttccaaagagaactgaaaacacaaacagagatgttgcgaagaaagaagttgggacctcctctccattgcctccaaatcctgctaatgctatgcataagggaaatgacaaggttggtaggccaatggagaacacacaagtacccatgcagagatttggcagcccatcgatgtcaactgcagcagtggggatggacagaggaacacctaggtcatccatcccaagcccgagcattacaatccggagaccgaatggaattgtacggccgcctaaaaacatttctgtctcttctaagaaacctgatgcaggagacgtttcacctgctattggtaaggaaaaggaacaaggtggaaggttgctgcaagcaaatatttcaactgatcagaaactggttatgtcaaaaccaccagctgtggagaaagctgcacacggaagtgctgaaaggacggagaaggtcagcagagatggggtgcctgatgttgccaagaaagaggacaaaaagagtgaccggcatgagaaaaagaaaaggaaagagaaagataaacacaaagagaggaaaaaggagaaagaggcaaagaaggagaaagagaagcataattacaaggagcatgataagacaagagagaacaatataagttatccggtagatagtcttaacttgaagccctcggcccctcctgtagccccaccagttgatggtggaaaatctgttgtgcccgatgagaacctgaagaagcgaaagaatcatgaaacgaatggttacctacaaaaccatcttgaaatgcggcctacaaagttgccgagaccagccctccccatcaatcttgtggagaatggtacagcatctcatgtagccgcgccactctcttctgtgaagccagaagccattatcaataatattgaaaaggctgaaaggctgcacaaggaagagaagatgaatggcaaccaacaggctgagcgagctccagtcgatccggtggctgcctatgagaatggcataacttctaggaagtcgcctcaccccgactgcaagtatcttagccagatatacagcgttcctgaagcacctcaaatgatggaattgcctgggcaggaaggtgaggactggctgttcgaccgaggtggcaccaaatcaaggaagcccagttcagcggctgaggctgatgaagccccccaagtgtgggctcaggctctgaaaattgaccaagctgatgtcattgctttaccatacgtggtacccttttag

SEQ ID NO: 829 - DNA, 1050 bp, Zea mays
  Peptide Sequence Number=SeqID_42608
atggggagcacggggcgcgagccggaggtgacccgcgccaacttccccgacggcttcgtcttcggcgtcgccacctccgcgtaccagatcgagggagcgagaagagagggaggcaaaggagacaacatatgggatgtatttacagatgacaaagaacgtgtcttagacagaagcaatgcagaaattgcagttgaccactaccatcgatacaaggaagacattgagctcatggcaagtctaggttttagcgcatacagattttctatatcttgggcacgtatatttcctgatggcttgggggaaaaggtcaatgagcaaggagtcgccttctataatgacctcatcaactttatgatttcgaaaggtattgagccttacgcaacactgtatcattgggatcttccaaacaatcttcaaaaaactctggggggctggatttctgacaagattgtggagtactttgcattgtatgcagaagcttgctttgcaaatttcggagatagagtaaagcgttggataacaatcaatgaacctctccaaaccgcaatcaacggttatgggattggaatttttgcgcctggaggatgccaaggtgaaactgcaagatgttacttggccgcccatcaccaaatcttggctcatgctgctgctgttgatgtttatagaagaaaattcaaggctgcacaaagtggtgaagtaggcttggttgttgactgtgaatgggcagagccattttctgaaaaactcgaagaccaaattgctgcgcaacggaggattgactttcaacttggatgtcaaggcagtagcctggctgacgttgggactgaacttgaactcatcgaagacagaacctggaagtcgtttggtgaagatgctgtcgaattgaatgttgtgggaacttgcgaaagcttgggcgaggaggagccatccaccttctccgaggccgagaagcaccactcgtggcgacgttccatgattgaagagatagactctatcgagagaaaccaacgtattgtgccccttctgcggttctgcccagtcaccggctga

SEQ ID NO: 830 - DNA, 267 bp, Zea mays
  Peptide Sequence Number=SeqID_42609
atgcatgagtgctgtaggggtggaggcgatcgtagagggcacagcatggacacacgggatagggatcgcaagctgcggatattttctggaattgagcatccattccatgaccgccctcttgaagcttttgtgatgccaccacggcaagtacgggagatgcgaccccgtgcaaggcgtgcaatgttaagggcccagaaaaaagagcattcaaacagggccaaggaggaagaagatgctaagaatgccacagctgaggtcactgcatag

SEQ ID NO: 831 - DNA, 1035 bp, Zea mays
  Peptide Sequence Number=SeqID_42610
atgggttggctttggacccttctgcacaatgcactaaaggacccggtgcttctggttaggtcgtttgatttagctgtatataatgggggtttcgtgaagactcataagaccaatgcgtatttcaaacgtttccaagtgaaattcaagagaaggcgggctggcaagacagactacagggccaggataaggctgattaaccaagacaaaaacaagtacaacacacccaaatacagatttgttgtgcgatttgtatcctttgattatttgaccatctggtttctacctattgctatgaccaacaaggacatcactgcccaaatcatatctgctagtatagcgggtgatatggttcttgcttctgcctactcgcatgagttgccacgatatggtcttgaagttggtctgaccaactatgcagctgcctactgcactggccttctgttggctcgccgtgtgctcaagatccgtggtttggatcaggagtacgagggcaatgttgaggccactggtgaggacttctctgttgagccagctgatgagaggaggcctttccgtgctctcttggatgttggccttatcaggactacaacagggaaccgtgtctttggtgccctcaagggagcattggatggaggcctggatattcctcacagcgagaagaggtttgctggattcaagaaggacgacaagcagttggatgctgatacccaccgcaggtacatctatggtggccatgttgctgactacatgaagaaccttgctgaagaggagccagaaaagtaccagagccacttcagtgcgtacattaagaagggagttgaggctgatgaaatagaagcgctgtacaagaaggtccatgctgccatccgtgccgatccttccattgttaagtcaaccaagcagccaccaaaggagcataagaggtacaaccccaagaagctgacatatgagcagaggaaggccagcctcattgaaaggctcaaccaactcaactcctccggtggtgctgatgacgacgatgaggacgacgagtaa

SEQ ID NO: 832 - DNA, 1833 bp, Zea mays
  Peptide Sequence Number=SeqID_42611
atgcctactttgttgaatggtggaggaaagggaactccagttaatatcatcgttggttctcatgtttgggtggaagacccaaatctagcttggatagatggagaagttattagcataaaaaacaatgaagtacatgtgcagacatcgaatgggaaaaagaaaggaagttctacagttctgttccagtattttacccgagttgtaaaggaaaacctggataaaaagattaaagaattccataccatccaggaggttaccacagacaggtcaaaagtatttcccaaggatatggaagctccaccaggaggagttgatgatatgacaagactttcatacttacatgaacctggtgttctacagaatcttgctacccgctatgaactgaatgaaatatatacttacacaggcagcattttgattgctgtaaatccatttcaaagattgccacatctttatgatacccacatgatggaacagtacaagggtgcagattttggggaattgagtccccatgtctttgctatcgcggatgttgcttacagggcaatgataaatgaagggaaaagcaactctatattgtccaacccagttcttgaagcttttggtaatgctaaaactgtgcgaaataacaactcaagtcgctttggcaagtttgttgagatccaatttgacaagactggacggatctcaggagctgctatcagaacttacttgctggaaagatcacgtgtgtgccaaattaattctccagaaagaaattaccattgcttttattttctttgtgccgcaccacctgagtacactcagaggtacaagctgtctgatcctagatctttccattacctcaatcagtcgagctgtattgaggtggatggaatcaatgatgctgaagagtatttagcaacacgaagagctatggatatagttggaatcaatgaggaagagcaggaaggtatattccgggttgtagctgctgtacttcatcttggaaatataaattttgccaagggaacagaaatcgattcttctgtaatcaaggatgataaatccaggttccaccttaatatcgcagcagaacttttgaaatgtgattgccagaatttagagaaggcgctgataacacgagttatagtcacgcctgaagaagttatcactagaacacttgatcctgcttctgcagttgctagcagagacgcattagctaaaataatatactcccgattgtttgattggattgtggaaaaaattaatgtctcaattggacaggacccaaactcaaaacagttaattggagttcttgatatctatggttttgagagcttcaaagttaacagttttgaacagctatgtatcaattatacaaatgaaaagctgcaacaacattttaaccagcacgtgttcaaaatggaacaagaagagtataccagagaagagataaactggagttacatcgagtttgttgataatcaagatgtgctagacttgatagagaagaaaggtggattgattgcacttctggatgaagcatgtatgtttcctagatctacacatgagacgtttgcgcagaagctatatacaacatttaagaataacaagcggtttgccaagccaaagctttcacgcactgattttacagtagtccattatgctggcgatgtgacataccaggctgattatttcttagacaagaacaaagattatgtagtggctgaacatcaggatctgctgaatgcttcttcatgcctattcgtagctggtttattccctcctctcccacaggagacagcaaagtcttcaaaattttcatccattggatcacgttttaaggtgtga

SEQ ID NO: 833 - DNA, 213 bp, Zea mays
  Peptide Sequence Number=SeqID_42612
atggtactgttccggatcctttgcttgtctagccctttgctttcccaactactgctactagcttgtgtgctgggcgtgcttcgcttcgcctggctgctgattgaatcatatttcgctgggattcgcgactctgtattggttcagaattcagatggcttaattgagattgttgtgtattcacgctacagtattcttacttcacttaatagatga

SEQ ID NO: 834 - DNA, 852 bp, Zea mays
  Peptide Sequence Number=SeqID_42613
atggttggttggctaccccttccctcctccggcgagctcttcccccctctccctctctcctacagggttgcgctggtcgcgcctcctacacccgcgtgtgacgcgaccccggggctggccctcatggccgaagacccccgcgtcgccatcggactctactggatccggccccgccggcgcccgctcgtgtcggcgcgactctcccatccgtgccgccgccgagtccggcctctcccggccccgctggcgcccgtctcgcggcccctccaccgcccgcccctccctcacccgtgccgccgccaggcagccgtgctcggccccgacgatgccctgatgctgcccctggtttttccccatggcgccattagcacgaccgtatacaaccaatcgtccgctctcacctctacactgtgtgctccttccccttcgaatgacgctgcagccatcctcactgccacttgggctaccgttgcggcggctcgccagcgggctcaggacaccactcgtgctattgagcaggagcaggcggttgtcaacgccatcaaacgccagtacactgagacctaccattgtctcgctggcaagggcgtgtcagatggttccccacgtccactcgtcacagcgccgacactttcgagcctgcgccagccccagcctcgaccctcagcgcctctcttcacgcctaggcgacgaccctcaccagcatccaggcaaccgtcaccgacattctcgcgctggactccactcagtaccctcagtggcacgaccaggtcctgtagaccctccaccgctacgccctcgccgaccacgtcctactcgcggtcgctgcaccgacagaggattgcctcctga

SEQ ID NO: 835 - DNA, 447 bp, Zea mays
  Peptide Sequence Number=SeqID_42614
atgggtcgacaagcgcaccacggacagtcgtgggcactggcggaagagccagagaagaggttgtggagagaatcaagcgatcagcgagacaataggacggtgtgtgtcagtgcgggaggcgccggagccgcacgaggctgtgcgggagtcggcggggccacgcgaggcaacagaggggacgccgaggcggcacgtggctgtgcgagggagggcggggccgcgcaaggcgattcaggggacgccgaggccacacgtggttatgcgggggagggcgtcgcaggcggggccacgcaaggcagtgcagtggacggacctacgtggaaggggggttcgattgtgggggacacagaatcaaggtcgaggaacacgtcgagctcagtgagagaggcagcgaaagaggaggaaaaggggaaatccgaccgtcgaaatcaacatgacgagagatga

SEQ ID NO: 836 - DNA, 594 bp, Zea mays
  Peptide Sequence Number=SeqID_42615
atggcgcttcctgttgacgtggcgggcctgtgccctaggtcgggcgacgtgggggctcctccgaagccgaggtcgagtctgtcttccgtggccgaggccgagcccgagcctctgggtcgggcgaggcggggatcgttcggccgaggccagggcggagtccgagccctggggtcgggcgaggtggagtttcgtcgtcttctggggctgagcccgagtccgagccctgggtcgggcggagcggagttcgccgtcttccgggtcttagcccgagtccgagccctggggtcgggcggagcggagttcgccgtcttccgggtcttagcccgagtccgagccctggggtcgggcggagcggagttcgccgtcttccgggtcttagcccgagtccgagccctggggtcgggcggagcggagtttcccatggcgcctttggcaaggcctgactgcctgtcagactcactctgtcgagtggcactgcagtcggagtggcgcaggcggccatgtccttctgtcagactgctttatgctgatgggggttaccagctgagaattaggcgtcttgagggtacccctaattatggtccccgacagtag

SEQ ID NO: 837 - DNA, 645 bp, Zea mays
  Peptide Sequence Number=SeqID_42616
atggatggcagatatcagatggttggccctggccagttttccctgaccgcgaggggcggcaccacccatgtctgcagtggggagctcgccggagacgagtggcaccggagggtggtggcccacggctcagaggcggtgccacctatctttggtgaggaatcacgcgcaacagagagcaagggagagaaaaggagagggcaagggaggtttgtcacctcaagggggtctcatggacctcttgacagcagcaggggcgcgacgacgtcttgggtcgacggcggcggcaccgtgcctgcgtggaggagggtaggtgagcgcgggcatgggaaatcagagggggaggacaaattggggtgtgtcccaagctacgaacgtcgaggtggagcttatcatggcaaagggcacgacggagcctcaatgtcgatgggggaacgagctcgtgatggcggtgaacggtgtcagctcctccctagcgtgcacatggcactgggctgggctgggggttctacggacatgcaaatgagggagggggagagtgagtggggtctaggggcttcaagtggtcgagggcggggtggttgcgggctcgacgtgcgacatgggcacggagtcctcggcgtgcgcgtgggacgcgcgggcgggtga

SEQ ID NO: 838 - DNA, 141 bp, Zea mays
  Peptide Sequence Number=SeqID_42617
atgggccgcctgcggtgctctgcggaggcgctgatggtccgcgacatagagccggatggttcgcgacatagagccggacgcagaccacccaagacgtctctagttgacgtagagtcaaaaagagatgaagatttgagatag

SEQ ID NO: 839 - DNA, 1239 bp, Zea mays
  Peptide Sequence Number=SeqID_42618
atggccccgcctccgccatggcttgccgccctcctcttcctcctcctacccgcgctgctgccggcggtcggctccgtctccggcgcggcggctgccggcatcttccgggtgcggcgtaagttaccagccggagttggaggggacactggcgccaacatcagcgcccttcgtgcccacgacggtcgccgccacggccgccttctcgcggctgccgacctcccgctcggtggcctaggtctccccactgacaccgggctctacttcacggagatcaagctcgggacgccgcccaagcgctactacgtccaggtcgacactggcagcgacatcctgtgggttaactgcatctcctgctcaaaatgcccccgcaagagcggactcgggttagacttgacgttctatgaccccaaggcgtcctcgagcgggagcacggtgtcctgcgatcagggattctgcgcggccacctatggggggaagctgccagggtgcactgccaatgtgccctgcgagtacagcgtcatgtacggtgatggtagctcaacgactgggttcttcatcaccgatgcgctgcagtttgatcaggtgactggggatggacagacacagcctggcaatgctaccatcacattcgggtgtggtgctcagcaaggtggggatttgggcaactcaaaccaagctcttgatggaattcttggttttggtcaggcaaatacgtcaatgttatcacagctagctgctgctggtaaagcgaagaagatatttgctcattgcttggataccataaagggtggtggaatttttgctattggaaatgttgttcagccaaaatgctactttgtgttcttttttgcccatggcctcttgaacatacccctgtttttgcttgtcatgattttactttccaggccgcactacaatgtgaaccttaagtcaattgatgttggtggcactacattacagctcccggctcatgtttttgaaacaggagagaaaaaaggcaccataatcgacagtggtactaccttgacataccttccagaattggttttcaaacaagtaatggatgtggtatttagcaagcatcgagatatagccttccataatttgcaagattttttgtgtttccaatattctggaagtgtagatgatggattcccgaccatcaccttccattttgaggatgatcttgcactgcatgtgtatccacatgagtactttttcccaaatggggtaacatga

SEQ ID NO: 840 - DNA, 159 bp, Zea mays
  Peptide Sequence Number=SeqID_42619
atgacggcgcggcaggtcgcgacgacggagttgagaggggacggagggcagaaatgcgaggctgacagatctagcgtgcggacacaagcttctcttccgtcgctgggtgtcgctcccctagaggtcacgccgtcgtcgctagacaaccgctccccatag

SEQ ID NO: 841 - DNA, 2631 bp, Zea mays
  Peptide Sequence Number=SeqID_42620
atggagatagctgtcttcttcggcgaggttatacccctctgccgcaggcttggttctaggcttcaacttcaatccctcatggaaactttgagctctaccgaaccccactatattagatgtgtgaagccaaataatctccttaagccagctatttttgagaatacaaatgttatacaacaactaagatgtggaggtgttctcgaagctatcaggatcagctgtgctggatatcccacaagaaaaacattttatgaatttgtcaatcgttttggtgtccttgctcctgaagttttagaagggagcaatgatgataagattgcgtgccaaaagattttggaaaaaatgggtctggagaattaccagattggaaaaacaaaggtgtttctaagagctggacagatggctgatttggatgctcgtagagctgaagtattaggaagagcagcaagaatcatacagaggcaaatacgtacatatattgcaaggaaacagtttgctgagcttaaaagatcagcaacacagctgcaatcttttgtcagaggaaccttggctcgtaagttgtatgagtgcatgaggcaggaagcagcagcagtgaaaatacaaaagaatatgcgacgccacaaagcacgggaatcttatttacaattgcaagcagctgcaatcacattgcagacaggtttaagggcaatgtctgctcgcaaagaattcaggttcagaaaggaaacaaaagctgctgtccacatccaagctcaatggcgccgccacagagactactcacattacaagaatctgcaaggagcagctcttacttaccagtgtgcctggaggcaaaggcttgccagaagggagctcaggaagctcaagatggcggcaagagaaacaggagccctaaaagaggccaaggataaacttgagaagcgtgttgaagaactcacctggcgcttaggattggagaagcgattaaggactgaccttgaggaagcaaaagcccaggaaattgctaagctgcaagagacgttgcatgatatgcagcttcaagttgaagagtcaaaggccatggtagttaaggagagggaagctgctagaaaggcaattgaagaagcacctccagtaattaaagagactcctgtgctagtcgaagacacagaaaagattaactcactgacgaccgaagttgaacaactgaaggctttgctgctaactgaaagacaagcaacagaagctgcaaaaagagaacacgctgaatctgaactgagaaatgaagaactaattaagaaatttgagagcgcagagaaaaagattgagcaacttcaggaaactgtccataggctggaggagaaagcaaccaacatggagtctgagaacaaagtgctccgtcaacaagctgttgcaatttctcctacgtcaaaatcattagctgcatatcctaagtctcctttccagctgaaaactccggagaatgggaatgctctaaatggagaagtgaagtcatcaccagatatcacccctatcttaccaaaccccaaggagcttgaggctgaagagaagccacaaaaatcacttaatgaaaagcagcaggaaaatcaagacctactgatcaagtgtgtatcacaagatctgggattctccagtggcaaacctattgcagcttgccttatctacaggtgtcttctacactggagatcattcgaagttgaaagaactggtgtttttgaccgtattattcaaacaattggctctgctattgaggggatgcgagcctcaccacaaagtgctgggcgtgcttttatgggaagtcgcttgattggaggtctaggtgaccttcgtcaagttgaagccaagtaccctgccctgcttttcaagcaacagctcacagctttccttgagaagatctatggaatgataagagacaatttgaaaaaggagatatctcctttgcttggcctttgcatccaggcaccaagaacatcccgtgcaagcctaattaaagggtcacgttcccaagcaaatgccttagctcagcaaactctgattgcacattggcagagcattgtgaaaatattgacaaattacttgaatgttttaaaagcaaattatgtcccttcagtcttaatcagcaaagtgttcactcaaatcttttcatttattaatgttcagttatttaataggaagtccttgtattgtagtcttcttcttcgacgggagtgctgttcatttagcaacggagaatatgtgaaagctggattggcagaattagagcagtggtgcatttatgcaacagaagaggtgattcatcaaaagccaaagaaaacattgaaagaaattaccaacgatctgtgccctgtccttagcatacaacagctatatcgaatcagtacaatgtactgggatgataagtacggtacccacactgtttcatcagatgtcatctcaagtatgagagtaatgatgacagaagattctaataacgcggtcagcagttcgttcctgttggatgatgattccagcattccgttttcggtggacgacatctcgaagtcgatgacagaaatcgaggtaacagatgtcgacatgccacctctgatccgggagaattctggcttcaccttcctacaccaaagaaaggactaa

SEQ ID NO: 842 - DNA, 228 bp, Zea mays
  Peptide Sequence Number=SeqID_42621
atggcggcagtccagggccgcccagttggtttgatcgagcgttctcaatgcagccatggagacaggggaggcggtagcgatggtggggaagaagagggagtcgccgaggtcgtggttctggaagtagccgaacagaggcggcgttccgtggaactcgcggatctcgaaggcaacggattctggagacctactctcccgatcgcagatgcacgttggcgctcgggatga

SEQ ID NO: 843 - DNA, 2229 bp, Zea mays
  Peptide Sequence Number=SeqID_42622
atggagggcgacgacttcacgccggagggcggcaagctccccgagttcaagctagatgcgagacaagcgcagggtttcatctccttcttcaagaagctgccgcaggatccccgggccgttcgtctcttcgatcgcagggattattacactgcccatggcgagaatgctacgtttatcgcaaggacatactaccacacaatgtctgccttacgtcaactaggtagcagctctgatggaatcttaagtgccagcgtgagcaaggctatgtttgagaccattgcccgcaacattttgttggaaaggactgactgtacattggaactctatgagggaagtgggtcaaattggaggttaacaaagtccggaacacctggaaatattggtagttttgaagacattctgtttgcaaacaatgacatggaagattcaccagtgattgttgctttgtttccagcgtgccgggaaagtcagctgtatgtagggcttagttttttggatatgaccaataggaagcttgggttggctgagtttcccgaagatagccgattcactaatgttgaatcagctcttgttgcattaggttgcaaggagtgtcttctcccagcagattgtgaaaaatccattgacctaaacccccttcaagacgtcattagtaactgtaatgttctgttgactgagaaaaagaaggctgacttcaaatccagggatctcgcacaagatcttggtagaataatcaggggttctgttgagcctgtacgtgatctactatctcagtttgactatgctcttggtccccttggagctcttttatcttatgccgagttgctagcagatgacactaactatggaaattacacaattgagaagtacaatttgaactgctacatgcgacttgattctgctgcagttcgagcattaaacattgcagaagggaaaactgatgtaaacaagaacttcagtttgtttggtttgatgaacagaacttgtactgttgggatgggaaaaagattgctgaacagatggctgaaacaacctctattagatgttaatgaaattaataaccgactagacatggttcaggcttttgtagaagacccagaacttcgtcagggactccggcaacaacttaaaaggatatcagatattgatcgtctaacacatagtctccgaaagaaatcagctaatctgcagcctgttgttaagctttatcagtcctgtagcagaatcccatacatcaagggcattcttcagcaatataatggccaattttcaacattgataaggtcaaagtttcttgaaccgttagaagaatggatggcaaagaatcgatttggtcggttttcttctcttgttgagacagctattgatcttgctcagctggagaatggagagtacagaatatctcctctatattcttctgacttgggtgtactaaaggatgagctttctgtggttgaaaaccacataaacaatctgcacgtggatacagctagtgatctggatctttctgttgataagcaactgaagctagaaaaaggatcccttggacatgtgttcagaatgtcaaagaaagaggaacagaaagtcaggaagaaactcactggcagctacttaatcatagaaactcgtaaagatggtgtaaagttcacaaattctaagctgaaaaatctaagtgatcaataccaggcattgtttggtgagtacacaagttgtcagaaaaaggtggttggtgatgtagtgagggtttcaggcacattctcagaggtatttgaaaattttgctgcagttctgtcggagttggatgttttacaaagttttgctgatttggcaactagttgcccagttccttatgttaggccagacatcactgcgtcggttgaacctggtgcatgcgaccaaagttttggtattcatgttgcagaatttgctaattttccagaagctgttgttgcccttgcgaaaagcaaagcagcagagttagaagacttttctactacacctaccttttccgatgatttgaaagacgaggttggatcaaagcgcaagagggtatttagcccagatgacatcaccagaggagctgcacgggctcggcttttccttgaggaattcgccgcattgcctatggatgagatggatgggagcaagatcttggagatggccaccaagatgaaagctgacttgcagaaagatgcagctgacaatccttggctccagcagttcttctga

SEQ ID NO: 844 - DNA, 159 bp, Zea mays
  Peptide Sequence Number=SeqID_42623
atggtggggtatggtgccgaatccggtggccgcaaatactggatcgtcaagaactcgtggggcgagaagtggggcgagaagggatactttcgcggtttcgcctcgagaggcgcgtcaaggacgtcaggggcacctgcgaacacgacccttgacccatag

SEQ ID NO: 845 - DNA, 844 bp, Zea mays
  Peptide Sequence Number=SeqID_42624
atggctgcctaccaacaagctcccgctctcctgtgcgcctgcctgatgctcgtgctcatggcgggcgcggcatccggcggccgcgtagacgtggaagacatgctgatgatggaccggttccgcgcgtggcaagccacgtacaaccgctcgtacctgaccgccgcggagcgtctgcgccggttcgaggtgtaccgccagaacatggagctcatcgaggccacgaaccgccgcgccgagctctcgtaccagctcagcgagaccccgttcaccgacctcaccagcgaggagttcctcgccacacacaccatgtccacgcgcctgcatgcgtccgaggccgcgcggcggcaccgggagctcatcacgacgcacgcaggccccgtcagcgacggcggtcgccagtggaaccggcggaactacacgacggacctcgacgtccccgaaagcgtggactggaggaccaagggcgcggtgacgacggtcaaggaccaaggagcttgtggcggttgttggtcattcgcgacggtggcggcgatcgaaggcctgcacaagataaggacgggccagcttgtctccctgtcggagcaggaggttctggactgctcttccccgcccaacaatggctgccacggcggcaaccccgcggctgccatagactgggtgtccgctaacggcggcctcaccaccgagtcggactacccgtacgaggggcggcagggcaaatgcaagctcgacaaggcacgcaaccacgtcgccaagatcagaggcaggaagttggtggatcaaaacaacgaagccgcgctggaggtcgccgtggcgcaacagcctgttgccgtggggcatgaat

SEQ ID NO: 846 - DNA, 723 bp, Zea mays
  Peptide Sequence Number=SeqID_42625
atgtccacgcgcctgcatgcgtccgaggccgcgcggcggcaccgggagctcatcacgacgcacgcaggccccgtcagcgacggcggtcgccagtggaaccggaactacacgacggacctcgacgtccccgaaagcgtggactggaggaccaagggcgcggtgacgccggtcaaggaccaaggagcttgtggcagttgctggtcattcgtgacggtggcggcaatcgaaggcctgcacaagataaggacgggccagctcgtctccctgtcggagcaggcggttctggactgctcttccccgcccaaccatggctgcaaccgcggtgaccccgcggctgccatagactgggtgtccgctaacggcggcctcaccaccgagtcggactacccgtatgtgggacggcagggcaaatgcaagctcgacaaggcacgcaaccacgtcgccaagatcaaaggcaggaagttggtggatcaaaacaacgaagccgcgctggaggtcgccgtggcgcagcaacctgttgccgtggacatgaataggatcgtcaaccacggcgtcaccatggtggggtacggtgttgaatctggcggccgcaagtactggatcgccaagaactcgtggggcaatgagtggggcgagaagggatactttcgcctcgagaggcgcatcaaggacgccaggggcacgtgtggtatagccgtgtgggcaaactacccggtgatgtga

SEQ ID NO: 847 - DNA, 996 bp, Zea mays
  Peptide Sequence Number=SeqID_42626
atggcgccgacgcggggcgccggaggcggggtgcgtctgccgccgatgaacgcgctggagatcctgcgggagacggtgcgggtgctgcgcggagacccgcacgcgttcacgtccatcctcttcctgctgctctgcccggcgtccgggtgcctcctcctgtccgcggccgcgctggacggggccgtcgtgctgccgctcgcgcggaggctcctcgccgccgccgccacgtcggggctcccgctcacgcatttcgtcgggcagctggcgcaccacctcgccgccacgctcgtctccgccgtcgtctcgctgccggcgctcctcacgctcctcctcgccgcccgcgccgccgtggcatacaccgtcgcggccgtgtacgccgggaagcccctagcggccggggacatcaccctcctcgcgcgccgcgcgtggccgcgcctcgccgccacgtacgcgctcgggtgcgccgccgtcgccgtcggactcgtcgccttcctcgccctcctcgtcacggcctgctccacgctcagggccatgctctacccgcccgacattgtcgtctgcgcgggcctcttcactgtcctcgcctactccgtggtgtacgcgcacaccatcatcatctgcaacctcggcggcgtcatcgccgttctcgaggaagtggccgggatcaatgcgctgcgccggtcggtgcagctgatgcgtgggcagacccacgtcgggctgctcatcttccttggatccaccattggcctagctttcgtggaagggctgtttgagcacagggtgaagacgctgagctatggcgatggctcgtcgcggctctgggaggggccattgttggtcctcatgtactcggtcgtgatgctggttgattcaatgatgagtgcggttttctacttcacttgccggtcatcaaacttggacttcttggacgagcagggtggctcggttgaggagcttgagatgatgagggctggcagtttagatgcatttaggtga

SEQ ID NO: 848 - DNA, 1635 bp, Zea mays
  Peptide Sequence Number=SeqID_42627
atgaggcggcatgggtggcagctcccgtaccaccctctccaggtggtggccgtgtccgtcttcctggcgctggcgttcgcgttctacgtcttcttcgcacccttcgtcgggaggaaagtgttccagtacgtggtcatggggctatacactccgctggtgagagctcctgcttggttccttcgatgccgtgctgcgtcgacaaacccagcagatccaggggtcttcaaatcaaagaagtatctgagcttgtacggaagcggcaaacacaagcatctgaaggaatccagaaagacttcttcagatgctcggttacaaatagagggaactagagaaaaacaagagcatgaggtcgcagcatctagcgagaggtcaattactcaatacaaggacaataatccatcttgcttgagttcaaccctctctccttctctccttctattctaccctctctcttttgttttctcctgctgccaaccacatgaaagttcctctgagcagcaagccaccgaggaagggatgtttttctgcagcctatgtgaagttcaggtgttgaagtatagtaagcattgcagagtttgtgacaaatgtgttgatggttttgatcatcactgcaggtggctcaacaattgcattggaagaagaaactatagaaggttttttattctaatgtcaactgccgttatcttgggaatcagtacctatgactacatcattgccctgcgagagcaagagcaagatgatctgagtgggcagcagagtccacagatgtctcgtgtaagctcctacaccggactcagcagtgctagttcctttggtccacttcgtcgtggttcatggtgcactccgccaaggctgtttcttgaggatcagtttgatgttattccatcggaggctgcttcttcgcataattctgctacgaagaggaaagaagaccaggggaagaggaaaaagggctcaggggccgtgaaaataagcccatgggcattagctcgtcttaacgctgaagaagtttcgagggttgctgcagaggcacggaataagtccaaagttttagtgccaatcagaaaagatgactattcacgaggccacgaaacagatagtagctatggaggcaccagcagtggtaggatcgatctaggacccgatagcaagaggagaacaaacagaagaggaagacagcccagtgatctctttctcaaacctgttgcaaagatatctacagatgctattgattctgccagcagcgacatgtccaatttagcaccattgcaacttgaggcacggagcgccttccatcccagcagggctgcatcctctgtgaatgttggtgggtcatctccagatagcagcttggattcgcctgacctgcatctgtacagagtctcagctgtctcatcgtctggagccgaagacttgcagctgacagctctcactgctccaggaagcacttcacatcaagggattcaactgtcgagatcgaccagcgatgggtatgaagcgtcagggggtgaagacagcgaccgcattccgtcacagatagtgcaccgctcgtcaaactgggcaagcatcatcctcaactctgaccagagtgcgtcctcgtctggcattcttgtgccgaagaacagattgtcctga

SEQ ID NO: 849 - DNA, 264 bp, Zea mays
  Peptide Sequence Number=SeqID_42628
atggctgaccttcggtgcggcggacggcgacgcacgcagcccgcacagcacgcaattggacgcggagctggctgcgagtccaaggctgaacggcggcgggtcgcaggctacgatggtggggcggccggccatactctatctatgttgctggtgcatgtggcatttaagcgcaacgcatgggacgacaacagcacagtggagtggagtggacgagtggtggccttggcccttgggctaggactgagacacaggcgtcagtgttag

SEQ ID NO: 850 - DNA, 279 bp, Zea mays
  Peptide Sequence Number=SeqID_42629
atggatgaccacttcggcttttcagatgatgatggaatagagaaaaacacagtggcaaacagtacaattcatttgatgaccatcaaggtaggggagggtgatcaagaagttggtgatgacaaagacaaatttggcagatttcattgtggagggaagatgaaattcatgggaatggacaaattccgtacaccgtcgtcgaagtcccgagagcaaccagttgatagacgccagcctagcgcaccggacagtctggtgcacccagaccgagcagtcttttga

SEQ ID NO: 851 - DNA, 367 bp, Zea mays
  Peptide Sequence Number=SeqID_42630
ggcctcaggcagcccgcagccggtcagtccttccttttcctgttcgcgtccacgatcctgccgccgccgccgctcgcacctccacgatcctgcccagcgccgtgcgcctccacccccgccccgtccgccgcccgcctggtccatccccgtcccgtctggccggcgttgccaccccgggtcccgcgcgcgtggagccccggcctctaccagccgcacgtcgcaaccgacgaggacgcgcgcgcctgcagctcctgcccggtcccggctggccggccgccggcactccggctgcccctcagcggctcagcccctgagcttgtctgcttgaatgcttcagtgcgggtgcagcacagcggcagtgccccct

SEQ ID NO: 852 - DNA, 396 bp, Zea mays
  Peptide Sequence Number=SeqID_42631
atggctgcagcagaggcatgggtgcggcaggagaaagttaggaagtttgaggagttcgtggaccagcggttgaaacccgacctcaccaatgccatcgcacagcgtaacaaggtgtttgagcagcagaagaccttcttggatttgaagaggaacattgaaaatttggagaggaatggtgttaccagcatgcggtccatggtcaatcttggctcagaggtgtacatgcaagcagaagtaccagatacaaggcatatttttgtggatatcggtctaggttttcatgtggaatttacttggcaagaagctttacagttcatatctttcacagtcataagagtccaaatcgaaaattttcctttggagaagctttctggtgttgggcctattattgattag

SEQ ID NO: 853 - DNA, 402 bp, Zea mays
  Peptide Sequence Number=SeqID_42632
atgcgccactggcgctcgatgccatcgcgccccgagaccgacttccgccaccgccgccggctcgtcctcctcgtccaccacgttgtaagatggggggtcagaaggggcgggggatctatgacatggtggtgccaatccttgttggcagatgcgattcagtggagaacaggagccgaggacggggtggggtccagggaggtgagagcgaatggcggagcgaggcagggtttacggacgcacatcgaggaatcactttccatcaaaggcgcgggcgcggtgatccagggatgcggggctggcggggatggcgagctgtcggtggaggtcgcggttgggagggcgtgggcgggcggaggcgtggtgatgctcggtggacgccctcgttacgttcttaaggagtag

SEQ ID NO: 854 - DNA, 363 bp, Zea mays
  Peptide Sequence Number=SeqID_42633
atgactgaggtatatttgttactgggagctagggcttattggttgctccaccgaggtcatgcaatggccctactgggagctcggcgagatggacgacacactcacctacagaggggagctagggtgtgtcgtgcatgcctgcgagctgtagagaagagggggcagtctggaaccgaaccctcagcaaggattttgcagctcctactggagaatggcattagagtaaatgaactaacaaggacaaaggctgctctcatcctcccatcagtgtttgatgatccagacgaggtagataaagagaaagaagttgagtatgaagaaatcgaggaggaggttgagtatgaagagatagaggaggattaa

SEQ ID NO: 855 - DNA, 378 bp, Zea mays
  Peptide Sequence Number=SeqID_42634
atggagcaccaagacgtcgccatcctcaagctgatcaacaaaatgcgactcatggaggcacgcctgtccaaacgcatcagcggacgttgcgacaacatcgagcgtcgtctggacgacgatgtgaagagacctgtagtctgtgacgagatatccatctttgatgaggtcccatctttgacgaggagccatgtttccgccgctgcctccttgattctgatttgggctctccctaagactgggtcgatcagccctcggtcgttcgggccgcggcccgagctcccgggatttgcttcctccatcgggcatccgcgccatgccgagcaactacgtcgcgagtgggcatccgcaggaggtggtcagcgtcgacgtctgagctga

SEQ ID NO: 856 - DNA, 419 bp, Zea mays
  Peptide Sequence Number=SeqID_42635
atgacgattgatgagtttggtgaaccagggagtcctgtctctctacgggagaggtcgtttgacactgtccccttcccgggcccgccccgcaagtgcatggcagtgagcttcctggccaatgaggtgtcggacctgtgcatcggcaagccggccgtgaggtcgctcccgctctccgccgccgccggcgaccttgccgccgcgctccggagggtggcccgctctggcgcaccatcctgcgtcgcggtgactggaccagcgcgcgccgtcgtcggccgggtcggcctcgcggacgtgctctgcttcctgtgcaccgaccccgaagcgctcgcgcgccccgccgtcgtgttctccaagccggtctccgcgctcctgccgaaggacggcgctggagaggtccgccgcgtcgatccccgctcgag

SEQ ID NO: 857 - DNA, 174 bp, Zea mays
  Peptide Sequence Number=SeqID_42636
atgtcgaaacagtgcccgcagacaagccgaatgaagcaccatacacttcggtgcagcaggcaggaggacgtgaggctagatgtgttggctactggtgtgtttgaaggcaacacccgtagttggatatttataggagaaaactgtgttcaggtccaacaaatcagtaccagataa

SEQ ID NO: 858 - DNA, 1611 bp, Zea mays
  Peptide Sequence Number=SeqID_42637
atgcccgacataccgagggatgtcgccaagcactcgctgggtatccgagctggagcccgacccgtgaagcagcctctgcgccgattcgacgaagaaaagcgcagagctataggcgaggagatccacaagctgattgctgcagggttcatcaaagaggtattccatcccgaatggctagccaaccctgtgcttgtgaaaaagaaaggcgcaacataccaaaggtgcatgaaccacatgttcggagaacacatcggccgaacggtcgaggcttacgtcgatgacatcgtagtcaagacaaagaaagcctccgacctcgtctctgaccttgaaacgacattcaagtgtctgagagcgaagggcgtgaaactcaatcccgagaagtatgtcttcggaatcccccgaggcatgctcctggggttcatcgtctctgagcggggcatcgaggccaacccggagaaaatcacggccatcaccaacatggggcctatcaaggacttgaaaggagtacagagggtcatgggatgccttgtggctctgagccgcttcatctcgcgcctcggcgaaagaggcctacccttgtaccgcctcttaaggaagaccgagcgcttcacttggacccccgaggccgaggaagccctcgggaacttaaaggcgctccttacaagtgcgcccagcttggtaccccccgctgcgggagaagcccttttgatctatgtagccgcgaccactcaggtggtcagcgccgcgatcgtggtcgagagacgagaagaagggcatgcactgcccatccagaggtcggtctacttcatcagtgaagtgctatccgagaccaagatctgctacccgcaggttcagaagctgctatacgcagtgatcctgacgcgacgaaagttgcgacactacttcgagtctcatccggtgactgtggtgtcatccttccccctgggagagatcatccagtgccgagagacctcgggtaggattgcaaagtgggcggtggagatcatgggcgaaacaatctcgttcactcctcggaaggccatcaagtcccaagtcttggcggacttcgtggctgaatgggtcgacacccagcttccaacagctccgatccaaccggaactctggaccatgtattttgatgggtcgctgatgaaaacaggagccggtgcgggcctgctcttcatctcacccctcgggaaacatcttcgctacatgctacgactccatttcccggcgtcaaacaacgtggccgagtacgaggctctggttaacgggttgtgcatcgccatcgagctaggggtccggtgcctcgacgctcatggcgactcgcagcttgtcatcgaccaagtcatgaagaactcccactgccgcgaccggaagatggaggcctactgcgacgaggttcggcgcctggaagacgagttctacgggctcgagctcaaccacatcgctcgacggtacaacgagactgcggatgagctggctaaaatagcctcggggcggacaaaggttcccgcggacgtcctctcccgagacctacatcaaccctccatcaagaccaacgacacgctcgagcccgaggaggcctctgtgacggaacctcccaagtaa

SEQ ID NO: 859 - DNA, 432 bp, Zea mays
  Peptide Sequence Number=SeqID_42638
atgttgtttgctattttgatcacgaaatcaatattgagtttaaatgcagttctgaagcagctatccttggcatccctggatataggtcgcacaaacagaagcaagtactcatatgctcctaaatctggtgtgaggtacgacgggttttacagaattaagaagtgttggaggcagtttggtgttcaggtaaaggctgatgttgtttttaagaaagttgctttaaactctatattgtatctgaagctttgttgccatgatgcttcactcgcaataagacctgtttttgatcatttcaaaactttggtgatcacttctggaactctcaacccaatagatctttaccctcgtctcttgaattttaatcttgtcataagcagaaggttcacaatgtccttaacaagagattgcatttgccccatggtcttgacttga

SEQ ID NO: 860 - DNA, 195 bp, Zea mays
  Peptide Sequence Number=SeqID_42639
atggggaagcctgtcccatcactcctcatgctcctcctcagccgaggcgggatcccactcgacagtccaacccggtggattaaacaacattatgctaaaggaaggaaaactaagttagttagtaacttagggtttcttggtcatacgtggcctttagtggttgatgcttatcattctaggtttaggtttggttga

SEQ ID NO: 861 - DNA, 180 bp, Zea mays
  Peptide Sequence Number=SeqID_42640
gcgttcatcgtctccagcaacgaggtggaccgccacaccgaggcgttcgaggagctcgagcgtctggcggggcccgacgacaaccttgacatgttcgtcacggtcctcagcctggacgtcgccatggaggaggacctggacgtggacggtgatagttttaggaggaggaaattgtggtga

SEQ ID NO: 862 - DNA, 1218 bp, Zea mays
  Peptide Sequence Number=SeqID_42641
atgggggaaaatgaaattgatatgcaggcatgcggtggtcagtcaggagcgggcgtgttcggccacctctcggactcgttcctgggccggaaggggtcgctgcaggtggtgtgcgtgctcaacgccgccttcggcctgctgaccgcgctggccccgacctactgggcctacgcggcgctgcgcctcctcacgggcttcagcacgggcagcgtcggcgtgctggccttcgtgctggccaccgagcccgtcggccccgcccgccgcggcgccgccggcatgtccgccttctacttcttctccggcggcatcgcggcgctcgccggcgtcgccgcgctcctcccgcgctcctggcgcctgctctacgccgccacctcgctcccctcgctcgtcttcgccgtcgccgtcgtcccgttcgtctccgagtcgcccaggtggtacctcgtgcgccgccgccccgacgacgccttgcgggtcgtccgcgccatcgcggccgccaacggcagggccgtgccagaggatctcacgctcaagcttgacgacgaggacgaggacgatgatgggggcgcggcggcggcggcggcggcggcggcatccacttcctcgggctccatcgtcgacgtgttccggtcgccgaccacgcgggtgcgcctcgtgctgtccgtgctcatcaacctcctcgcctcggtggtgtactacggcctcagcctcaacgtggtcaacctcaagaccaacctctacgtcaccgtcgtcgtcaactcgctcgccgagatgcccgcctacctgctcacggcgctgctcctcgaccgtttcgggcggaagcctctcgccatcggcaccatgctgctcagtggcgtcttctgcaccgccgggagtctcatacccggagcagggaccatgaggctggcgcggatggcctgcggcgtggtgggcatcttcggcatggcggcgacgtacaacctgctgttcatctacacggcggagctgttccccacggtggtgcggaacgcggcgctggggtgcacggcgcaggcggcgcagatgggggccatcgtggcgccgctggtggtggtgctcggggagaggctgccgttcgcggtgttcggcgcctcgggcatcgtcggcggcctgctcgtcttctacctgccggagaccatgaacaagcccctgtacgacaccatggcagggctggaggaaggggagaagagcgtcatcaagtga

SEQ ID NO: 863 - DNA, 399 bp, Zea mays
  Peptide Sequence Number=SeqID_42642
atggcccactttgccccccctctgcgtccgcccctgctcccgactcccaaggtcatgcccccacaccatcgtgagttcttgaggatggccgtccttgcttgcttcggtcgtgtatttgtccaaggagtttgccgtcagcccatcaccgatccacggggagacaattgcgcacagaaaatcaagctccgttgtccaaggagagcatgcggcgggcgtggggatgggcacggcggcagttgcaagggggcggcgggggtggagcgcatcccaggcggaggcaactgcgttgagggacgatggatacatcaagcgggaggcttagggcctgattggttgccgtatctaggcagcatggccgagcgagccaggcccgtggcagcctggctgtgcatcgcgtga

SEQ ID NO: 864 - DNA, 342 bp, Zea mays
  Peptide Sequence Number=SeqID_42643
atggtggaggcagaagtgctccttgcgctggagtacctgcacgtgattagggtggtctacagagacttgaagacagagaacgacctcgtgagagaggatggccacatcatgctctccgactttgatctttcaggcaggctacacggtcttgtcgatgctgatgagatcttccatgagcttcgaccccaagtacctgcgcccaacccgcctgcatccaacccacatgcttcatgcccaagctctttggccagaggagcccaaagagcagcagcaccgacaagaaacccaagggcggcgagcccaggtagcggcctcgtgtccaacctcgatctcgcggcgtag

SEQ ID NO: 865 - DNA, 360 bp, Zea mays
  Peptide Sequence Number=SeqID_42644
atgacttacattctcattgtcacaagcaatcatgtcactgaatgtggtgtaaaagtagttcgcctattgctcattgcagatcttcaaggacaagggtccgttgtggatgtacccaatgaactcatggatctggctatgaagggttctttaaatgatgttggaagtgtagatgtcttctcttggataagctgtttggatcttcgcagtctcgctgtgctgacaaattccaccctgtccagctcaagtgatccacataatatatctttccattacttaatacctgaaggaggcaacgataagttgtcctacttcaagctaaaagtcttgctacctgattcagatctcactgttactaggtga

SEQ ID NO: 866 - DNA, 465 bp, Zea mays
  Peptide Sequence Number=SeqID_42645
atggggaagagaagcaagggaagaacgggtctgttaagtagggggaagcattccatcggaaaaatcattaacaaggcggcaaggattagtggtttcaaacaaacaactgcagagcctaaaattgacaggaaggcagtaattcatactgaaccagatgcacctgtactggagcaccaggaaccaaaggaagttgcttccttcgaacttgcatataagcccattgatgtaaggagagtgcaacttgcatataaactctttgatgagaagatggtcggatcctgtgtgactggcaagatttaccatttaaaaactatgcccccggagaatgaggagaattctatccgacttattacacgttctgatgccacatttgagaagatcaaagatcctaagaaacagtttatgggtctagcagagccagaactgagcacctacaacccttttaagttaagcaacacaagttga

SEQ ID NO: 867 - DNA, 732 bp, Zea mays
  Peptide Sequence Number=SeqID_42646
atggctatcaacgctaatgtccttatggagatggaggttcctgaatcgtacacggagtcgctaccgaagaatgggaagtccacccttggggattcagtgtacagacttataaccgacgatcatttccaccctgaagaactgctacgctccgtggactcgtcggatgaacacagcattgttgatctgaagaacaggatcgaagcctcagcagtcatctggcagaagaaaatgacccacaacaaggacagcaaattgccctggggacatagtcacgagaagcggggaatgttcgaagggagggcggagaacgttcttctcctcatcaagcacaggtttcctggcattgcccagtcggcgctggacataagcaagatccaatgcaacaaggatgttggccttgccattttggagagctactccaggactctggagagcctggctttcacggtcatgtctcggatcgaggacgttctgagcgcggacttggccgctcgagatctcaggaacacggaatcgatgagaatcgccgccagcttagcttcggacgacaccgacaaggtcgtctcagacgctaaagccgaggtagagaagacggggagaatggagccggtttcgccggcgctatctgacttggtcggcccgaagctgacgaagatctcgccagttgcaaccaagaggttttcgtaccttgagaatctgggtggaacaagaagcccgatagcaagacactag

SEQ ID NO: 868 - DNA, 399 bp, Zea mays
  Peptide Sequence Number=SeqID_42647
atgatcacgtcgagcaaggagtggacagagcattcagagagctgcttccggagaaaggtagacgccctgtcgcgaataaaccacaagaacttcgtcaacctgctcggcttctgcgaggaggaagaaccgttcaccaggatgatggtgctcgagtacgcgccgaacgggacgctccacgagagccttcatgccgaggatttcgagcgcatcgcttggcgaggtaggatgaggatcgtcatgggactagcgtactgcgtccagcacatgcacgagctcagccctcccgtggcgcaccctgacatgcagtcgagctccgtactgctatctgaagacggcgctgcgaaggctctggtggagcgcgtaaccaacgacgaccgggagcgtagcctcgttgcttga

SEQ ID NO: 869 - DNA, 1230 bp, Zea mays
  Peptide Sequence Number=SeqID_42648
atggacgcgtcgagctccctgtccctcctcgcactggtgaccatgctcagcctcctccactccgccacgaccgacgccgccgcgggtctgccggcggcgcggacgagccaccggaggctactgctgctacaccagcaggacaccaacctcgccgcgctgcctccgcctgcacgcgtgcacgtcgtcccagtcgacgtccacgtcccttctcatggaaccggctcttttccggcagcgtctcccggtccacacgggggcaagaacggtccgagtgaggcagcgccagcgacgccggcgacggcggcggcctatctgtcgagatccatgaggtggctgtacatggttgcggttccggcggtcgccctgctggcgctcgctggactggcgtgctggcttctgtgtcgcaagagcgccgttgccaccattgggccttggaagaccgggctcagtggccagttgcagaaagcgttcgttacaggagtaccgaagctgcagcggtcagagctggaacgtgcctgcgaggacttcagcaacatcgtggtgagctacccgcactacaccgtctacaagggaactctatcgaccggcgtcgagatcgccgtggtgtccaccatgatcacgtcgagcaaggagtggacagagcattcagagagctgcttccggagaaaggtagacgccctgtcgcgaataaaccacaagaacttcgtcaacctgctcggcttctgcgaggaggaagaaccgttcaccaggatgatggtgctcgagtacgcgccgaacgggacgctccacgagagccttcatgccgaggatttcgagcgcatcgcttggcgaggtaggatgaggatcgtcatgggactagcgtactgcgtccagcacatgcacgagctcagccctcccgtggcgcaccctgacatgcagtcgagctccgtactgctatctgaagacggcgctgcgaaggctctggtggagcgcgtaaccaacgacgaccggagcgtagcctcgttgcttgatccaacgctgggtggagaccacagggaagacgagctagcggtcatcggcgaggtgatccgggcctgcatgcagagcgacccgaggcgaaggccgagcatgagggaggtcgccgccaggctgagggaggccgtgggtatctcgccggtcgctgcgacgccgaggctgtctccgctctggtgggccgagctggaggtcctttccgccgcggaagcaagctaa

SEQ ID NO: 870 - DNA, 1476 bp, Zea mays
  Peptide Sequence Number=SeqID_42649
atggacgcgcaggcgcagcctttcaccaggcgggcgctgtccaggagctgcgggtccaaggggagccggctgtccgttgaccatccgccgccgccgctggccggcggcccttcggcggacaagggggtggcagggagctcgtcctcgctcgcggtgccgcccgagccggcccgtcgtgagggcccgccctcagacgcggagaaggtgagggagaagttctccaagctactgctgggggaggacatgtccggcaccggcaaaggggtgacctctgctctcgccctttccaacgccatcactaatcttgcagcttctgtgtttggtgagcagcgccgtctgcagcccatggccgacgaccagaaatcgcggtggaagaaggaggtcgactggcttttgtccgtcgccgaccacattgttgaatttgttccttcgcagcaggtcgccgagaatgggacctccgtggagataatgataacccagcaacgtcaagatctacagatgaacatccccgcgctgcgcaagctcgatgcgatgctccttgaatacctcgacagtttcgcgggtaagcaggagttctggtatgcgtcgaaagacgcagatggaccgggcaagggcagcacgccgaggcaggacgacaaatggtggctcccgactgtcagggtccctcctgacggtctgtcaggtgcatacagtaaatggcttcagaaccagaaggacctcgttgcgcaggtgctcaaggcagcaatggctatcaacgctaatgtccttatggagatggaggttcctgaatcgtacacggagtcgctaccgaagaatgggaagtccacccttggggattcagtgtacagacttataaccgacgatcatttcgaccctgaagaactgctacgctccgtggactcgtcggatgaacacagcattgttgatctgaagaacaggatcgaagcctcagcagtcatctggcagaagaaaatgacccacaacaaggacagcaaattgccctggggacatagtcacgagaagcggggaatgttcgaagggagggcggagaacgttcttctcctcatcaagcacaggtttcctggcattgcccagtcggcgctggacataagcaagatccaatgcaacaaggatgttggccttgccattttggagagctactccaggactctggagagcctggctttcacggtcatgtctcggatcgaggacgttctgagcgcggacttggccgctcgagatctcaggaacacggaatcgatgagaatcgccgccagcttagcttcggacgacaccgacaaggtcgtctcagacgctaaagccgaggtagagaagacggggagaatggagccggtttcgccggcgctatctgacttggtcggcccgaagctgacgaagatctcgccagttgcaaccaagaggttttcgtaccttgagaatctgggtggaacaagaagcccgatagcaagacactag

SEQ ID NO: 871 - DNA, 1860 bp, Zea mays
  Peptide Sequence Number=SeqID_42650
atggggtccctaccccgcgccgcggtcttcgccgtggccctcctcctcctcgcctcctccggtgaggcgttcttcgagatcttcaacatcttccgcgcgcgtcccgagaccgactacttccagaacgccttcgagggcacgcacgagcagacggcgcccacccagacggagcaggaggagaagggcgccgcgccgggcgccgccacgggcctcaccagggtgccgcccgggggaccggccagcaaggctgcgcaggacacgatcgtgctcgccgccgacaaagacggcgggccagtcggttcgtggaccatcgtcagcgagaactctggcgtgtcggccatgcacatggccgtcatgcgccacggcaaggccgtcatgtttgacaccagcaccaccgggcggtcactcatgcggctgccccaggacaactgccgcatcgacccgcgcgccaaggaggagggcaccatggactgctgggcgcactccgtggagttcgactacaacaccggcggcctccgccctctcaagatcttgacagacacctggtgctcgtcgggcgcgttggacgcggacggcaacctggtgcagaccggcggctacttcgacggcgagaaggttgtgaggaccctcgggccgtgcgacacctgcgactggctggagcaacccaacagcttcgccgaggggagatggtacgcgacgcaggtagtgctcccggacgggcggttcatcgtgttcggcgggcgccgcgccttcagctacgagtacgtgccgtggccggggaagtcgaacgataaggccgtccggctgccgctccttcgcgagaccaccgacgacgcggagaacaacctgtacccgttcgtgaacctcctccccagcggcaacctcttcctcttcgccaacgaccggtccgtgatcttcgaccacaagtccagcaggatcgtgcgcgagctccccaagctcgacggcgggagccgtaactacccggggtcggccatgtcgacgctgctcccgctcgacctccgcaacgccagcgttggcgacccggagccagaggtggtcatctgcggcggggcgcccaagaagtcgttcaggaagggcgagaacaacacgttcctgccggcgctccgcgactgcgcccgcatcaacctgggcaggcccgacgcgcggtgggagaaagaggacatgcccgtgggccgcgtcatgggcgacatgctgatcctccccaccggcgacctgctgctgctgagcggcgccgccaagggctgctccggctggggcttcgggcggcagccggtgctgaccccggtcctgtactcgccgcggaaggcgcagggcccgcggttccgggcgctggcgtcgtcgaccatcgcgcgcatgtaccactccaccagcgccgtgctgcccgacgccacggtgctggtggccggcggcaacacgaacgcggcgtacaacttcagcggcgtggacttccccaccgaggtgcgcgtggagcggttctccccgccgtacctcggcgagggggccgccggcaaccgcccggtgttggacgcggcgtcgttgcccgcggaggggatgcagtacggctccccgctcacgttccgattctctgtgcccgccgagcccgtggcagaggccgacgtgaagaccaccatgtacgcgccgccgttcaccacgcacggctgctccatgaaccagcggctgctgatcctgcgtgtcaccgcgttcgtcgaggagggccggagctacagggtgaccgtggacgcgccgaggaagccggagctggcgccgcgagggtactacctgttgttcgtggtggcgaagggcgtgccgagcatgggtgcgtgggtgaaggtccggtga

SEQ ID NO: 872 - DNA, 540 bp, Zea mays
  Peptide Sequence Number=SeqID_42651
atggcgcagaggatcgtcttcttcgcagcagacctagatctcgcctcccgagagggatcttgtcgggaagaagagatcataggcacccttcgggaaataatagatctcacaagtcaccttgttcccgaactcgttaccgtctacctgcctccctcaaaccgcaccatcaggccggaccaccattgtcgggcagctgggagagagcgccgccgcacggggcaagtcttccccttcgccgatctgggcgagttgtcgggccgtggagcactgcgggttcgcggtgaatccgtccgtggtctcggcggggcaaatcaaggctccgtgcgtgaggaattgctcatcggcgtatcaccggcgacggaaaaccgcaccaccgcgtgggcagtgaagccatcgccccgattcaaggcgctggtgtgcgggtttggtgctccccagtcatggcgccgccgcgccgtgcgagtcctccgccgcgctctggatgctgtggcgccgcgggatatctcaggggaaggggatgagcgcctgccgtcgatctaa

SEQ ID NO: 873 - DNA, 1579 bp, Zea mays
  Peptide Sequence Number=SeqID_42652
cccgttcccctccagcactaccttgctcaccaagacactcctccgcgcctacgcgctcaactcccttccccacgccgcgctcgccgtgttcttggacgtgccgttgcgccagcggggcacattcacctactccttcctcatcaaggcgctcgccgctgcgggcctcacgccagtccgcggggcgcatgcgcacgtcgtcaagctcgggtccgccgaggacaccttcgttggaaatgcgctgatcgacgcctactccaagaaccaggggctatctgacgcgaagaaggtgttcgacgaaatgacgacacgagacgttgtgtcctggaacacggccatggccgcaatggtgcggcaaggggaggtggacgcagcaaggagcatgtttgacgagatgcccgagaaggacacggtgagctggaacacaatgctggatggctatgccaaagctggggaggcagagaaggccttcgagctgttccagcgcatgccggggaggaatgtggtgtcctggtcgactgtggtgtcagcctactgtaagaagggtgacatggagatggcgcgggttatatttgataagatgccggccaagaacttggtgacatggaccataatggtctcagcatgcgctcagaaggggcttgtggaggaagcaggcaggttgtttactgagatgatggatgctgccattgagcttgatgtaattgcagttgtgagtatactggctgcatgtgctgaatctggctcccttgcccttggtaagaggattcaccggcatgtgcgccagaggaagctgagtagatcaaccctggtatgcaatgccctgatggacatgttctgcaagtgtggatgtgttaaccgagccgactacatatttgacactgagattgttgaaaaggatttagtgtcatggaacattataattggagggtttgcaatgcatggcccaggtgaaaaggcgctggaactcttcgcacaaatgaagcagcaaggctttcaccccgatgctgtgacactcatcaatgttctcagcgcttgcacgcacatggggcttgtggaagaaggacggaggttctttgccaacatggagacagactatggcattaagcctcagatagagcattatggttgtatggtcgatcttcttggccgtggagggctcattaaggaggctgttgacatgatcaaaaggatgccctgggagcctaatgaggtcatatgggggtccttgctcagtgcatgccgactgcacaagaatgtggagtatgcagaactggcagtgaacgagctgagcaatttgcagccctcaagtgcagggaactacgctgtcttgtcgaacatctatgcagaggctgggaagtggagcgatatggcgaaggcaagggtgcagatgaaaggaacagggtctcagaaaacagctggttcaagctggatagaacttaatgaggcgttccacgaattcacagttggggacagaaagcacccagagtctgaccagatatctgatatgatagataggctgagttcgcatgttaagtttgttggctgtgttccggttggccatgaactgtttgttcagtga

SEQ ID NO: 874 - DNA, 282 bp, Zea mays
  Peptide Sequence Number=SeqID_42653
tttaagtacaacagtggacaactagcaccagagacgattactgatcaaatttatgggaacacactatcaatttttgaaataaaaacagcagacatttctgataatgtcctaccctctgttggagttgtaagctatggtgagttcaccatagaagtgatagatcatgttttagattaccttgaactaatggagtgcatggttggtgatattggagataagttcttcacaaagagagcactaaggggcgttcatgttgtaatttgtctaactgatgcatgttaa

SEQ ID NO: 875 - DNA, 309 bp, Zea mays
  Peptide Sequence Number=SeqID_42654
atggatggttatggcggctctccttacggtgcggatgggaagaagggggaaataacggcgcacggcttttattcctggagctgggggaggttcatgccgaagatcccggccgaaattcatgggaattggccgagtcaaccgcggactgtggagttggtggcgccggtgcgcgcgatttcgcgcggtctgttacagaggaacggtgaaggggatggctctgacgtgcgggggccacaggccagcgagaagccgagcgtggcacaagggctggcatgcggggcccagacatcggtgcctggaatccggtag

SEQ ID NO: 876 - DNA, 312 bp, Zea mays
  Peptide Sequence Number=SeqID_42655
atggcactcgcgccgtgcgcactgccgagggccccgtctgtcagcacacgcccgcgatatcgcgcctgcgcgtgccctccaccgctgactagcgggcccgacctccccgcggcccggtttgtcaggctctcgtcgtttccccctgttggtccgagtcgccgacccgtgggccccgcccgccagggagcgcccgcgctcgcatcccgcaccagggatacccgggccgctgacgcgtgggactcgccgtgctcaggaagtgatgctggcaacatggaggacttcgaggagttccaggaatatgacgagttctag

SEQ ID NO: 877 - DNA, 1893 bp, Zea mays
  Peptide Sequence Number=SeqID_42656
atgtgggccatccggtggacccaggggatatctatcccccacaccccgggtcgcctcggcaacgaacaccctcaccgcaaccgtcgaacccacctcgacgagtgggtgcgccgaggctaccaccgcaggcgtgggggacgctacgacagcggggaggatcggagtccctcgcccgaaccacccggtccgcaggctttcagccgagccatacgacgggcgccgttcccgactcggttccgaaccccgactactatcacaaagtactcgggggagacgagaccggaactgtggctcgcggactaccggctggcctgccacctgggtggaacggacgatgacaacctcatcatccgcaacctccccctgttcctctccgacactgctcgagcctggctggagcatttgcctcgggggcacatctccaactgggacgacctggtccaagccttcgccggcaacttccagggcacgtacgtgcaccctgggaactcctgggatctccgaagctgccgccagcagccgagagagtctctttgggactacatccggcgattctcaaagcagcgcaccgagctgccctacgtcaccgactcggatgtcatcggcgcgttcctcgccggcaccacctgtcgcgacctggtgagcaagctgggtcgcaagacccccaccagggcgagcgagctgatggacatcgccaccaagttcgccttcggccaggaggcggttgaggccatcttccggaaggataagcagccccagggccgcccatcggaagatgcccccgaggcgtcaactcagcgcggcaccaagaagaaaggcaagaagaagtcgcaagcgaaacgcgacgccgctgacgtggaccttgtcgccgccgccgagtacaagaaccctcggaaacctcccggaggtgccaatcttttcgacaagatgctcaaggagccgtgcccctatcatcaggggcccgtcaagcacacccttgaggagtgcgccatgcttcggtgccactttcacaaggtcgggccacctgcggaaggtggcagggcccgcgacgacgataagaaggaggatcacaaggcaggagagttccccgaggtccacgactgcttcatgatctatggtgggcaagtggcgaacgcctcggcttggcaccgcaagcaagagcatcgggaggtctgctcggtaaaggtggcggcgccagcctacctagactggtccgacaagcccatcaccttcgaccagggcgaccatcctgaccgcgtgccgagcccggggaaatacccgctcgttgtcgaccccgtcatcggcaacgtcaggctcaccaaggtcctcatggacggaggcagcaacctcaacatcatctacgccgagaccctcgggctcctgcggatcgatctgtcctcggtccgggcaggcgctgcgccttttcacgggatcatccccgggaagcgcgtccagccccttggacaactcaatctacccgtctgctttgggacaccctcaaacttccgaagggagaccctcacgttcgaggtggtcgggtttcgaggaacctaccacgcagtgctggggaggccatgctacgccaaattcatggccgtccccaactacacctacctcaagctcaagatgccgggccccaacggggtcatcaccgtcggccccacgtaccgacacgcgtacgaatgcgacgtggagtgcatggagtacgccgaggccctcgccgaatccgaggccctcatcgccgacctggagagcctctctaaggaggcaccagacgtgaagtgccacgctggcaacttcgagccagcggagatggttaagtccgtccctctcgaccccagcaacgacgcctccaagcagatccggatcggctccgagctcgaccccaaatag

SEQ ID NO: 878 - DNA, 261 bp, Zea mays
  Peptide Sequence Number=SeqID_42657
atggcaaggaaggaggatggggaaggggaggtcgactgcataggggggcgatacggctacctcggggcaggggctaaccaccatgcgcgccaggagctgctgctgtggggtgggggcgggcgccgcctccacctccgggagtcgtcgctgagggccacgcggggaggggaaggagggggtgcaccggggggagaagggatagagaggggagagaggggctgcgctagggattgcaaatgggaattccccgccgaggaatag

SEQ ID NO: 879 - DNA, 252 bp, Zea mays
  Peptide Sequence Number=SeqID_42658
atggagagaagctcaccagagaagacggagttcgccagagccgagaagaaaatcgtcgattggcggcgaactgatggtcggcttgatgaatcgaacgcagtggtactctcaaatttcgccaacaatgccggacttgaaactgccataaacttcgacgagcaattccagaaattgtggatcgaatatggggaaacagtttcgagatttggaaagggttcaacaagagggttcaaaccatatatatattgctag

SEQ ID NO: 880 - DNA, 420 bp, Zea mays
  Peptide Sequence Number=SeqID_42659
atgaagctgtggaaggagacttctaggagttccaagactacgacgagttctaggtgtgggttagcggcaacccccagtcggctgcctgtgaaggccgcagttatctacatttcttttccgcactttgatttatttgtcttagcaacaagtaaagatcaggatgaaggatctggcacaagtgtagagaagctccatgaaaaggaaacctttcaatggatgaaaagggaacttcagttagaaaaggcaccgtcacttggtatatgcagaaagctacaaaaggaggggagaatttatgcattaaagcttacctcgacctgggaggaaacttgccttaacggtgaaggtgttttatgtgctaaagagcttaaagctcagccttgtgatgatgatgaggtcaccttattaaagcctcgtctttag

SEQ ID NO: 881 - DNA, 144 bp, Zea mays
  Peptide Sequence Number=SeqID_42660
atgagaagaaatttgaagcctataattcaaagggtgcagttgtgtctggagacaagtcgaaggaggagttgggatgtcttccaccctgtcctagtttacattgttttactggctgattacaccatgcattccaacttatattaa

SEQ ID NO: 882 - DNA, 867 bp, Zea mays
  Peptide Sequence Number=SeqID_42661
atgacgctggacgccaactacctgcgcggcaccatggcggccgtcttctccatcctgcagcacacggcgtgcccggagaacgtggcgttccacttcctagccgccgcagcggacccggactcggactcggacccggacccgctggcggcgatccgcgccacgttcccgtaccttgacccgagcgtgcaccggttcgacccctcccgggtgcgcggccgcatctcccgctccgtgcgccacgcgctggaccagccactcaactacgcgcgcatctacctggccgacacgctcccggccgtcgtgcgccgggtcatctacctggactccgacgtggtggtggtggacgacgtgcgcaagctctggtccgtggacctgggcgagcgccacgtggtggcggcgcccgagtactgccacgccaacttcaccaagtacttcaccgacgccttctggtccgaccgggagctgcgcgccgccttccgggaccgccgcccctgctacttcaacacgggcgtgatggtcatggacgtggcgcgctggcggcggggagggtacacccggcgggtggaggagtggatggcggtgcagaagcggaagcggatctaccacctggggtcgctgcctccgttcctgctggtgctcgccggcgacatcaggcccgtggaccaccgctggaaccagcacggcctgggcggcgacaacgtcgagggcaggtgccggagcctgcacccgggccccatcagcctgctgcactggagcggcaagggcaagccctggctgcggctcgactcccggaagccctgcaccgtcgactacctctgggcgccctacgacctctacaaggccgcggccaccgcgctggaggagtag

SEQ ID NO: 883 - DNA, 1581 bp, Zea mays
  Peptide Sequence Number=SeqID_42662
atgacgacggcgtggtgttggccgtggccgtggcaagcgaccttgctcgcggccgcggcgtggctgtgcctgcacgcggccgtggcgcggctcatggaggcgctgtggtggcggccgcgccggctggagcgccacttcgcgcgccacggcgtgcgtgggccgggctaccgcttgtacctgggcagctccatcgagctcagccgcctcatggaggacgcctcctcccgccccgcgccgcgcgatgagccgcaccgagttctgccccgggtgctcgccttccaccaccattgggacaaactctacggtccaatgcatctgatctggttcgggacgacgccgcggctggtcgtgagctcgccggagctgatccgggaggtgctgctgtcgcggtcgcagcattttgaccggtacgaggcacacccgctgatccgccagttcgagggcctcggcctcagcaacatccacggcgacgagtgggcgcgccgccgcaagatcctggcgcccgccttccacgccgagaacctcaagctgctcgcgcccttcgtcgccggcaccgtgcagcggatgctggaggagcgcgtgctgctgccgggcgggcccggcgaggtggagctggacgtcgcggactggtaccggcggctgccgcaggaggtcatcaccgtcgccacgttcggccgcaacaacagcgacgagggcagcgccgtgttccggctgcaggccgagcacgccagctacgccaccgaggcgcacagcaaggtcttcttcccgggctacaggttcctgcccaccaggaggaacaggcgcgtgtggcagctggacagggagatcaggagactgctggccaagctcgtcgccggactgcagagcggcggcagcggtgatcaccgacaccagggccgggaccacgggcgcgccggcggcggcatgagggacttcatgagcttcatggccccggccatggcggcggacgagatcatcgaggaatccaagaacttcttcttcgccgggcaggagacgctcaccagtttgctcacctgggccaccgtcgcgctagccatgcaccaggaatggcaagaccgcgctcgcgaggaggtcatggaagtctgcggcagccgggccgtccccaccaaggaccacatacccaggctcaagacgctcgggatggtcatcaacgagacgctcaggctctacccgccggcggtggccatgatccggaaggcgaagcgggacgtggagctcggcggctgcgtggtgccggcgggcacggagatcatgatccccatcatggcggtacaccacgacgccggcgtgtggggcgacgacgccacggagttcgaccccgcgcgcttcgcggacgatggtgaccgccggccgcggcagcagatggcgttcttcccgttcggcggcggcgcgcgggtgtgcatcggccagtacctggcgctcatggaggccaagatcgccttggctacggtgctgcagcgctgcaagttccgcctgtcgccggcgtacgtgcacgcgccgagggtgcttatgattctcaacccacagcacggcgcgccggtcatcttccggccattgtga

SEQ ID NO: 884 - DNA, 612 bp, Zea mays
  Peptide Sequence Number=SeqID_42663
atggcgccccggtggaaggacgcggacgtcctggtgttcaacacgggacactggtggaaccacgagaggctgcagcagttaggatgctacttccaggacggcaagacgttgcggctcaacatgagcgtggaggacgcctacgagagggcgctgaacacgctgcagaaatgggtccaaaaggaagtgaacacaacaaaaacgctggtcgtcctacgaacatactcgccggcacatgtaagggcgtcaaacggtggtggaggtgggtgtgtcagggagacggcgccggagctgaacacgtcgaggatcgcgctgcaccggtggccgggcctgctcaacccgagcccggctttaattgaagcggcgaagaagcggcagctggcgacgatgcacgtcctgaacgtgaccctgatgacggcgcagcggcgggacggccacccgtcggtgtacaacgtccgcctcccgtcgccggcggcggcgcaggagcaggtgacgacgagggcggccgactgcagccactggtgcctgccaggcgtgccggacgcgtggaacgagctcctctacgctttgattctacataggactaggactacgtcattaggaggttcagactga

SEQ ID NO: 885 - DNA, 330 bp, Zea mays
  Peptide Sequence Number=SeqID_42664
atgacggtgtcgagactcatgaaggtttcacatatcatcatgcttttcttgtgtaatgcattggggaacagacttttatgtctccattttggcacacttgtggtttatgctacatttcagactccgaattttaaaaactgttgtgatgtcagcaagcgcgggctgccctttgtgctcaagttctcccaagatatcaagcgcgtgcgtgtccccacaattgagatgctcgatgccaacgtgtccaccgctgtcactgttgccttccgaatgttgctagaggagcaacaaatggtggagttcgtggaggttgttagtatgtgtcagagataa

SEQ ID NO: 886 - DNA, 141 bp, Zea mays
  Peptide Sequence Number=SeqID_42665
ggattaaatgctgttcaccatgtcgtaaaggatcgactggacaagagaatggccaactgggagaaattctgccttcgacattgcttcgatgtacctgaaggttttgtggccgatgaaaatgttcataatttagaaaagtga

SEQ ID NO: 887 - DNA, 495 bp, Zea mays
  Peptide Sequence Number=SeqID_42666
atggctacgagaggcttcgaatctgagcttggcgaggaggaaatagcacggccctggaacacgcacgttgctaatattggcgccctcggtgacagcctaaccggtgtgatttttgttgaatttgtctcaagttttgaacttcaatttctgaaactacttcaggatgagcacccctatttacatattttaaccctactttcttatcgcctaagaattgggtattacatggagcgtgccaacgacatgattctgcagggacttaagccgaggatctacaacgacctcaacaagttcggcaagcggttgatgaaggaactaccctcggtggtctggagtttgaggacgacgccaagccgggccacgggtttctcaccgttctttctagtctatggggccgaggctatcttgcccatagacttagaatacggttccccgaggacaagggcgtacgacgaccaaagcaaccagaccagccgagaagacttgctagactag

SEQ ID NO: 888 - DNA, 216 bp, Zea mays
  Peptide Sequence Number=SeqID_42667
atgtggcgtcgtctccagtgcaatgttttcaagtggtctgtcgtgattaatcgtccaagtcgggttcttaatgcagcagcacaaaggcaagctagagaagctgaagggagcaaaggtacatcagacgcagagcctaacagtaaaaaagatcaattagtgttggacatatgtgtcatatgccttgagcaagagtacaatgctgtttttgtgccgtaa

SEQ ID NO: 889 - DNA, 384 bp, Zea mays
  Peptide Sequence Number=SeqID_42668
atggcgcctagggggtccttttatagctccaccgaacctaggagtcgttggagctccatttggaaggcccctgaatgccttctgtccatgggtgcaccggactggtactgcgcagtagacgatttctttccttctatagtgaagccgactgtcgtcgaccgtcgatcacttggcacaccggatagtccggtggtgcaccggacagtccggtgcgacctggtgaccgttggccaggctgacgtgtcctacgtagattgcgcgaccaaccgttggttaggcgcgcaactggcacaccggacagtgcggtgcacaccggacaatcctgtgatttatagccatggtgcccggctgattctcgagagttgctggttcgctagctggtag

SEQ ID NO: 890 - DNA, 774 bp, Zea mays
  Peptide Sequence Number=SeqID_42669
atggagaatgaaaatataaatgaagttggagatgacgaagtggaagaggacaggatgtccacaggaatatctggtcgctccccggccgcaacgttaagctctaagagtcagaagaaagacaattatgacgggaaaaggaataggaccgaatcaaattgcccatctctggacaagttcaaggatgtacatgttcagtttcagaatgccattcagcatgccagcacaatggctgctgcaatggagctgttcaaggacgtatgtgatcgcttccaaagtgtcgtccagcatgctagcgagatggcagcagcagtggagctgttcaatgatgcacacagttgttttcagagtgctcttcagaatgtcaacacctcagcagtaattgaacagttcaaggatgctcttgatcattttcaaggtattacgcataatggcaagatggtagcggctgtggagtacggtactgaaatgcaagagaagtcaatgtgtgaagagccccagaggaaggccaaagtaatagcaattgctgaagtactgaagcttgggtttagtggaattgaagtggtaaccaccgcaagcattttcgctaaggaaccaaaccaaatggacatgtttctagcactgccagaaatctataagaaggattacatacttcagatgctcagtggtaggccatgtgatcctctgaccctttatacaatgcatctcacttcgtttaaggctgtaaaggtggacaatgtatccaatattcagccggttagtttgtattcagcatga

SEQ ID NO: 891 - DNA, 261 bp, Zea mays
  Peptide Sequence Number=SeqID_42670
atgacaattactctatatccgaagattagttcaagaaggcttgtcctctcgttatggatgacagaagcaccatttctgccgcgtgagaggctcttcaagcagcaacattacttccagaacttgaccaagcacacctacctgaaagggcgctacgacgtgatcacatctgtcgccatcccccttgcactcgctgcctccagcatgttcatgattgggcgtggagtttataacatgtctcatggggttgggaagaaagagtga

SEQ ID NO: 892 - DNA, 315 bp, Zea mays
  Peptide Sequence Number=SeqID_42671
atggaagacggcgacgagagcgcggcggcggcgctggggctgagcccgcagcttttcgtcaacgaggtccacggcatcatcgccgacatcagcgccgaggccttcgaggcagcggccgcaccaggggtcgtcggcgccgccaaggctgcagagaaggccatggatctccagcggggattaaatgctgttcaccatgtcgtaaaggatcgactggacaagagaatggccaactgggagaaattctgccttcgacattgcttcgatgtacctgaaggttttgtggccgatgaaaatgttcataatttagaaaagtga

SEQ ID NO: 893 - DNA, 222 bp, Zea mays
  Peptide Sequence Number=SeqID_42672
atggcttcgaccgccaccaaggacaatgtttacatcgacgaccactggcacgggttgcaggcgttcgatgacaccaagttgggggcgaaaagcctgggtgtgctatttcaacgagggcccatggaggcaaagcaggcgctctacaccaagaacctggctgatgtagtggtgtgggatctccgggcatggcagtgggaaaaactgctcatgtccattacttaa

SEQ ID NO: 894 - DNA, 141 bp, Zea mays
  Peptide Sequence Number=SeqID_42673
atggccatccccaactacacttaccagaagcccaaaatgtcgggccccataggcaccatcattatgggcaccatgccttcctccaaaataggaaagcgcgctcgtcgactttctccgtacagaaaagatttttttgtctag

SEQ ID NO: 895 - DNA, 234 bp, Zea mays
  Peptide Sequence Number=SeqID_42674
atggatatagatttgacagtggacatggttcctcccaaggatccttacattcaggttcgggtgctggaggacattggtgaagtatcgctcggtgaccattctgtgtcattgaccaagaactcactccatttcctaaggcgcacagacgctgaacagtttatatcacaggtaccaactttgaagtgtctcctgtacttggacctgcttcttaaactacgcatgtgtgagcagtga

SEQ ID NO: 896 - DNA, 258 bp, Zea mays
  Peptide Sequence Number=SeqID_42675
atggcacccctggccctaaggcaggatgctctcagtttaagcttttgggttgaactggtgtcatgtgcgggcgcacctacaccaggcgccatagggcccgtgacgtgcgccgagcccacgaatgcgcagctgagcacgcggcaagcacgcagggagaagcgcgcgacgcagccaccaccagtggctaagagggaaagtagggatttctttctatctgctagtcctaaattagtggagtttgtttctccaattagttag

SEQ ID NO: 897 - DNA, 711 bp, Zea mays
  Peptide Sequence Number=SeqID_42676
atgctccaaggccctcccctgcgactcgggggctgggtcccgcatgtcatgcaagccggctcagggcagaagaagccagaccgccgcgcgtgggaccgggaaagggggatacctcgaaagggatccttctccgcgaaggaaccgggctccgagccccccactactgatcaggggttcgaaggctggccctccgtagggttcaacagccgcctcagatcgcgtgggcccgacacccactactggctggcccccgaagggttcacagtcgcctcagacaccgagcgagggatgaccagggaaggacagcgccgcctgcgccactccgactgcagtgccactcgacagagtgagtctgacaggcagtcaggccttgccaaaggcaccacggcgaactccgccccgcccgaccctagggctcggactcgggctaataagacccggaagacggcgaactccgctccgcccgaccccagggctcggactcgggctaagacccggaagacggcgaactccgctccgcccgaccccagggctcggactcgggctaagacccggaagacagcgaactccgctccgcccgaccccagggctcggactcgggctaagacccggaagacggcgaactccgctccgcccgaccccagggctcggactcgggctaagacccggaagacgacgaaactccgctccgcccgaccccaggctgcctga

SEQ ID NO: 898 - DNA, 783 bp, Zea mays
  Peptide Sequence Number=SeqID_42677
atgcctctaaagaacatctgctcctctgtaagtgcccacactggtgtgccggaagggttccccatcctcaacaacattagggggaatcccttgttctggtaccgccatacttttgctaccatgaaccatcctcttctgaaatatgcgagaaaatgcaccaaattaaatgggataggatgggatgggatgcgatgtcatgggcttcatgatcctcccatcccctctctctacggtctcggcggcaagggaaaggagcaggaaatgaaaggaagcaagtcagattttggggtgatggcgatccaacaagtgaagtcgcgtggggagatggaaaatgagtgggagtgggagggagggagatgggtagataggcgagttacctctacgaacaatgctgcgctggcgctggcggtgaagcaatcggcgaaggagattgcgaatgccccgtcgcccgtcatgccgaggatggcagtgtcctcgttgctgttcgtggtggcaaagtcggagtcggaggagtggtcggtcgccgtgtcagaggtggagggcttcgacgggaggaagctgtcgaagggaagcatcagaggctggaggcgggggagggataccaaaggggaggtggtggacggtcgggggagggataccagagggaggcggtgggccgtcgtgtccggttcgccggttcccactgacgccaccgagaccgaggcgcgcccgggcaagctgatgatgagcctctcgcccgacagcctatcggggtcgtggtcggggtccaaccatacaccgtag

SEQ ID NO: 899 - DNA, 969 bp, Zea mays
  Peptide Sequence Number=SeqID_42678
atgatagacaccaagcgcagcagcaccgcaggccgcgactgcgcgcagagggcgaacgaggaggccgcgactgcgccgggtggacgaagacagcagcagcagagggtcgcgattgcgactgcagcagccgcgcgggcgcgcagaaggcgcgacagcagcagtgccgggcggccgcaactgcagcagagggcgtgcagcagccacgcgggcgcgcagaaggcgcgacagcagcagtgccgggcggccgcaactgcagcagagggcatgcagcagccgcgcgggcgcgcagaaggcgcgacagcagcagtgccgggtggccgcaactgcagcagagggcgtgcagatgaagcgacggcagcaggggcaggatcctcgacggcgggcagcagagggcgcgcggatgaagcgacggcagcaggggcaggatcctcgacggcggctggggcaggggacagccgcgtgggagaagcccgatccgcggcggcagggtatgtgcttagcgatggcaagatgaacattgaaaggctgacaaaacttgtcgagctggttgggaaacagaggcttgtgctggaccttagctgtcgaaaaaaggatggcagatatactattgtaactgacaggtggcagaagttcagtgatgtgtttgtggatgaaccggcattagaatatctcgctgccttcgcagatgagtttttggttcatggtgttgatgtggagggcaaaaggttagggattgatgaggaacttgtggaactattggggcatcattcaccaatcccagtaacttatgctgggggtgtgtcaacaatggatgacctagagaggataaagaaggcaggcaaaagtcgagtagatgtaactgttgggagtgctctagatatatttggaggagatttaccctacaaagatgttgtcctttggcacaagaagcaaagtatggttggccaagtgtcaaggaacatgtggtag

SEQ ID NO: 900 - DNA, 463 bp, Zea mays
  Peptide Sequence Number=SeqID_42679
gctgacagccgccgcccgccagctttggagagccacggtgacaggccgccagcagccatcgacggccctccctccacctcgccgtcgtccctcttcccccatctcgccgagccatcgtccctccacagcaggaccacctcaccgagccgtcgtccctccacagcaggagtgcaggaccgcatcgccgagtcgtcgtctctccacaccaggtccgaccgactcgccgtctcgccgacgtccaatccttgccctcccctgaactcaccgtgcgggcttccaggttcgccgtcgcggcgcggctacctcgctccggctcccagctcgtccggtccagctcactcgcggtcgcgaccatctccgtccacctcatccctccggcaagcagttgctaaactcatccagggtcaggtcagtaagctacgtggcactgaagctgctgctactgattcagagatgagcccag

SEQ ID NO: 901 - DNA, 237 bp, Zea mays
  Peptide Sequence Number=SeqID_42680
atgtcggtagaacacgccaagaaggagatggtcaccggcgaaaagcccgaaggctcgggaaggtgcataaaggttcaacacaaaccaataaatattcaagttagggatccaattcaaaggagcaaaagaaacgaagtgtgctgtggtctggcgcaccggactgtccggagcgccaccggacaatgtccggtgccccaggtgcctgttggggacttgctcttaaatgctatgaattaa

SEQ ID NO: 902 - DNA, 837 bp, Zea mays
  Peptide Sequence Number=SeqID_42681
ctgatgacgctgaccgatgtgtatcgtgcacgatgaggctacccatgacgattttggttcaacaatcctcgccaattcctggtgcttcggttgtaatcccactttcggagcagctagacgggcacccgcgcgccggggcgttttcccggcggcaaagccgcgcggggagccggcggacggaccagccagtcagccacctcgtcctctggcccgatgccgagcgaatcttcctcgattgcttggcatggcactctggcaggagagtggccagaacgacgcgcgtcgccgtggaccctgtccgcccggccggcaccgcgccagtggcacagcagcaccgactgcggcggcccgccaaaccaactcgttttgtgacgtggcgtcactatacgtcagtgtccgtgaggaggcgcacggggcaccaaacccgctgcagcgccattaatgcccccgacctcgggatagacgctctacttgccaagttcgggcgcggcgaggctttggcttctgcttctgacttcgcgcggagtcaggaggagcagattccacatgtacggactggggaccgggaccgaccgactcgtggacttctccagcacaggattgacatgttcgatgcacagctggcacgtgagatccacgcgctccacgccagccgcctcgccacatcacccggccaccgacacaccccgcaccgaccctccccttccgcagcagcagcagcgacggcggcggcgcggttaactgcagcgcccgagagattgagagcagaggcgccgcagctgatggacggcacgcgccttgccgtgaagccaggccagggggtccagagacgcggac

SEQ ID NO: 903 - DNA, 1686 bp, Zea mays
  Peptide Sequence Number=SeqID_42682
atggccgtgccatcattgtctttgctggtgatctcttgcgtctgcgtgatttcttgccgacgaacaagtggaccgataagaagaactaagggtggctggacactgaaagagcatagctatgaaatgttactaattgcttcaaaatatgccaacaggatgaaacactgcggaaggcagttgaagctttcaagggacagaactgaggttcaatgtttgcatcgttggcagaaggttcttaatccggaacttatcaaaggcccttggactcaagaggaagatgaaaaaatcattgaccttgtgcgcaagtatggaccaacaaaatggtctatcatcgcaaaatcattgcctggccgcataggcaagcaatgccgagagaggtggcataatcacctgaatccagaaataaggaaagatgcttggactcctgaggaggaaagggcccttattgatgctcatcaagtgtttgggaataaatgggcagaaatagcaaaagttcttccgggaaggactgataattccataaagaatcattggaacagttctttgaaaaagaagttagaagcctatagtaacagcagtgttctttcagtttcaaagctgtttgttcatgatgatttcaaggataaaatgaagcccgtggctactgatggtcatcttgatctgaaccaaatgccaagcattggttccaaagattcctctggaagagcttatcattccattgtgagcccactttcacaggcatacaatttggactcaagctgcctctctctttctataccaaccatgcagcctctaacttcacatgaaatgtcatcactaattgatggttctgctgttactttggtggtacaatgtctggaaagtgactctgtccgtgacaaggaccaagaaattgactctgttcaagagaagggtgttgaggttagctcaacacctgatcctgttggggttgaattagaatctgcaccagccaaaagaggtgcagaattatcttcaaagaacgagttgcattctacccttggtcctctttgttatcagattttaaacatggaagatgtgatcccaatcagtaccccactctgttctgaacataatggtgcacatcaaacatcacaacaatgcatgtcacccaatggttatacttctctctctccaacgattggaaaagtatcaagtcagctaactgttgattcaattttgagaatggctgctgatagctttccatgtactccttcaatactaaggaaaagaaaacgtaataaagcaacacctggttcaggtaatgagttgaagacgggtggagtaaacaatgatagcttttacactcctaatggaactaatgggaaggacactactccacggtcatttaaaactgctgcatccttctcatcgctgggttctgttgatgggctattgacttctgtatgtatcttgaacatcattaactgtgcattcctcactttaagtataattaatttattcttccatacctttcaaggaattaatggcaatcttatgaaaccggacaggactttatggaatcccttccgaactaaccagcctcatgcaaatgtcgtggttcaagctaaatccaaatcaatcaccttcagcggagataaagagcttcctgcaatggaaatgacgtacggaacacaggccaacagtttaccctgtcatctcatgtaa

SEQ ID NO: 904 - DNA, 213 bp, Zea mays
  Peptide Sequence Number=SeqID_42683
atgatgcttttagactggcatttagcaaatctggagtatgctaatgttacccctcttgctgatctctccatggccttctggggtcaggatgacccatatgaaatgtgtggagaccacgactttatttctggtggaaattctcagtttgtccgtgcatttactgatggaatcccgaaactctatggacagaatgtggaaaggatacattattag

SEQ ID NO: 905 - DNA, 258 bp, Zea mays
  Peptide Sequence Number=SeqID_42684
atgggtatgggcatggtagatgtgggtggcaacaaggctgaggttggcggtggaaggttagttgaggtggatgggagtggagcggctgtggtggtgatcggcggtgatggtatgggtggcgcggtggggtttgacaagggagcagatgcgacatcgctggtgttgtcgtcgttgcctggcatctctgataccagattgttggagctgcggcttctaagaagggctgctaggctgtcggtcataacaatatcattgtga

SEQ ID NO: 906 - DNA, 1265 bp, Zea mays
  Peptide Sequence Number=SeqID_42685
atggcggcggaccacggggagggcgtcgggcggtgcatactggtggggctgcacatggacgccgtcggcagggacctgctccagtgggcgctccaccaggaggtcaggcggggcgaccgcatcgtcgccgtgcacatttaccgcaagtccgacaagacgaacacactgaagctgatcaggacgctggacgactacctggcggaatacgaggctctctgcaaccagaaacaggtggttctcgtcggccgggtgacgccgggaagctcgatccagaaggagctggtgaaggaggccaagctctgcgccgccatggtcgtggtgcttggcgccaataagaagtactccttcggagggtcgtcctgcctggccaagtactgcgccaagaagctgccgccgacaaccaccgtcgtcgccatccaggacggcaaggccgtcttcgtccgggaggcgcccaggccgccacttgagccaaagccggtgctccgcacggtgctgcacccgagcgtggggctggagcccaaggtgatcatcccgaacccgaaccggcgcgcgcggtccatgtccatggacttggacgccccatgctgcggtcacggcgccgcggacgcgccggcaagcagaggctcgggtggccgctgctccgccgcgcgcacgccgccgccgccgcctacagctgcccctgtacagacgcccggcggcaagaatcatgagccgcggaagcagtcggtggtgcactgggtgatgagcctgccccggcggtccgcgccgtcggagtccgccgagccgcatgccggggcggggctcgagtcggagctcaaggcaatgcttggcggcagtggcgcgcggtgccggtggttccgctacgaggagctctacgactccaccaaccacttctccgcaggtgcttcctcccttttcctgatcgtcagtctcgcgcctttcaggttccagctcacacgattcctcgccgtcaccgaccgaccccgttcttggcttgtggcagagaacctgatcgggaacggagggaacagcagggtgtacaggggcagcctcgcctgcggccggcaggtggcgatcaagttgtgcaaggcgtcggcggaggcgtccaaggacttcctccgggaggtggacatcatcaccaagctgcagcaccaccggatcgtccccttgatcggcgtctgcgtggaaggccgcaacctcatctccgtttaccgctacctccccaggggcagcctcgaggacaatctacacggtacggtaccagc

SEQ ID NO: 907 - DNA, 1029 bp, Zea mays
  Peptide Sequence Number=SeqID_42686
atgtgccctaacttgttgcttgaaaatgctctcatggacatgtatgcaagctgcggctgtttgaaggatgctagggaaatctttgatttgatgagtgcccgggatgtgatatcatggacttcaatcatatctgcttatggaaagcatggtcatggaagagaggctgttgatctttttgagaagatgctaggacaggggctggaaccagactctattgccttcgttgctgttctagcagcatgcggccatgctggacttttggctgatggaaagcactactttgattccatgacatccaggtatcatatcattccaaaagcagagcactacacttgcatggtggaccttctcggccgtgctggatgtataaacgaggcatatgattttatcacgacaatgctgattgagccaaatgaaagagtctggggagccttattacaagcttgtcgaattcactccaatatggacattggactcgtggcagcagacaatctgttcagcttagtacctgaacaaacaggatactatgtgctgttatctaatatgtatgctagagctgggagatgggcagatgttacctcggtgagaagtgtcatggtgaataagggtatcaagaaatttcctggtactagtattgttgagctaggggatcaggttcacacatttcatattggtgatagatgtcacccacaatctgaaatgatctaccataaactggatgagctattgggaaaaataagggggatgggttataacccagaggtagaggctacacttcatgatgtcgaagaagaagacaaggaagaccatctttctgttcacagtgagaaattagctattgcatttctccttttgaacactagtccaggtacaattatcagggtgactatgaatctcagaacctgtagcgactgtcatcttgctgcgaagctgatttcaataatcacctgtagagagattgtcctcaaagacaccaataggatccatcatatagtacaaggagtttgctcatgtggggattattggtag

SEQ ID NO: 908 - DNA, 778 bp, Zea mays
  Peptide Sequence Number=SeqID_42687
atgatgcttttagactggcatttagcaaatctggagtatgctaatgttacccctcttgctgatctctccatggccttctgggcagatcggatgcacgcatcgcggagccacctccccacgtccggcgagtctctcctccgccttttggccgcctgccgtgcacccgcccacctcccatccctgcgcgccgcgcacgcgcggctcctcgtgctgctccacccttctcacccatccgcggcacacgctaacgtcaaactcatccaagcctacgctgcctgctccgcgctccccttggcgcacaccgtgctcgagtcctcctcccccgacggcaggagcagaaccaccaccgtctgcttcaacgtactcattcgcgcgctcaccgcctcctctctccaccgcgatgcgctcgtcctcttcgcctccatgcggccgcggggcccagcctgcttccccgaccattacacctacccgctcgcgctcaagtcgtgctcggcgtccaaggatctcctcctcggcctccagatccactccgccgtcgctaagctccgcctcgacaggaacgtctacgtggcacactccgcgatcagcatgtactcgcggtgcggccgcccggaggacgcttacagagtgttcgacggaatgccgcaccgggacgtcgtctcttggaatgctatgatcgcggggttcgcgcgtgtgggtctgttcgaccgtgctattgaggttttcaagcagtttgtggtgctgcagggttcaatgccagatgccggcaccatggcag

SEQ ID NO: 909 - DNA, 1029 bp, Zea mays
  Peptide Sequence Number=SeqID_42688
atgtgccctaacttgttgcttgaaaatgctctcatggacatgtatgcaagctgcggctgtttgaaggatgctagggaaatctttgatttgatgagtgcccgggatgtgatatcatggacttcaatcatatctgcttatggaaagcatggtcatggaagagaggctgttgatctttttgagaagatgctaggacaggggctggaaccagactctattgccttcgttgctgttctagcagcatgcagccatgctggacttttggctgatggaaagcactactttgattccatgacatccaggtatcatatcattccaaaagcagagcactacacttgcatggtggaccttctcggccgtgctggatgtataaacgaggcatatgattttatcacgacaatgctgattgagccaaatgaaagagtctggggagccttattacaagcttgtcgaattcactccaatatggacattggactcgtggcagcagacaatctgttcagcttagtacctgaacaaacaggatactatgtgctgttatctaatatgtatgctagagctgggagatgggcagatgttacctcggtgagaagtgtcatggtgaataagggtatcaagaaatttcctggtactagtattgttgagctaggggatcaggttcacacatttcatattggtgatagatgtcacccacaatctgaaatgatctaccataaactggatgagctattgggaaaaataagggggatgggttataacccagaggtagaggctacacttcatgatgtcgaagaagaagacaaggaagaccatctttctgttcacagtgagaaattagctattgcatttctccttttgaacactagtccaggtacaattatcagggtgactatgaatctcagaacctgtagcgactgtcatcttgctgcgaagctgatttcaataatcacctgtagagagattgtcctcaaagacaccaataggatccatcatatagtacaaggagtttgctcatgtggggattattggtag

SEQ ID NO: 910 - DNA, 426 bp, Zea mays
  Peptide Sequence Number=SeqID_42689
atgaaaaagcctggatgctttggcattatgtccacatacagaaatgaaaaggagttcacatttcttgcaagtgcaaggcggaagaaaggagaggccaaggggagccccaaaaaatctatgctagcctccttccgctcccgaagggtgtcaccactaccaccaacattgccacactgctctaactcacagcactgcccgcccataggcctcgcctgccggtctgcccccagccccgccacctactggcacaatctcctgacgccgcaatctgtcatgccgctgctggctggcctcagcatcgacgtgcggatgtacgacgttgacctcaccgtgctgctcgcgttcacccggaccggcttcgagctcatcgtcaacgtgcacaacgaatgcctggataccatagccgacactggcagcgcaacgtag

SEQ ID NO: 911 - DNA, 1923 bp, Zea mays
  Peptide Sequence Number=SeqID_42690
atggctcttttaagaattaccttgacaaaaagcgaaagatcctctagcgtaatgggtaaggattccgagtatcaccttcaggcaaactcttctggaagaaaggtgtctaaaactatgaacgggttacagaaagcaaaggccaagggcaaaattggaacactaatgatggttggttgcatgagtctgtcgattacttgcaagaaatgtgaacctttgtttctttcatctccaccagtatgccctctcatactctatataaacacatcaacagcatcgcaattagccacaagatcacttcgggaggcaagtgcgatttcgatctcgcagccaccttttttttgttctgttgtgtatctagtagttggaggagatatgcagtttgcacttgcattggacacgaactcaggtcctcaccagataagatcttgtgagggtgatgggattgacaggttggaaaaattaagtattgggggcagaaagcaggagaaagctttgagaaataggtgctttggtggtagagttgctgcaactacacaatgtattcttacctcagatgcttgtcctgaaactcttcattctcaaacacagtcctctaggaaaaattatgctgatgcaaaccgtgtatctgctatcattttgggcggaggcactggatctcagctctttcctctgacaagcacaagagctacgcctgctgtacctgttggaggatgttacaggcttattgatatccctatgagtaactgcttcaacagtggtataaataagatatttgtgatgagtcagttcaattctacttcgcttaaccgccatattcatcgtacataccttgaaggcgggatcaactttgctgatggatctgtacaggtattagcggctacacaaatgcctgaagagccagctggatggttccagggtacagcagactctatcagaaaatttatctgggtactcgaggattattacagtcacaaatccattgacaacattgtaatcttgagtggcgatcagctttatcggatgaattacatggaacttgtgcagaaacatgtcgaggacgatgctgatatcactatatcatgtgctcctgttgatgagagccgagcttctaaaaatgggctagtgaagattgatcatactggacgtgtacttcaattctttgaaaaaccaaagggtgctgatttgaattctatgagagttgagaccaacttcctgagctatgctatagatgatgcacagaaatatccataccttgcatcaatgggcatttatgtcttcaagaaagatgcacttttagaccttctcaagtcaaaatatattcaattacatgactttggatctgaaatcctcccaagagctgtactagatcatagtgtgcaggcatgcatttttacgggctattgggaggatgttggaacaatcaaatcattctttgatgcaaacttggccctcactgagcagccttccaagtttgatttttatgatccaaaaacacctttcttcactgcaccccgatgcttgcctccgacgcaattggacaagtgcaagatgaaagatgcatttatctcagatggttgcttactgagagaatgcaacatcgagcattctgtgattggagtctgctcacgtgtcagctctggatgtgaactcaaggactccgtgatgatgggagcggacacctatgaaactgaagaagaagcttcaaagctactgttagctgggaaggtcccagttggaataggaaggaacacaaagataaggaactgtatcattgacatgaatgctaggattgggaagaacgtggtgatcacaaacagtaagggcatccaagaggctgatcacccggaagaagggtactacataaggtctggaatcgtggtgatcttgaagaatgcaaccatcaacgatgggtctgtcatatag

SEQ ID NO: 912 - DNA, 690 bp, Zea mays
  Peptide Sequence Number=SeqID_42691
atgggatattgggatctaacaagaacagagaatggacaaccgcagcgtcagacagagcagatgggagatggcagcagaatagcagatcacgtacctcagtacctcacgacggcagatgggttggctgacggcgcgaccacagagctggcggcggtggacgcggccacggaagcgcggctgtcggctggagtggcggtgcgcagggaagcgcggctgcgcgcgtctccaagcggtgacgggctggcggcgcgcaggtgcgggctgacggctggcggcgcgcagggaagcgcggggctggcggcgcgcaggaaggtgcgcggggatggcggcgcgccgtggggagaagcggggctggcgtcgcgcagagaagttgcgcgtgtgcgccgtggggagaagcgaagtatccgcgaagtatccatatctgatacggtatccgacaccggtgcgctcttactaaagaaggatgttgtcaagttggactccattgctcagaaagtcaatacccattgtctaagctcagttggtgttatacagcactggcttactaacattcctataaaatccttgttgaagaatctgtccgatcacgaagggaagaaagggaagaaaggggagggagcacctggtgtcctggtgatgctcgtcgcctcccaaggtggcgaggaagggggcgagctcggacgcgggtag

SEQ ID NO: 913 - DNA, 1377 bp, Zea mays
  Peptide Sequence Number=SeqID_42692
atggcgtatcgcggtatcggcgtatcgcgtatccgtatcagaattttgtttttccctgacaatggtgaagctggtggatccccttcaaagaaagctgggtcaccactagtgccagcatctgcatgggcatcggtactgcatctcttctcagaggtcacaagtgaggcagaggttgcctatattttcttccccttcttgaaaatggatcatagttctgacgaagatacagaaatcagtgattctgagattgatgattatgaaggaaaaatttatgcaagactgatgtcaggagatttaaaattaaataagaatggagaaaattacatttgtcccttctgtagcagcaagaagaagaattacagtaaaagtagcctggttcaacatgcctcaggagtcagtgcagcacctaatcgggaggcaaaagaaaaagcagtccatcgcgccctcttcaaatatttgaagaatggtcttgctaaatcacctgaaccagggtcacatgcaactcctgtggagccacaacctcttcagaaccgagacgagaagtttgtgtggccctggatgggtgtcctagttaatgtgcctactgaatggaaggatgggcgccaaattggagaaagtggaaatcgtctgaaggagcaactatcacacttttgcccactgagggtcatcccgttatggacttttagaggtcatacaggaaatgctattgttgagtttggaaaggactggaatggtttcagaaatgcgcgtacctttgaaagtcactttgcggcaggaggattcggtaagaaggactggattggaaaaaagaatcaaggatccgagctctatggatggcttgcgcgggctgaagattacaattctccaggaataatagcggaccacttgagaaaaaatggcgacttgaaatctgtcaatgatcttgcaaaggaaggagcgcgtaaaaatgacaggcttgttgctaatttagctaaccaaattgaggtgaaaaataggtatttacaggaactagaatgcaaatacagtgagacaactgcatcacttgagaagatgatggggcaaagggaacaacttctccagtcatacaatgaagaaattagcaagatgcagcagctagctcgcaggcattctcagaagatcattgatgagaatcaaaagttgcgttctgaccttgaggcaaaaatgaatgatcttgatgtgagatccaagcaactcgatgagattgcagcaaaaagcgattatgacagaaggagccttgagcaggagaagcaaaagaatgctatcaaatcgagtcatcttaaattggcaacattagagcagcagaaagctgatgagaatgtgctgaagcttgagtattctatagtgtcacctaaatag

SEQ ID NO: 914 - DNA, 324 bp, Zea mays
  Peptide Sequence Number=SeqID_42693
atggccctgcctctggggctctgggccggctggtctggctggcccggctggccggtgtcagcgaggcaggcactgcacgttgtgaatcttggtcgcgtcgcgtggtggtccgcgcgtgactcgcaccggtccgtcacggggccggccgtgtccgggtccggccggggagactgcactgcgtctgcgtctgcgtctgcgtctgcgttgcacacggggtgcattcggtttcgattcacgttcgttcacgccatgctggctgctgccatcaatggatccccccgtccggagggaggaaacgtgagaggccgtttacagaccttttaa

SEQ ID NO: 915 - DNA, 2088 bp, Zea mays
  Peptide Sequence Number=SeqID_42694
atggcggcggaccacggggagggcgtcgggcggtgcatactggtggggctgcacatggacgccgtcggcagggacctgctccagtgggcgctccaccaggaggtcaggcggggcgaccgcatcgtcgccgtgcacatttaccgcaagtccgacaagacgaacacactgaagctgatcaggacgctggacgactacctggcggaatacgaggctctctgcaaccagaaacaggtggttctcgtcggccgggtgacgccgggaagctcgatccagaaggagctggtgaaggaggccaagctctgcgccgccatggtcgtggtgcttggcgccaataagaagtactccttcggagggtcgtcctgcctggccaagtactgcgccaagaagctgccgccgacaaccaccgtcgtcgccatccaggacggcaaggccgtcttcgtccgggaggcgcccaggccgccacttggagcagagccaaagccggtgctccgcacggtgctgcacccgagcgtggggctggagcccaaggtgatcatcccgaacccgaaccggcgcgcgcggtccatgtccatggacttggacgccccatgctgcggtcacggcgccgcggacgcgccggcaagcaggtgcttggacgacgccaccaaaggcgacggcggcgtggcacccgagcagaggctcgggtggccgctgctccgccgcgcgcacgccgccgccgccgcctcagctgcccctgtacagacgcccggcggcaagaatcatgagccgcggaagcagtcggtggtgcactgggtgatgagcctgccccggcggtccgcgccgtcggagtccgccgagccgcatgccggggcggggctcgagtcggagctcaaggcaatgcttggcggcagtggcgcgcggtgccggtggttccgctacgaggagctctacgactccaccaaccacttctccgcaggtgcttcctcccttttcctgatcgtcagtctcgcgcctttcaggttccagctcacacgattcctcgccgtcaccgaccgaccccgttcttggcttgtggcagagaacctgatcgggaacggagggaacagcagggtgtacaggggcagcctcgcctgcggccggcaggtggcgatcaagttgtgcaaggcgtcggcggaggcgtccaaggacttcctccgggaggtggacatcatcaccaagctgcagcaccaccggatcgtccccttgatcggcgtctgcgtggaaggccgcaacctcatctccgtttaccgctacctccccaggggcagcctcgaggacaatctacacggggaaaggtcaaagccggcgctgtcgtgggagaaccggtacaaggctgcgctggggatcgcggaggctctgagctacctgcactccggcagcccgcggccggtgatccacagggacgtcaagtcgtccaacatcctcctcgcagaagagttcgagcctcagctatccgatttcgggctggccatctgggcgccgacgaatccgacgtccgtgacgcacagcgacgtcgtcggcacattcgggtacctggcgccggagtacttcatgtacgggaaggtgaccgacagggtggacgtgtacgcgttgggcgtcgtcctgctggagctcctgtccggccggaagtccatcagcagcgacgggtcgtcacccaagggccaggagagtctcgtcatgtgggcaactccggtgcttagcagcggcaacatctgtgacctgctggacccgaggctggacgtgaagcacgacgaggtggaggtcaggcggatggcctctgccgcgtcgctctgcctccggaggtcggctcgactcaggccgccgatatcgcagatactgagcatactacgaggagaaagcgcggcgagcatcgccgaccagggcgcgacggagccggactgcgtggacgacgaggcgtaccccgccgcgaacgtgaggtcgcacctgggcctcgcgcttctcgacgtggaggactcggagtccatctccagcacggagcacagcagcggcctcagcccgttggaggagtacctgcgagaacgttggagccgatcgtccagcttcgactga

SEQ ID NO: 916 - DNA, 103 bp, Zea mays
  Peptide Sequence Number=SeqID_42695
cgttcttcatttgtccctgatgttgaggcaagtttgaagcctgtggtggggatgccatttgagaaccttacagatgtagagaaatgttacatagattatgcac

SEQ ID NO: 917 - DNA, 570 bp, Zea mays
  Peptide Sequence Number=SeqID_42696
atgaggctacccatgacgattttggttcaacaatcctcgccaattcctggtagcgctacctgtgcttcggttgtaatcccactttcggagcagctagacgggcacccgcgcgccggggcgttttcccggcggcaaagccgcgcggggagccggcggacggaccagccagtcagccacctcgtcctctggcccgatgccgagcgaatcttcctcgattgcttggcatggcactctggcaggagagtggccagaacgacgcgcgtcgccgtggaccctgtccgcccggccggcaccgcgccagtggcacagcagcaccgactgcggcggcccgccaaaccaactcgttttgtgacgtggcgtcactatacgtcagtgtccgtgaggaggcgcacggggcaccaaacccgctgcagcgccattaatgcccccgacctcgggatagacgctctacttgccaagttcgggcgcggcgaggctttggcttctgcttctgacttcgcgcggagtcaggaggagcagattccacatctcgtggacttctccagcacaggattgacatgttcgatgtaa

SEQ ID NO: 918 - DNA, 2088 bp, Zea mays
  Peptide Sequence Number=SeqID_42697
atgatgcttttagactggcatttagcaaatctggagtatgctaatgttacccctcttgctgatctctccatggccttctgggcagatcggatgcacgcatcgcggagccacctccccacgtccggcgagtctctcctccgccttttggccgcctgccgtgcacccgcccacctcccatccctgcgcgccgcgcacgcgcggctcctcgtgctgctccacccttctcacccatccgcggcacacgctaacgtcaaactcatccaagcctacgctgcctgctccgcgctccccttggcgcacaccgtgctcgagtcctcctcccccgacggcaggagcagaaccaccaccgtctgcttcaacgtactcattcgcgcgctcaccgcctcctctctccaccgcgatgcgctcgtcctcttcgcctccatgcggccgcggggcccagcctgcttccccgaccattacacctacccgctcgcgctcaagtcgtgctcggcgtccaaggatctcctcctcggcctccagatccactccgccgtcgctaagctccgcctcgacaggaacgtctacgtggcacactccgcgatcagcatgtactcgcggtgcggccgcccggaggacgcttacagagtgttcgacggaatgccgcaccgggacgtcgtctcttggaatgctatgatcgcggggttcgcgcgtgtgggtctgttcgaccgtgctattgaggttttcaagcagtttgtggtgctgcagggttcaatgccagatgccggcaccatggcaggtatcttacccgctatggggaacgccaagccagatgacattaggtttgtgaggagagtgtttgacaatatgcagtttaaggaacttatatcttggaatgctatgctcgctgtatatgctaacaatgaatttcatgttaaggcagttgagctgttcatgctgatggaaaaggatgaggttgagccagattcaattactctagcaactgttcttcctccatgtggggagctatcagcattttcagtgggaaaacgtatccacgagattatcaagcgaaaaaatatgtgccctaacttgttgcttgaaaatgctctcatggacatgtatgcaagctgcggctgtttgaaggatgctagggaaatctttgatttgatgagtgcccgggatgtgatatcatggacttcaatcatatctgcttatggaaagcatggtcatggaagagaggctgttgatctttttgagaagatgctaggacaggggctggaaccagactctattgccttcgttgctgttctagcagcatgcagccatgctggacttttggctgatggaaagcactactttgattccatgacatccaggtatcatatcattccaaaagcagagcactacacttgcatggtggaccttctcggccgtgctggatgtataaacgaggcatatgattttatcacgacaatgctgattgagccaaatgaaagagtctggggagccttattacaagcttgtcgaattcactccaatatggacattggactcgtggcagcagacaatctgttcagcttagtacctgaacaaacaggatactatgtgctgttatctaatatgtatgctagagctgggagatgggcagatgttacctcggtgagaagtgtcatggtgaataagggtatcaagaaatttcctggtactagtattgttgagctaggggatcaggttcacacatttcatattggtgatagatgtcacccacaatctgaaatgatctaccataaactggatgagctattgggaaaaataagggggatgggttataacccagaggtagaggctacacttcatgatgtcgaagaagaagacaaggaagaccatctttctgttcacagtgagaaattagctattgcatttctccttttgaacactagtccaggtacaattatcagggtgactatgaatctcagaacctgtagcgactgtcatcttgctgcgaagctgatttcaataatcacctgtagagagattgtcctcaaagacaccaataggatccatcatatagtacaaggagtttgctcatgtggggattattggtag

SEQ ID NO: 919 - DNA, 426 bp, Zea mays
  Peptide Sequence Number=SeqID_42698
atggcgccccgcatactctgtgacgacggcggctctcagcccccttacggaagcaagaggacgaaggaccagggccctcttagagaaggctggccgcgcggggacgaggacgagacaggcgctcgcttggagccgctcgctccctctcccgcgtggacgcttgtaaccccctactgcaagcgcacccgacctgggcgcgggacgaacacgaaggccgcgggattcccacctctctcacgccggtctccggccgcctcgctctcccccttcgcgctcggcctcgcgctcgacccatctgggctggggcacgcggcgacattcactcatcggctcaaggaccccccggtctcgaaacgccgacaatcgggcacccgacaaagaagcctttgccgagtgtcgcactcaacaaagtactgctctcggtaa

SEQ ID NO: 920 - DNA, 1329 bp, Zea mays
  Peptide Sequence Number=SeqID_42699
atggtcaagttgcctgcactgagaatgaagaggatgtttcatggtgatgattgtgctaatgagttcaaaatcaggaccatgaaatccatgaaagtttcacactttcatgtcagcgagttagagcagtcagctatgtcgaacttatcagataaaactcctcaagatgagccagacccaaccattcaacttgctgaccaggatattagggtaacagaagcttctggcttgcatgatctgattggaggaaaatccatgctcgaggatttaacatccgaagtgatagattcaccaaattcagagggtgactcctctgctaattatgatgacaacaaatctgtgttacatgcagtgaattatgttggcaaagagtttgcagatgatggtgtagattcttcattccagaatttctgttttagtgatcatgaggcgaactggggtttgaatgagtgttgcagactgatggatatttatagtccagatgacgatttctcttatttgcttgatagtccacctgatcttctgcctagttatactggattttgtgatgaatttgtatcaatagatgcattgatgaatatgagtagcagatgtggaatcttcccacttattgagagcgctacggaagccagtgttgataataagccatgctcatctgaggtggatttgtgctttaataattctgaggtattagagtggctcaaccctaatctattggagggggatttaccagatcttgttgattttgctgagttaaattcaaatgctacccctgcaaaaaaagagcaatggaccaggaatgttactctcgtgcttgatttggatgaaacccttgttcattcaactatgaagcattgtgatgacgctgatttcacattttctatgttctatgatatgaaagagcatgttgtatacgtgaaaaagagaccgcatgtccatatgttcctccaaaggatggttgaaatgtttgaggtagtgatatttactgccagtcaaagtgtttatgcagaccagttgcttgacatgctggatccagagaagaaacttttctccaagcgtttcttccgggaatcgtgtttgatcacagacagcggctacagaaaagatctgactgttgttggagtcgaccttgccaaggttgccataattgacaacactccacaggtttttgagctgcaagtgaacaatggtataccaatagagagttggtatagcaaccccttggacgaggcgttacctcagttgatcccattcttggagaccctcgctgtagcagatgatgtccggcctatcattgccaagaagtttggcaatataatagataatcgctaa

SEQ ID NO: 921 - DNA, 831 bp, Zea mays
  Peptide Sequence Number=SeqID_42700
atggagggttctcggatggcgtcagccaccctcaccaccgacgacctcctcaagcgggttaagggcgcggggctatgggtttaccgaaccgccctgcccccgatcccgaaagatgtgactggttgggcgacatgtaggttggctatagagcaacaaaagaagaaggacaaggagaagaagcggatccacgagaaaagggcagctcacgatgcccttgagaggcaccaccgagcgcaggagagggaggggctaccgctagaggcatccccaagcacgatcggcggcggcagcggcgacgacgacgaggggatggaggtctggcttggcttcaaccccaaggttaggctctggtccgagccatccttagtgggcccgtccattggtccggacgtgtcggtgctcaggcttgaggtgtctgcacctctacccaagacacaaacgtctgtcgagacagggtctatccccacaaccgaggaggaggcggcagagcgacctgtcgatccactctcggcgccaaccatgggggccaagtgcacgaggagcctaggaccaagaatgctaggcctgccccggcctagcctgaagcgcaaagcgggtgcgctgatccttacccccgcggaggtcgtgaagtgcttagcctcattacctttgaagtgcttagcctcacacgagcttcaagaggtgaccaacattcggttcttgagggctattcgaaatagttcttgcataggtggtcaaagcaaaggtggtgtgaagtggcatgaagtgaaagcagattcagatgaatacattgtgaaagcaatgcacactaacacgctacaatgtttttaa

SEQ ID NO: 922 - DNA, 417 bp, Zea mays
  Peptide Sequence Number=SeqID_42701
atgccgagcgtgtgctgccgtgtcacgcacgcacgcgcggcgcgcgggccatacttgatgagagtggccagaacgacgcgcgtcgccgtggaccctgtccgcccggccggcaccgcgccagtggcacagcagcaccgactgcggcggcccgccaaaccaactcgttttgtgacgtggcgtcactatacgtcagtgtccgtgaggaggcgcacggggcaccaaacccgctgcagcgccattaatgcccccgacctcgggatagacgctctacttgccaagttcgggcgcggcgaggctttggcttctgcttctgacttcgcgcggagtcaggaggagcagattccacatgtacggactggggaccgggaccgaccgagtgagttcggattccagtttggtttgtttttgtttgtttga

SEQ ID NO: 923 - DNA, 162 bp, Zea mays
  Peptide Sequence Number=SeqID_42702
atggtcgagccacgggaacacctacgcctccaggatatgatttccccactcaccacccttcgcctaagaagtgcgcccacctacaccccacgccaagctgtcaggtgcgtccccccgcccatgcatcaggccaacctctctcgcgtgggagccaagacgtaa

SEQ ID NO: 924 - DNA, 609 bp, Zea mays
  Peptide Sequence Number=SeqID_42703
atggcaactggtggctgggaggctgctccggtcgacagacctcgcctcgtcaagacgccgtcggggaacccgctgccccggcggaggggccaggtcaaggagaggatcgtcagggacattgcggaggccctggccacggcggcggccctcgcctgcggcgacaggacgggcgtgggcaagagaggcgaaggagggagggcggccgccgcgaccgcgtcgccgtcacccgagacaagcaggttccagaaccctcctcgcggctcacgccacacctcagtccgtcgagaccgccccttgcgctcccggccgttcccagacttcgccctcctccgcctccaatgtcggcactgcgtcccctcctcccttgcgcttcttcaacgccacccaccacttcgtggaccttccaccgcaccctactcctccatgaccagtcccgccgcctactcctgcctcgcgcttcttcgacgccaagcaccaatagaagaagtaacaggtgcccttccctccgtcacccacgacgtcgacgccgacgatgtcggcgacccccccaacgtcctcatcgagatacagagatctatcggctgcttgagcattctagacgccacatga

SEQ ID NO: 925 - DNA, 216 bp, Zea mays
  Peptide Sequence Number=SeqID_42704
atggagcacgggtacccctgcaacggctgcggcaaggagaagcggccgccgctcaagaggggccagctcaagctgcagatcgccaggaccctgctcggcagcctcgcggcgccgaaagagcgtgttgccgtcaggttttgctctgttctttctccttccgcaggcctcttgctcaccttcttcagccgcctctcttggttggctggctcgtactag

SEQ ID NO: 926 - DNA, 222 bp, Zea mays
  Peptide Sequence Number=SeqID_42705
atggggtcggttgtgaagacggatcacttcagactgtctccagtggatatgagtggggatgaaataggggttatgattataggtagccatgcagcccaaggctcggtagcccggcccgaggcccgattttttggcccgacccgaacctggcacggctcggagggagtcatgctcaggccggcacgacacgatccagcaggccgtgcctgtgctggcacctag

SEQ ID NO: 927 - DNA, 3027 bp, Zea mays
  Peptide Sequence Number=SeqID_42706
ccaacaattcctccgccgacgccgaggccgagcaggcgccagcatttcgtgcgctcgaaaggagccccgccgttcgtgccccgaggaccaatggcggcggcgtgggcccgcgcgaagcgcgcactcgccaccggcctctgcgtcggcgtgcccgcgcgccagctggccatcgaggacgcgccgccggtggtggaggcgccgtcttcggtggccgaggacaagctggagtccgcccccgtgtccgtgcgtcggctgacgagctttgggagccggagctcgcagcagggcatcttatttgaccctcaactgctaggaaaagtaaaacttgcaactagaggatattccgatatgtactcgtggggcaaacagaagacatgtgccatttgccttggtggcatgagatcagggcagggtcatgccttgttcactgctgaatgctcccacaagttccattttcattgcatttcttcaaatatcaagcatggcaacctcatctgcccgatatgccgtgctaagtggaaagaactcccaggcgctcaacctgcagatgccagttatggacgagctagagttaacccattaaattggccccaggatgaagggcacatggctgttgtccgcaggctttcccatacatacagcggaaacctgcaggagcaccttcctttcttccgtactctggaggcaggcgttttcaatgatgatgagcacatagatcttcagtctgataatatcagtgaacataatgcagtcgctggttcagttaaaatcaaggcatattcagaagttccagctattgaacaatcaacgaccaaggagatctttgctatcttgatccatctcagggctccaaaatcttcacactcagcgagctcccgtgcacctcttgacctcgtcaccgtgcttgatgtcagtggtagcatggcagggaccaaaattgcacttctgaagaatgccatgagctttgtcatccaaacccttggacccaacgaccgcctgtctgtcgttgctttctcatctacagcacgcagactcttccctcttcggcgaatgacattatctggcaggcagcaagcattgcaagctgtcagttcccttgttgcaagtggtggcacaaacattgctgatgggctaaagaaggctgctaaagtgattgaggaccgtcggttgaagaattctgtttgcagtatcattcttctctctgacggtcaagacacatatacactcccttctgacaggaatctgcaagattacagtgccgttgtcccaccttcaatccttcctggaacatgccagcatgtacagatccacacctttggtttcggctcagatcatgattctgctgccatgcatgctattgctgagatctccagtggcacattttcattcatcgatgctgaaggctcaatccaagatggatttgcccagtgtattggtggccttcttagtgttgtggttaaggaggtgaggttgggcattgagtgtgtcgacaatggtgtgctactgacttccatcaagtctggcgggtatacaagtcaagttgctgaagatggacgcggcggttcagttgatatcggtgatctgtatgcagatgaagagagggggtttctggtcactctacatgtcccagctgcacagggacagactgtgctgatcaaaccaagctgcatgtatcatgacgctatcactacggagaacatcgaagtacatggtgaggaagtaaggattcagcgccctgaacatcgcgtggactgcaaaatgtctcctgaggttgagcgtgagtggcaccgtgttcaggccacagaggacatgtctgccgcacgggctgcagcggaggtaggtgctttctctcaggccgtggcaatcctggaagcccgtaggaggatactggaagcacaagcagcacaatcttcagacgaccagttcctggcattgatggcggagctgagggagatgcagcagagagtggagaaccggcggaggtacgaggagtcaggcagagctttcatgctggcaggcctgagctcacactcatggcagagagcaactgcacgaggggactcaacagagatcactaccactattcatacctaccagacgccatccatggttgacatgctgcagcgctctcagatcctcgtgccacccattgctgacatgctgaacagctccccaactgtggcgcctccaaatagattcagccggccatccagacagtgggatgagtcggttgaggcggaaaaccatgtagacagtgggatcaacaagtccattgatcatattgaacacgcaaaacccaagattcatgcaaaggggggttcgccgtggcgcggtccattgccaaaaccaagagtgtctaagatgactttcgcggcggcgttggacaaagcgatccatgtcgatccgtgttctcgtgaaagaagcaagtctgcatcgcggtttctcgagcgagttcatccatttagcgcgttcaccggcggagttgtcagagatacgacacagtctctttcaaatttcgaaaatcagaaggttcgaagctgtaagaacgttgggccgttttcgccttttctgaggcgtgattactggagaagcgcgttcactggcgattgtgttggagatacgaaggaggctctctcaaaattcgaaaaccaaaaggttgggcactataagaatattgggccgaaaccaggggcacaaagcctcaaactaggcatggaatgggatgagaagtaccctttatccacattggtagcccttagtagagatgtctcggatcatactcctcttcttttgcacatgggtgaaacgagaaagggtaatcagaatagtcctttcaaattggagttaggatggttgttgcgggatggtttttatgatatggtgaaggtgatctggacaaataagaatgggggcagttcgccaatggagaaatggtgggcaaagataagacatgttagtcagcaccttaggggttggagagaagaagatgagtggaaaatacaaaaaggaaaagaaggtaatccttga

SEQ ID NO: 928 - DNA, 2277 bp, Zea mays
  Peptide Sequence Number=SeqID_42707
atggctgaaaatgctcaacgtctaatgtccgggaatccgtcacttggacagcggatcacggtcatcaggggcaaggtcgaggaagtagagcttccagaaaaagctgacatattgatttctgagcctatgggaacccttttggttaatgaaaggatgctagagtcctatgtcatagctagagacagattccttgctccagatggtaaaatgtttccaacaacaggaagaggagattgtgagcagatcagcagggaaggggagaaggatgagagcagggacagtggcagcaaagggaggcagtggcgagtgattcacatggctccattttctgatgaatacctttatgttgaaatagcaaacaaggctctcttttggcagcagcacaatttttttggtgttgatcttacacctttacatggttcagcattccagggatatttttcacagcctgttgtggatgcatttgacccaagattattaatttctccaccaatatatcatacacttgattttactagcatgaaggaagaggagctttacgagattgatatccctctgagttttgtagcatctgttggcactagagtacatggattggcttgttggtttgatgtgttgttcaatgggagcactgtgcaaaggtggcttaccactgctccaggatctcctaccactcactggtaccaactgcgatgtgtgctttcacagccattgtatgtgatggccggccaagaaataactggccgccttcatctcgtagcccatagtgctcaaagctacacaatatacttgacaatgtcagctaaaatgtggggtgtgggtgcggagcaaggcggtatcctacaaacatctacaggaaaacttgaactcaaggagccgtactacaggttgtctcagccgcaatcctacatgttgccacaagatcaacagcagcagcagcaattgtcatctttgcagccacacagcagctggctgaagcctggatccgatctgaatctgccgggcgttcgttcagttggaaaacagcaggaatcctacacacgtgagtcccgtgcgggacggtctgctagatcgcggagtgcatcaaacggtgctgccggcaatggaatatcccgtcccagccagcctgcgtgcttccaccaactttggaagcgatttccttgcgtaccatgccgtctcgtcgttgccaagaagctttcaagtacgggcagtatagatctgtcaactgtcgtacccaaatctgtcgatcgaacgtgtcgacaaatcttctgttgcttaacctcaaagcaaaattgcgaaggttgccatgccagcagcttcctgccaacggtcgtacctaaaactgtcgatgacatctcgtatgtatgcagtctcatcaaaattgtgctgcattcccacccgaaatttctagaacctggtttcgacgctcgacatcatcgtttatggcccaccagcggcagtgccctccaatttgaaccactagcacacagatcgatccgcgctattcgagaaaaaaagagacacaggccggttacgccgttggcgacgtgcccatcacggagcggctacgtgtcggtcccgctccagagtgttcttgcacagcctggacggtggcggctgcccaggcccgcggtgtgcctcgctgggctctacggcctcgccaaggaccacgccggcccgctccgccccagcgttgacgccgtcgagtctgccgtcaagggcgtcgttagccccgtctacgaccgcttcggcggcctgccgctcgacgtcctcgccttcgtcgaccgcaaggtggacgacacggtgcacgaggtggacaagcacctcccgggcgcgctgaaggcggcgtcggcgcatgtctacgcggtggttcggggcgtgccggaggtggcgcgcgagctggcggccgaggcgcagcggtcgggcgtgaggggcgcagcccgtgcggcgctcgcgatgacggagccggtggcgcgggacgtgtacggccgcgtggagcccgtggccaaggacctctacgtgcggtacgagcccgcggcggagcacctggccgtctccgcctggcgctcgctgaacggcctgccggtgttcccgcacgtcgcggagatcgtcgtgcccaccgccgcgcactgggccgacaagtacaacagggcggtcgcagccgccgcggagcacggctacgcgggggccaagtacctccccgccatccccaccgaacgcatcgccaaggtgttttcgtcggcgccagaggccgagccgctggcagagggccagtag

SEQ ID NO: 929 - DNA, 4311 bp, Zea mays
  Peptide Sequence Number=SeqID_42708
atggacggcgacgacgaagcagatccccctatttctcatgtgacttcacatgtaaccgatacttgggcttttactcctcggagaaaattttcaattgtgactacccacaaaaacgctgcactggcacgacaacaacgtaaaagagcgttagaccagtggcgattactcacccgaggtcctgccaaaagtattagaacaccaatgaattgtggttattttcctgaagagtacatagctgcccttaaagcgtcatatcgaggtcgatcataccatggaacactagattatgaatgtgaacactgtcatgctttattctggtatggtgagaagtcttctataaatcgcgaaactggaaggcctcagtatcatacctgctgtaagagtgggaaaatttatataccttcgtttagagatcggcctgaaccactggcttccttggcaatcttcaatggtgattctaggtccaagaaattcatgcgtagtatcaggcaatataactgtctttttgctttcacatcaatgggtgcacgaattgataactctattaatgatggtcgaggaccgccgctgttcaagatatgtggtcaagtacatcatcgtgttggttctcttttaccccttgatgactctgctccacaatttcttcaactttatgtgtacgacactgctaacgaagttagtaatagattgaaatgtcttgatgctgatcatagacccgttgaatcgctcgatccatcaattgtacatgatttgattagcatgttagaccaacataatccatttgctaagaaatttagaatggcaagagatcggttggctgaccacaataatgaagatttcatcatcagaatcgttggcgcaaaaaagggtgatccagttcaatacaacttaccaactactgatgaacttgcaatgttggttgttggtgacttctctttagatacgtacaaacgtgatatcatcattgaaacacataatagagagcttaaaagaatctcctcattacatccagcttacatgcctctccaatatcctcttttatttccttatggtgaacgtggattccagctcggtattcattacactaatagaaatcctattggggcaaccacaggacgccatatgacaatgcaagaatactattgctatcaattccattataggaagaatcagccaaatccgtacctatgctatggtctgttatcaagccaagccaaagttgatgcacgtgctgctattgaggagagtagacttcactacattgctcaaaatcaaagaaacttacgaatggaaagtatccaaggaatagcagatgctgttagccgtggatgcataaatggcgatgaaatgggaaaaagagttgttcttccagcatcgcacattggaggacgacgctatatgattcaaaattaccatgacggtctagcaatttgtggaaagtatggtcctcctgacttttttgttacatttacatgtaacccttcatggcctgaaattactgaaagtatctttcagcatggtcaaacagctcctgacagatcagactgttacataccgttgaattccaaaaacgtggcttgcctcatgcacacattatattttgggtctccactgacacttctcaaccaacaccctgagctaattgactcatttataactgctgagataccagatccagaaactgatccgctaggaagaagaaataatggacgtgttgttttcaaaaataagattgcactggataataggtacattgtgccttcaaatttgttgttattgaaaaaatttggtgcacatacaaatgttgaatggtgcaacaaaaccatctttataaaataccttttcaaatatgtgaccaaaggaccagatcgtagcaaaatgtttcttcagaggattcagagcggcgaagatgttccttatgatgaagaaactgatgcaagaaatgaaatcaaagaatacattgacagtagatacctttgtgacattgattcttgctggcgagtatttgggtttgagatacatagacattacccagctgttgaaagaatgcatgttcatttaccaaatgaaaattatataacatataatacttcagctaacatggcaggcatattgtcacaatcatttctcaggaaaaccatgcttactgaatggtttaccactaatcaacaacattctaatgctagaaatcttacatactctcaattcccatcaaaatggagatgggacgacaagaccagaacttggcatcctagacaaacaagagaaggcaagataggacgtctatactatgtgcatcccctggcaggtgacaagtattaccttagaatgcttttgttagttgtcaaaggtgcacgcagttatgaggaggttcggacctacaacaatattgtctataataccttcaaagaagcatgcaaagcacgtgggctccttggtgatgatcaagaatggttggctgctttcaatgaagctgctacttgggcaacgtcttctcagctaagacaactttttgtcacaatgcttctttattgtcaggtagccgatgagtatacactttttgggaaagtttggaaatacctagctgatgacatcgaatataatattcgtaaggcacttaaccagactaattatcagataccagaagatgatctcaagaattatttactagataagctagcagttttatttaacaagagtggcggcaacattcatgacttcaacctcccaaggaaaaccgacaacctagaaggtagaaatgtcaatcatttactcaaagaagagttgtcatatgatgcaaacagcctttcatatgaatctgaagtcctaatttatcaattaaacacagaacaaatgaaagcctttaacactattgtggaaaatgtgctatctggacagcctggcttctactttgtttcggggtatggtgggactggaaaaaccttcctttggaataccatcgtagcatatctgcgttcgcagaaaaaggttgttcttacagttgcttcttcaggggttgccgcattactccttccaggaggtcgtacagcacattcccgatttaaaataccatgtgatttaaatgaaaccactacttgcaatatcaagagaggaactatgctagctgaactgattgaagttgcttcattaatcatttgggacgaggcattcatgactcatagaatagcttttgaagctctagaccgaacactgcgtgatttactttcacctcgatgtcctgtagctgaaaaaacaccttttggtggaaaggtagttgttttgggaggtgatgctagacagatactcccagttattgaaggtggtacacaatcacaaattatagacgcagcaataactagctctcctctatggacttctattactgtcttatacttgactgaaaatatgagattaaaatcacctcatttagattctgcaagtaagaatgaaattgcttcctttagcaaatggctcttggacataggtgatggcaaagtaccagcacgagcaaaagactctgaaacagaaaaatattggataaaaattccgcaagacattttactaacacctcaaaataatagcctgcaatgcattgtagactccgcgtatccagatctaacagataattatgcagacatacaatacctgaaagaacgtgcaatactttctccaacgaatgatgttatagacacagtcaacaacttcgttgtcactctaatacctggtgatccaagggaatatcttagctgtgatagcatagtaaaaggaccagacagcaacgattcatatgacttattatatcctgttgaattcctcaattcaattactggcaacaatttccctcaacatcagttaatattaaaaaaaggagttccaattatgcttttgcgcaacattaaccaatccgaaggcctttgcaatggaacaaggttaatcattgttactctaggagatctgattattgaagctaagatcatgactggaaaatataaggacaaaactgtgttgattccacgtgtttgtttaactttaaaaacactgaagctaccattcactctagaaagaaggcagtatcccattaaagtttgctacgccatgacaataaacaagagccaaggacaaactttatccagtgttgctgtgtacttgaagaaacctgtttttacacatgggcaactatatgttgctttctctagagttacttcaaaaaaaggactcagagtgctgattgaagatgatgatggcaaatcaacagatgaaaccaaaaatattgtttacagggaaatcttttcccggtttcctgcgcattaa

SEQ ID NO: 930 - DNA, 201 bp, Zea mays
  Peptide Sequence Number=SeqID_42709
atggaggtagagaacttaagggaggcaagagaacctggagaacgatggatggtgggggagctgatgtcgtctggtgatggcggagttcttgatgtggttgcgtttcctctctctgtaaatgacatcggatcacaatctaagggttggaaatatagtagtgacgtggatagcacggttgcgcggttatgttcagctggttaa

SEQ ID NO: 931 - DNA, 192 bp, Zea mays
  Peptide Sequence Number=SeqID_42710
atgaagtactcgctgccgaagcagacgagcacgacggaggccggggtctgggcgtcgagccagcgcatcacgcggtctgactcggactccgacgacgtgccgcctccggcggcggcggcggcgggcgtcggcgtcgacgagcagcgggccgacggggaccatctccttgttgccgcccacgagctcggacag

SEQ ID NO: 932 - DNA, 293 bp, Zea mays
  Peptide Sequence Number=SeqID_42711
atggcgcagatggagcgcgagcacctcagcgtggtcatgttcccgtggctcgcgcacggccacgtcaccccgtacctggagctggccaggcgcctcacctccgccaacgacgccgacatcgacgtgaccgtccacctcgtctccacgcccgtcaacctgtcggcgatcgcgcggcaccagacccctcggatccgcttcgcggagctccacctcccggcggcgccggacctgccgcccgagctgcacaccaccaagcacctgcccgcgcgcctcatgccggcgctcaagcgcgc

SEQ ID NO: 933 - DNA, 141 bp, Zea mays
  Peptide Sequence Number=SeqID_42712
atggcggcctcgcgacgtggcctggtcgtcgctgactcgtggccacgtaggggggcgcgtgtcacgctctgccgtcagccgtcaccttggagaggggaggagaagagcgctccgcctgcccaagaggtgtccgaatcttaa

SEQ ID NO: 934 - DNA, 753 bp, Zea mays
  Peptide Sequence Number=SeqID_42713
atgccgcagggagaccacatcgagcttcaccagaagcgccatggcaagcgcctggaccacgaggagcgcaagcgcaagcgcgaggcgcgcgagttgattggtgctaagggcaagaggttcgccaagaaacgctatgctgagaaggcgcagatgaagaagaccctgaaaatgcacgatgaatcaaataagcgacagaaggttgatgatgatgtccaagagggtgctcttcctccgtatctactggatcgtgatcagacacagcgtgctaaggtactcagcaacacaatcaagcaaaagaggaaggaaaaggctggcaaatgggatgttccgctgccaaaggtcagacctgttgctgaagaagaaatgttcaaggtgctacgaactggcaagcgaaaaaccaagcagtggaagagaatggttaccaaagccacttttgttggagctggatttacaaggaaaccaccaaagtatgagcggttcattcgaccaactggtctgcgtttcaccaaagctcatgtgactcacccagaactgaagtgcactttcaaccttgacataatttctgtgaagaaaaacccaaatggtccgatgtacacttctcttggtgttatgacaaggggaacaatcattgaggtaaatgtcagtgagcttggtctggtaactcccgctggaaaagttgtttgggggaaatatgctcaagttacaaacaacccggagaatgatgggtgtatcaatgctgttttgctagtgtag

SEQ ID NO: 935 - DNA, 246 bp, Zea mays
  Peptide Sequence Number=SeqID_42714
atggccgacccgggcgcctccgtcaacatcgctgcgcgccaccacctcgcgtcgcagctcgcgaggcagccgccagtgacgcacacgggctggtggggaggggcgcgttcgtaccaccatgggaggggcgtggggcgtggcatcaagggtgagggaggggcgtcgaggaggcggacggcaacaagcccacacatccaacaccctaccagtgtggatgacattgtgctgcctcagaaaatgtactaa

SEQ ID NO: 936 - DNA, 267 bp, Zea mays
  Peptide Sequence Number=SeqID_42715
atgggggccctcaaaatcataggacgggggctggaagcaggcaacactgtgaggagcttaagggggacatatctgagaggaaagatccccatcgacgaacagaccgtcttcttctatgaaggaggcgatgaatatagaggagagtcgtcgagcttggaggggactgaagaacaagggtacacgggaggggaggcacagccgcagttgagtgagaaatttgctattatggggatcttcacgtgcggcttcgacgttttggaggcgtag

SEQ ID NO: 937 - DNA, 594 bp, Zea mays
  Peptide Sequence Number=SeqID_42716
atggacggatggatggccgtcagtcacgcgcccgcccgcccagcccaggaggacactgcatgcggccgcatgcattcaggcggcgtcttgtctgtgtcgccgtcgtaccggcagccgcacgagcctgggcgtactgtacgtggagcaaggctgtggggtagattgttttcttcctcgccccggtctgcccagccagttgctgctctccgcctccaatggtgcgatgcctttgttagtctggtcgcgagggcctctgtctatgactgggcgagcactaggaaatttgcgccgtgggagcggtggatggacctccgggaggcgtccgtctgccacgcccacgacgagctgctggcgctgagctccgccgcggcggcagccacggcggccgaggacttcctccggtggcagttccccgagtccccgcgcgggaaagggtggtggtcggcggcgcggcagctcgtggaagacgcctggcgcagcctcggcgaggccaagaacgcggcgaggctcatggacaacttcgtgctctgcgagttcactacaagaaaaaaggcaaggagtgtcggccaaaaccccacactcttactgaaataa

SEQ ID NO: 938 - DNA, 426 bp, Zea mays
  Peptide Sequence Number=SeqID_42717
atggcgtcaggggaagcagagccgctgcagtacacggtgagcgagcacgaccgcttcttctccgtgcgtctctgcgtttcccttaccgaccgaccgcctgacgtcctctcttctgctcttcccgtgccgccagaccaccgcgctgcgggtgtccatccactgcgagggctgcaggaagaaggtcaagaaggtgctccacagcatcgaaggcgtgtacaaggtgacggtggacgcggcgcagcacaaggtgaccgtcacaggcagcgtggaagcggccgcgctcgtccggcggctgcacaaggccggcaagcaggcggcgccgtggccttcgccggcgccggcaaacgtcgaggccaacaaggccgcgcctgctgcaccccgggggagggcggcgccaaggaggccgcggacacgaaaggcggctga

SEQ ID NO: 939 - DNA, 306 bp, Zea mays
  Peptide Sequence Number=SeqID_42718
atggtggtggtattcttccacttgcaagctgcaaacggctttctcttcattgctatgaatgaactcgtggaagaaattctcgtgaaatttggagcgcgggtatgggtacggcggcttgtgactgaaattttgaagaagctgactgaaaagctgaacgtttggcagttcgcagcagcttttggtggccagaagctgccagaagccgaaacaaacatgcacaacaggtgctggggcctgcgggtgtggcttctccgcgcggtactgcgcaaggattgcgaatcccgtttccgtctaagaatgaaatga

SEQ ID NO: 940 - DNA, 801 bp, Zea mays
  Peptide Sequence Number=SeqID_42719
atggtgacccggaagacgagggtgagagctagtgcgaagccgcccgatcccgcattcgagtcccgctccctggtcccgcataccagtcccgctcccctatcgcaccgtgaaaccgtctcgacccgaaaccgtcgtgcctcggcctccccttcaccgatttcgtgcaaaagggaactccgcccccaccgcccctaccttgattttgccgccacaccttccttcgacactggagatgagatgagaggattcgttattctggcgctccttgcctccgccgcctcctcctccttcggcgcggcggccacgacttcagagggcggtggaggtggacccgtcgtggcgacgtggaagcggcaggccatcttctccgaccccaacaacctcaccgccgattgggtaagcccgagggtgtacaactacacgggcgtctactgtgtgccgctcccctccagccccgaccgccgcggcgcgctcgccgtcgccgaggtcaacctcaaccatggcgacatcgcgggcttcctcccgtcagagctcggcctcctcgccgacctcgccctgctccacctcaactccaaccaattctgcggcgtcctcccccgcgcgctccgccgcctccgcctcctccacgagctcgacctcagcaacaaccacttcgtcggcccgttcccggacgtcgtcctggacctcccggcgctgtgcttcctggacctccgcttcaacgacttcaagggcgtcgtcccgcctcgcctcttcgaccgcccactcgacgccatcttcctcaaccacaaccgcctaatctag

SEQ ID NO: 941 - DNA, 1389 bp, Zea mays
  Peptide Sequence Number=SeqID_42720
atgacgcagcagacacgacacgagcctcggcgcggccggcccgcgccgcgcgcgtgctcgctcttccggggaacgagcccgtgcgagtgcgatacgtatcgggctcgggctgcctcccgcctcctgcatggggctggttgttcggcggaaaccgcgaaggggctgggcacttgggcagccaccagtgaccagccgcagggcaatagcaaacaggcggagcgggcggcgaaagcgaaaccgtgggtctcgcggcgaaagcccgtggtccgggcgccctgctggacgcaggtcacgcagcacgtggggcaccgggagcccaggaggcagtgggcagggcgcccgttgcctcgagaacgaaagggcaaggtccctgtcagcggcacccggctcgggcgcacggctagtactagtagcgacgcccccacggcagcgccaagggccagccagagccagcccagacacatgcggcgggcagctcaacaccaccgcaccgcccccgccccgcctctcctcgccgccgacatggccgcgtacatccgcctcgacgacgccgtccgcgcgcgcctccgcgggggcgcccacgccgcggggtgcaccaccagcagcagcagcggcagcgaccacgacgcgtccgcctgcctctccgagctcgtccaggcgttcctggagacgggcgccggcggcacggccgaggaagggccccgcgcggcgcccaaggagtacggctccgacgacgaggacggggcggcggcctccgccgcggcgaccgtgcgggccctgctcgacccgccggcggaggaggacgcgttccgcatcaggctggccgcggcggtggcggccgcggcggaggcggaggcggcgctgcgggcgcacggggcggcgttcaggcgcgcgctggcgcggcggctgcgcggcgccgggtacgacgccggcgtgtgcaggtcgcggtgggaggcgtcgggcggcgccgcggccgggacgtacgagtacgtcgacgtggtcgcggtcgcgccggcggcggccaggtacattgtggacgcggacttccgggcggcgctggaggtggcccgcgccacgcccgagtacgcggccgtcgtggccgcggtgccggcgcccgcggtggtcgcgcgcgaggaggccgtcggccgcgccgtgcgcgtcgcgtccgacgccgcgcgccgctcgctccgcgcccacggcctccacgtcccgccctggcgcaagacgcgctacatgctcgccaagtggctcgggccctacaagcgctccacctcgtccgctgctggtggggtaatgtcgatgcccggcggcgcagggctggacgtcaagtgccgcgccgtcgggttcttcgcgcctccggccgccgcgccggcggccaggatcaagtag

SEQ ID NO: 942 - DNA, 571 bp, Zea mays
  Peptide Sequence Number=SeqID_42721
gggcagcggggccggcatacggcagccgagcggcgagtaccgcgggaggaaggtgggggccaggaccgaggtgcgggacgtggagggcgacggcgaggtgcaggagctcggccggttctccgtcgccgagtacaaccggcagctccgagaaggtggcggcggcggcggcaggctcgagttcggcagggtggtggcggcgcagcggcaggtggtgtcggggctcaagtactacctccgcgtcgtggccgtggaggagggcggcggcgcggggaacggcggcgagcgcgtgttcgacgccgtcgtcgtcgtcaagccctggctcgactcgcgtaccctgctcacgttcgcgcccgcggccgccaaactaatggacaagtcgggtgagagggcaaggatgaactctttgggcccatccacatgttgcccgagagttgttcttaatttaaaatggatttgggaatctagggtcactaaggtggttccgatgccatttattgattccaataactctaggatgttgtctaagaccctaaaaagcctatccgaatgccaaaacctttgtgatgtgtga

SEQ ID NO: 943 - DNA, 201 bp, Zea mays
  Peptide Sequence Number=SeqID_42722
atggcccaaaggcacatttccctttcagagtgccagggcgacaccatgggttcccatggtcacaatctgcagcaatcgaaggcagagccaatgacaggcatgatgaatagatggggcttccgtgaaaggaaaaagggagaaagaggcgaggccgtgggaggccggcatggacaacaacggccatgggcggagcgaagttag

SEQ ID NO: 944 - DNA, 714 bp, Zea mays
  Peptide Sequence Number=SeqID_42723
atggatgagtgggggtgggggtcggcatggttgtgggttgagctggatcgaggcggagttgttgagttcaagcaagggatgtggaacagcagatcacacttcgccggcgggcaggacaacgacggcaacgacgaccagccatacggatacggatacggtggcggccagcagtatgaagcaaccggcggcaagaaacgagcgtcctcgaggctgaagaagagcagcggcagcaagaaagacgacgagtacaccaagtacgcaggcaacagcaacgaggccgacgacaaccgccgcaacaggccgaacgacgacaataactacaacggcggcggcggcaaccactacagcggcgccggcgccgcaataggtgcgccctactacggtgctgctggcgccggcggctacgggagcagctctccctactacggcaacgccgctgtccacggcaccggcggcgacggcggcggcggctacgcaccgtacaacaacgctcccgccgccttctgggctccccaggacggcaccaggtcgcccatgtttatcagcactagggaggtgcacgtgtacggcgcgcctggcgggtacgacaactacgatggcagcaacaacgacgaccgccagaggaggagaggcggcggcggattcttcgggcccgcgttccatgccgtcggccgcttcttcgaccgcaagttcggcttcagcgacagggactga

SEQ ID NO: 945 - DNA, 1008 bp, Zea mays
  Peptide Sequence Number=SeqID_42724
atgagcatttatatagaaatgccttcaaagcctttcaccatcgatcgcgtgactgcccccgctcccctacccaacgccgctcccgcacgcccgcgcggcagcgaaacctccgcacgcccgcggtccgcctgttccccgcgcatcctgccgcacgacctccgctaccgcaacggcatcccccgcacgcccgcctgttcaccgcacaatcccgccgacctccgctaccgcaacgccgccgccgcagcgaaatccacacccacgcatccatccagtaccaaaccgcccccgcgccgcagccctttgcccacgccggagtctggcacccaaccgccacgcgcgccagcgtaccgcccgggcaaccccacgtccgccgcggattccgcacccacgccgccagccatgacgcggaacgaccgtccctacgccagcggaacaacagcggagaaacctccgctcgccgtatccccgtccttggtgccccgctccacgcttcctcggtgtcccgctccacgcccgtcgcgtggtcccagccccaccccgtcctcctcgcgtcccccaccgctacagccaccagcagcaggaaaccccgccgcggggaggcaccgccccaagaagcgctgccatgggggcgtggattccgcatcaccgaccctgacccctgatagcgtcgtgctggctatcctcatcggggatgaggacatcgagcccgcgatgctagccaaagaggcgaacggcgggcacatggcgatcgaggctccgacgaggtggctccaccagatccagaagacggaagtagagaagagaagcgaaccaaagcaagcaggcttcaagaataagttagaaaagcaccggagaactgatcaagggctgaagaagggggttctgaagtttgaatttttccttcaagaatctcagtctcagatgcgaaaattaaagaggtttgaggcaagctctcctgcttctgagaaagaaaaaaagcaggataggaagcaggataggagcccgtaa

SEQ ID NO: 946 - DNA, 615 bp, Zea mays
  Peptide Sequence Number=SeqID_42725
atgggcgtcgcttgctcgccggccttggaagtgtcgtcgcctcgggcccccggatgtatgtcttcattcaggccgcccgaactgcgctggatcggaagatgtaatgcgcgatcgtcgctgcgcgcacctcgcacctcccgtgacgccgctcgaacctcgcgcctcgtgtgtcgctgtcgctactcgcacatcgaggggcaccgcttgctcgccggccttggaagtgccgccgcctcgggccctggggacgccgccgcttgcccgcacaagggcactgccgtcgctcaccctctagatcggggagccaccgccggcggcctaggaatcgccgcctcgactccggatcgaggaaccgccgccaccgcacgtcgaggtcggggagtcgcggccaccgcagccactggccgggggtccaccgcagccactggccgggggtccaccgcagccactggccgggggtccaccgcagccactggccgggggtgccagggggtcggtgccatagatcttggcgccgaccccctggacggcgaggtcgatgacgcctacctcggcgccaagatctacgacatcgaggtacgcgccacgtcagttccactgtggccctcaatctga

SEQ ID NO: 947 - DNA, 2424 bp, Zea mays
  Peptide Sequence Number=SeqID_42726
atggagcagctgcggacgttcgggcgggagctggcgatggggtcgcagggcgggtgggggcagtccaaggatttcctcgacctcgtcaagtctatcggcgaggcgcgctccaaggcggaggaggaccgcatcatcgcgcgcgagctcgagcacctcaagcgccgcctggccgaccccgacgtgccacgccgcaagatgaaggagcttctcctccgcctagtctacgccgagatgctcggccacgacgcttccttcggccacatccacgccgtcaagatgacccacgacgagtcgctaccgctcaagcgtaccggctacctcgccgtcgcactcttcctcgacgagcgccacgacctcgtcatcctcgtggtcaacaccatccagaaggacctcaggtcggacaactacctcgtcgtctgcgcagcactcaccgccgcgtgccgccttattggtgaggaggccatccccgccgtgctgccccaggtcgtagatctgctcgtgcaccccaaggaggctgtgaggaagaaggccgtcatggcattacaccggttctaccagcgatcctcctcctccgtttcccacctcgtctccaacttccgcaagaggctatgtgataatgatccaggggtaatgggtgcaactctatgccccctctatgacctgatttcggaggaaccaaattcgtacaaggatttggttgttagtttcgttaacatcctcaaacaagttgctgagaggaggcttccgacttcctacgattatcaccaaatgcctgcaccatttattcagataaaactattgaagatacttgctgtgcttggcagtggtgataaacaagcaagtggacatatgtacactgtattgggcgacatattcaagaagggtgacactgcgagcaacattggcaatgctatactgtatgaatgcatatgctgcatttcatccattttcccaaaccctaagatgctagtggctgcagctgaaacaacatcaaagtttctgaagagtgatagtcataatcttaagtacatgggcattgatgctcttggcaggttaataaaaataaatccagatattgcagaagagcaccagctggctgtcattgattgcttagaggacccagatgacactttgaagcgcaagacatttgagcttctttataagatgacaaagtcaacaaatgttgaggtgattgttgataggatgattgagtacatgatcaacataactgatcatcattacaagacagaaattgcatcacgttgtgtcgaactcgcagagcaatttgcgcctagcaatcagtggttcatccagaccatgaacagagtttttgagcatgctggagatcttgtcaacatcagagtggcacacaatttgatgcggctaattgctgaaggctttggagatgaggacgaaggtgctgacagtcagctaagatcatcggctgtagattcttatgtccgcattgtcggagagccaaagcttccttcttctttccttcagataatatgctgggtgttgggggaatatggaacagcagatggaaaacattcggcttcttatattattgggaaattgtgtgatgtggcagaggcccacctcactgatgacactgtcaaggcgtatgcaatctcagcaattctgaagatatttgcgtttgaaatcgctcttggaaggaggattgatttgctgcctgagtgtcaaacattggtagatgaattgttagcttcacattcaacagacctgcagcaacgggcatacgagctacatgctttactaggcttgggcaaaaatgatgttgaaagtgttatgcctgcagatgcaagctgtgaagatattgagaagtgcgtcgccactctcaagcaaggccccagccaactcgctgcctccgccaggtggcgagtaggagaggcaccgtcgccagcattagaggccaccgccaaccatcagcagaagagcggcaacaagcgcccccacgactccgaccaccaggaggtgtacgcggtagagtcctccggctcaccatgccccttgtggttggaggccccaatcgtgttcgatcgacgcgatcacccgagcaaggtcccgcatcttggaacctacccccttgtcgttgaagcaatcgttggcccgaagcgtctgtccaaagtcctcatggacagggggagcgatctcaacatcatcgccgcgccgatccacgacatcacacccgactacgtcaagtttgaagtggactttccaggggcctacaatgccatattggggagcccgggctacgtcaagttcatggtcgtttccaactacacatacctcaagctaaagatgcccgaccccatggggtcattatggcgtccacttccttccaagcagcccatgcgtgtgagcaagctagctgcgagctcgcgtcaggacaagccgttgtga

SEQ ID NO: 948 - DNA, 513 bp, Zea mays
  Peptide Sequence Number=SeqID_42727
atgtccgatcactggagcgcggcgcggtcggtgggcttggtttacgtagggcagaggcagactcagcatccgggggcatgcacggccaacttcatgcggtacgacgcgaacgcgatggagaaccgcacagcgcttgcgtgcgcttccccggctcgaaaaccatgtaccctgccggggtcacgatcacggcgcgccgtggccgtctcgacacgcgcgcgcgctcttccggacgctgcacgcagggtgaaaggcgcgcgtgcccggtgcccggcccacggttccactaccaggatccatggctttgccgagtgctcggcactttgccaagtgttttttatcgggcaatactttgtcgagtgtcgtactcggcaaaatccagctctcggtaacgaacacgtttaccgagagcaggactctcggcacagaaatacactcggcaaaaacctctttgccgagtgccaaacactcggcgaaggcgacgctcggcaaagaaccgtcaacgaccgtctatag

SEQ ID NO: 949 - DNA, 2937 bp, Zea mays
  Peptide Sequence Number=SeqID_42728
atggcggcggcgtgggcccgcgcgaagcgcgcactcgccaccggcctctgcgtcggcgtgcccgcgcgccagctggccatcgaggacgcgccgccggtggtggaggcgccgtcttcggtggccgaggacaagctggagtccgcccccgtgtccgtgcgtcggctgacgagctttgggagccggagctcgcagcagggcatcttatttgaccctcaactgctaggaaaagtaaaacttgcaactagaggatattccgatatgtactcgtggggcaaacagaagacatgtgccatttgccttggtggcatgagatcagggcagggtcatgccttgttcactgctgaatgctcccacaagttccattttcattgcatttcttcaaatatcaagcatggcaacctcatctgcccgatatgccgtgctaagtggaaagaactcccaggcgctcaacctgcagatgccagttatggacgagctagagttaacccattaaattggccccaggatgaagggcacatggctgttgtccgcaggctttcccatacatacagcggaaacctgcaggagcaccttcctttcttccgtactctggaggcaggcgttttcaatgatgatgagcacatagatcttcagtctgataatatcagtgaacataatgcagtcgctggttcagttaaaatcaaggcatattcagaagttccagctattgaacaatcaacgaccaaggagatctttgctatcttgatccatctcagggctccaaaatcttcacactcagcgagctcccgtgcacctcttgacctcgtcaccgtgcttgatgtcagtggtagcatggcagggaccaaaattgcacttctgaagaatgccatgagctttgtcatccaaacccttggacccaacgaccgcctgtctgtcgttgctttctcatctacagcacgcagactcttccctcttcggcgaatgacattatctggcaggcagcaagcattgcaagctgtcagttcccttgttgcaagtggtggcacaaacattgctgatgggctaaagaaggctgctaaagtgattgaggaccgtcggttgaagaattctgtttgcagtatcattcttctctctgacggtcaagacacatatacactcccttctgacaggaatctgcaagattacagtgccgttgtcccaccttcaatccttcctggaacatgccagcatgtacagatccacacctttggtttcggctcagatcatgattctgctgccatgcatgctattgctgagatctccagtggcacattttcattcatcgatgctgaaggctcaatccaagatggatttgcccagtgtattggtggccttcttagtgttgtggttaaggaggtgaggttgggcattgagtgtgtcgacaatggtgtgctactgacttccatcaagtctggcgggtatacaagtcaagttgctgaagatggacgcggcggttcagttgatatcggtgatctgtatgcagatgaagagagggggtttctggtcactctacatgtcccagctgcacagggacagactgtgctgatcaaaccaagctgcatgtatcatgacgctatcactacggagaacatcgaagtacatggtgaggaagtaaggattcagcgccctgaacatcgcgtggactgcaaaatgtctcctgaggttgagcgtgagtggcaccgtgttcaggccacagaggacatgtctgccgcacgggctgcagcggaggtaggtgctttctctcaggccgtggcaatcctggaagcccgtaggaggatactggaagcacaagcagcacaatcttcagacgaccagttcctggcattgatggcggagctgagggagatgcagcagagagtggagaaccggcggaggtacgaggagtcaggcagagctttcatgctggcaggcctgagctcacactcatggcagagagcaactgcacgaggggactcaacagagatcactaccactattcatacctaccagacgccatccatggttgacatgctgcagcgctctcagatcctcgtgccacccattgctgacatgctgaacagctccccaactgtggcgcctccaaatagattcagccggccatccagacagtgggatgagtcggttgaggcggaaaaccatgtagacagtgggatcaacaagtccattgatcatattgaacacgcaaaacccaagattcatgcaaaggggggttcgccgtggcgcggtccattgccaaaaccaagagtgtctaagatgactttcgcggcggcgttggacaaagcgatccatgtcgatccgtgttctcgtgaaagaagcaagtctgcatcgcggtttctcgagcgagttcatccatttagcgcgttcaccggcggagttgtcagagatacgacacagtctctttcaaatttcgaaaatcagaaggttcgaagctgtaagaacgttgggccgttttcgccttttctgaggcgtgattactggagaagcgcgttcactggcgattgtgttggagatacgaaggaggctctctcaaaattcgaaaaccaaaaggttgggcactataagaatattgggccgaaaccaggggcacaaagcctcaaactaggcatggaatgggatgagaagtaccctttatccacattggtagcccttagtagagatgtctcggatcatactcctcttcttttgcacatgggtgaaacgagaaagggtaatcagaatagtcctttcaaattggagttaggatggttgttgcgggatggtttttatgatatggtgaaggtgatctggacaaataagaatgggggcagttcgccaatggagaaatggtgggcaaagataagacatgttagtcagcaccttaggggttggagagaagaagatgagtggaaaatacaaaaaggaaaagaaggtaatccttga

SEQ ID NO: 950 - DNA, 585 bp, Zea mays
  Peptide Sequence Number=SeqID_42729
atgcacgatagcatttcatatgcgtctccaatgcggtttagctcatggacggacaaccttagagagaggactctagaagcattgcgaagcccaaaagcggctatcgccggaccacgcgggcgagcgggggaagatggagttttgggggcgaagactctggcgcatccgccgctgctgcttcagcaccacctctttgtcgaaccccaccacacggagctccacggtgaccggcataaaacactgaaggaattgatggctattggtcctagtctggtttctcctccctggggttgtgggcaagccgagatgggatggggagcgatgcagggagccggggagggagagagtgagtcacgacgaaagaccaagagcgatggggagcagcgggggagagggcgggtgggcggcgccagattcgaccggggattcgtatggtccaacgcggagacgacgatgggagtgaagactcaccgctttttcctcatggaggtcgtcaccctgtggaatccatcgcccaacagatttctggagacacggagctccaatgtggaagacaccggatattgtggaagcaaagaactttag

SEQ ID NO: 951 - DNA, 2376 bp, Zea mays
  Peptide Sequence Number=SeqID_42730
atgggcacagggggagacggggacaaggcggggccggcgctgccgctggaggcgcttttggcgctcgggctcgaccagcgcaccgccgagaacgcgctcgtcaacgccaaggtcaccgccaacctcgccgccgtcatagctgaggctggtataaaggaatgtgacaagtcaattggtaatcttctatatgcagttgccaccaagtacccaactaatgcacttgttcatcgccctgtccttattagctatgtcttgtcaacaaagataaagagccctgcacagctagatgctgccctctcatttcttactaatactggtcctgattctctagatgtggacaagtttgaagaagcatgtggtgtaggcgtggttgtttctattgaggaaattaaatctactgttactgacattcttgaggagaatatggaagctataaaggagcagcggtatcacataaatggtttggttaggaagagacacccctggggtgatgctaaggcagtaaaggaggaaattgacaagaggcttgcagaaatcctaggtccaaagacagaagctgacagtataaaaccagtgaaaaagaagaaggaaaaaacagcaaaagttgaggagaaaaaagttgcagttgccactactgccccaccatctgaggaggaattgaacccgtatactatatttccccaaccagaggaaaactttaaggttcatacagaaatatttttcagtgatgggaacatatggagagcacataacacaaaggaaattttggaaaaacatctcaaggcaactggaggaaaagtgatgacccgttttccaccagaacctaatggatatcttcatattggtcatgccaaggctatgtttatcgattttggtctggctaaggagcgaaatggccattgctaccttaggtttgacgacacaaatccggaagctgaaaagaaagaatacatagatcacattcaagaaattgtccattggatgggatgggaaccctacaaagtaacatacacgagtgattatttccaacctttgtatgagcatgctgttgagttaattcggaaagggctagcctatgtggatcatcagactgcagaagaaattaaggagtacagggaaaagaagatgaatagtccatggagggataggccaattgaagagtcattgaatttatttgaagacatgaggcgtgggttgattgcggagggtgcagcaactctccgaatgaagcaggatatgcaaaatgagaacaaaaatatgtctgacttaatagcatatagaataaaattcacccctcatccacatgctggtgataattggtgtatctatccgagctatgactatgctcattgcatggtggattctcttgaaaacatcacgcattcgctgtgcacacttgagtttgacatacgccgcccttcatactactggctacttgttgccttgggtctttatcaaccatatgtgtgggaatattcgaggctaaacatatcaaatactgtgatgtctaaaagaaagttgaatcgacttgtgacagagaactgggtagatgggtgggatgatccccgcttgttgacactggctggactccggcggcggggagtatcatcaaccgcaataaattcctttatccgtggaatcgggataacaagaagtgacaacagcttaattcgtgttgatcgtctagaataccacatcagggaagagcttaacaaaacagcccctcgaaccatggttgttttgcgtcctctaaaggtggtaataactaacttggaagaaggaaaagtactagaccttgatgggaaaatgtggccagatgcttctgatactgatgcttcctctcactataagcttccgttctcaagaactgtctacattgagaaaactgattttcgccttaaggactcaaaagactactatgggctggcccctggtaaatctgtcatgctaaggtatgcgttccccataaaatgcacagacgttatctatggtgatactcctgatgatattgttgaaattcgagcagaatatgatcctttgaagacttctaaacttaagggtgttctgcactgggttgctgagccagcacctggtgtcgaaccattgaaggtggaagtaagactattcgagaaattgttcatgtcagagaatcctgctgaattggaggattggcttggtgatcttaacccgcactcgaaagaggtgataaaggacgcttatgctgtaccatcgcttgccactgcagttctgggcgacaagttccagtttgagcggcttggttacttcgccgtggacacggactccactcctgagaagctcgtgttcaacagaactgtcaccctccgtgattcattcggtaaagctggaccaaagtga

SEQ ID NO: 952 - DNA, 1053 bp, Zea mays
  Peptide Sequence Number=SeqID_42731
atggcatgcggggcggtggccaacatcgtcaaatcctcactcggcctcgttggtctcgacaagatatcatgcgcattaacaagcaaccaagaagacactaagctacggggaattatggccttagtcctggccataaaacaaaagcagcaatcgttgtcccttgaagcacatgattgtgcgaatgcaattcctgatttgagcaatatgatcaaagcagttcagggcctagttgcacagtgtgaagatttaaaattgaagtgctatgaagagatggataagaggaagaaactttataatattgttcaagagacaaaaggtatctattatcctgaatttatcaggtttttttgtcgatgccgacccttaagcaaagatgaggtgtcatcaggcctgaatgcaaatggcggaacaactaaaaagacatttaagtttgatagagtattcacgacgaatgatgatcaaggaataggaaagacttttaccatggaagtgaatgagagtaatagtggtgttaactatagaactctggaagaactgttcaatattgcagaggagaggaaaggaagtgtcacatatgacttttctgttagtgttcttgagattgttcttgtcaccctaaaaaggttcccgttctactttcgggcaggtgaattgcaaagaaatggtatgtccgcaactggtgctctcggacgactccatcaccgagcagcccttcgcccggtggctgcggtgtcgaactggctgacacctactcgcagttgcattacaagttttactgactatgaatttacagtgtacctacactcagttggaaaacttcaaccacactgcaacaaggtttataaaaggtttgctatgaggaaaaacaaatttatgggctcaaacaaaaaccaagccaagaaaacagatatcaactgtgatgccacactcaaaagcttgtttggtgggagggacaaggttgggatgctggagatctccaagcttttgagccctgacttcccgaagatctccaagcttccctggtccatggagccagggatgtcactttggtaa

SEQ ID NO: 953 - DNA, 330 bp, Zea mays
  Peptide Sequence Number=SeqID_42732
atggggctgcacgcggccatctcgggacagggctcaggcaggcgaaatcggcggcatgcatggtgcgagcagcaggatgctgacgagcgtgggggcaggtggggcattgcgcagaggggggaggcaggggcgggggcacaaggcgaagagaagcagccttacgtccagcaggcacaggtcgacaagaaacgttatgaaaaagagtctgccgtctatcgtggtgaagctgcaggatcgcaagagcaacagaaacactgggaatcctttttacatgcatcagaccccaaaacaaagtctgaaagtcttaatgccatcacacgatttttctag

SEQ ID NO: 954 - DNA, 2253 bp, Zea mays
  Peptide Sequence Number=SeqID_42733
atgaggaacgcctctgacctcctctccgaccttgaaacgacattccggtgtctcaaggcgaaaggtgtaaaactcaatcccgagaagtgcgtcttcggagtcccccgaggcatgctcttggggttcatcgtctccgagcggggcatcgaggccaacccggagaaaatcgcggccatcaccaacatggggcccatcaaggacttgaaaggcgtacagagggtcatgggatgccttgcggctctgagccgcttcatctcgcgcctcggcgaaagaggccttcctctgtaccgcctcttaagaaagaccgagtgcttcacttggacccccgaggccgaggaagccctcgggaacctgaaggcgctccttacgaacgcacccatcctggtgcctcccgctgccggagaagccctcttgatctgcgtcgtcgctaccactcaggtggtaagcgctgcgatcgtgaatgagagacgagaagaagggcatgcattgcccgtccagaggtcggtctacttcatcagtgaggtactgtccgagaccaagatccgctacccacaaattcagaagctgttgtacgcagtgattctgacgcggcggaagttgcgacactacttcgagactcatccggtgactgtggtgtcatccttccccctgggggagatcatccagtgccgagaggcctcgggtaggattgcaaggtgggcggtggaaatcatgggcgagacaatctcgttcgcccctcggaaggccatcaagtcccaactcttggcggactttgtggctgaatgggtcgacacccagcttccaacggctccgatccaaccggaactccatacaatgtttttcgacgggtcgctgatgaaaacaggggcaggcgcgggcctgctcttcatctcgcccctcgggaagcacctccgctacgtgctgcgcctccatttctcggcgtccaacagcgtggctgagtacgaggctctggtcaacgggttgcgcatcgccatcgagctaggggtccgacgcctcgatgctcgcggcgactcgcagcttgtcatcgaccaagtcatgaagaactcccactgccgagacccgaagatggaagtctgctgcaacgaggttcggtgcctggaagacaagttctacgggctcgaggtcaaccacatcgcccgacgatacaatgagactgcggacgagctggctaagatagcctcggggcggacaacggttcccccggacgtcttctcccgagacctacatcaaccctcagtcaagaccgacgacacgcccgagcccgaggcgccctcggctcagcccgaggcaccctcggccccccagggtttctactggccgaccgcggtggccgacgccactagaattgtccgcacctgccaagggtgtcaattctacgtgaggcagacgcacctacccgctcaggctctgcaaacaatacccatcacctggccgtttgctatgtggggtctggacctcgtcggtcccttgcagaaggcacccgggggctacacgcacctgctggtctccatcgataaattctccaagtggatcgaggtccgacccctaaacaatatcaggtccgaacaggcggtggcattcttcaccaacatcatccatcgcttcggggtcccgaactccatcatcaccgacaacggcacccagttcaccggcataaagttcctgtacttctgcgagaatcaccacatccgggtggactgggccgccgtggctcaccccatgacgaatgggcaagtagagtgtgccaacggcatgattctgcaaggactcaagccgaggatctacaacgacctcaacaagttcggcaagcgatggatgaaggaactcccctcggtggtctggagtctgaggacaacgccgagccgagccacgggcttcacaccgttctttctagtctatgggaccgaggccatcttgcccacagacttagaatacggttccccaagggcgagggcctacgatgaccaaagcaatcgaacaaaccgagaagactcactggaccagctggaagaggctcgggacatggccttactacactcggcgcggtatcggcagtccctgcgacgctaccacgcccgaggggttcggtcccgagacctccaggtgggcgacttggtgcttcggctgcgacaagacgcccgagggcggcacaagctcacgcctccctgggaagggccgttcgtcatcgccaaggttttgaatcccgggacgtacaagctggccaacagttaa

SEQ ID NO: 955 - DNA, 300 bp, Zea mays
  Peptide Sequence Number=SeqID_42734
atggagctagctcctatggaagaatttgacactcatggtccaaaggagaacactttgctacccccttacttgaggaaaagtgctctacgatacagaacaactcagacaaagtatgctttgtcaatgcaattgcttttttatcctatcatcttctttaaaacttccccaaccgttcaagcttatttggtccgacttgcttcaaacatgttcaagaatacaacttgtttcctccacacctttgtttacaagaagtatggcttggcagcctccatattcttcatcgcagcagcagcagcatga

SEQ ID NO: 956 - DNA, 495 bp, Zea mays
  Peptide Sequence Number=SeqID_42735
atggcaacgtgcacggctccgcctccacgaaaggtcgggaaatcttattctgacgcgaggcaatctacctaccacctacggcctacacctaccgacgatatgcctggatgtggattggatgcgagtccacagcggactgatggacgcaggataaattttaggagaggccatatggggagagccgaagagggcaaaggggtgggccaatgggggtggagggctggggtggagcggttgcatcgtcgtgttgttgtggggagtccgcgagtctgtctcaacatggcaacggttgtccttcagagttcagaggttgttccaagaggagtcggggagaatgaaagtaaaaccttggactgtgaactctatcatctatacctcggttatcagcctcagccgatgaacataattcttcccaggaaaagaggtctctcttatgaccatttcactgaagatgcagcctaccgatcacatatcaatagccagggtatactctaa

SEQ ID NO: 957 - DNA, 492 bp, Zea mays
  Peptide Sequence Number=SeqID_42736
atgggcgacggcgaggcggcggtgccgagcaggttccgcacggtctgcgtcttctgcggcagcaacgccggccgccgcaaggtgtacgccgacgccgccctcgagctcggccacgagctggtgcggaggggcatcaacctcgtctatggcggcggcagcatcggtctgatgggcgtgattgctcggacggttcgtcacggcggctgccatgtcctcgggtaccatgccggctaccgcgcttgcagttccacctctctttttcgtttcgttcttttctgcaccccttttcaaatactctccatccatctgagatgttggagctgggtgattcctaaagcgctcatgcctattgagatatcaggtgaaagcgtgggagaggtgagggtcgtggacgacatgcaccagaggaaagccgagatggctcgtcagtcccaagccttcatcgctctcccaggtgccagaccagaccagacgtcccctgctaaaacataa

SEQ ID NO: 958 - DNA, 1242 bp, Zea mays
  Peptide Sequence Number=SeqID_42737
atgggggcgtcggggaagtggatcaagtcgctggtggccctgaaggcgcccgagaaggcggcggggcacaagggcggtcgcaaatggcgtctctggcggagctcgtcggccacgtccagggccagcgccggagagggcagtgcgctggcgtccgagtcttcttcggcgtcggccgactcgttcaactcggtcctcgccgccgtggtccgcgcgccgcccagggatttcctgctcatcaggcaggaatgggccgccgtccgcatccagaccgccttccgcggattcttggtatcgcccgtattccttctccgtttccattatgtagcggcgctgatcatgactcttgctattatgtggtggcgcgaacgcgcccgggagcgccgggcgcgctcctccgctgatggccacggctcacagggccaggacgcgctcaacggctgtgccagttctaccaaagacgctatggaacaatggtgtgaccgccacggatctgttgctgaagtaagatcaaatttacacatgaagcatgaaggtgcagcaaagagagaaagggcaattgcctatgctctgtctcaccagcctcggggttcaagacagaaggggacaccaagctctcctgctaactgcgttagaagccatgatcctaatgggtgcaatcaggacttcagttacttagacggatggatggcaacgaagccatgggagaccagatctacggagcgaaaccatagcgactcgcagctcgcgaagcactgcgaggagccgaacttgcccgcctccaagctttccgatgccagctcagttaagatcagaagaaacaatgtcacaactagggtatctgcagcaaagcgtcctcctccatcttcagtgctgtcagctgcttcttccgactccgcgtacggcgacaagagccctcggtcgagaccatcggtgacgctgacgtctgctaccaccaacactgtcttagcgtcagaagcaagatcagacagtggcgacaccggaggcccgaactacatgagcttgaccaagtctgccaaggcgaggctgagtggatgcagcggcagcagtcatcacaggtcgttccagcgaccacggtccggggacatgtcgagggtgacactgtcttcgatcgacacccagagcaacgcgggctcggagatttcagtcacctcgaagagactgaacagcatgtccctgaacctgaaaggccggagcttggacaaggagaacgaggaggattga

SEQ ID NO: 959 - DNA, 1635 bp, Zea mays
  Peptide Sequence Number=SeqID_42738
atgacgtgtgctgcttacagtatcagaggtcctctcatgcttgctgcaaggcgcagctcggatgtgttcgctagtagcaagtcgtgcaatggcaagtcttcggtgtcttaccccgttattcagtggtggagcagtaactgctcatccttcacaatgcggcatgtcgcctcccatcatcacttgattgttaaggcttcagcaacgtggcactcaaaagcttcagcaactgatgcagccactgcttccgatgagaggataactgtactggtcattggtggtggaggcagggagcatgctctttgttatgccttgaaccgttccccatcatgtgctgcagttctatgtgcccctggtaatgctggtattgctcagtccggggatgcaacatgtatttcagatttggacatctccagtagcgatgatgttatctcgttctgccgcaagagggaagtgggaatggttgtagtgggtcctgaagcccctcttgtcgcgggtcttgtgaatgaccttgtcaaagttgggataccaacctttggcccttcatcagaggctgcagcattagaaggatcaaaggacttcatgaagaagttgtgtgataagtacaacatccctacagccaagtatcgcacattcacggacgctgtggaagctaaaaaatatgttaaaaatgaaggagcccctatcgttgttaaagctgatggactggctgctggaaagggtgtggttgtcgcaatgactttggatgaggcgttcgaagccatagattctatgttggttgaaggctcattcggttctgctggttcactggttatcatcgaagaatttctagagggtgaagaagcctctttctttgcattggtagatggcacaaatgctttacctcttgaatcagcacaggatcacaaaagagttggtgatggtgatgttggcccaaataccggtggtatgggtgcatactcccctgctccaatagtgacagatgagctcaaacgcactgtaatggaaagtataattatccctactgttaaaggaatgtcaaccgaaggttgcaagtttgttggtgtattatatgctgggcttatgatcgagaagaagtctgggctgcctaagcttattgagtacaatgtaagatttggtgacccagaatgccagatgtccctgaacccaagcagcgtcaccatgctgacactcagcagccgcaccagaagatctggaacacatgaggttctgatgatgcgattagaatctgatttggcacaagttctgttatctgcttgccagggagagttaggcaatgtttcactaacctggtcacccgaaatggcaatggtggttgtgatggcaagccagggatacccgggcccttataaaaaggggaccgtgataaaaaacgtggacaaggctgagcaggtgtctccggctgtcaagatattccatgctgggacagcactagatggagacggcaaccttgttgccgttggagggcgagttcttggtgtcactgccaagggcaaggacattgaagaagcaagggcaagagcatatggtgcggtagacgctgtcgagtggccagaagggttcttcaggcacgacattggttggagagcactgaggcagaagcaagcggcaaaatag

SEQ ID NO: 960 - DNA, 444 bp, Zea mays
  Peptide Sequence Number=SeqID_42739
atgcccaaatccgatgcccaggacgatgctacacatgatggaggcggatgcgagtacagggagggagtccataccgcgaattgtcgcaaggagctctctggccgcggggataggcggaggtgcgacgacgcgatgacgacggcgagcaattcgcgagtccttgaatcgcgccttcgcccgcagcagccacgcgcacaaaaccaacaccacggcgaattcgcactagccttggcgggagtccccgcggtgagaaccagggcgaattgtagtggcggcgacgaatttcttctcggcgaagtcgttctctcactcaccgacgatggcgcgaggaacagagatcaaactcacataaagagaaattgttcctctaccggtattattcctagcaattacaaagtgggtgctacagggggcaaccatgtggggcaaatggtgttcctatag

SEQ ID NO: 961 - DNA, 648 bp, Zea mays
  Peptide Sequence Number=SeqID_42740
atgtgtcccattagaaaacaaataaaaattagagagccacatgctctgtctggtggtgcaaaatccagaagaggaaaaaagtcaaaatgttcaagttttatcagatgggaatggctagagtatccattctcgatcttgccacagcagcactgccgcaagcctgcgctcatgcggagttgccactggcagaccggagactcgagtactagactcgggaggcgatgtcgatgggatcccctgtccgacatccacagcaatgagaaattcccgatacgccctggatacgtatccggaagtatccgtatccgatacggtattcgacaccgcctaatttatcctccaatagcaccgattggttctgatgatctctaccctgggcctggtgcaggcttctaccctcacagtggcattgggagcggtggcagcatgcatgttggtcctaatgatccgcgcttctttccttctaatcccttctctgccccatttggtgggcttgggagtgttccaccaggtagtcgctatgatccaattggcccacctgacgtcccagggtttgagccatctagctttgttaggcgtccaaggcggcctccaggcgggagcacccaccccgacctcgagttcttccagcaaggcccagacttctga

SEQ ID NO: 962 - DNA, 618 bp, Zea mays
  Peptide Sequence Number=SeqID_42741
atggcaaagctcccgcgtctaccctgctcgtttgccgttctcgcgctcatgtgcatcatcccgctcacagcgccgcggcctgcactgtcctcgcgcgcggccccaagggacggtgtctccttcgccggcgcaggcaacacgatacatcaacttcttaaagatcacggccttcccggaggactgctcccgcgcggcgtggagtcgtacaccctggacgagtcgaccggcctgctggaggcgcggctgtcggcgccgtgctacgccacgtacgacaacggcgaactggcctacttcgacaacgtggtgcgcggcaacctcagcaagggcgcgctccgaggcgtggagggcctctcccaggaggagctcttcgtctggctccccgtcaagggcatcctcgtccaggaccaggaacccggggtcatcctgttcgacatcgggttagcccacaagagcctgtcgaggtcgctcttcgaggacccgccggactgcaagccgtcggcctccggcgggatgagcgccgcctccgccgccaggagggagggcacgcaaggtgagattctgacacgccactgtttcagatttgttcgggggaacatggttcccttctcgattggttag

SEQ ID NO: 963 - DNA, 375 bp, Zea mays
  Peptide Sequence Number=SeqID_42742
atggctctgaagatctcagcgggttcctttgttgcacgagggggctggttgtcacgggctggtcggccccggcagtgctcgtcggtgggggagaaggagaagaagcttcttctcttcttcttcctccgtgctggtttgattctgctgtcgacccccgcgaaaaccgttcctgataagttgacattatggcccccacgcaaagggcttcttagattagaggttgaatctatggaagggaacagctggaggatcgtgagcagcgttcacgggaaacggagcgattcgcgcttgctttggcatgcattctccagacaaggcaaccgatcagaagcttcttgccttaacctcctgtcctacgagtccggaaggagatga

SEQ ID NO: 964 - DNA, 333 bp, Zea mays
  Peptide Sequence Number=SeqID_42743
atgccgtttcagacttccagtgttctgtatctagctatcttggtcatgcatcacccgagagattccttcgcgcagctggttcatcagagcctcaagacatattcttgccgttggttattgcaagagggcttcgttgacaatggcaccgatgagcactgcactatgctcgtcaggcgaaactgcagagcgttgatcaacggtagggaaccaaaataccagatcagtttgatgatagctgcttcagcatcagatgttttgtttttatccttgaaggatatacttgaatttatccttcggattttaggaattaaaccacactccctaccccgttaa

SEQ ID NO: 965 - DNA, 405 bp, Zea mays
  Peptide Sequence Number=SeqID_42744
atggccctctacgccctcctctctttcttcttcgccctctacttccaagcccaaggtgaaggtacgataacagatgcgttgggacccagccccggtggtccggcgcccgagacggcggcggagttcgtcgtgctgcgggagcccatggccatcccggagcgcctgctgcgggcggcggcgacggcggttggcgcggcgaacgcgacggatccggatacgcagatgacggagctcatgtgcttggaatgcgactgctgcctcaagcacaccagcccgcgggtgtgcctcacgacgtgctgctgccagagggtctgcggcgagtccgtctgctccattccggagccgcttccaatggtcaggcaggaggtggagagtggagaactctttctcttcgtgttcatatag

SEQ ID NO: 966 - DNA, 1287 bp, Zea mays
  Peptide Sequence Number=SeqID_42745
atggccgttaccacacgcttcgagctcccgcgcttcctcaccaacaggactcctatgtggttcaaaaggatgctatcaccgtcgaagaagactgaaaatagtccagtatttaggttttttatggatctgaatgatgcagtatcctatgtaaagcgactaaatgtgccaagcggcatggtgggggcttgtcgccttgatgtagcatatgaacatttcaaggaaaagcctcacatgttccagtttgttccaaatgaaaagcaggtccaggctgccaataagctattgaagtcacttccacaaaggggcagaaggaaaaaacttgatggggttcctgtttttagtgcgcaaaacttgaatattgcagtggcaacaaatgatggaattagatgttgtcctgatttttttgtttttgtgcaactttgtcactggcaaatgccaagaaggtacacaccatacttttttgataaaaacttgttggacaatatccttgaagcttctatggatcaacatttccattcgataatgcaaaatcgccatacacgtcgtagaagggatattgtcgatgatagtttaacatcagaaataattgaagaaagtgctgaaagcttgcttgagcccccagaggttcaagaattaatgaatgagattggcccagctggtataccattaaatgttgtaacgaaagctgcagagattcagtttcttgatgttgttgataaagtccttctaggaaataagtggttaaggaaagcttctggcatacaaccaaagttcccttatgttgttgattcatttgaagaaaggactgctgtttcaattgccaatattgctactaccagcagtttaactgcttcaaacgacgacagcagttgccagaataatcaagaaactcaatcttccgagccaagtggtgataacagcagctacagaaatcacaataatgaagatcataatcactttccgtttagcaatctgcttccaaatatatggccagggcatgacagaaagttcaaatcacaagagagtgacaataagtttagcagatatgatgccgacgtgaagagtaagttacaagcaaaccctcttcttccgaaaatcaccatggttggcatctcaatgggtgatggtgcacagatgagcaaagccaacttaaagaagacaatggaagacttgacaaaagagttggagcaaacgagtgaagaaaatatgttcggtgatgaaaaagacccactttttgttgccaacgttggtgactactcaaggataacaaagattagctctgcatga

SEQ ID NO: 967 - DNA, 642 bp, Zea mays
  Peptide Sequence Number=SeqID_42746
atggtgaacacctggcccacgaacgcgggccccccaccaccgctggccatgttacccccgccggtcgcgcccgcgccgaccatccgcgtgcccggcagcggctgcgccccgcggcgggactcggaagccgaggagacggggaggaggagcgggacggcgaggtggggagcggcgggcgcgggcgaggcgggtggggatgggggtggggatgtggaggagaggaaggggaaggcggaggcgagggagtggaaggggttggacgacgaagaggagcacggcatggtggacccctcctgtacggaccgaacgggtggcgcctgcttggtggggactggactgggtggggcgtgcctttttgttaggttttggtggtgggggatgggatctgagctttgcaacctgtgggagggaggcccgggcccgggtgcgttccctatgcgagggacttctgctaccgtgctcaccgtgcagtgcacggggatgggccacgccggcaatgctccaccgcgcacgcgcgcttatccgattccaccaccattgcccgatttgcgtgtcgatgaaacacctgaatatccgatcggctatccgacatcaacggacaaaattgaccggcaaatgcttcaggtgaaactattcaggtag

SEQ ID NO: 968 - DNA, 517 bp, Zea mays
  Peptide Sequence Number=SeqID_42747
atttatacggaggagggaggcgttggtgtacaatactcctggggaccatgtcactcgtgacatccgtgaaggagttgccaagcttggggatctccgtttccgtgtgcttgactcagctggacttgagactgcagcaacatctgggagcattctcgctcggacagcagacatgacagggaatgtattggctaggtctcaatttgccattttcttgattgatgtgagggatggtcttcagccgctggatcttgaggttgggcaatggctgcgcaagcatgcatctggtatacatacgcttgttgcaatgaacaagtccgagtcacttgatgagcatggatttctgactgctgctgctggagaagcacacaagttggggtttggtgaccctgttgcaatatccgcagagacaggcctggggatggcagaactctatgagatactcaggccattgtttgaagaatacatgtttcagcttcgaaatactccaaacaagtttgcgcatattatgctcaattag

SEQ ID NO: 969 - DNA, 231 bp, Zea mays
  Peptide Sequence Number=SeqID_42748
atgcaacagctcctgcgtggtaacctgatacccagagtgacctccattggcaagtctgactttgaaaggatcttcaaggaagtcttcgaggacctgtcagacaagaacacggggatcctggacatcaactcccgccacgtcgctaccctcatggtttacaattcaatcatcaggcagttggttggacctcacaaggaccctccttacatgaacaccatcaccgagaaatag

SEQ ID NO: 970 - DNA, 408 bp, Zea mays
  Peptide Sequence Number=SeqID_42749
atggcgcggtcggccccggcgtggccccgctgcctgcgcggcgcggtcggcccccggcgcagccccgctactcgcgcaacacgctcggacccgacgcggccacgctacctgctcgcggcgcacagcgtggctcattcgcagcgcatcagcgcggccttgcgcgtgctcgcgtggtgcgcgcggtgtcttggcgtggtggtgatgagaattgtggttttggtattgactatggtaatggttgtccgtgttgcaaccactgctaaggagaagatgaagccgtggaggaagacttctaggagttccaagattacgatgagttttatgcgtgggttagcggcaacccccagtcggctgcctgtggaggccgcgtgtatctatgttttgttttggcactttgattattgttaa

SEQ ID NO: 971 - DNA, 516 bp, Zea mays
  Peptide Sequence Number=SeqID_42750
atggctaaggttgttgtcacaatgttcaattatcaacaatttcggcacatcggggcacctggatggcagcttgggtggacatgggcaaaaaaggaggttatatggtcaatggttggggctcagaccactgaacagggtgactgctcaaagttcaagggcaacaccccccattgctgcaagaaagatccaacaattgttgatttacttccaggcactccatacaacatgcaaattgcaaattgctgcaaggcaggagttataaatacctttaaccaggacccagcaaatgttgcttcctccttccagatcagttttggtcttgctggaactaccaataaaactgttaaggtgccgaagaacttcactcttaagactccaggccctgggtacacatgtgggcgtgctattgttggcaggccaacgaagtttttatctacggatgggcgaagggtaacccaagctctaagagttgaggtgcagccgcatcatattattcagtctgttcctattccttga

SEQ ID NO: 972 - DNA, 489 bp, Zea mays
  Peptide Sequence Number=SeqID_42751
atggtcccaggcgtcatcattatggctatgtcgacccctgtcctccgtagactagggttcggcgcagcccatcgtgtagccccccgtgggaggttttctgtctctaaatcccagcttcaattggggttcatcgagaggtcatctgttggctcattgtgggtggagcagtggccccctccctcctcaggctcttgggagagccgtggagtcactcgtgcagcgccaagggctaccgaggtcgaggtggagctgctccagtctcatcttgtcaagtttaatgatcgtgtgatggccttgaaggtcgagcttatggagctgcgatgccatttgggtcgggctctagattttgtcggggcgcgtggctcttctctggtggagcgcgtaaacaacgtcccacgttgtgttcggagcactattggtctaggtgctcgtcggggtgccatcgcagcgctgctcgtggggggattcaagacgggctgcaatctttag

SEQ ID NO: 973 - DNA, 402 bp, Zea mays
  Peptide Sequence Number=SeqID_42752
atggagatggcgacaggtcaggccacgatgaagggcggcccgcggtggcgcacaaatctacggcgagaaatcgcagacggcaccactgattctgcactggatttggttttgggcgagcttcaacaatgcccgcggccgagccaggcaaaagcgggcacggagtggctggcttgcaagcgggcccgagttgctcgtggggcagcggaaatcgcgctggagcagcggcgaactcagccggtcgttgaggttgcgaaggaggaagccctggcagaggggtcccacacggcagcgacaggccaggcgcgcatggtgggtgaagtggctacggcgtgcgcgaggagccgggctgaggaaggccacaagagtgggccccaccacgcttccgttgcgcctggtgagtag

SEQ ID NO: 974 - DNA, 162 bp, Zea mays
  Peptide Sequence Number=SeqID_42753
atggcgctcggtgagttacaagcgggcaatccgagtgaggccttagctcctttagcaggagcaggatccaagcttggggtccgctggggaccgtcctcatactcccagacaccgactcatatagttgtcgatcctattcgaccaggacagatgctcctgtga

SEQ ID NO: 975 - DNA, 3273 bp, Zea mays
  Peptide Sequence Number=SeqID_42754
atgtcaacgaatcctgatgaacctaagagtcgtgcccggacagactttttgctcaacaatgaactagaggtccagaagttttgggatgagaacaaggtttttcaggctgatcctggcaatgactctccaagccctggggaaaaattctttgggaactttccatacccttacatgaatggcttgctgcatctgggtcatgccttctcattgtccaagcttgagtttggtgctgcataccacaggcttcgtggctccaatgttcttttgccctttgctttccactgcactggaatgcccatcaaggcctccgctgataagctagctagggaaatccaacaatatggatatcctccggtgtttcctgtggcagagggttctagtgctgcagtagccgatgctacccaggctgaccaggttgatgttgttgccccagataagtttaaggggaagaagtccaaggctactgcaaaggctggtgcacaaaagtaccagtgggagatcatgaagagctttggtctagatgatgaagaaattgccagatttcaagatccttatcattggttgactcacttccctccgctggcaaaggaggttctcaagaaatttggcttgggttgtgactggaggagatcattcataactactgacatgaatccatactatgatgcttttgttaagtggcagatgaggaagctgaagaaattgggcaaagttgttaaagacatgaggtacacaatctactctccgttggatggccaaccttgtgctgatcatgatagggcaacaggtgaaggtgtgcagccacaagaatacgtcttgattaaaatggaggtgatatcaccttttcctcccaagctgaagtcattggaagggaggaaggtatacttggcagctgctacactaagacccgagacaatgtatggacagacaaattgctgggtccttcctgatggaatgtatggtgcttttgagattaatgacactgatgtcttcatccttacagcaaggtctgcttttaatcttgcataccaacacctatccagggtccctgaaaaaccaacctgcttatgtgagctatctggcagtgatttgattggtttgccactgaaatctcctcttgccttcaatgaaacaatatatgctcttccaatgctcactgtcttgactgacaaaggtactggcattgtgactagtgtccctagtgattcacctgatgatttcatggcactgcaagatttagtcacaaagccagcattgagagcaaagtatggagtgaaagatgagtgggttcttccttatgagattataccaataatccacattcctgaatttggagacaagtcagcagagaaggtttgccatgatcttaagattaaaagccagaacgacaaggagaagcttgctgaagcaaaaagaatgacatatctgaagggatttactgatggaacaatgattgtaggtgagttcagtggtagaaaggttcaggaagcgaaaccgctgattaaaagtaagcttttggaagaaggcacagctgtgttgtatagtgagccggagaagaaggtcatgtctagatctggtgatgaatgtgttgttgccctcactgatcagtggtatataacttatggcgaggctgaatggaagcagaaggcagtcaaatgtttggaccacatgaatacattctcaactgaaacccgcaatggttttgaacatacgctgggctggctgaaccagtgggcttgttcacgttcatttggactcggtactcgaattccatgggatgagcagttccttgtagaatctctttctgattctaccctatacatggcttattatacagttgcacaccttttgcaaaatggtaatatgtatgggaaagaaatatcttcagtaaggccagaagaaatgacagatgaagtctgggatttcgtgttttgtgatggcccggcaccaaaaagcgagatccctgccgctctgttgaacaagatgaaacatgaatttaagtattggtatccatttgatatccgtgtgtctggtaaagaccttattcaaaaccatttgacattctgcatatacaatcatacagcacttcttcctgagcaccactggcctattggtttccgctgcaatggacatctaatgcttaactctgagaaaatgtccaagtccacagggaatttcctaactctggaagatgccataaaaaagtactcttctgatgccactagatttgcccttgctgatgctggcgatggtatggatgatgcaaattttgtcactgaaactgcaaattctgctgttatgaggcttacaaaagaaatttcatggatggaggaggttacagctgctgaatcaaaattaagaactgggccgcccactacatatgctgaccgtgtgttttcaaacgagatgaacattgcaatcaaagaaactgagaagagctacaatgctttcatgttcagagacgccctgaagtctgggttctatgacctccaattggctagagatgagtacaggctctcttgtggtgcagcaggcatgaaccgtgatctgttgtggcgatttatggatgtccagaccaggcttatcacccccatttgcccacactatgctgagcacgtgtggcagaagatcatgaagaaagaaggctttgcaataaaagctggctggccagccgcggacaccccggatcccacactgagaattgcaaataaatacctgcaggattccatagttttgatgaggaaactgcttcagaagcaagagtctggttctaagaagcctaagaagggagctgcaccggcacctccgtccgaggaaaagaagatgagcattggcctcatatatgtgaacgagcactactctggatggaaagagcagtgcttgaaggtgctgcagtccaagttcgacagccaaagccgctccttctcacccgatcaggaaatcgcagaagctctgaaggagtgccccatcgggcaggaaatgaacctgaagcaggttcagaagctgtgcatgcccttcatcaagctgaagaaggacgaggcaagggaggttggtcctcaggcgctggacttgaagcttccgttcggtgagatggatgttctccgggagaacttggagctgatcaagaggcagctgggccttgagcaagtcgaggtgctctccgcgtcggacgaagctgctcgcgctaaggctggtgaacatgcttcgctgctggagaagaacccaccatcacccggcgaccccatcgccatcttcctcagcaaacagagctga

SEQ ID NO: 976 - DNA, 177 bp, Zea mays
  Peptide Sequence Number=SeqID_42755
atggcgccgaggtatcaacctcgttcgcatctggttgttgcgctggtgcttacgttgcgtgacctcagcgccatagatcatggcgccgagctagctgatgatcgaagacaacgtacaccagtgcatgcacgcagagaaattgtgaagaagatccgaagatacttaccatgcaaatga

SEQ ID NO: 977 - DNA, 441 bp, Zea mays
  Peptide Sequence Number=SeqID_42756
atggagtgcctgtgctctggtgagcagttgaaggcgtcagatgagaccatgcggtcatctgattctacgatcacaaaggatttctcggccagtgggtactcttcttggaatggagagattgagcagtaccttgataatggcaacatagaggaagccgagttgtcgctccgggagggcatttgcctaaattatgagacatctgcattagttcctaagatgaaaatctcaattgctagaaaaacaggccgtgggaagactcattcacagtgggattccccaccaatgcccttgcatgctgtcagccttctcatggaggccatatatcttaaagcaagagcacttcatgatcttgggaaagataaagctaacattcaagcttcttctgtgtgtttatccttgatcctttctaatccttttagtgatgcatatgggaacgactaa

SEQ ID NO: 978 - DNA, 345 bp, Zea mays
  Peptide Sequence Number=SeqID_42757
atggatgattgcggcggcggcggcaagaggccgttccagctggcgcggtcgctgacgtaccaccaccacccggggcaccggccggcggccgcgtccaggtggcgacggcagcaccagcagcatcagctcgcggacgagccgcgtgcgccccggccgcaggcggtggtgctgtacacgacgtcgctgcgcggggtgcggcgcacgttcgcggactgcgccgcggtgcgcgccatcctgcgcggcttccgcgtggccgcgcggaggagcaggcggcagatggaggacgatggggagtgctggtgggggaggggaagaagcgacgacgacggggccgaggaactctag

SEQ ID NO: 979 - DNA, 948 bp, Zea mays
  Peptide Sequence Number=SeqID_42758
atggcggccgtcgtggcgctggcaccggcctctccagctctcctccctgtccccttccgcggccgccgcgacggccgggtggccctctcgcctcgccgaacccgctgctccgcggggcgctgcagagccacggcccagaccttccaggggggcgccgccgccagctacgcccgcgagatggagcgcctctccgccaaggagtcattgctcctcgcctttaaagatgctgggggtttcgaggccttagtcagcgggaagaccactgagatgcagaggatcgatgtcaatgagcgaatcgttggacttgaacgcctgaatcccacaccgcgccccacaacatcgccgtttctggagggtcgatggaactttgaatggtttggtgatagtagtcctggagcatttgcagcccgtcttttgtttgagaggtcacctacggctgttgcacactttatgggacttgatgtgctgatcaaggatggatactccaagctctcatcaaacctcaagtttgtaaacacgatacaaagcaagtttttactgactactcaattgtctgttgagggccccatcaggatgaaagaggaatatgttgagggccttatagagattcccagaatcaatgaagaatcattgcctgaacagttaaagggcttgcttggccaaactgcaggagctctacaacaacttcctagccctataagggatgctgtttcagaggggcttaaattgccacttagtggatcatttcaacgcttattcatgatctcttacttggatgaagaaatattgctcattgagttgaagcctgatgaccaactaaaccagaatgccacaaagattatcagagatgctgctggagcacctgacgtcttaaccagacttgaggggccgcaaccgaatccaggtgacggcacagcagatgcagtgatatcggaatatgaaagctaa

SEQ ID NO: 980 - DNA, 420 bp, Zea mays
  Peptide Sequence Number=SeqID_42759
atgaaacacgccgcgaagctcccgtcccgcggtgcatcgtcgtcacagcaccggctctcccacgctatcccgaagacgccgccgcgtaagatcaggatcgttcacgtcttggcgccggaggttatcaaaacagaggctcgggactttcgtaaggtcgtccagcggctcaccggaatgccatcgtcccaaaagggctcctgcgcggcgtcggcactcacggacgaggatgcttcgccatcatcgctatcgtcgtggcagccgactgcgatgtcgtcgccgatgaaagtggaggccgaaacatcgtctggagaagggggagggttactgtacgatctcgatccggatggctacaacgatggcttctatgattttctcctcagctcctgcgacacagacggggtggccggctttaagttatga

SEQ ID NO: 981 - DNA, 1035 bp, Zea mays
  Peptide Sequence Number=SeqID_42760
ggcatcgaattttatgctataaacaccgattcccaagcccttattaattcacaagcgcaatatcctctgcaaattggagagcagttgacccgcggcttaggtgccggtggaaatccgaatttgggagagcaggctgctgaggaatcaagagaaaccatagccactgccctgagggattcagatcttgtcttcataacagctgggatgggagggggtactggatctggtgctgctccagttgttgcccagatatcaaaggaagctggttatcttactgttggtgttgtcacctatccattcagtttcgagggcccttcagccgagagccacttcttcctagaagaccttcggcgacgaagcatattcccaacagtggcattggaagcactagagaagctggaaaagagtgtagacacacttattgtgattccaaatgataagttattagatgttgcggatgaaaacatgcccttgcaagatgcatttctccttgcagatgatgtccttcgtcagggtgttcaaggaatatcagacatcatcacaataccgggacttgtcaatgttgattttgctgatgtaaaagctgtcatgaaaaactctggaactgccatgctcggtgttggtgtttcttccagcaaaaatcgggcccaagaagctgctgaacaggcaacacttgctcctttgattggatcatccatcgaggcagctactggcgttgtgtataatattactggtgggaaggacatcactttgcaagaagtgaacaaggtgtcccagattgtgacaagcctagctgacccatctgcgaacataattttcggtgccgttgttgatgaccgttacactggtgagatacatgtgacaatcattgcgacaggatttccacagtccttccagaaatcccttttggcggatccaaagggagcacggatagtggaatccaaagagaaagcagcaaccctcgcccataaagcagcagctgctgcagttcaaccggtccctgcttctgcttggtctcgaagactcttctcctga

SEQ ID NO: 982 - DNA, 390 bp, Zea mays
  Peptide Sequence Number=SeqID_42761
atggaagaagggtcggcgaccgttggggaagggagtgcccgcgaggccacggcggctgctggccgggtagggaggccgattgccgacgagcgggacgccatcgggaaaggcccttgccgggcggggctcgccggcgagcgggggagaagcgccgcgccgctgctggtggcaggcgcgcggccatggggccgcgccgacatggggagcggcgacgtcgcgagcttggtggccacgagcgggtggcacgcgggcgcggagctccagcgttgcgtgccaggcgacgacggcgtggatcccgccgcgaccggcagcggggagcgtggcccacgggtcgcgctaggagcagcggcgcgccatgggcgcttggaggagggtagcaggggcggttga

SEQ ID NO: 983 - DNA, 240 bp, Zea mays
  Peptide Sequence Number=SeqID_42762
atggcgacggcacaggcagcgtcggcgtccccaacccaccaccgcgcgtctccagggatgtcgccgccgcagccgccgtaccccagcgccgccaggatcgccgactccgcctgcttcccccagtacaccgcctcgctcaagtgtttggaggccaaccaggacaagaccaagtgccagcagcagttcgacgattacaaggaatgcaagaagaaagagatactagcagttgcatgcacatga

SEQ ID NO: 984 - DNA, 1950 bp, Zea mays
  Peptide Sequence Number=SeqID_42763
atggcgaggctcccgctggccgcctgcgccgtcgccgccgccttctacctgtgcctccaccttgcgtcgtcgtcctcttccgctcctcgtcttgcgcctgccccgagcgacggcggccgccgtgcaggcaggaccgcctaccacttccagccggccaagaactggcagaatgggccgatgtactacaacggcatgtaccatctcttctaccagtacaacccgcacggcgcgctctggggcgttggcaacctctcctggggccactccgtttccggcgacctcgtgaactgggccgccctggacacggcgctggacccgacgtcgcccttcgacgccaacggctgctggtcgggctccgccaccatcctccccggcggcaccccggccatcctctacacgggcatcgacgccaacggggagcaggtgcagaacgtggcgttccccagggacccggcggacccgctccttcgccggtgggacaagcccggctacaaccccgtcatcccgctccccgccgacgtcccgggcgacaagttccgggacccttcgacggcgtggctcggccgcgacgggctgtggcgcgtcgcggtgtccgccgaggtccgcggcgtggcgtccacgctcgtgtaccggagcgcggacttcctccgctgggagcgcgcccccgccgccgcgccgctgcacgcctcgcgcgccgcgggtatggtggagtgcccggacctgttcccggtgaaggaggagggtgacgacggcgacggccaagggctcgacgcgtcggcgagcggcgccgggctgcggcacgtgctgaagctcagcgtgatggacacgctccaggactactacatggtggggcggtacgacgacgcggcggacgcgttcgtgccggcggagcccgagcgcggggacgacgtgcgcggctggcggcggctggactacggccacgtgtacgcgtccaagaccttcttcgacgcgcgcgggagccggcgcgtgctgtgggcgtgggccaacgagtccgacagccaggccgacgacgtcgccaagtatagatgcccaaacggcccggcccgaccggcccgcgtgccgcagccacggcccaagcacggcacgccggcctggtccccgccggcgcgcatgatttctttcttgctctcctcggcggtccgacccacacccactcattcctcactggcttggctggcttgtgtgacgcagacgttcccgcggaagctgtggctggacgaggacgggaagcagctgcggcagtggccggtggaggagatcgaaacgctgcggaggaagcgcgtcgtcctgcgccgcggcacggcgctggccaccggaggcatgaacgagatcgtcggcgtcgcgggctcgcaggcggacgtggaggtcgcgttcaaggtctcgagcctagcgggggccgaggcactggaccccaactggctgctggacccgcagaagctgtgcggggagaagggcgcctcggtgcccggcggcgtcgggccgttcgggctcatcgtgatggcctccagcgacctgcgcgagcacaccgctgtcttcttccgcgcgttcaggtaccatggcaggtacaagcttctcatgtgcactgacctgacaaggtcgtccacgagggcaggcgtgtacaagccgccatacggaggattcgtggacgtcgacgttgaggagcacgagaccatcaatttgagaaccctgattgatcactcggtggtggagagcttcggagctgacgggcggatgtgcatcacggctagagtgtaccctgagcacgcggagacgagcaacaaccacatgttcgtgttcaacaatggcacaggcacggtggaggtgtacaagctcgaggcatgggagctcgcggcggcgaccgtaaattccgttgggggcaacgacagcttggttatttctaaatctaatgaccaaagtgaatcctattaa

SEQ ID NO: 985 - DNA, 189 bp, Zea mays
  Peptide Sequence Number=SeqID_42764
atgggtgcaggcggtggggcggccgggggccacggcggcgacgtggggcagaagaccaaggtggctgcaaccaccggcatgaggaaggtgaaagagggaatgtcgcaggggttccaatggatcaaggacaagtgccagcatggcggcgtcaagaagcagcagggctccgaggcccctaggtactactga

SEQ ID NO: 986 - DNA, 1005 bp, Zea mays
  Peptide Sequence Number=SeqID_42765
atgggttcgcccgggtccgccaatggcagacgcggcgagtacgtgaggatccctgaggaggtggaggtggcgtccaagggggaggcagatgccgcggcggccatcaaggcggccgtggcagcggagtgcccgagggtgctgcggtgccgcgcgatccggtggtgggccaaggtcgccgtgcttgggatcttccttgcaggggccggagctgctgccgtggtcttcctcggcccgctcgttattaagaagtgttcaaggatcttaatatattatgatagaatactaatagatctctttggaagtcaatttttgggtgtctacatcgcaatgagggttgttgcacctattctttactgggaatcaataactttcagcagaccagctattgctctaatatgttttggcacaatcgccttattcccaagtgttttgttaccttcttcgcccttcatgtggcttgctgggatgacttttggatatctttatggctttttgataatcacagtggggatgagcataggcatgtcgttgccgtattttataggttctgcattccactgcaggatacatagatggctggagaagtggccaaagaaagcagcttttgtaaggcttgctggcgagggagattggcatcatcaatttaaggctgttgctttactcaggatttctccatttccatatttagtttttaactacgcttctgtggctacgaacgtcaaatattacccatacatagctggttccatggctggaaccatacatgaaactttccttgcaatatacagatggcatgctaaggagaaactaatgccattttttgcaaacagtgggaaacttctacagagcttggctgtagcaactagccaagggtcattcttgtcggtggatcagattatctacaatggaatcggctttacaattgctgcaacttccactgctgctatcactatttatgcaaagaaagcgcttcaaaagctccaagcggaggacgagatattttga

SEQ ID NO: 987 - DNA, 267 bp, Zea mays
  Peptide Sequence Number=SeqID_42766
atggtcggggaaataccgattacagaccggagccctgatttcctactcctggtgcaagatacatggaacagaggacctagcgaatcatctaaggacatttttctggtgtcatgggtgcacgtggagctcacctacggtatattgcccacgacagaccgtggagcagcagcggcggcgatacctccacaactcgcgacgatggcgctcgacacggcatccagggcttcaacaaggaggttgctgcaacgcggcccgggtgggaactag

SEQ ID NO: 988 - DNA, 228 bp, Zea mays
  Peptide Sequence Number=SeqID_42767
atggcggaccgccacggccgagcaccggcgaagggacaggtgtctcaccttggggcagagctcggggaggcttggggcggtctctggcgagctagatggccgagggcgcaggcgcgggtcttcggcggcggctggcggcaagggcagagcctgagagagggtgaagctgcgcgaaatgaggtgagggttgtgcgcggggcactggcagggctctataaagggagctag

SEQ ID NO: 989 - DNA, 258 bp, Zea mays
  Peptide Sequence Number=SeqID_42768
atggctcaccagagtttcttcgacccgcccaagaccttctcaccgccgttctcccttctctgctcgtggattcatggcctcttccccgccactgagttcgccgtggcgccctcttcccctctacccaactccggcgaccccggagccaccctagctcgcgcctgcctcaactccggcgatctcactgccgcggagaggagtggcgccgctgaatgggaaatagggtcaaaccttttcctaaatgattttggtggttga

SEQ ID NO: 990 - DNA, 900 bp, Zea mays
  Peptide Sequence Number=SeqID_42769
atggcagagacagccaagctatgctggtacacaagctacactccattcgaggcatggttcggcaagctggagaagcatatcagtacacactttttaggcggcaggcatcactgcagtaacaggaacagctggaggaaggccaccgtacaatgtggtctaccggaactagaaaaggaagttgacgaaaagatagaccagttcagtgcatgggtggagaaacacccaaaccgcagaagccagatctgcctctcctttttcgacgagaaacacagacaccctggttggtttgtcaacaaaacagagcgcatctattgggagcaatggttcatcaatttgcaagtcatgttccccaaaagatacagcaagtcaaacagctccaaagggctgacaaacatccaagcaaatgccgtggaggagaccagcacaaggcgtgctgcattggaggcgtcgattaacgaagtgctgttccagatcataaagttcgccaacgagaaaaaggaccacattcctgctatccctgacaggattttcaatcacgagatcatgatcccaagactagggttaacgaaactcttttgtttgtcctacattaaagcaagtctaaattttggtcctggtgacatacaggctaaggtgatgttatgtatgggtagagcactgacctatgggatgggtagagcactgacctatgggctgctgtgtatgggcgtggcaggagttggagggtttttaaacctgtggttcctcattctgccgggatctgacctaatcgtccaaggcatcttggaggccgctttagctcaaagcggatgtcttttttatcttcgaggacacttagaacttatggggggatggcaatgggccacgatcattgattccccgagggaattctttggttag

SEQ ID NO: 991 - DNA, 243 bp, Zea mays
  Peptide Sequence Number=SeqID_42770
atgacctggcggatcatatacagaaatgggtttagccttctccttggcttgactcttgtaagtgaacacttatatggggtggcttacgagtggtactatgccctaaaaagcgaccacgacatcatgtcctgggcgtgcttcgtcgaattcttccacatgtattttgggctgcccatatgcaccaacagcctgacagagatgaaggccttgtactgcacagacctgacatggggcagtaagtga

SEQ ID NO: 992 - DNA, 195 bp, Zea mays
  Peptide Sequence Number=SeqID_42771
atgggggtatttctgatggaactggacgatgaccaggagatggatgaagtagccaaggcattgggtatctcgtcgcatgccctaacgagcatcgacgtcggcgctaccatcttcaatgtcatcctaggtgttcagtggcacccctccttgggagcaatcatgtggaactttgacgcattccatatgacgttctag

SEQ ID NO: 993 - DNA, 249 bp, Zea mays
  Peptide Sequence Number=SeqID_42772
atggccacgccgggcatagagaagaaattgagatggggtttagacgatggggattctcgtctcgaccgagggcgcggcgcagggctcagacgactgacagattcttgcctcggccaaggctggcttcggccctttccttcagccaccataggtggtgtcgcccgtgtccgcggtgaggagctcgccggagacgcggggcgcgagtgctctaggggtcttaaggcgactgggatggcctgggaagattag

SEQ ID NO: 994 - DNA, 249 bp, Zea mays
  Peptide Sequence Number=SeqID_42773
atgaagaggaaatacgactgcacaaccatctacagcatttttttcacgggagcgaagggaactggatatgaggcattcaagagggatccgcaagagggccgtttcttgacacagggaacctggttcgataggctcatcggccaaaaaaagggagatcgttcctgcgccgaccctggtagctgctttcgggctttgctgtcgctgcaagcctgcaagtatccaacttttagaccagcaagcataatctga

SEQ ID NO: 995 - DNA, 564 bp, Zea mays
  Peptide Sequence Number=SeqID_42774
gtgggcacgcacgagtacctcgcgccggagctcgtgagcgggagcggccacggcaacggcgtcgactggtgggccttcggcgtcttcctctacgagctcgtgtacggccgcacgcccttcaagggccacaccaaggaggccaccctcaagaacatcctctccaagcaggccacctaccctcagctggacggcgaggccgacgcctcgcagctgcgggacctcgtggggcggctgctggagcgcgacccgcgccgccgcatgggcgccacgcgcggcgccgccgagatcaagcggcacccgttcttctccggcgtggactgggcgctcatccggtgcgtggcgccaccggtggtgccggacagggacgccgcggcccccgtgggcggcggtgacaggaaggcggccaagctcgggagctggagcagcatgagcagcaaccgcggcagcaagaagcggaagagcagcagctttgggaggagatccacatccacctgcgaagaaaggcagggggtcttccgcaagctcatgagctggaatcaggagagccgatcgctgtcatgctaa

SEQ ID NO: 996 - DNA, 156 bp, Zea mays
  Peptide Sequence Number=SeqID_42775
atgacgaaatccatggcagctgcctacacattctgcagtcgcacgaacaagacgattgcagcaaacttgaaggaacggaatgggatcttatcgttctggttccagcggcgaatagagttgatctttggccatccagttatatccactctgacctag

SEQ ID NO: 997 - DNA, 444 bp, Zea mays
  Peptide Sequence Number=SeqID_42776
atggtcagcgcaacatccgtcgccgccctgtccaggaggaatcaagcgccgccacaccggacgacgtcgccagcaacgggaagaactcgccgccaccgcaagagcacgcgctccaacatcgcccagatctggacgcgcaggagagaagggccccgccaccgccttccttgggggtctagacggcgacagtttgccccctcgggcgacggcgaggagggagaaggggggagggagagacttaaagctgagcaacaacaacaaagtcttttactccaattaagttgggtcacgtcaaggattggccaccctattactggatatggccaggaaactagaaaccgtgcagctcggcaaagaattccaaataagatttggacagatgaggatggtgttgaacatgtggagattttggcacaaatgggaagctctgatagaagtggctaa

SEQ ID NO: 998 - DNA, 306 bp, Zea mays
  Peptide Sequence Number=SeqID_42777
atggacactgaagcggcagtcgtcaaccagccactaacgatgctatggtctatgggacttggaagggacacggagcacagcgtaggaaggcaacaaggccagaaggggtggtcaacattggagagttggagcgttagcgcagggttcattgagttagagtttgccctttgtcaagtttctcagcggctggtgcaccctgcggcagcaccacacggcagacggtgcctggttgccttgagggttctggccgagcgccctacagtcatctccaaagggccgcctttggctttccgtcaagtcgattaa

SEQ ID NO: 999 - DNA, 333 bp, Zea mays
  Peptide Sequence Number=SeqID_42778
atgccggtgacgagcccgcacgaccgcgcgttcgacaaggtgttccggccgatgcggaactgcagcccggaggaggacgggctcatcgtgtaccgggagggcaccctggacgacctcaccgtggagacgtgcagccgccacgccgccaccggggacgacggcgccgccggccacgtcatcccggggatcagctgcagcgacctcggctgcctccgcaaggtggacggcaactgcctcgaggagggatgcaaaagccgccgcggcactgcccgcggccatgacgacgacttcttcgtcgtccagctcaaggatctttttcccagctactactga

SEQ ID NO: 1000 - DNA, 435 bp, Zea mays
  Peptide Sequence Number=SeqID_42779
atggagggcgggcgggcggcggcgcaaggtatcgagcgagagagtgacaagcgagagagaagccccaaccaccaaagtggtcgttggggaaagctgctgtcgaagggcgcaccggacagtccgacgaccgttggcgctgttagacgttgctccgcatggcacatcggacagtccggtgctacaccggacagtccggtgaattatagcggagggctcttccagaaatccgaagctgaggagttcggagtgattctccctggtgcaccggacagtccgaccaaatctagtgtgccctcagaactggttacgcagagagatacatccccagctagcccattcaatactcaagagctgagcaataactccaatacactagagcaagactctcaagtgatcaaagcctctcaagtgatcaaagcctcccaagtgccatag

SEQ ID NO: 1001 - DNA, 585 bp, Zea mays
  Peptide Sequence Number=SeqID_42780
atggggaggcctgtcttgctgatggttttcatgggagccatgggtgttggtcttcaaagcacaaatagtgggcggcaaatgttgggctccactgacatgtggacaggtaaccgggtgggtaggtggtcccaagtaccattatgccctcggttacctgctacattcccggattattctctgcaacggggtcattacagtttagtaaagaacactgatccaaccacacctagaagtctaccccaaaggggcttacaagtgggaccatgccccaacttggtagaatcaggccccgcggatgttcgaagtctctgctcatgtgacagacccttcgctccctcggtggctgctgggggtgccttcaccgggacctcgactccgtacgctgtgggggtgccgagttgtcactgctgggggtgccttcaccaggacctcgactccgtacgctgtgggggtgccgagttgtcgcatgctgttgactttgactcagcggcagacaagcccccgtcttcccgtagtgcggtatgggcggaagcttcgccgttgattccagaggaagtcttccggtgttgcgagccctgcgtctaa

SEQ ID NO: 1002 - DNA, 1434 bp, Zea mays
  Peptide Sequence Number=SeqID_42781
atggtggtttcaatattgactcacccgttcatggctgcggcggcgtgcgtcgccgtcgcgttggctctgttggccacgaccagcagcgcgcagctggacccgcacttctacgacaaggcgtgcccggcggcgctccccaccatcaagaggctcgtggaggaggctgtggccgcggagccccgcatgggcgcgtcgctgctgcggctgcacttccacgactgcttcgtcaacgggtgcgacgggtccatcctgctggacgacacgcccttcttcaccggcgagacgatggccgcgccgaacgccaactccgtccgcggcttcgacgtgatcgaccgcattaagggcgccgtcaacgccgcctgcaggggcaacgtggtctcctgcgccgacgtcgtcgccatcgcggcacgcgactccgtcgtcgcgctgggagggccgtcgtacgacgtgccgctgggccgccgggacgcgcggacggcgagccaggcggcggcgaacagcagcatcccggcgccgaccttcggcatcgaccgcctggcctccaacttcgcgtcgcacggcctctccctgcaggacctcgtcgcgctctcgggagcgcacacgctggggttctcccgctgcaccaacttccgagaccgcctctacaacgagaccgccaccctggacggctccctcgccgcctcgctccgggccgcgtgccctcgggccgccggcaccggcgacgacagcctcgcgccgctcgaccccacgcccgcgcggttcgacgccgcctacttcgcctcgctgctgcggaaccggggagtgctgcactcggaccagcagctgttcgccggcggccccggcgtcgcggacgccctcgtgaggttgtacgccgccgacaccgacgccttcaggagggacttcgcggacgccatggtgaggatgggcagcctcagcccgctcaccgggagcaacggcgagattcgctacaactgccggaagtttgtgaggtttgcaaggcggcgacgccacactcccgaaacgccgaaaccccacaccaatcatggacgccgccggcgcgcgtccatcggcaccgtcggccgctgctgccgcagtcgccgggagccccgggacgcgcgggtggtgcgggagctcctgcgctcgatgggtctcggtgagggcgagtacgagccccgcgtcgtgcaccagttcctggacctggcctaccgatacgtcggagacgtgctaggggacgcccaagtctacgccgaccacgccgggaaggctcagatcgacgccgacgacgtccgcctcgccatccaggccaaggtcaatttctccttctcccagccaccgccgcgcgagaaggacagcgccgcctacgccactccgactgcggtgccatttgacagagtgaggctgacaggcagtcaggccccgccggaggcaccatag

SEQ ID NO: 1003 - DNA, 342 bp, Zea mays
  Peptide Sequence Number=SeqID_42782
atgcacgcccgcgccaagcactcccccgccgtactccccagccgtgaagcgcccgcgcgcagcactcccccgctgcaaatcctgcaaccatccgcacgccaagcgcccggttctggtgagggtccagcctgtgtagctttgatcagaaataagcaactcattgtggcaaatgctggtgactcccgctgtgtcatctcaaggaatggtcaggctgtactcccacaatttggtagcgcgtgcgtccctgaccccccgagctcacgcagtccggaggtgctgcagatgcatggtttgagatcagggttgtatagacaaccagtaaagatatcaagcaaagggtga

SEQ ID NO: 1004 - DNA, 438 bp, Zea mays
  Peptide Sequence Number=SeqID_42783
atgtctgaagaggctgcatcagcaaggatgagtctggtcatctggtgccggacggtgaccaggagtaggaaagaggaaagggccgtgtgggtggtgtttatggccatgttggccgtttgtgagtgctcacgtcccggcgatccgtcgttggtggccaagggccgtgacaactggtatcaaagctatcgtcctctgcgtgggtcatcatcgaggaagaggtcgtcccaggattcgtccacaacggcgccgattccaaaaccctcgacgcaaaccaaggtgctgtttggttcaaaaaatgtaacgcaaatggaggaggattcagatcagtgggagcggttgatgaagaagatggattggctcacacagaaggtgatgggtatggatgaggtgcagcaacagttgctggcgcaggcaaggctggcggcgactgtggcgtag

SEQ ID NO: 1005 - DNA, 747 bp, Zea mays
  Peptide Sequence Number=SeqID_42784
atgggcattgagctgttactaattgacttcgttaatgtcaggcccataggaattaattatgctgacattcttttttttttgcattcttttccaaggtatgtgaaaagtcgcagtgataaacaattgcgatataaagatgctgcacacttgacaaaagattgtgagcctgaagtttatagtgctggcggtgccccaatcgttccatgtggcctcgttgcttggagtttgttcaatgatacatatacaatttcggtcaacaagaaagctattgtagtgaataaaaaggatatagcctggcagagtgacaagaagaaaaaatttggcagtgatgtttatcccagtaactttcagaacggaaatcttataggtggcgctaagctaaatgagagcataccgctaagtgagcaagaagatctcattgtttggatgagaactgctgccctcccaactttcagaaagctttatggaagaattgagacagatattatggaaaatgatgaactcacagtggttatacagaacaactataacacatacagttttggagggtcaaaagcactggtcctctcaactacatcttggattggaggcaaaaataatttcattggtttcgcatatctgattgttggtggtttttgccttttccttgcactggtttttgtagttctctacatgattaagccaaggactcttggagacacctctttcttgtcatggaataggggtaccatggactatccaagctaa

SEQ ID NO: 1006 - DNA, 819 bp, Zea mays
  Peptide Sequence Number=SeqID_42785
atgtatacattgtacactcatgtccctttactggatctgcccctaagcagggttaccctagttattgtatcccgcattgtggaatctggaatgcttgccaaagggaggaggttagctggaaggggtggagaaatgtctgcacattatccatttggaccacaggacgatgatgcaattattaaacacaggcttctgactaggacgacgaccactaggggtgaaccaccactaaagaagcttcagaagaagttcatgtcctttgccactgagatcgagaaggatgcagataacataactgactgcgaaagactgtacaaggcctttctacatgaaattaacacctttgagctacctcttctgaaaagcaaggctgtggttgatgcaaacatcagggagaaggaaagctttaatgagctgcaggttgagattgagcgacagattttgcaagctaaaactgatattgaggtccttaagaagcaacttgagcagagcaagatcgagaggcagcacaaagaagagtgtgaagccatcaggaagctgatctgtttgcagcctccacggtcagaaactgaaaaactcattgcagatcttgagaaggaaatagctgatttggaggatgagaatgtagcatgcacaaggactttggaactgaggaagaagcagtttgctcttcttctacatgtggttgaggaattgaagatctccattgaagatgagcaaaagagtatagcagatgagctgagagccatcactggagagcagaagatgagcacaggagaagggagtgtcggcgcttcagattccatggtggttgactaa

SEQ ID NO: 1007 - DNA, 1020 bp, Zea mays
  Peptide Sequence Number=SeqID_42786
atggccgctgttcgtagatgctgcctgctggccgcggtgctgctgtggtcggcgctcgcttcagcggccacggccgcgccggcgcctgtggtggccgggccggtgtccagggtggaggacgccaccatgttccggatatactacggtcagagcttcaaggtcatcaagaactccggcgatggcaagagctaccttctcatgcagaacacgtccaagatggcatccaagacgaagtactgcacggggaggattaagtcgttcgtcatccccctcgccagcttctccgtcgacaccacgacctctccagtgtcattctttgagctgcttggagtgctagagagcttgaaaggaataacatcgaaccaagtcgcttctcagtgcgtgctccagtcatatacaagtggaaatgcccagcttgtgaatagaactgatgtgcagacactctcgcagtttactgcgcatttcataagcgatacagatgaagacagaggttgcaactttgcagcatatgtacccttagaagagggcacaccattgcagatggctgagtggatcaagtacctgggaactttcacaaactctgaaaacagggctaatgctgtctacgatgcagttaagaccactaaatgcatctttatttggattgatatgaataacacgccattgcaggtaaagacaaactacctgtgcttaagcaaagtagctgcaaaccttggcacaagattcaagcctgtagtagcgtggattgaattcacacaggtaccatccgtaggggatgaagattatgatgaggacgaagtggcccaaatccaacacttcaactcccaagccacaactatactcctcgcctctctaagtcgagaggagtataaaaaggtgcaaggattgaagattgctaaggagatttgggacgtgctaaagaccgcgcacgaaggagacgaggtgaccaagatcaccaagcgggaaacgatcgagggggagctcggtcgctttcgacttcgccaaggggaggagccataa

SEQ ID NO: 1008 - DNA, 273 bp, Zea mays
  Peptide Sequence Number=SeqID_42787
atggcccaagtgcacatttccctttcacatggttgtctggcccatgagcttacttgctcggtgaacttgacagcaaacgactaccatgataaaggagttattcggactatggagtcaagtactgaagttgtatctggatccttcttgtgttcagggaagaatgcttcagacgaccgtcgtatacaagcttcggatgaagccaaatacatagagccttcggaggctgaggaatcaagccgaggagaaggacaatttttcaggttctatgattga

SEQ ID NO: 1009 - DNA, 588 bp, Zea mays
  Peptide Sequence Number=SeqID_42788
atgtggatggcgaccgggacgcgcatcggcacgctgtggcgcctatgcgacaggtgcttcgatagccatcaggcgctcgggggacatgtccttggacaccaccggaagagagccaagatcgccattgccgcaggagcagttcatgacgtcgtcgatgacaaggtccatggcaagggcaagggcggcgttggggagcccgtgtttgcaggaagccatgacatcgctgtatcatcaggccatggcttcacatatggcaactccagaagcgacaagaagatggacattggcacggcaagccccaaccgaaaggtcgtcgtcgctggaacgtgccgcgagggtgccaatggcaacggcaacggccacggtgacggctgcaggacgcggtacaagtgcaaggtgtgtggaacggaatgcctcacagggcgcgcgctcggtggccatatggggaagcaccagaagcgactaccagtcggtggtggtggcaaggcagacaggtcgcctagtccagcgacgcggacgacgactgccagacctttggcgcagctgttcggcgccgagaggttgcagagagagataagacctagttga

SEQ ID NO: 1010 - DNA, 1023 bp, Zea mays
  Peptide Sequence Number=SeqID_42789
atggcgcgagtacacgaatcccgtcggcaaggccgcgaggcaacaaagcagacctcccgtcccgatccccccaaactgtttggatttcggaccggacgcgtttctgaacttcttgcgccggaagaaagagaaaccgagaagaggagtcgcggctcccgacatatgtggcggcgggcggcgacagcggcgctgtcgctgggcgccggtgccggcgcggtctcgatcgccacctccgaggaccccgccgcgacgttcaaggtctgcgcgcacctgcctccgcgcctcctccgcgactctgtcacggccgccaccatcgcgtttgactacaagtggtccctctggggcctcgagccgggcacccccgtgtggcagagcgccaagcaccatgcccacctccgttccgccaaccgactccaggagctctgcttccgcaacggtggcatctacatcaagctcggccagcacatcgctcagctggagtatgtcgtgccggaggagtatgtgcaaacaatgagggaatccatgctgaagaggtgcccggtctcatcgtacgagcaggtccgcggggtgtttaccaaggatctcggtgaatcgccagaaactgtttttgcagaatttgatcctgctccatttgcaagtgcttcccttgcacaagtccatgttgcccgaacgcacgatgggcaaaaagttgctgttaaggttgcacaacattgtgcctctggtctggtaacaaatatgcacaagagctgtgccattccaataagatgtgatggtcaagttgtgcaggctggatgcagtatgttgcaatgcagtcccacttcttttccttgcaagtatttggggctgcccatctctgataagaaattgaggaagactgatcttatgctgtggattgagaagattgcagatcgcctccctaattggaaggctcggcacctcaatctggctggacggacaacattggtgaagtttgttctttcagccataccaatctatcttcttattgctataaatatcccttag

SEQ ID NO: 1011 - DNA, 345 bp, Zea mays
  Peptide Sequence Number=SeqID_42790
atggcgacggtgccggtgccgttgccgtggccgagcgtgaggaggtcgctgcaggagggggccgccagcgcggcatcgtacgagcggcgagctccgtggcagggggcggcgcggcccgcggccacggtgaggtcggtggagacgctggtggtgatcgtggccgcgatcgtgctcgccgccgtgctggcgggcgtcctcgcgcgggtctgtggcgggcggcacgtcgtgccgagcgcccagtaccacgacgaggaaggctgggtggagaggcgctgccggagctgcctcgacagcgggctgccgccgccggagcagggggcgtccaagacgagcgaggccaaatag

SEQ ID NO: 1012 - DNA, 174 bp, Zea mays
  Peptide Sequence Number=SeqID_42791
atgggcaaagccatatctatcgtaacaacacccaagagatcaggtgttgatcacgagcagttgatcaggagcctcatcaaccatactgtagggaagcattgtaatatcataacaacactatgtgacaggcaaatgttggggattgtcgtgcagtcctgtgttggaaaggaataa

SEQ ID NO: 1013 - DNA, 1110 bp, Zea mays
  Peptide Sequence Number=SeqID_42792
atggccgccgcctccctcctcgaggccactcgcttcctctccaccccgcacccacgctcgcgctcgcgcccgctccctttcccgcccggcagcggcctacacccccacctcctcaggacccctcgcctctccactctccgcgtccacctccaccgtcccgctcctctcggcgcgcaggagccggcgaggcctggcgcgctcctggccgtagacgcgctcaggaggtccgtgctcgactccctcgcggcgctcaagcggcccgcgctcgcgctcctcctggccggtgtgctgctcgccgcggcatcggcgggcgggccgcacgcggcggcgctggccgcctcgggcgggcgcgtcggcgggtcggccttctcctcgcgctcctcctcgcctcgatcctacgggtacagcgcgccggctcccaggggcgggtacacggccgctcccttctactctccttcgcccttcgtatccgtcggcccagccctcggcatcggcttcgggggatcggggttcctcgtgaccctcatgggtttcgcggctttcctctacctggccgggttcctgtccgactcgtccggcgctaccagtgtgctcacagagacggagaagaccaccgtcctcaagctacaggttggcttgctgggcatggcacgatcatttcagaaggagcttgatcaaatagctgagaaagcagatacatctaccccagctgggttgagctatgtgttgacagagacaacattggcattacttcggcatccggactgttgtatctcagcttactcatcggtggatgtgaaacgaagcattgataatggtgagaaacgtttcaatcagctttcaattgaggagaggggcaagtttgatgaagagacacttgtgaatgtgaacagcatcaagaggaataaaggaggcagccaaagatcaagtggttttagcaacgagtacattgtgataaccatattggttgctgctgagggagtacataaggtgccggttataaatagcagcaatgacttaaagacagctctacaaaagatgggtgccataccatcgcgcaaaatactggtatttcttgctagtttctttttgtctcttgttatatcatga

SEQ ID NO: 1014 - DNA, 2136 bp, Zea mays
  Peptide Sequence Number=SeqID_42793
atggcgtatcgcggtatcggcgtatcgcgtatccgtatcagaattttgtttttccctgacaatggtgaagctggtggatccccttcaaagaaagctgggtcaccactagtgccagcatctgcatgggcatcggtactgcatctcttctcagaggtcacaagtgaggcagaggttgcctatattttcttccccttcttgaaaatggatcatagttctgacgaagatacagaaatcagtgattctgagattgatgattatgaaggaaaaatttatgcaagactgatgtcaggagatttaaaattaaataagaatggagaaaattacatttgtcccttctgtagcagcaagaagaagaattacagtaaaagtagcctggttcaacatgcctcaggagtcagtgcagcacctaatcgggaggcaaaagaaaaagcagtccatcgcgccctcttcaaatatttgaagaatggtcttgctaaatcacctgaaccagggtcacatgcaactcctgtggagccacaacctcttcagaaccgagacgagaagtttgtgtggccctggatgggtgtcctagttaatgtgcctactgaatggaaggatgggcgccaaattggagaaagtggaaatcgtctgaaggagcaactatcacacttttgcccactgagggtcatcccgttatggacttttagaggtcatacaggaaatgctattgttgagtttggaaaggactggaatggtttcagaaatgcgcgtacctttgaaagtcactttgcggcaggaggattcggtaagaaggactggattggaaaaaagaatcaaggatccgagctctatggatggcttgcgcgggctgaagattacaattctccaggaataatagcggaccacttgagaaaaaatggcgacttgaaatctgtcaatgatcttgcaaaggaaggagcgcgtaaaaatgacaggcttgttgctaatttagctaaccaaattgaggtgaaaaataggtatttacaggaactagaatgcaaatacagtgagacaactgcatcacttgagaagatgatggggcaaagggaacaacttctccagtcatacaatgaagaaattagcaagatgcagcagctagctcgcaggcattctcagaagatcattgatgagaatcaaaagttgcgttctgaccttgaggcaaaaatgaatgatcttgatgtgagatccaagcaactcgatgagattgcagcaaaaagcgattatgacagaaggagccttgagcaggagaagcaaaagaatgctatcaaatcgagtcatcttaaattggcaacattagagcagcagaaagctgatgagaatgtgctgaagcttgtggaagaacaaaaagtttcaaacaatgtgtcctatggtagtcttactgtatggaaactacagagggagaaacatgctgcgttaaagaagattctgatgttggaacaacaattggatgcaaaacaaaagcttgaattagaaatacagcagttgaagggcaaactaaaagtgatggagcatatgccaggtgatgaagattcagcgtcaaagaataaaattaatgagctgagtgaggcattgcaagaaaagatagatgaactggatggaatggagtcacttaaccaaactctggttatcaaagaaagcaaaagcaacattgaactgcaagaagctcgcaaagagctagaaaatggcctgcttgatctttcaggtgggcagacacatataggaatcaagagaatgggagagcttgatctaaaagcattttcaaaggcatgccaaaaggagcgtacagaaaatgcagaagttactgctgcctttctttgttcaaagtgggaggctgaaataaaaaatcctgactggcacccttttagggtcgtcacaattgatggaaaggagatggcaataatcgaggatgatgcaaagcttcgagcactcaaagaagaacatggagaagaaatctatgcaatggtgacaaaggcgctgcttgaaaccaacgagtacaaatcaaaaggcagctaccctgtgggggagctatggaacttcaaagaaaaccggaaggtgactctgaaggaagctgtccagtttgtcctgagacagtggcgaacaaacaggaggaagcgataa

SEQ ID NO: 1015 - DNA, 249 bp, Zea mays
  Peptide Sequence Number=SeqID_42794
atggagaagagtaccaggaaagcgatgtccttgccagattggttgattgcccgattcctcggtcgaggggggaccaggcttagagaaaacatcagaagatgtgccgccacgggtgatcctcatcttcctctcaaccactgccacgagcttctttctcatcaggggctcaacaccgagcccgaccagttcgacgcgaatgccgataagttaggccccccaaggcgcccctacccttgcattccaaagtaa

SEQ ID NO: 1016 - DNA, 712 bp, Zea mays
  Peptide Sequence Number=SeqID_42795
atttatacggaggagggaggcgttggtgtacaatactcctggggaccatgtcactcgtgacatccgtgaaggagttgccaagcttggggatctccgtttccgtgtgcttgactcagctggacttgagactgcagcaacatctgggagcattctcgctcggacagcagacatgacagggaatgtattggctaggtctcaatttgccattttcttgattgatgtgagggatggtcttcagccgctggatcttgaggttgggcaatggctgcgcaagcatgcatctggtatacatacgcttgttgcaatgaacaagtccgagtcacttgatgagcatggatttctgactgctgctgctggagaagcacacaagttggggtttggtgaccctgttgcaatatccgcagagacaggcctggggatggcagaactctatgagatactcaggccattgtttgaagaatacatgtttcagcttcgaaataatgacctcaaccaagatgatcctatctcggaggttgaaactgaggcccatgatggtgatgagagcaagttacctttgcagttggcaattgtgggacgtcctaatgttgggaagtccacccttttaaataccttgttgcaagaacagagagttcttgttggtccagaggcaggcctaacaagggactcgattcgggctcagtttcaatttgatagtcgaaccgtgtattta

SEQ ID NO: 1017 - DNA, 522 bp, Zea mays
  Peptide Sequence Number=SeqID_42796
atggccagcggtggtggggggcccgcgttcgtgggccaggtgttcaccatgctcgacccatccgggaacgggctcatggccgttaccacacgcttcgagctcccgcgcttcctcaccaacaggactcctatgtggttcaaaaggatgctatcaccgtcgaagaagactgaaaatagtccagtatttaggttttttatggatctgaatgatgcagtatcctatgtaaagcgactaaatgtgccaagcggcatggtgggggcttgtcgccttgatgtagcatatgaacatttcaaggaaaagcctcacatgttccagtttgttccaaatgaaaagcaggtccaggctgccaataagctattgaagtcacttccacaaaggggcagaaggaaaaaacttgatggggttcctgtttttagtgcgcaaaacttgaatattgcagtggcaacaaatgatggaattagatgttgtcctgatttttttgtttttgtgcaactttgtcactggcaaatgccaagaaggtga

SEQ ID NO: 1018 - DNA, 1017 bp, Zea mays
  Peptide Sequence Number=SeqID_42797
atgcggggcgccatcattgcctatctggcggagctagccagatgggacaccggtcttgttctctgcggcccaagccgagtccgagcccctgggtcgggcgaggcggaggtcgttcggcagaggccagggcggagtccgagccctggggtcgggcgaagcggagttcgtcgtcttctggggctaagcccgagtccgagccctggggtcgggcggagcggagttcatcgtcttctggggctgagcccgagtccgagccctgggtcgggcggagcggagttcgccgtcttccgggacttagcccgagtccgagccctgggtcgggcggagcggagttcgtcgtcttctggggctgagcccgagtccgagccctgggtcgggcggagcggagttcgccgtcttccgggacttagcccgagtccgagcactgggtcgggcggagcggagtttcctatggtgcctttggcagggcctgactgcctgtcagtctcactctgtcaaatggcactgcagtcggagtggcgcaggcggcgctgtccttctgtcaggccgctttatgctgatgggggttaccagctgagaattaggagtcttgagggtacccctaattatggtccccgacaagtgttatcgaacaagatccaagagtcatcggtactcgccatgtcgtgcgcgtccgacgactactatatcaaggactatggcgtcatcttggcgccagagcactacgtggccacatgtgtcgctgtgttcggcaagcttcggcgctgccgctgcttggacgcggtccagagcggctgcaccgcgctgtccatcttcaaacagggggacctcatggtgtactacctcgctgatgagtccggggtgcacttcgtttggcagcccaaccaagagtcatcggtactcgtcatgtcgtgcgcgtccaacgactactatatcaaggactatgacatcatcttggcgccagaggtgacacagaggaggaccaacagcaataaccactcgccatcatcggggtag

SEQ ID NO: 1019 - DNA, 414 bp, Zea mays
  Peptide Sequence Number=SeqID_42798
atggcgagagaagcagcgagcgaagccaccgcaagccgcgaaagcggggcggaggcggcaggggagtgctggagcgaagcgctcaagtcgttcctggaccacatccccgtctcctccgtcccgggcgcgctccaacccactgcctccccaggtgttgggtcggacgaggacgatccattccattccatatacccgaccactaaccatctcgcgttcgtgtttgttccgcacgcagcggtggaggtcaagctccacggctccgtcctgggcgccctcgacgccatgtacagcagcaacgccgcgggcgcggtgatcatcgacgtggtgcacagcagtctaggcaagtacgtcgatcgcgatattggcttcgtcgagttctcgagcctagtcctgtgggcacttgaggtaacctga

SEQ ID NO: 1020 - DNA, 1347 bp, Zea mays
  Peptide Sequence Number=SeqID_42799
atggcgtgcgggtctcgaagccggaccaacgagatggttgacgagtacgagaagctggtggacagcgccaacaagtacgggaccttgctggaggtggttcaggtgctgaccgatctgaagcttaccatcaagcgggcctacatttcctccgacggcgagtggttcatggacgtgttccatgtcgtggatcaggatgggaataaactttatgattgccaagtcatcgacagaattgaacagtctctgggagcgggatcgctcagcttccgcgggccgccggagcgggcggtggccgtggaggcggaggcggaggaggcgcagaccaccatcgagctggtggggcgggaccggccgggcctgctgtcggaggtgttcgcggtgctggcggacctcaggtgcaacgtcgtggcgtcggaggtgtggacgcacgacggccgcgtggcagcgctggtgcacgtgacggacgccgacaccctgggcgccatcgaggacccggcgcgcctggacacggcgaggcgcctgctccgccacgtgctgcgcgggagcagccgcgacaagaaggccgcccgcgccgccgtctcggcgcgcgtcgtggagcacgcgccgcgccggctgcaccagatgatgcgggcggaccgcagcgcccgccgcgacggtgagggcgagggcgagggcgatggcgagcgcgagcgcggcggtgccggcatgccggtggtcgcggtggaggactgcgccgagcgcgggtacacgctcgtcaacgtgcggtgccgcgaccgcgccaagctgctgttcgacacggtgtgcacgctcaccgacatgcagtacgtggtcttccacggcaccgtcatcgccgagggctcggaggcgtaccaggagtactacatccggcacctcgacgacagagccgccagctccggcgaggagcgcgagcgcctgcgccgcggcctcgaagccgccatccaacgccgatacaccgaggggctccggctggagctgtgctgcgaggaccgcgtggggctgctgtccgacgtgacgcgcgtgttccgggagcacgggctgtcggtgacgcacgcggaggtgggcacgcgcggggcgcgggcggccaacgtgttctacgtggtggacgcgtcgtcgggggagcccgtgcaggcgcaggcggtggccgccgtgcgcgccgagatcggcgagcagctcctgttcgtccgggagcaccaggacgccgccgccgccgccgccaacgggaccaggtcgaccgtggccggcgggcggcgctcgctcgggaacatgatccggtcccgctccgagaagttcctctacaacttagggctcatcaggtcgtgctcgtag

SEQ ID NO: 1021 - DNA, 321 bp, Zea mays
  Peptide Sequence Number=SeqID_42800
atgtgccgatgtggtgatgctcgtgagcctagactcctagaacccatcaggtttactgcacctgttccagtgtccctagtcctagttgttcctggagagtggcgactatcagcttcagagcttccccaaatcagccacttgaaaggaattggtagcaccatggatgtaaatcacatcactgagatggaggatggtttaaatgatgatggaatggaatatccatttgagtgtgatgctaatgccagtaacaatgatcagatagtagaggaccatgctgatgatgcccctattgctagtggtgagaatgccatcgtccaatag

SEQ ID NO: 1022 - DNA, 222 bp, Zea mays
  Peptide Sequence Number=SeqID_42801
atgaacaaggataaaggtccaatgccaatgagtatctccaagatgaaaaccaagaagccaatcggtacccctaccggcagcaagctaatggcatctgcattcaaggtcacatcaagcaagaatgaacttatggttttaatgcaaaaattggctgaagttgtgcaacctgcaatcgcaagtgctagtgctagtgctagtgaaagtcgcctagagggggggtga

SEQ ID NO: 1023 - DNA, 417 bp, Zea mays
  Peptide Sequence Number=SeqID_42802
atgaaggtaaagggcgaggcgcatattggcaaggaatgtgattcagactactcttcatctgactccgacgatgaaggacttgctgcctccgtcttggacaagtcctccctgttccccaacgaacgacataaattcctcatggctaaggagaagaaggataaaactgaaacccaagaaaccctcaagcgcttcttaggacgggctccaaatgagtttgagctaaaagtgaagaagataagaagctataatggatctaagttcaagaaccttcaggtggaagattatattgaggaggaaggcatcaagcatgagttctttgctccctacacgccacaacaaaatggtgtagtggaggggaagaacaggacgctcatcgacatggcaaggacgatgcttggagagtacaagacgtcgtaa

SEQ ID NO: 1024 - DNA, 1761 bp, Zea mays
  Peptide Sequence Number=SeqID_42803
atgttcttcgacgggtcgctgatgaagacaggagccggcgcaggcctactcttcatctcgcccctcgggaagcacctacgctacgtgctacgcctccatttcccggcgtccaacaatgtggccgagtatgaggctctggtcaacaggttgcggatcgccatcgagctaggggtccgatgtctcgacgctcgcggtgactcgcagctcgtcattgaccaagtcatgaagaactcccactgccgcgacctgaagatggaggcctactgcgatgaggttcggcgcctggaagacaagttctacgggctcgagctcaaccacatcgcccggcgctacaacgagactgcgaatgagctggctaaaatagcctcggggcgaacaacggttcccccggacgtcttctcccgagaccttcatcaaccctccatcaagatcgacgacacgctcgatcccaaggcgccctcggcccagcccgaggtaccctcgactcagtctgaggcatcctcggcacggcccgaggcaccctcagctcggcccgaggcaccctcggcatccgagggtgaggcactgcgcgtcgaggaggagcaaagcggggtcacgcctgatcaaaactggcagaccccgtacctgaaatatctccaccgaggagagttacccctcgaccgagccgaggctcggcggttggtgcgacgcgccaagtcgttcgtcttgctgggagatgggaaggagctctaccaccgcagcccctcgggcatcctccagcgatgcatttccatcgccgaaggtcaggaactcctacaagagatacactcgggggcttgcggccatcacgcggcacctcgagcccttgtcagaaacgccttccggcaaggtttctactggccgacggcggtggccgacgccgctagaattgtccgcacctgcgaagggtgtcaattctacgcaaggcagacccacctgcctactcaggctctgcagacgatacccatcacctggccttttgctgtgtggggtctcgacctcgtcagccccttgcagaaggcacccgggggctacacgcacctgctggtcgccatcgacaaattctccaagtggatcgaggtccgacccctaaacagcatcatgtccgagcaggcggtggcgttcttcaccaacatcatccatcgttttgaggtcccgaactccatcaccaccgataacggcacccagttcaccggtagaaagttcctggacttctgcgaggatcaccacatccgggtggactgggccgccgtggctcaccccatgacatatgggcaagtagagcgtgccaacagcatgattctacaaggactcaagcctcggatctacaacgacctcaacaagttcggcaagcgatggatgaaggaactcccctcggtggtctggagcatgaggacaacgccgagccgagccacgggcttcatgccgttctttctagtctatggggccgaggccatcttgcccacagacttagaatacggttccccgaggacgagggcctacgccgaccaaagcaaccaagctagtcgagaagactcgctggaccagctggaagaggctcgggacaaggccttactacactcggcgcggtaccagcagtccctgcgacgctaccacgcccgaggggtcggtcctgagacctccaggtgggcgacctggtacttcggctgcgacaagacgcccgagggcgacacaagctcacacctccctgggaagggtcgtttgtcatcgccaaagttctga

SEQ ID NO: 1025 - DNA, 720 bp, Zea mays
  Peptide Sequence Number=SeqID_42804
atgcgtggaggtggcagggcgctgcggttggcgactcggtgcggtctgctgctggtgaccgcgcggctgcgcctagccggcccacgcggagacgatgagctagaaaagacaatctcagttgcatcaagggatccggcatactatggacttgatgaagttgagctttccagacgaagaaactggactggttcttctcataagcagttgacaatgtacctaaatttattgcatggatcctcacaatttatgcatgagcatattcaggtcggtacagtcaagagagctattgaaaagggcaagagcaatgcagcaacttcaaaataccaggatacaagcaggaccaaccactattctgcccaagataatgatgactttctttcttcagaatcagatagacagcttctactcatgagaatatgttgccgctcagcattcaacatatgctgtctattgcagcaggatgaagaacttgatgagctcagtgaaagtgtccaaaggattggtggcgtgggactaaccatacacgaagagctgtctggacaggaaaggatcctaaacgacctaagcttggagatggagactacttccaacagacttgatttcgtgcagaaaagagtggccatggtgataaagaaggccggcatcaagggtcagatcatgctgatcgtgttcctgattgttctgttcatcattcttttcgttttggtgttcttgacatag

SEQ ID NO: 1026 - DNA, 528 bp, Zea mays
  Peptide Sequence Number=SeqID_42805
atggctgaaagactggatcagattacttatgttttgattcaccctcttcgttgtttcagtttaaaggcatggaaactcccactttcagtgattatagcaaaagatgaggtgattattgaccatggagaaggtatcgtgtctgtttggacaaggtgtaagaccattaccagcaacttgcgtgttgagaatgcgaaaaaagccttatttccgcaatgggctaaccacgggcccgtgtcccgcgcgaacgcggcttccaataattcccgcctcccagtacagaaacttagtctgaacttcttgtggtcgttggaattgatgggtcgcgatgggagcatacgacaatttctaccgcatagaccacactaccctacttttatgcatccgcgtctggttgctgttggatacatgtacaatgccacatcatcatgtaaatcccacgcccgcatcctcttcgggtacctgcccgacaaagctttacatacgattgccacggaaaaatatgggtgtgaggataatttggttagttag

SEQ ID NO: 1027 - DNA, 528 bp, Zea mays
  Peptide Sequence Number=SeqID_42806
atgttcctgataccagccccacttaaccatctaccagatcagaataacgtgttggccccattcccaacaatagaaaacacagaattcgcaaagagagacaacattggcattacttcggcatccggactgttgtatctcagcttactcatcggttgtaagtcatatcaatacttcatgcttgagcatcttatcatgtgtttagtgaaggtggatgtgaaacgaagcattgataatggtgagaaacgtttcaatcagctttcaattgaggagaggggcaagtttgatgaagagacacttgtgaatgtgaacagcatcaagaggaataaaggaggcagccaaagatcaagtggttttagcaacgagtacattgtgataaccatattggttgctgctgagggagtacataaggtgccggttataaatagcagcaatgacttaaagacagctctacaaaagatgggtgccataccatcgcgcaaaatactggtatttcttgctagtttctttttgtctcttgttatatcatga

SEQ ID NO: 1028 - DNA, 129 bp, Zea mays
  Peptide Sequence Number=SeqID_42807
atgaagggacccggcctcttctccgacatcggcaagaaggaagggtacttcctcctcctactcctgtctcctcgctatcattgtcgtcatctctctctaactggctcggatctactcacctacgactag

SEQ ID NO: 1029 - DNA, 273 bp, Zea mays
  Peptide Sequence Number=SeqID_42808
gtagatgagctagaaaagacaatctcagttgcatcaagggatccggcatactatggacttgatgaagttgagctttccagacgaagaaactggactggttcttctcataagcagttgacaatgtacctaaatttattgcatggatcctcacaatttatgcatgagcatattcaggtcggtacagtcaagagagctattgaaaagggcaagagcaatgcagcaacttcaaataccaggatacaagcacgaccaaccactattctgcccagataa

SEQ ID NO: 1030 - DNA, 921 bp, Zea mays
  Peptide Sequence Number=SeqID_42809
atgaagggacccggcctcttctctgacatcggcaagaaggccaaggatctacttagtaaggactacacctacgaccagaagctgtccatcttcaccgccagcgcctctggagtgggcacaagagatagggtatggacaggtcctttgactgaactagatgagatcaacctaacacttgttaactgtgtaactgaacgatgtaaaatgggcctgacttccacagctgtgaagaaaggaggtctttattctcttgatgtcagttcagtttacaagtacaagaataccaccgttgatgttaaactggacacagaatcaaatatctctactacattgactgtgttggacgctttgccatccacaaagcttgtcacttctgtgaagctgcctgactacaattctggaaaggtggagctgcaatacttccatgagaatgcaacttttgctactgttgttggcacgaagccgactcctgtgattgatctttctgggacagtaggtgctcaaggagttgcatttggtgcagaagctgggtatgacactgctacaggaaaatttaccaagtacactgctgcaattggtgtaaccaagccagactaccatgctgcattcattctggcggacaaaggtgacaccattaaagtgtcaggtgtttatcaccttgatgagaaacagaaggcctcagctgtggctgagctaacccggaggctctcaacaaatcagaacacactcacagtcggtggactgtacacagttgatccccagacagctgtgaaggcaagactcaataacactggaacgcttgccgcgcttcttcagcatgagcttaaacccaagtcgctcttgacaatctctggtgaattcgacacaaaggccctggacagatccccaaagtttgggttggcgcttgcactgaagccctga

SEQ ID NO: 1031 - DNA, 342 bp, Zea mays
  Peptide Sequence Number=SeqID_42810
atggtcataagtgacaacatcaacacggccaaggcaattgcccgggaatgtggcattttaactgatggtggcatcgccattcaaggcttagatttccaaaccaagaatgaagaagagcttactcaactgataccaaagatacagatgcaccaggtgatggcaagatcttcgccactggataagcatacccttgtcaagcatcttcaaactaaactcgacgaagttgtggctgtgactggtgacgggactaacggtgctcctgcgcttcatgaggctgatattgggcttgcaatgggcattgctggaaccgaggaaatttcaagatttcccttacatggctaa

SEQ ID NO: 1032 - DNA, 204 bp, Zea mays
  Peptide Sequence Number=SeqID_42811
atgccaccactgagcacccctaaggagcttgttgttactcttgagatgtgcatgactaggctggacaagaagagagcttatgtcttcttcaagacctctattgatggttacacatcttgtgctaaggatatgaccaagccttcaggattttacattgacacatgtttcaggattaaggctatccttgcattcaggctatcctga

SEQ ID NO: 1033 - DNA, 504 bp, Zea mays
  Peptide Sequence Number=SeqID_42812
atggccttgggagtgcagcagctgaagaaggagctgggacgatcaaggaaggttccattcgagttcgatgagatccacgagttccttgaccggttctacatgtcaaggattggcatccacatgctgatagggcagcatgtggctttgcatgaccctaaaccggagcctggtgtcataggcatcatcaatacaagattatccccaatccaggtggctcaagctgcttgtgaagatgcatgttctgtctgtttaagggaatatgtatcaactcctgatattaacatttatggcgatccaaattttacatttccgttagcgatgaaggtggcgggataccaagaagcagcctcccaagaatttttcacgtatctgtacagcactgcaaagaatcctcctgagctagatagacctaatactgaaggggtaactatggagtatcacatctgttggagagaaatggccttcaaggaagcacagtggaaattcggacccacttacggttag

SEQ ID NO: 1034 - DNA, 621 bp, Zea mays
  Peptide Sequence Number=SeqID_42813
atgatggatggcccgcccagccgcggccgcccaacaggacccgcgccttctgttccgtccgtcactgcctcccggctcctactactcggcgcggcacagccccagccccaacccctgtgcaaggggcatgtctcccactgcggttgctctatgtccaccggatctggatcccgcgggagcgagtggcgcggcggtggcgatgacgttgggggaggggcggtggaggcaaagggaggatgggaggcggagagaggtcgcgtcggcggtggaggcagggggcgggcaacgcgacagagagtgcggggggaggttagggattgggtggtcacgcggtggagaaggatggagtgtgggagatgcagacacacgatgcgatatggacggtccagatccatggatggcagaacggcagaacgagggaggcagactactcttgctctcttaatatgtagtacagatatcacggatgcggttacggaaaaaagtcattcactcctcgcgtccctaaaatatgggcaacatctcttctcccacgctttcacgaggtgttgggactggacactgacactcccttcccattcgcactgcatcttctctacatccgtgctcgcgacgggctag

SEQ ID NO: 1035 - DNA, 1758 bp, Zea mays
  Peptide Sequence Number=SeqID_42814
atggagctcgccaccgtcgccgctgcagtcgcctccgccgctgcgcgcccgcacgggcctttctcctctccccgcgcagtctctgcctccgtctcgtggaccagtctctcgctcgcctacacctcccgctgtctctcctccacgtcctcgcgacggcggctgcgctggctccccgtcacctcggccgccgtggagctccgcgaggccactgccgggggcggagactcgctccgtgtcaccaagacgccgcagcctggatccagtgttaagttcagcgtggaggtgcctacttccatcattcacgagtgctaccaatccacgctacaggagtacgccaaacgtgttaaggtatcagtttctgcgcaaactggctgcaaacacgtggacgagcacacccatatgaaatttcgaaacgcattattggttcctttatatgataacgaggttggacagtcagccgtgcttgcaattcctgattttgcctactcgcacagaagtcagtatcaatttatcgtagccgttcctggatttcggcctgggaagaccattccagaaaacgttcttataaactatgtaggaccgcaacatgtacaggatgccacgattgaagctatcttaaaacatacgcttcctcaagcactgtcctcggtagaggagagggcattagaagattctgttcgcattctgactcaatttgatgatatgagaaattctttctcactcgacaatgtgtttagatatgatgttgctgtggatgttgcccctgaagtccgatggttatctgaagacaaatataggaacctcaaagttgtcgttgaaatagatgaagctgttgatgcggaaaaggcggcagagaaagagcttcagcgtcgtcataaagctctaggcttacttagaattgtggctgacagaggcctccagattggtgatctggtggtgctggatatatttgcggaaagcattaacaatgatggctctagaggtgaaaaaatttcatcggctgagagtacaggtttccacttggacactgaggaaaatagtaaccttgttcctggatttcttggttcgttgattgggattcgtgctggtgagactagatcatttcctatccagttccccgagtcatttgagcgagaaagtctacgaggtgtccgtgcacagtttactgttgtgtgtaaagagctgttctacagagagttgccagtaatggatgactcacttgctgtaaagcttcttccaggatgcactacaatagacgaggttcgagagcgtattttgaaaagatgtaaagaagtggagaagacggccatagaacaagcaacagacaacgcgatccttgaccagctcgggaagttggtcgaggtcgacgtccctcgtgccttgtttcaagagcaagggcagcagctttatggagccaagcttctgcagcttcaggcggaaaggaagctggataaagaccagctagcttcgttatcaaccaagaggtcagtgcaggcgtacctagaagatgagaaggagaacattacaagaatcattaaacagatgctggccgttggcgatattttcaaatccgagaacttacagtactcgactgatcagctcgtcaaggaagttgagaactccatagcggagttcaaacagtacaaccaagactatgatgaggacaacatcaggcagcaggtccaggatgtcctagaggcggcgaaggtgcttgaatggctcaaggagaactgctcggtcgagtatatcaggcgatga

SEQ ID NO: 1036 - DNA, 147 bp, Zea mays
  Peptide Sequence Number=SeqID_42815
atggtggatgttagctacgctttcatggtggatgtttactatgttttgtcatgtttacagaagagagaaattctggcagatccaattgctgttgccgtcattctgatacaacctgacttgatgactctcaatgaagctgaatgctga

SEQ ID NO: 1037 - DNA, 1116 bp, Zea mays
  Peptide Sequence Number=SeqID_42816
atgccgcccgagttccacttcggcctcctcggctggtcgccgccgtcccctgactccgtatggccagacgtcaccgccgcctccccgccgccgcgctaccccggggggctcaaccagcagcacagcgtggagtattggctcacgctcgacctcctctcctcctcgcccccctgcggccgtcactccgcagtgcgggtctccgattcccgcgatgccgacctcgtcttcgtccccttcttcgcgtccctcagctacaatcgccactaccggcccgtgccgcccgagaaggtcagcagggacagggtcctccaggagaagctggtgcggtacctcgcggcgcggccggagtggaggaggtacggtggtgccgaccacgtcatcgtcgcgcaccaccccaacagcttgctgcacgcccgggcggtgctgcaccccgccgtgttcgtgctgtcagacttcgggaggtaccctccgagggtagctagcttggagaaggatgtcattgcgccctacaagcacatggctaagacgtacgccaatgactcggccgggttcgatgaccggccgaccctgttatacttccgtggagcaatttacaggaaggagggagggagcattcgacaggagctatattatatgctcaaagaagaaaaggatgtttacttttcctttggaagtgtccaggaccatggggccagcaaagctagccaaggaatgcactcatcaaaattttgcctaaatattgctggggacaccccttcttccaatcgtctgtttgatgcgatagttacccactgtgtccctgttatcatcagtgacgacattgagctaccttatgaggatgtgttggattattcaaaattctccatctttgtccgttcgtctgatgctgttaagaaaggttacctgatgagactgctcagtggtgtaagcaagcaacaatggacaaagatgtgggataggctcaaagaggtggataaacattttgagtatcagtatccatcacagaaggatgatgcagtccagatgatctggcaagcattgtctagaaaggtgccatcaattaagctgaaggttcacagatctaatagattttcaagatctaacagaggaaaataa

SEQ ID NO: 1038 - DNA, 855 bp, Zea mays
  Peptide Sequence Number=SeqID_42817
atgacgacggcgataaagaaggggccatggatgccggaggaggacctcgtcctcgtctcctacatccacgagcacggccccagcaagtggcgccacgtggccgcgagcacggggctcatgcgctgcagcaagagctgccgcctccgctggaccaactacctccgcccgggcatccggcgcggccacttcacggcgcgcgaggagcgcgtcatcgtccacctccactccctgctgggcaaccggtgggcggccatcgcgtcgcatctcccccagcgcaccgacaacgacatcaagaactactggaacacccacctcaagaagaagaaggtcgtcgtcgaggaacagcagcgagcggctgcagcagcagccaaacgacacgtcgacgacggcggcatcaccaccagtcgtagtccccgcctgctcgccaaggacgatagctatggctacgactacgacgcgcgcccagctgcagcctatccctgtaccatggacaacgtatccaagcctctcaaagtcaaattaggttgcatgaagagcgcatcgtcatcatccccgccggcgcaggatggtagtagtagtatccgtcgtcctttcttttcactcgaccaaacgtccggcagtacggcgccgctgccacccatctccaacgtggtgccgcagctagccggtacggtgttggcgggacaggggcagggacgacacggcgggcgtttcttccacgagccgccccagcagcagctgtcctcaataatggagaactggttattcctccccaagcagcagcaccagcagcagatgacgcagagctctccgactccgacggctgctgctcactgtccatgctgttttagctaa

SEQ ID NO: 1039 - DNA, 450 bp, Zea mays
  Peptide Sequence Number=SeqID_42818
atggtggtggacacgaaactgggctggtggcggcgctgccttctctctctgcgctcggtaatggaggacgccacagatgcaaaaggggacggctcggttttatacggctacgaggttccgagtccagggaatcgcgggatccgtggtgaggcggacgggaacgctgaccacgcgagaatggcagattccgttgagatgcgcacggaggaatcgctccatcagttcggcgtgctacgagcggatcacacggggaagaaggcactgctcgatcgggcccactggtcaggcgcaggaagcggcgccctgctgggctggccggactgccgtgcggccccacctaccagtgtcgcaaccaatctccacttgcgcacacggcgtgagactggacattgggtcccaccagtcggcacgcacggtcacaagttgggctgcgcggtggtagtgtggtaa

SEQ ID NO: 1040 - DNA, 450 bp, Zea mays
  Peptide Sequence Number=SeqID_42819
atggtggtggacacgaaactgggccggtggcggcgctgccttctctctctgtgctcggtaatggaggacgccacggatgcaaaaggggacggctcggttttatacggctacgaggttccgagtccagggaatcgcgggatccgtggtgaggcggacaggaacgctgaccacgcgagaatggcggattccgttgagatgcgcgcggaggaatcgctccatcagttcggcgtgctacgagcggatcacacggggaagaaggcactgctcgatcgggcccactggtcaggcgcaggaagaggcgccctgctgggctggccggactgccgtgcggccccacctactagtgtcgcaaccaatctccacttgcgcacacggcgtgagactagacattgggtcccaccagtcggcacgcacggtcacaagttgggctgcgcggtggtagtgtggtaa

SEQ ID NO: 1041 - DNA, 492 bp, Zea mays
  Peptide Sequence Number=SeqID_42820
atgcggaagcgattacataacttacatttatttgaaaggaataaaaccctgagtatagaattactcagcaagtcttacccgactaaagaaaagactctcaagggtatgctggttataagggagtcaagagcaattctaagcatagtaaaaccttttgtaaaaatagggtttcaaggaagaaaaagaaaaagaaaaacttgcaatagtactgggccgattctagcccagacggcccaacaacacagggaatcggggcgcgcccacgcccgcggtggaaatttcacagaaaggccctcgaggttttcgctaactgagaacaggttccttcaccgttactcagagtcactgacagtttgcactaaggcccttgaagttctattcctttaccgactgaagtccacgacggcgagcagtgcagggttgtgctccggcgagctagactggccggagaaagccaagaccggcgctcccgagcagcggacatgggattga

SEQ ID NO: 1042 - DNA, 405 bp, Zea mays
  Peptide Sequence Number=SeqID_42821
atggcgctgccgatctcgccttcttcttgctattgctggaggagcacgatctcatgggggctagcgcccttcttccatcgcttagcttcaaggatgtttatcatgcagtcgggctgcggtctcccaccagtggtcatctacaaggatgactaccagccttgtggtggagagaacttcaaggatgttcatcatccttgctggggtggaaggcgagctgagttggggtcctaccttccgcatgggctggtgacccgcttcttcctccagcatttggaggagaaggatgttcaccagccttgcgaaggaggcgaacttcggctatgcggtgccagccggcctgcaagtgccaccagccgccaggcttcctgccccttggcttggatggtcctgtcctcactctcgtag

SEQ ID NO: 1043 - DNA, 387 bp, Zea mays
  Peptide Sequence Number=SeqID_42822
atggcctcaccaggggccatgaggcaatggagtgaagacgtcgaccagctgcttggaatggcgcactccggctcgactaggtcaaggccacagtcatcccggcgccaacatgaggcgtcggcatccgtacactcaccctcggtgagagcagcactgactgaagacctaagggcagagcttagccgtcggcgcgcggcagaagatgctccagtctcttgggagaagtctaatgacctgtgggcagaactcaatcgcaggcgggcgggcaaagatgtctgtgtctcactggagaggacgcgagagcgccggcacaatatcgagggtcgtaacctcgataaagacttcgtcgcggtagcaccgcagaccccagtgggcacccggtcctag

SEQ ID NO: 1044 - DNA, 453 bp, Zea mays
  Peptide Sequence Number=SeqID_42823
atgaaggatcataagccgcgcttcacccgaggccccctcagggatcaccaaaactctgcctcgcccgagcatgccctcaaacagggtatgttctcaggagaatcctcatcccgaccgaggtcccctctccccagaacggcggtctccgcctcgcctaagcctgcctcggccttcgccatctactcggtggccaactccagaacgctttaccgagcgttgctggagtactgtgtcaaccagtacagtataagcaaaccccttgccagggggcttagccaactccaggcagtcccccttgaggctataaatagggtagcctacgacttctggagggcgggcgaacactccacagtttctcctccaccacgatattggcacaacctcaatcaaccccagggacttgggctccttccctctcccgctcaacttgtattccttactacaagcacttag

SEQ ID NO: 1045 - DNA, 483 bp, Zea mays
  Peptide Sequence Number=SeqID_42824
atgaagctggcgctggcgctgcaggtgccaaaaagttcgacacaaaccaatataaagaacaagttagggttcaaaagaaggagtaaaaaggaaaccgatgtgttccctggtctggcgcaccggactgtccggtgcaccaccagacagtgtccggtgcaccaagggtcgtacactccaaactctccagcttcaggttttccaggcgcagcggactgtccgatgtaccaccggactgtccggtgcaccagcggagcaacgactatctgcgcacaacggtcgactctgacgggtgaacattgcagcacagtaacacgacagaagtcagagcagaaggttagaggggcaccggactgtccggtgccgcatgaggacaaagcctccaatggtcgaccagctctaagccctaacgacagggtgttatggcggcacatcggacactgtccggtggcgcaccggactgtccggtgcgcccatcgccagtag

SEQ ID NO: 1046 - DNA, 228 bp, Zea mays
  Peptide Sequence Number=SeqID_42825
atggctagcgtttaccgctgcgcacagcctaagaccatctcaaggcgacgcagggtgctgcaactcggcgacgggcaggcgcagcgatacgagacacaacgcgaccgccctggctgccgcctcgcacttaatcacagttatgatctgctgactggtcgaaaacctgcgatcaaaagtcctcgcattcctttcccgccatattatccaattaacaaggatcaacaatga

SEQ ID NO: 1047 - DNA, 483 bp, Zea mays
  Peptide Sequence Number=SeqID_42826
atgcaacaacctagctgggactgggactgggactccgagctgctcctgctgcggcggtcctggaagcgcagctgggcggcgcgcgccctgtcgtcgtgctcgctgccgccgcccggcctgctggccttcttcgccatcgtcgttttcttccttgccgtctccgggtacgtggactacaaggccatcgagcgccgcgccgagatcggcgcccgcgtcttcgccgcgccgctcgccctggccaccgtcttcctcctcttcgtcgcgctcagctggcgccgtaggtactgggccaccaggaggaggaaggcggcgcaccactacccatggtcgtcgtcgtcgtcgtcgcagcacgaggcggacgcggtggcgccgtggggcgtgttggcggcggtggccatactgctgctcatgatgacgttccagcagtccgtccactccatgtggttcaggccgctctgggactccgactactacgacccctaa

SEQ ID NO: 1048 - DNA, 453 bp, Zea mays
  Peptide Sequence Number=SeqID_42827
atggaaataaatggcgaaggcgaagattcggaaattggaaccgtacagaaacagcagtaccttcggccgactctcttggtgtcgggcggcggggccaatgaagaggaggaggcggcggaagccgccttgggcatctccgcccccgctgacggtggccggaggcagcaggacaccaggtacgtggacatctttcttcaacttgttcttattgaagagggaggtctggccgagcttgccttccctggagagagaataaaggaggaggaggaggaggaagaagaaggaatggatggatggatggataggaagtggccatatgggccaaaccaaaccaaatcaattggtgggtttgtatcgtgccagcggcccatatgtagacttccaccagaccatccccgtctgattccgcagatcatgcttacaattaattattcttggggcgaggaggagtaa

SEQ ID NO: 1049 - DNA, 423 bp, Zea mays
  Peptide Sequence Number=SeqID_42828
atatttgttcttttgaattatgaaccagcacagcctatgatgtatagagtgtttgcattgcttgatttggttttcttgtgtgtagaaaaggtccaagggctaaagaaggacctgcaatatataaaagagacggtgcagtcctcatctattctggaaatgaaggataacaagatcaggaagcatgatgactgggtgaaatgggtgatccctcgtgagagcaatcctgatgtcccgtcaagctcagcatctgtaccaaggcctgatgtcaataatctgacggcacatcttggaggcatggatctgcaggattctgctagctctgctggcgctgtggagccgaagcataatgatgtggtccagaacggatcgccttctggtaatgaagaggctgcagtagctgaggacagctctgatcagcagtag

SEQ ID NO: 1050 - DNA, 879 bp, Zea mays
  Peptide Sequence Number=SeqID_42829
atgctggagctggaagaaggcccaggaaggactccgtccgggtacggcggcggcgttgggcgcgatgcaaaaggcgaaagaagcgaagaagataaggagggaccaagaccaacccagtgcaccacacaaggcattgtcagcggcggcggcggcggcgggccggcggagactcccaggccaggagcagtctgccgattggaaggggagatgaaggccacgctcaagggccgctacgagggcgacaaggccacggccgccaccaccctcgccgcccccgccggcgacctccgcctcaaggcctccgccaccgaggccgccttcaccaacggtccttccctgcgaggcctcaccctcaccctcgagaagcccggcgccttcctcgttgacctcaagccccacaaccaggatgtgcgctttcagttcatgaactccgcgctcgtgctcgacaagcgcgtcagcctcacctacactcactccactagcctcgccgcggcccccgccgccgcgccgccctcccgcaccgcgctcgactgcaccgtcactttcgaccccgccaacaaggtcagcctctcccactcgctaggctccggcggctgccgcctcaagtacacctacgcgcacggggtcgaccgcctcaccaccatcgagcccctcttcgacaccaacaagaacgcatgggagttcgccatcaccaggaagttcgccggaggggacgccgtcaagggcacctaccaggcctccaccaagctgctcggcctcgagtggagcagggactctctcgccggcggctccttcaaggttgcgacgacattcgatttgtcggaccaaagcaaagcaccaaagctaatagcagagagcacgtggaactacgaaatatga

SEQ ID NO: 1051 - DNA, 324 bp, Zea mays
  Peptide Sequence Number=SeqID_42830
atggtgattactgttagaacttactggcagcctgtcaaggttacgttgtcagatggtaccgtttcagaaggtactctgagagtttcagaggctgcaatacaaatatctaggtgtcgtgtttctgaatatctgagtttgcatacatgctatgatttactcccagattctggcaaggttattgccctagacattaatttacctgtgaagcaatcattccatattctccatgaacaggggattcctgtagctcctctctgggactcattcagaggtcaatttgttggtctccttagcccattggatttcatactcatattgcgggag

SEQ ID NO: 1052 - DNA, 1125 bp, Zea mays
  Peptide Sequence Number=SeqID_42831
atggggttcccggttcctggacggctccttcaactgggaatgggggcggctggaagtgagcgaggatggaaggggagcgtggttagggtcggggatgggaggcgccgcggccgccgctgccatggcgaggtgggtctgcgacggctccggtcggtgcacgcggccgcccttcatcggcggcgagcggggaactgggtggacaccggaccgcagaatcgcggattcgatgggagaggggatgggaggaggcagcagagggtgaggaggcgtgattggatccgctgcgggacggtgtgtgagaccggcgccgaggtggacgccgtcgcggacgtgtgcggtgtggcggtgctacaggaggactgcgcggcgaggcatgagcggcctgggtcagacccaacacgggcgatggtggggacggtggggatccggcatgcagggagaggtgagggagaggtgggcgagggggcggatgtgcgagggagggaatgggggagaggcaggggcggcgggatgcggctgcgggcgggagcggggtgcgtcagcgggcagaacgtgcaccatccggaggtcttattcttcgcgacactatcgaagccacaagcgaacccaagaagggttgggcgacgtggaggctcctccgaagccgaggttgagtctgtcttccgtggccgaggccgagtccgagcccctgggtcgggcgaggcggaggtcgttcggcagaggccagggcggagtccgagccctggggtcgggcgaagcggagttcgtcgtcttctggggctgagcctgagtccgagccctggggtcgggcggagcggagttcgccgtcttctggggctgagcccgagtccgagccctggggtcgggcggagcggagttcgccgtcttccgggacttagcccgagtccgagccctgggtcgggcgaagcggagttcgccgtcttccgggacttagcccgagtccgagccctggggtcgggcggagcggagttcgccgtcttccgggacttagcccgagtccgagccctggggtcgggcggagcggagttcgccgtcttccgggacttagcccgagtccgagccctgggtcgggcggagcggagttcgccgtcttccgagacttag

SEQ ID NO: 1053 - DNA, 360 bp, Zea mays
  Peptide Sequence Number=SeqID_42832
atggccggtcgcttcctcctcgtcgttgccgtcgccctcctcctccgccctggggatgcgtccgtgcacgagtaccgcgggctcagcttcgccaacaagggcaacgccttcatcctccacgccggcagcgagggcctctacgcggcctcccacgccaacaccaccgccgaggacgccgccgcagtggccgaagccttaatccgtgcaaagggttggctgcggtacagctacagcggggtggatgctggcagccgggtggatcttggatcctaccgagctgggtactctgccgcccgacacttggatgggtgcgggttttgcgagaatttagtaatcttgcattctcgcgtcaaggtttga

SEQ ID NO: 1054 - DNA, 228 bp, Zea mays
  Peptide Sequence Number=SeqID_42833
atggcacagcgcagtgactcagtcgcgcagagggtgcgggtgagcgaatgtagtgcgggccccgcggaccagcgaaagggtagggcaaacgcactagagccgctgcccggtggggccctagtgttggcaccaccacaacagaagcgagatcagggctgcgcacaggaaatggctagatgggccaaatggagcggtggtcggcccatgcgcggatgcaacaacacataa

SEQ ID NO: 1055 - DNA, 297 bp, Zea mays
  Peptide Sequence Number=SeqID_42834
atggctgtgatccgccagcctgacggcggctgtacacagcatcagtgcatcagctgctacgcgaagcaccatcctggcaaaggtgcgagcaagcggtcccaggtggcgcggtcatctttgactcaagcaactttccgtcacgcatctgctccaccacttggccaacacagcctctccgacctggatctccaggcatccggatctgcagcacctgaagacagccatccgctgccaatcaactgcccccatctgcagagcacctgcctaggtattctctcaaccaatttagtgccctag

SEQ ID NO: 1056 - DNA, 501 bp, Zea mays
  Peptide Sequence Number=SeqID_42835
atggcagcgccgcacatcactggtgtggtggcgctcctcaaggcagcccacccggactggtctccggctgccataaagtcggccatgctgaccacggcggaccggctggacaacggcggccagcccattctggacgagcagcacgccgaagcgacatccttcgccatgggcgccggccacgtcaacgtctccagggccaccgacccggccggggctggtaaggcactcaagaccatcactagcccaagctcgacctgctcggaggtggggagcatcccagaatcgtggctcaactatcctaccataacggtgccactcaaggatacgccggtcacggtaccccggacccttacgaacgtcggcccggcgaagacctacggtgcgaacgtgcaaggcccatcctcgatggacatctgggtttccccggactacctggtgttctctgaacccggggagaagaagacgttcaacgtgacggtgacggttgttggaactcactag

SEQ ID NO: 1057 - DNA, 228 bp, Zea mays
  Peptide Sequence Number=SeqID_42836
atggcaggcaccctgaaggagcagctgaattccatcacgcccgccctacaagaaatgcagatgagaaaggatgccagagtaaagcagttcgtggaggttcagactgaaatacacagaatcgcttctgaaattgttggacggttagcgggtggagctgtcgctgtgaacgaagaggatctgagaactacaaagccattggttgttcccgtctatcatcacaggccatag

SEQ ID NO: 1058 - DNA, 276 bp, Zea mays
  Peptide Sequence Number=SeqID_42837
atggcggaagaacgccaacccccacgaggtcgtgctcctccaacaacagcaagaagaaggatcgcatcctcccctgaagtgggcctgggggccactgtcggtaccctgagacaggggtaccccctactactatatcaaggcgcagttcccgtgcggctacctcttagccgcacgaagctggctgaaaagctgagcgcttggcagtccgcagcatcttttggtggccagaagctgcaaaaagctgaaacaaacacgaccattgatcatttgatttaa

SEQ ID NO: 1059 - DNA, 384 bp, Zea mays
  Peptide Sequence Number=SeqID_42838
atgtggcgcgggcggcggcctataaagcggggcgaggccgttgcgttggaatggagtggagtggggaggaggaaggcgagcgaggcaaatggaaatgagaatgggaatggacggacgaacggtggagaaggcgtggccgcggcctcgcttggcgctactacgccgcgtgtgccctgctccccgtgccgcgcctgcgcttgcccatgtgggggaggagcccggcgcacggtaaacaaccacgagtccattagattgatgacgatgagcgcgggcggccagggccggattgaagccgagctttacggagcacgggtcatggatggctccagatcaacaggtgctacggaccgtcgatggggatctggcacccggctacccgcttaa

SEQ ID NO: 1060 - DNA, 179 bp, Zea mays
  Peptide Sequence Number=SeqID_42839
atgtcgctctgccgggctggcctactcgtcagtcagctccaaacccttccagttgtcgtctccgcaggatttgcggaccacgccgaacacctcggcgctgtcgttgggtcacctgatttccccgcggcacgactccgtctcacgctggctacaaaggcggacgacttccccacatctcc

SEQ ID NO: 1061 - DNA, 261 bp, Zea mays
  Peptide Sequence Number=SeqID_42840
atggggagcaagccggccggtgatgccgccgagggggaggagtggaagtccatcagcggcgagagacaccggcaacgcggtgcatcccgactcgtgggcaactgcggcggcgatgtcatgcgcatggcgatccggggtcttatcccacgacgcggcggactcggtcagtcgttcctcaaatcatgcgtggcggcggagatttcggtcatggccgttgcggaggcgcgggatgacacgcgggtcccagcagcagcggcgtga

SEQ ID NO: 1062 - DNA, 306 bp, Zea mays
  Peptide Sequence Number=SeqID_42841
atggcacaggagatgacgatgctgctggttccgcagacgttgatgctgagtaacgaaaaagagcgattgacaaaaacaagtacctctggatttcaacgctatgtagcttgccttaagcagctacatcattccaggacaaaagaaaaacatttgcaccaagagttgcaatacaagaccatgaaagaaatgtgcttttggacacaagcaccaccagctatggaggcccgcttttgggaactgaggatcgcttttgggaactatcccagttcatctaggttgctgttagaacttccccctactgtgtag

SEQ ID NO: 1063 - DNA, 423 bp, Zea mays
  Peptide Sequence Number=SeqID_42842
atggacatgtcccgaatggagacgttgtatcatgctgacaaggagaagaccgaagcacttatcctggagctggtcgtgtggcttcatcatctaatcagcaaatcaggaaacaccagtggaggtgtaaggtctcctatcaaatctccagtcagctcaccaacacaaaagggtgctgcaatgacaatgttgtcgggcaaaacaaacaatttgccaccaattctcacccaagaggaccaggatatgctaaggggtgttaagtataggaaatttgttctagaaataagcaaaagtcaagagtttgacacaaagtcaagtcacagcaaacagagtaggttgagcaagagcaacagccactctccggctagtggcagcagaaaagacttgttcccagcactaaacttcactaaagctaagatactataa

SEQ ID NO: 1064 - DNA, 1080 bp, Zea mays
  Peptide Sequence Number=SeqID_42843
atggcggccgagcccaagatcctagagctctccaacggcaagatcaccgcgaggatctccaactggggcgccaccatcacctccctcctcgtccccgacgcccagggtccgcatcgctcgcttttctctttgtttcgcctcctctgggttacttcttggcttcttcggttccccgggagtgtcgctgatgtggtgctcggattcgatggcttggatccgtacgtgaaaggcatgtcaccttattttggctgcatagttggccgtgtcgcgaataggatcaaggatgggaagtttacactaaacggacttgagtattcattacctgtcaacaatggacctaacagccttcatggtgggttgaagggatttgataaggtcgtgtgggatgtcgtggagcacaaagatggcgaatgcccttcaataacttttcagtatcacagcaaggacggggaagaaggctatccaggcgatgtaaccattcgagcaacatactctcttcctgaagctactactctaaggcttgacatggaagctacaccagagaacaaagcaactcctataagcctggcgcagcacacctactggaacctcgcaggtcacgcctgcggcgacatcttaaaccactcgctgcagatctggggcaagcacatcactccggtcgacgagaacacaattcccaccggcgagataatgcccgtcgatggcaccccttttgacttcacgacggagcgcaggattggcgagcgcatcgacggtgttcctggagggtatgatcataactacgtgctggactgtggcgacgagaaggacggcctgaagcgtgcggccaggctgaaagatccgtcgagcttgcggaccctggacctgtggactgacgcacccggcatgcagctgtacactgccaactacgtggatggcatcggtggcaaggcgggcgctgtctacgcgaagcatgctggagtgtgcttggaaacccaggggttcccgaatgccatcaaccagcctgagtttccctctgtggttgttcggcccggtgagaagtataagcatactatgctgtttgagttctcgggatgttga

SEQ ID NO: 1065 - DNA, 1052 bp, Zea mays
  Peptide Sequence Number=SeqID_42844
accagaccacccctgcgccctggacctgggactgggagaccgcgacctacagcgaggcagggaagactacgacgtcagagaatttccagcagcagcgcagcagcagctcactcactcccctccccctgctccctccactctcgcagtcgcagcgcaagtctcttcagttcagcttctcttccaaaacccaagcaccagcacgtggtaccatcccaaaccacaaggctccagccatggcggccgccggagcagcgatgcgtctgcggctcctgtaccggatgctgcgcgtgggggagctcctcgcgctggtggcgttcctgtcctggtcgtcgtcccgcgtgccttccgccgccgccgccgcgctgcgtctcgcggggtcgctcctcctcaacgcccgcttcgtcttcgtcctcgggaacgccatcgtgctcctcctcctcgcgctgtcgcggcgcgagcgcgacctctcctcgtcgtcgtcgtcgttctcctccgcctccggcgggcagcagacgagcacgaccgccggcacaccgccaccgcaggacgccgccagcgccgtattcccttcctcgttttccgatgctcctacagctccaccggctccctccacatcgctggaagccttcagcgcgcccccaccggccccggcgtccgacgacaggcccgggagccccgcggcggcgcgggcgagcaagctggcgcgcgccgcgccgcggcggagcaggtcggagaagatggcggcgggcccgcggctgctgcaggttcggcgcgcggcgtccccgccggcggcccccgagctgcggcggacggagtcggagaacgggcggcggcggcggtcgtccgtgtcggcgcgcgcgtgccgctggggcgcggacgacgccgacgagttccggcgcacggtggaggcgttcatcgacaagcacaagcggttccaccgccaggagtcgatgacgctggccgtcgtcgcggggaccgggtccgggtccgggtccggcgggcactgcgaggccgccccggccttcactggcgccctggccgtcgtggagtag

SEQ ID NO: 1066 - DNA, 360 bp, Zea mays
  Peptide Sequence Number=SeqID_42845
atggggtatggtgtcgttgtgtacgggtgtgacaggggtttgaaggttttttcgacctgtgcaaggtcaagtttttatgtgaagtttaagaaaaaaacagtttggaaactcaaatcccctaggaatctctacatttttcccaaggtgaacaatctcatggataccattggttttcttttcccgggttcgtctccccttagctccaaactagcccttatcgaggagggtgacgcattagttttcaggtcttggttgtgtccagttttggcaacttgtgattacatcaaggttactcagctggaacggaaaggagatgaactgtacggagacatcttgatctccagaggattaaagatgtga

SEQ ID NO: 1067 - DNA, 498 bp, Zea mays
  Peptide Sequence Number=SeqID_42846
atggcagcgccgcacatcactggtgtggtggcgctcctcaaggcagcccacccggactggtctccggctgccataaagtcggccatgctgaccacggcggaccggctggacaacggcggccagcccattctggacgagcagcacgccgaagcgacatccttcgccatgggcgccggccacgtcaacgtctccagggccaccgacccggccggggctggtgcactcaagaccatcactagcccaagctcgacctgctcggaggtggggagcatcccagaatcgtggctcaactatcctaccataacggtgccactcaaggatacgccggtcacggtaccccggacccttacgaacgtcggcccggcgaagacctacggtgcgaacgtgcaaggcccatcctcgatggacatctgggtttccccggactacctggtgttctctgaacccggggagaagaagacgttcaacgtgacggtgacggttgttggaactcactag

SEQ ID NO: 1068 - DNA, 570 bp, Zea mays
  Peptide Sequence Number=SeqID_42847
atggtggagggaggcaattgtctatcgccaaccatgaggagggcggttgctgctcaggggccactaaggcttacaaataatatcctcagtactgcgcaacaagtgtggcttcaaaagcttggaggtgcaaaaaatcctgtcaaagaatatattgacaaactttcaagagaagaatccaccaatgttcagaagaatggatccactgttcagagcaaacctctgcccaaacttagtaaagcccagcccagccaagagctgaaaccaactggaccgcaacgtggggaaaggaagataaaaatatttaggaaactaaaggaggaagaatcaaggagaaaagaggttctggggcaagcagaacaatcagaacagtcaagttttgaatctagcgtcgtagatggagcacaaatttctgatgcgtcttctggagacaaaaatgatgaacaggagcctcatgaaattggaccgatcgtagctaatagcaacggtggagttaaccatagtagaaatgaaaagactgagaatttttcatcagaaaaggaagcagctgacgatcattcctcggttatgtga

SEQ ID NO: 1069 - DNA, 156 bp, Zea mays
  Peptide Sequence Number=SeqID_42848
atggcgaatggtggaagcgtgttatatatccgagagcacgacgagcatggagggggcgtcaggcgtccgacgactccgacgggacacgccagagcgcggggttggcgggtcagattaatgaggtgtttgaatgtactagatctattagttagttag

SEQ ID NO: 1070 - DNA, 336 bp, Zea mays
  Peptide Sequence Number=SeqID_42849
atgaggatcaactgctgcagcatctggcgcaacaaggcactgaggaggatgtgtttcagtgaaaggggtgctgtgagcagcacccagtgtgtgctcacatcagatgctggcccagacactcttgtcgtccgaacatcctttcagaggaattatgctgatcctaacgaagtcactgctgtcattttgggtggtgctggggaagacgaccggggaaggaaaagccagcaagagggacacaaagagcaccagcagcacaagttgaccctcccaactgtttcgaattataccattcacgatgccactgacggcaccgacaatggcaaacaggaaggatag

SEQ ID NO: 1071 - DNA, 286 bp, Zea mays
  Peptide Sequence Number=SeqID_42850
atgtccggtgcacaccggacagtccagtgcccccttccgaccgttggcccggccacgtgtcccgcgctgatcgcgcggccgaccgttggccctggccgaccattggctcaccggacagtccggtgcacaccggacagtccggtgtgcttcacctatgcagttcagcagtgtgcttcccctagagggaaactccggacgactacaacgatcgccctaggcacaatcatttccgactatttcttccttcgacttgaactggtacctgttcgacatcctacttctcaag

SEQ ID NO: 1072 - DNA, 801 bp, Zea mays
  Peptide Sequence Number=SeqID_42851
atgctgtcacgtgtgcccccatccatcattggcagtgcacacaaaaacatggatacaaaactaacagggccgtggtcgtatgaaagggaaggtgtaaatcagggccctcacaggaaaggcacatgctatgggcaaaggcaccgcagagcacagcggcgtatgacgagatccacagaagagacacatgctgtgataagcaagtgtaacgttgctgaccactttcatctgtttataaagccaggttacaaggccatccaatttctaggatttctacatatatgcatttcgttattgcctcacagttgcgcgagggatgccaaattatatggcaacatgatttccaagttgagcaggcttgaagacacggaagataatggccaaatgagtcagacagtaaacaagaagcgtgggctcttatggccactgtcggaaatggttaggagattcttcactgccgatggtagcaagggttccacgttgtggcctgcgctgaggctattgatcccgataatagcattggttgcagtttgtgtgggttactacatgcacaacagtgttgaagagatagactgcaccaactgtgagtgtttatcgttgtatagatctgatgagtactacacgtatttgttggctgatgaatggagaactggcttgaaagctcttggagctgacagtattagtaaactaaagaaagcatttccagaactggtccaggaggtatggttggtttctattgtaaattataatgctccaaagcaaagtgatcaagatgactgctatttctgtgatttttcacaatga

SEQ ID NO: 1073 - DNA, 561 bp, Zea mays
  Peptide Sequence Number=SeqID_42852
atggtggagggaggcaattgtctatcgccaaccatgaggagggcggttgctgctcaggggccactaaggcttacaaataatatcctcagtactgcgcaacaagtgtggcttcaaaagcttggaggtgcaaaaaatcctgtcaaagaatatattgacaaactttcaagagaagaatccaccaatgttcagaagaatggatccactgttcagagcaaacctctgcccaaacttagtaaagcccagcccagccaagagctgaaaccaactggaccgcaacgtggggaaaggaagataaaaatatttaggaaactaaaggaggaagaatcaaggagaaaagaggttctggggcaagcagaacaatcagaacagtcaagttttgaatctagcgtcgtagatggagcacaaatttctgatgcgtcttctggagacaaaaatgatgaacaggagcctcatgaaattggaccgatcgtagctaatagcaacggtggagttaaccatagtagaaatgaaaagactgagaatttttcatcagaaaaggaagcagctgacgatcattcctcg

SEQ ID NO: 1074 - DNA, 339 bp, Zea mays
  Peptide Sequence Number=SeqID_42853
atggcggcgccctcccacctccacctcccgggctgcccccaaaccctagccctgcccctgccctggccacggggcttctctgctccgcccggcctcctctcccgctcccgacgcctccgcccggtcgccgcgctcgggcccgccgacgccggcgacttgctcggccgagtcgaggcgttactctacaccgtcgcggacgctgctgtctccgcggagcccgtcgcggcggccgggaccaaggaggccgccgccggtgactggctctccagcatcaccaattccatggagaccgtgctcaaggtgcttttatgctttctgaacgtgctccgcaatatttaa

SEQ ID NO: 1075 - DNA, 216 bp, Zea mays
  Peptide Sequence Number=SeqID_42854
atgaggatcaactgctgcagcatctggcgcaacaaggcactgaggaggatgtgtttcagtgaaaggggtgctgtgagcagcacccagtgtgtgctcacatcagatgctggcccagacactcttaggaattatgctgatcctaacgaagtcactgctgtcattttgggtggtggtaccgagactcagcttctccctctcacatcggcacatcgctag

SEQ ID NO: 1076 - DNA, 978 bp, Zea mays
  Peptide Sequence Number=SeqID_42855
atgcaccagcccagccgtgccaaccctgccctccacctagcactgaccggtgggacccgcacttcggctgtctgcccacgcgtggagacctacttgggcaccgtcgtgtggggcctggtagtcaatctcactggctcgcccacgcttgctggcgtttctgctattgacaggtgggcctgcctcgtcagctggttctcccacgccgtgagcttcgcaacaaatccgagctccacggcaaccacccgcgtggagtccgccacagccccactgccgcgcagccgccttgcttccgagccgacgggcgggacccatccgccaggcgcccttcgccttaggtcactacgccgttgggcccgcgtgtctgccgctgtgcgccactgtagatcttcccaggcaactgctcaccgagttcgccgccaggttaagcgcagctgcacccaactaacatcgccggactataaagggggtaggtcacgggttcttccttctctctttgttcttcccttaatcccaaccgccactgttaccgtggggaagaagggcgtaatcgcggccacctccattggaccacctccgcgccgccgtgagtttatcccgggctacagcactgggtggtcgaggaatcagcggggatggcatcaccgccgcgtggagaatccgggtggagcccgattgaatcggattccaaccgtatcaaggaagaatcgctcgccggtgcgggcgctctgccttcagcgtcgctcttgccgtggtccgaggttacggtgccattattgtaggtacggattctcagtagagtttcaccttgattctaggatgggtaattgctcctcgtatggccggttggaccatgggagtgccgcatcggctgtgcgccggtggaaccccgccgtgggtgaccctgacaccgccgcacggtcggttatgggaggaagaacggtaggggaccgtctgatcttgacggacggtcaggattag

SEQ ID NO: 1077 - DNA, 342 bp, Zea mays
  Peptide Sequence Number=SeqID_42856
atgggggcactgcacgtcgttggcgagctcaggatcagcttccgtcagcagcctacatcagtcgttgcgaagaacagcggccacgacgccgtcatcgaggagatccacggcctgatccgcgtctacaaggacggacaagtggagcggttcccgttgatcctagtcgtgccctgcacgtggggcggcacggccccggacgcgccgggcgtcgtcgtcgcgagggacgtcgtggtcgaccccgccacgggggtgtgggcacggctgtacgcgccgacggtgacgtcggcgggggacaaagccaggcgccccgtcgtggtgtacttccacggcggcgggttctga

SEQ ID NO: 1078 - DNA, 219 bp, Zea mays
  Peptide Sequence Number=SeqID_42857
atggatgtcgtttcttaccggtacgccggccctatctctttatttaattcatctactgtctacgactatactatacacacacacaacaacgcctcagcagcagttatatatcgtactactgtgtaccacgactgcgacgcgcgcgctcctacatttgtggacctactgtacgagcgaccgaccgttaaagctgcactgcagcagcagcagcagcagcag

SEQ ID NO: 1079 - DNA, 2616 bp, Zea mays
  Peptide Sequence Number=SeqID_42858
atggctctcaaacttgacagtttggtgggtgatatagaagatgcagtttcttcttctgttactggaaaacttaaatctcgtgtagacaattcggaggaaacacatcatgttgctattggatatttgaaaagcatagaagatcttctagcttctgtagctgtgactagaccacaatggactcgccttctatcttccgtggatcacagagtagaccgatctttagctatactaagaccacaagccattgttgatcatcgatcacttctttcttcccttggctggcctccttcacttgccggctcaaaattttcaagtattaattcggggaaacaagcagagattgtgaacccattgtttgtgatgcggggtgacctgaaaagcaagtattccgagagctttcttgcactatgcaatttgcagggattacagaaacgtagaaaagctagacaactgaaagggcattgtgtgggtaatcaactacgtcaaccattatgggtaattgaagagctagtaaatccaatatctacagctgcacaacgccatttctcaaaatgggctgaaaagcctgaatttgtttttgctcttgcttataagataattagagattttgttgattctatggatgagattctacagccccttgtggataaggctaaccttattgggtatagttgtagggaggaatggatttcaggaatggtcattgcattgtctacatacttggcgaaagagatatttcctaagcagattgaagttcttcaggaaagtagtagctcaagtgactcaggcagcacggcctatcaggctagagtctcgtggctcagccttgttgatctgatgatatcttttgacaagcggattcaagatttaatcttgagtgctggactactacttacggtaaaggatgatgacagttggcagaggatctcagttctctgtgtcttctgtgatcgcccagattggcttcaagtatgggcggagattgagagacaagagagtcttaataagctgcgatcagcaatggatttagagaaaaattggagtacaggaattcgaggaactatgcttgaatactcagatgattacaaggctccagtaatcaccagtgtcgttcatcataccttgtctttgctaattgatcgtgcccgtcccatccctagcatcacacttagggcagaattcattagtatgtctgctgcacccatcatatcagaattccttggttacatgcttcggaggtgtcaagaagcagaggggctgactgctctggctgatgataatgctgtgctcaaggtatcacaatctatcaatgcagctcgatatttcgaatccacgttggcagaatggtgcgaggatgtttttttccttgagatggaaaatttgactgtaaatggtgagagtgggtgtatctttcagcaagagataaaccatctgaaagagttcagagtggaatggactgataagatttccactgtcattttgcgtggattcgatgctcgttctcgggattatctaaaaaacaagaggcagtggctggagaaatcagatggacctgctgtatccagaaccttcatagaatctttagactacatgcaagagcaactatccaagctgcaaggtggcctaaatacggttgattttgtgaccgtatggagaggtgtggcaagcggggtagaccagctgcttttcgccggcattttcacaagcggcacaaaggttagcagcgatggagtggagaggctacagggcgacctcagcgttttgttcgctattttttcagcatggtgtctgagacctgaaggcttcttccctcgactgtccgagggattgaggttactgaagattgacgaacagcagcttagagagggggcgtttaaagataagaattggttgagggaacatggcattaggcatctggcagctgccgacaccgagaggataataaaaaaccgggtcttgtttcttctttatatacacctacgttcttggcgtatcggctggtgtaataagtcgtcggagtatactttggcaccacacagtcatagaaatgtcccttttgatcctgattgcaagcacctctcgttgccaaataccaaggcaacacacggcgatggttggagacggtgtcagtcagccccgaccccaaccggagcgttaatgcggcagggggcgcaacaacttttggctgcaaatcttgggcccgaaagattccgcgagggcgccttaatcaggcgtgcccgcgtgcctcccggccccgaaccaccgccggataatgctgtctgtcactcacctaaccctgggcctcgcgcgcgggggggattgacgatcgggaaaagatggacggagagggacaggcggaggcgtctcggtcgccgatacgagcgatccatcgacccagcggcagcggcagcggcagcggagcgggtggtggtctgcactgcactgcagccgcaggcgggggcgccgcgcggcaccatgcactcatcgagggggactacaaacatgtggttgcacgtctctttgcttgtggtgccgagcactgaggaatggtcgatggtgaagataatgaaagtcataagggttcatgccgacagactagaagtgatgaatgattaa

SEQ ID NO: 1080 - DNA, 678 bp, Zea mays
  Peptide Sequence Number=SeqID_42859
atgtacagaggtacattagaaagcgaactgttcaaaagggtcaatctgcctcccagactcaagaacctccctttccaaccagccagccttttgtccattttttccaacatagaacaccaaagagatttactaatcttcttattgtcaattggcacaccaaggcctttggtttcacttgcgtatcctctgtatgcctctgttagagcaattgaaacaaaatctgctgtggatgatcagcaatggctcacgtactgggtgctgtactcatttatcactctattcgagctcacctttgctccggtactcgaatggcttcctttctggtcttatgcaaagctgttcttcaattgctggttagtattgccacagttcaatggagctgcacatgtatatgagcattttgtgaggccaatgattgtaaatcagcaagttgtaaacatctggtatattccaaagaaggatgaatcaagtagacctgatgatgtaatttcagctgcacagaggtacattgagcaaaatggatcaaaagcgtttgagaatcttgttaacaagtttaagagttcgaacccaaggcgctcaattctggaggaggtagaggttgaaaggagggccaggattcaactagaatctgaagcgagggaagtgaaccctttcttcaatccagaatatcagtactag

SEQ ID NO: 1081 - DNA, 144 bp, Zea mays
  Peptide Sequence Number=SeqID_42860
atgtccggtggcacaccggacagtccggtggcggtacggtggcgccctcctcctcgagctttgtcggcggtggctgccgggccttgtggcactccgcatcggggaagaatcgggtcgtctacggcggtgcgcgacccgccttga

SEQ ID NO: 1082 - DNA, 367 bp, Zea mays
  Peptide Sequence Number=SeqID_42861
atggccaggcggaagcaggccgtaatgggccgggagcagaaagggccgattgctggggctcccgccccttcgatccccttcacctcacagatctcgtgctctccgttcacctcccagatccagatgctggccccgcctcctcctcagcctgctccccgcaatgcccaccccgactcccagatgccggccctcgcctcctcccacctcccaaatccagatgtcggccccgcctcctccccggcctgctccccgcgatgcccgccccgactcccagatgctggtcccgcctcctcccacctcccagatccagatgacggcctcgcctcctccccggcctgctccccacgatgcccgccccgactcccag

SEQ ID NO: 1083 - DNA, 1948 bp, Zea mays
  Peptide Sequence Number=SeqID_42862
atgacgccacagatctctgaaacgataaatgccatggggctccatggggacagtggagggaccggacatgatggggggtggggcgaggaagacggacgcgtggaggcagttgagctacccgtgtcggtgcggagaggcccggggcggtcttcaatgaggcggcggccggtcctgccggcccaccacgacgacgtggacaagggcggcggcaagccggcgtcgtcgcgcctctgcttcctcgccacgctctgcgccatgttctgggtcctcatcttctacttccacttcgccgtcgtctccaacgaccccgccgcctcggcggcgcagggcgccgaggctcgcattgccggcgcccacacccgcattcccgaacgcgacggcgcgtctcgcgtcgacgttcccctcgccttcgcctcggagccgcctccgccgccgcctcctcctcctcctcctcctgccgcgcggcccaaggaggcggaggacgaggttgccgccggagtccgccgggaggaggcgccgcccgaggtcgcggcgccgtacccgttcgagcgggcgctcaggacggcggagaaccagagcgacccctgcggcggccggtacatctacgtgcacgacctgccgccgcggttcaacgaggacatgctccgggactgcgagaagctcagcgtctggaccaacatgtgcaggttcatgagcaacgacgggctcggcccgccgctgggcaacgaggagggcgtgttctccgacaccggctggtatggcaccaaccagttctccgtggatgtcatcttcggcaacaggatgaagcagtacgagtgcctgaccaaggactcgtccgttgccgcggcggtgttcgtgccgttctacgctgggttcgatgtggcaaggtatctctggggctataatatcacgacgagggatgcggcgtcgcttgatttggtggagtggctgatgaacaagcccgagtggagcgtgatgggtgggcgggaccatttcctggttgccgggaggatcacctgggatttcaggaggttgacggaggaggaagcagattggggcagcaagctgcttttcttgccggctgcaaagaacatgtcgatgctcgtggtggagtcgagcccgtggaattcaaatgattttggaataccatatcctacgtacttccacccggccaaggacgctgaggttttcctttggcaggataggatgaggagcttggaacgcccatggctgttctcgtttgcaggcgctccacgtcctggtgatccaatgtccatcagagggcagctcatcgatcaatgcaggagctcaagcctttgtaaattgttggagtgtgaccttggggagagcaagtgccactccccgagcacaatcatgaagatgttccagagttctatgttctgtttgcagccccagggtgactcctacacaagaagatctgcctttgactcgatgttggctggctgcgtgcctgttttcttccatcccggttcagcgtacgtccagtatacatggcatctcccaaagaactatacaacgtactctgtattcatccctgaagatgacatccgttctggaaatgccagcattgaggagaggctaaagagtattcacccagatgtggtcaagcaaatgagagaggaggtcatcaatctgataccaaaggtgatatatgccgatccaagatcgaaactggagacattgaaagatgcatttgatgtttccatagaggcgatcattaacaaagtgacaaagttgagaagagatatcatcgcaggccaagaagacaaagattttatcgaagagaatagctggaagtatagtctgttagacgatggacagcaggcaattggacctcacaaatgggatccattcttctcgaagcctaaagataaaggtggagattctagtggttcatctgcagaagctgccaagaattcttggaaaa

SEQ ID NO: 1084 - DNA, 3123 bp, Zea mays
  Peptide Sequence Number=SeqID_42863
atgacaagtgctactccaaggcttggtagcactccacacctcttcttccccttctccttctccttggcattcctgtgctgcattgccgtgtgcaatgccgccggcgatgaggccgcggcgttgcttgccgtcaaggcgtcgctcgtcgaccccttgggtaagctcgggggctggaattcggcgtcggcctcgtcacgttgtagctgggatggcgtgcgctgcaatgcccggggcgtggtcaccggcctcaacctcgccggcatgaacctgagcggcaccatccccgacgacatcctcggcctcaccgggctcacctcgatcatcctgcagagcaatgcgttcgagcacgagctcccgctggtgctcgtgtccattccgacgctccaggagctggatgtcagcgacaacaacttcgccggccacttccccgctggcctcggcgcactcgcctcgctggcacacctcaacgcgtcgggcaacaacttcgccggcccgctccccgccgacatcggcaatgccaccgcgctcgagacgctcgacttcaggggcggctacttctccggcacgatcccgaagtcctacgggaagctcaagaagctcaggttcttgggcctctccggcaacaacctcggcggcgcgatcccggccgaactgttcgagatgtccgcattggagcagctcatcattggctctaatgagttcacaggcacgatcccggccgcgattggcaacctcgccaacctccagtatctcgacctggcgatcggcaaactggaaggccccatcccgccggaattcggccggttgtcgtacctcaacaccgtctacctatacaagaacaacattggcggcccgatacccaaggagatcggcaacctcacctccctggtcatgctggacatctccgacaacacgctcaccggcacgattccggtggagctggggcagctcgccaacctgcagctgctcaacctcatgtgcaacaggctcaagggaggtatcccggcggcaatcggcgacctccccaagctggaggtgttggagctgtggaacaactccctcaccggcccgttgccgccgtcgctcggcagcacgcagccgctgcagtggctcgacgtgtcgacgaacgcattgtctggacctgtgccggccggcctctgcgacagcggcaacctgacgaagctgattctgttcaacaatgtcttcacgggcccgattccggcgggcctgaccacgtgcgcgtcgcttgtccgcgtgcgcgctcacaacaaccggctcaacggcacggtgcccgcggggctcggcgggctcccgcggctgcagcgtctcgagctcgccggcaacgagctgtccggagagatcccggacgacctggcgctctcgacgtcgctctccttcatcgacttctcgcacaaccagctgcggtccgcgctgccgtcaaacatcctgtccatccggacgctgcaaacgttcgcggcggccgacaacgagctgaccggcggtgtaccggacgagattggcgagtgtccatcgctgtctgccctcgacttatccagcaaccggctgtccggtgcgatcccggccagcctcgcgtcgtgcgagaggctcgtctcgctaaacctccggagtaatcggttcaccggacagatccctggtgcgatcgccatgatgtccacactgtctgtgctcgacctctccagcaacttcttctccggtgtgataccgagcaacttcggcggctcaccggcgctcgaaatgctcaaccttgcgtacaacaaccttactggtcccgtgccaacaactggtctgctgaggacgattaaccccgacgaccttgctggcaatccgggcctgtgtggtggcgtactgccgccgtgcggggctgctagctctcttcgggcctcctcgtctgagacgtctggcctccggcgctcacacatgaagcacatcgccgctgggtgggcgatcggcatctcggtcttgattgcgtcatgcggcatcgtcttccttggcaagcaggtgtaccagcggtggtacgccaatggagtatgctgcgacgaggcggtggaggaaggcgggagcggcgcgtggccgtggcgcctcacgaccttccagcggctgagtttcaccagcgccgaggttctcgcgtgcatcaaggaggacaacatcgtggggatgggcggcacgggtgtggtctaccgcgccgacatgccacgccaccacgccgttgtcgccgtcaagaagctgtggcgcgcggccgggtgcctcgaggaggtcgccacggtcgatgagcggcaggacgtggaggcgggcggcgagttcgccgccgaggtgaagctcctcggccggctccgccaccgcaacgtcgtgcgcatgctaggctacgtgagcaacaacctggatacgatggtgctgtacgagtacatggtgaacggcagcctgtgggaggcgctgcacgggcgggggaagggcaagatgctgttggactgggtgtcgcggtataacgtcgcggcgggcgtcgcggccgggctcgcgtacctgcaccacgactgccggccgccggtcatccaccgcgacgtcaagtccagcaacgtgctcctcgacaccaacatggacgccaagatcgccgactttggcctcgcccgcgtcatggcccgcgcgcacgagaccgtgtccgtgttcgccggctcctacggctacatcgcgccagagtatggatccacgctgaaagtggacctgaagggcgacatctacagctttggagtggttctgatggagctcctcacggggcggaggccggtggagccggattacagcgaaggccaggacatcgtcgggtggatcagggagcggctgcgtagcaacagcggcgtggacgagctgctcgacgccagcgtcggcggtcgcgtcgaccacgtccgggaggagatgctcctggttctgcggatcgcggtactgtgcacggccaaatccccgaaagaccggcccacgatgcgggacgtggtgaccatgctcggtgaggccaagccgcgccgcaagagcagcagcgccacggtgcccgccaccatcgtggacaaggacaagccggtgttcacgacgtcgccggactccagttacctatag

SEQ ID NO: 1085 - DNA, 366 bp, Zea mays
  Peptide Sequence Number=SeqID_42864
atgcgcggccacattgcctctgctggtgccgcccgtggccccatcgcctccgcctatgtcataggctgccccatcgcatctgcccctaccgcatgtggccccgtcgcctccacccgcgtctatcaacggcttgatccatcggttccctacgatggcggcccacaccttgccccgacccgctcccatgacgagtcgtcggtgtaccaaccgggcgccatccacgcaaccaagtcggacacatcctcgttcatccttcaatgcggcgacgatgatgtctacctcctctatgtcgagacatcgtgctcacggcgtccagtgtcgccctcctccagcgcacgatcgccgccctgcagcactagttcatga

SEQ ID NO: 1086 - DNA, 687 bp, Zea mays
  Peptide Sequence Number=SeqID_42865
agagaagcacgcaaagcattctcatgggtcccccgtgatagtggcactaaaacacccccaaaagatatccttcggaaaagaaagagttcaggctctggaggtgatagatcctcttgggaagcaatgcctggtttacaggaggagcggacacctgtatatccttctgaggcgcaagaaagacttccttttgtctctgctcctgatgagtgggtgctgacgggagatcctgacaaggatgatgcaactcgttcatcccataaatatgaaacctctcctgatatcacactgttcaaggcactctcttatgctaagaatctatttaaaaagctcgttggtagtagtgatttgtcaagtggctctgaaagaagtaaggaagttgatgatgtttctgtggacactggcagttcaagcactgggagccagtatctggatgagctgtctgatttcctaactcaagcagacatgtggttagggcgtgcagagcttcttcaaagcctgctgggatcaggtattattgcctcgctggatgatatagctgacaaagaatcttcaagtagactacgtgacagattggtcaacgatgaacggtacagcatggctattgatgctgtaccagtatgggttgcatggggccatgcattagttcgaatggagcactatgctcaagctcgtgtgaagttcaagtaa

SEQ ID NO: 1087 - DNA, 150 bp, Zea mays
  Peptide Sequence Number=SeqID_42866
atggggctcctgacccgacccagatgtgagtggccgaggtatggcacggatggtcttggtgggaaggcgattaagaagataacacgctcagccttaccattctgggggaggtgtagggacatgacattcgaagaagagtgccatgggtga

SEQ ID NO: 1088 - DNA, 1152 bp, Zea mays
  Peptide Sequence Number=SeqID_42867
atggcgctcatagaggaagatgcttgctggtgctctggcaatgacatgtgggtggagagattggtcggctatgtggcgatgtcttccaggaccttcgtggtggcgtcggtggtcggtgatggtgtgatcaacaatatttgctcggactcatcgtcacccgccatctcctataccagattgataggatccgaaatcctattgtggctgcgtaagttgtacgggttaattagtgaaggaaaattaagtgatgctcttgctgtgtctgatcgttgtttgcgcaatggagcatctgataatttgcttcagttgctcatcgaacagaaggaagaaaaaggtccaggcacaggacaaattcatccatatggatctcacagtcttgggaatgatacttctcagtactgcttgaggctgagagacaaaaaagttgcagctcagctcgctctaaagtacttgcacagctgggaccttgatgctgcaaccaatgttctaactatgtgcatgtgccacttacctgagaatgatcctatgcgcagtgaggtgttgcacatgaagcaatctttacagaggtatggccatatcatgagtgctgatgagcactacactagatggcaagaggtggaagctgattgtgaagatgacccagagggcttggcactccgtcttgctgccaaaggagctgtttccgctgctttggaggttgctgaaagtgcctctttatcaattgatttgcggagggagttgcaaggccgtcagcttgtcaaactgctaatcactgatccacttaatggcggaggcccagctgcagcttcaagatttctgtcaactttaagggattccaatgatgctcttcctgtagccattggtgctatgaatttattacctgacctgcgttcaaagcagcttcttgtgcatttcttcctcaagcgtacagttgggaatctatcagatgctgagattgcacggcttaatttgtgggcattaggtctccgtgttctttccttattgccattgccatcacaacagcgttgttcttctctgcacgaacaccctcagttgatcgtagaagtactgttgatgatgaaacaactccagtctgcttctttggtataccaacttgactattcttattgtgtttgccctcatctctattaa

SEQ ID NO: 1089 - DNA, 201 bp, Zea mays
  Peptide Sequence Number=SeqID_42868
atggcgggtgtgcgacgggcaatggaggaacgatggtggcaggcaggtgggcagtggcacggtggcagctcacattttacgtggaagcttggacagttaatcttcttctgcgttcaggttcagctcttcactctgcatgatgccgtgaactcgattcatgattccttctcattcacctttgatcttgctgctgattcttag

SEQ ID NO: 1090 - DNA, 1611 bp, Zea mays
  Peptide Sequence Number=SeqID_42869
atggcgtcgtggaagctcgccaaggcagtccaggatccgccgcgcttgtctcgcctcgcccgtaggacaatcgaggtcaccgaagccggcagaggtgggcaggctgagagggccctcgagatgttcgaggcaatgcctgtgaagagtcaggtgtcctggaacgccgcgctggctgcgctcgtcgacgccggccgcaccgactgggcgctctccttcttccggaagatgcccaggaggaacgccacctcttacgccaccatgatcgggggcctctcccgcgccggcggagctgcggccgccgaggcgcggcttctcttcgaggagctcacacttgatcagcacaacgtcttcacctggacggccatggtgtcgtgccacgtccggaacggcgagcctggtaaggcggtggagctcttcgtggcgctctacgccgagttctttgcgcggggggtgctgcccaacgcgcacacgttcagctccctgctcaaggcctgcgtgggtgtccagtcaccagccatgctgttgcagctccatggggtcatcttcaagctcctggacgaggggagcaggtcctgtttcgtgtggaatgctttggttgatgcacacgccaagctgggcgcactgtcggacgccgagaaggtgttccacggaatgcggcaaagggacatctgctcttggaacatcatgatggacggatattcccggcataagctcgtcgacagggcccttgatctattcagaagtatgagggaaaaggatacctcgacgtggaacatcataatatgctgcctgggggagaacagactcggtgaagacgctctccgcctcttcatcgatctggtcagatcgtatggccattgtggcggcgatgccgaggtaaacgcctcaatatacacaacagttctgcacatctgctcggtgctggcactccttgcgtttgggaggcaagtgcatgcacgcgccgtaaaggacgggttcggccggagtaacgtgttcgtcagcaattctctgatcagcatgtacagcagctgcggcgcgacgcttgatcttgagcaggtgttggaagaaatggctgtcagggacgtcgtgtcgtggaactcggcgattcaggggcttggtcagaacggacttgggaggcaagctctggcggctggagagcgtgcgctggagctcgggatgtacaacgggaacaccttcatcgccatcctgacatcctgcagccacgcggggatggtcgtggaggggttgagctacttcgatgccatggccaagaagcatggcgtggaaccaacgcttgaccactacatcagtgtcatcgatctcctcggccgtgcagggaggcttcaagacgcgtacgacctgctccggaagatgccgttcgcaccggacgcggtggcgtggcgcactcttctgcattcttgcttggcccataagaacaccgccgtgggaagcattgcggtgcaggagctgatggcgctgcagcccgacggtggcgccaggaactatgagagactggttcagggctgcggaggcagcagcacggctgatgaaacgcaggctgggaacgagaagagtgctgatcacacgcctgggtgcagctgggtcacctga

SEQ ID NO: 1091 - DNA, 723 bp, Zea mays
  Peptide Sequence Number=SeqID_42870
atggaccgggccgagctatggacacacttgtggccgggctacaaccgacaacataacagatttattgtgggccttcaacagcagaagactggctttgaaaatgtagagatgctactggccgtggaaggaggagggttcttctcgtcttcagcttcggggtacagccatggccttgctctcttgctactcggacggaaagctgaggagaagcccgtcaaggcttcgccgtggaaccagtaccggctagtcgaccgggaggccgagcaggtgtaccacctgccctccgccaaggatcaggcgcctgggaaatgtgctccctttgtctgtttcggatgcacggctaatggcctcgaggtggcgtctccttccaaagcggtctccagcaatgcgctcggtaggggtacctcacaggaagaagcatcttgttcagcacacaaggcgttgacaactagtgcttccatcagtggcagtgagagacgtggctgtcttaagagcaactccaaaagggattctttggagcaccgtatagtggtgagcgagggggaagaaccacgcgagtctgtggaagaggtgcagaccttgagatctagcatagaacggaggaaagttcagtggacagatacatgtggaaaggagctttttgagataagggagtttgaaacaagtctccagtctccacctaaaagtctaagggctcctttggatcaagataatttgatatga

SEQ ID NO: 1092 - DNA, 2886 bp, Zea mays
  Peptide Sequence Number=SeqID_42871
atgcaccggaaggtaagggtgccgccattacctcacctcacgctccgctgcgcctcttcctcttcagccgctgcctccgtttccccgccgccacctagacgcctccctcctcccgtcccactctgcgacctccttgctcaccgtctcgggcctcctcgctcgccgctctcacctccaccgcctcgccctcacgccgacctcctccccctgctccgccgcggcggcgacgccaactctccggaaaacctccacgtcgagctcatcaagcggggcctcaatcatgacctcttcttatgcaaccatctcgtcaactcctacgccaagggcgcgcgcctggctgccgcgagccaggtgttcgacgaaatgcccgagcggaacgccgtctcctggacctgcctcgtctccgggtacgtgctgcatggaatcgccgaagaggccttccgggtgttccgcgccatgctgagggaggtgcaggctgggtgcaggcccacgtccttcaccttcgggaccttgctccgggcgtgccaggatgggggacccgaccgtctgggcttcgcagtccaggtccatgggttggtgtcgaagacggagtatgcgtcaaatactactgtgtgcaatgccctgatctcaatgtatggtagctgcactgttggcccgccgatcctagcgcagcgggtgtttgatggcacgccgatcagggacttgatcacatggaacgcattgatgtctgtttatgctaagaaaggtgatgtggcttcaacgttcacactgttcaaggatatgcagcgaggtgattccaggattcagctgcgtccgacagagcatacctttggcagtttgatcactgctgcatctctgtcatcaggcagctcggctgtgcttgaccaagtattggtgtgggtgctcaaatctggctgttctagtgacctctatgtgggtagtgctctggttagcgcttttgctagacatggcttgactgatgaagctaaggacatatttctcagtctgaaacagaagaatgcagttaccttaaacggtttgatagttgggttggtcaggcaagacttcagtgaagaagcagtgaagatttttgtggggacaaggaatactgttgatgttaacgcagatacatatgttgtattgctcagtgcattagctgagtattctatatctgaagaagggctgaggataggtagggtagtccacgggcatatgcttagaactggacttactgatctaaaaatcgctgttagtaatggactggttaatatgtatgccaaatgtggtgccatcgagagtgcctctaaaatttttcagttaatggaagcaacggataggatttcctggaacaccatcatctcagctctcgatcagaatggtttgaaacttttaactgctggtcagcaagtgcattgtgatgctgttaagtggggtctagatttagatacttctgtttcaaatgtactggttaaaatgtatggggaatgtggagctatgtcagattactggaaggttttcaactctatggctgaacacgatgaagtttcttggaacactatgatgggtgtcatggccagttcacaaacacctatttctgaaattgtcaaagttttcaacaatatgatgaggggtggtttgatcccaaataaagtaacatttataaacttacttgctgctttgtctccactgtccgttcttgaattggggaagcaagttcatgctgcagtgatgaagcatggagttatggaagataatgtggtagataatgccctcatatcatgctatgcaaaatcaggagatatgggttcctgtgagcatctgtttactaacatgtctgacagaagggatgccatctcgtggaattctatgatttcaggttacatctacaatggcaatctacaggaggctatggattgtgtatggcttatgatacacagtggccaaatcatggattgttgcactttctccattatactcaatgcatgtgcttctgtggcagcattggagcgtggaatggagttgcatgcttttggtattaggtcacacttggaatcagatgtcgtggttgagagtgctcttgttgatatgtactccaagtgtggtagggtggattatgcctctaagcttttcaattctatgactcagagaaatgaattttcatggaattctatgatttctggttatgcaagacatggtcttggaaggaaagccattgagatatttgaggaaatgctgcgcagcagagagagtccagaccatgtcacttttgtcagtgtcctatctgcctgcagtcatgctggattggtggaaagaggtttagaatacttcgaaatgatgccggatcatggtatactaccacagattgaacattattcttgtgtcatagaccttctcggtcgagctggtaagattgacaagataaaggagtacattcaaagaatgccaattgaacctaacgctctcatatggaggactgttttagttgcttgtcgacaatcaaaagacgggtctaacattgatctggggagagaagcttcaagggtgcttttggaaatagagcctcaaaatcctgtaaactatgttctggcatctaactttcatgcagctacaggaatgtgggaagatacagccaaagcccgaactgcaatgaggcaagcgacagagaaaaaggaggctggtcgcagttggaatataagaaatgctggttatgttcccctgacagagtatgccttgtatgatcttgaagaagaaaacaaagaagagctgttgagctatcatacaccagttcctaacatttcaggtcataccacattgccagatgctagcctagacatgctggtgtctctgttggcagatgcttggaattttgaagtgttcggttcatga

SEQ ID NO: 1093 - DNA, 789 bp, Zea mays
  Peptide Sequence Number=SeqID_42872
atggcggcggtggcgccaactccctcggtatcagtgatctctctcctcgattccccggcttccgaccgaggcgagggggtggctgacgccgatgaagctggtccctcaatgcggccggaggtcctagtcctagagcacaccgtgctcttccttgacgatgaggtctcatggcgaagaccgctgccaagtccttcctttgttgtgagtgtggcgtctaggacacgctacggtgctagaggggcttgcttgattggtcaaatgagcagcttgcccagaagagcgtcgaggcagcagatctctaagcgttgtgctcggaacttagggacgaggccgcagcggcacagcgggagatccctcaccgaggatctcaaggaccagcagtccgaggcccagggcctaaggaacctagtgggagagcttgagcgagacctcgatgtctctattgagacgtcccaaacgctctcccagactgttgacgagaagattgtcgcgctcaatgctctgtccgaggcggtggcagacttttgccaaaccttcgacgctgaagacatcccctcgggtggatctttgccgggctatttactcatgaggttcggtcataccataaaggtgccctgtgtccccgttgaggagcctacgaagagccaggtcttttccaaccttaatcctcccttcatcgaccataaagatctaagtgaaatcactcaaactgctcaacgagcgggtaatacaaacttcttgaggttgtcgacaagactgaagactctcaagcgacttctagctgtttag

SEQ ID NO: 1094 - DNA, 264 bp, Zea mays
  Peptide Sequence Number=SeqID_42873
atggcctcggctgccctctccaccgacgagctcctccggcgggttaaggggacggtgagaaaggcagactacattgtccctgtcccgatgcgccctaagcagggttatgtgtccctggggctacggggggcaccgaaccgccctgcccccggtcccaaaggacgcggctggacggacggcgcgcgagttggccgcagaggagaagaagaagaacgaggcgaagaggcgggcccgagagaagagggtgacccacaatgctattga

SEQ ID NO: 1095 - DNA, 1146 bp, Zea mays
  Peptide Sequence Number=SeqID_42874
atggccctcacagaatcgcccgatcccagcccctccaccggcgacccattctgctcacttccatgcgggccccagcccgccacgaatccccgttcccagtcccgcctgctccgacctcgcctttctccatctagggtagcgaggggtggcgcgtcgcctccatggagggaggatgaccgcgacggacactacgtcttcgatctcggcgagaacttgacccgccgatataaaatcttgagcaaaatgggagaaggttcgggttttctgcaatctgtcgtctcctcttctggtgggtatcctcgttattattctaatgaagagggctacgagttgggttttcgtagtatccgcaagtaccgtgatgctgcaatgattgagatagatgtgctcaatcgccttgcagaaaatgagaaatacagatctctttcctcttcaattaccagctgtgttcaaatacagagatggtttgactatcgtaatcatatatgcattgtttttgagaagcttgggccaagcttgtatgattttctaaagagaaatagataccgacctttccctgtggaacttgtgcgggagtttggacggcaactgttggaatctgtagcatatatgcatgacttgaggcttatccacactgatctgaagccagaaaacatactacttgtgtcttctgagtatataaaagttccaagtacaaagaagaattcacaagatgagatgcatttcaagtgcttgccacagtccagtgccataaagctgatagattttggtagtaccgcctttgataatcaggaccataactcgattgtttctacgaggcattacagggcacctgaaataatcttaggtaatttggttattcttgaaggtttaggctggagttttccatgtgatatttggagtgttggctgtattcttgttgaactatgctctggggaagcattgtttcagacacatgagaatctggaacacctagcaatgatggagagagttttgggacctctaccagagcatatgatacggaaatcaagttcttctgctcagaaatatttcaggagggcaacacgtttaaattggcctgaaggtgctgtttcaagagaaagcatcagagctgtgaagaaactggatcgactaaagggtagctag

SEQ ID NO: 1096 - DNA, 471 bp, Zea mays
  Peptide Sequence Number=SeqID_42875
gctgttgcaaaatggcataaaaggaacactaatcatgtcaacgctacgatatatgggtgttccatagtcattgtgatatattatctagaccatcttcatcacgaggcaactccagagaacaaatatgacacttcacgtattaaatactttgataaagagacaattgatgcactgaccaaggctgacaggaggaagcctcgtcatgctggcgaaacgacagacacatgctatgttgctgctcctaaacagccagcaaatgatacgttccatattcatgttcctcgcatgaaagatttgatctctagcaaggttacttgccttccaccgccataccgttcaagttttgactctttgttgaaagctcatgacaaagaggttgacaagttcaagaatcctagcagcgagatactcaaaaagaacaacctagctagtctgatgtcaacatccccaaagacctgcacatgggtgtag

SEQ ID NO: 1097 - DNA, 2161 bp, Zea mays
  Peptide Sequence Number=SeqID_42876
gcgtagcgtagctctctccaagtctccatttcccttcccgaaccctcgcgccgccgcctactccagcctccagcgtgatctgagtcctgaccaagccctaaacgccaccgccctcgcaaatctcctttcccttcgatccatggccgccgccgtcgccgcccccgcgccatcccgcaagacggagacctacaccgacaccaagcgccgcgacgacgtgcgcggcgccaacatcgccgctgcgcgcgccgtcgccgacgccgtgcgcacctcgctgggcccccgtggcatggataagatgatcgcttcgggcgaccaggctcaggaggtcatcatcaccaacgacggtgccaccatcctttcccgcatggcgctcctccagcccgccgcgcgcatgctcgccgagctatcccgctcccaggacgccgccgctggggacggcaccactaccgtcgtcgtcctcgctggatccctcctccgccgcgcccagtcgctcctctccgccggggctcaccccaccgccgctgccgacgccctccaccgtctcgccacgcgcgctgttgagatcctccacgccatggccatccccatcgagctatccgaccgggaatccctcgtcaagtctgcgtccacggctctcaactccaaggtcgtctcccagtactccacccttctctcgcccctcgccgtcgacgccgccctctctgtggtggaccccgctcaccctgaccttctcgacctccgggacatccgcatcgtgaagaagcttggtggcaccgtggacgatactgagctcatccctggcctcatctttgacaagaaggctagccatgctgctgggggcccaactcggatggagaatgctaagatcgctgtcatacagttccaaatctcaccacccaagactgacattgagcagagtgtcattgtatccgactacgcacagatggaccgcatcctacgtgaggagcgcaattatatccttgggatggtaaaaaagatcaaggcggctggatgcaatgtattgctcattcagaagagcatcttgcgtgatgcagtcactgacttgtctctgcactatcttgctaaggcaaagattctggtggtgaaggacgtggagagggatgagatggagttcatcaccaagaccctaaactgccttcccattgccaacattgagcacttccgcacggataagtttgggtatgcagatgttgttgaggaagtctctgttggagagggcaaggttgtgaagatcactggaatcaaggacatgggtaggaccgcaactgtacttgtcaggggatctaaccaattggttattgatgaagctgaacgcagtctccatgatgcactctgtgtcataagccgcaaccaaaatggcagggatgctgtccttggcgttgatgttgcgtcgtgcgagaccttatgtgatgctagtctgaagtactggctggatgaaacccatggaacaaacgccaggtgcttggtcagcaagagatttttgattgctggtggtggtgctccagaaatagagatgtcaatgcagctggctgcttgggcaaaggagcttcgagggatggagagttactgcatcaaggagtttgctgaggcgcttgaggtcatcccttacacattggctgagaatgctgggctcaacccaatctccattgtcaccgaactcaggaatcgccatgccagaggtgagaagaacactggcatcaatgtgaggaaagggcagatcacaaacatcctggaggagaatgtcgtgcagccgttgctggtgagcacaagtgccattacgttagcctgcgagtgtgtcagaatgatcttgaagattgatgacattgtcactgttagatcagtcgttgcttcatacccccccacccccaaaagggccaacgtggcagcaccattccaccccgcgacgtcgcaagccctcacatcagcgctcttcatatcgctgcaggtcctctccatcgaagctgctggggaggaccatattgccgacctccctaggagctcctcgccctccttgtcacacccgtttttacaagacaaaccaaatgtgaaccatgtacgtgccagaattagcaatttacacgtcgagggcgcctcctccctaggattcgacagccacgacgcctcctccctgcgtggctag

SEQ ID NO: 1098 - DNA, 273 bp, Zea mays
  Peptide Sequence Number=SeqID_42877
atggcgggtggcgaccagtcgagccaggactccaggtcggcactgagtgagttattcacttgttctattgtttatgctgctgtaatctgccaccagaagtttagagagcaaatattggttgagaatttactggttcatggtgccattgcagcattgctaccaatttgcaaaatgaagaacaaaccagttaatttaagaaaaatcttggccaacttgagagttgtagatgatgaatgtcagaaaaagggtgcagtggatgctgctaatgtttag

SEQ ID NO: 1099 - DNA, 681 bp, Zea mays
  Peptide Sequence Number=SeqID_42878
atggaggctgcagttgaagaagctgcactttctagttctaagagaactaaatggcagttcatgggagctagagatgcagggtctagagatgagctacgtcttgtctatggtgtttctgagcgtacagaaagcgatggtgcagctaatttaattcagaagttgagagctataaactatgctctgggtgaactaggacagtggtgtgcttacaaggttgcactgtcattcttgacagcactacagaatgatgaaagggccaactatcagttgactgaaggggctgcaatgaaaagtgacagtaatgatgttgaaatgcataattctgaaaaccccaagccaaatgaacttgaggagggagagctacctgacagtcatggtgaacatgtagatgaagtcattggtgccgcagtggccgatggaaaagttaccccaagggtgcaagctttgataaaaatacttctcaagtatcagcacactgaggattttcgtgctatcatatttgtagagcgagtggttacagcattagtcctccctaaggtctttgcagaacttccatcgttgggctttatacggtgtgcaagcttgataggtcataacaataaccaggagatgcggtcgtgccaaatgcaggatacaatcacaaaatttcgtgatggccgttggttttatgcaatctactaa

SEQ ID NO: 1100 - DNA, 384 bp, Zea mays
  Peptide Sequence Number=SeqID_42879
atggtgggttgggacggctgcacgccactagcgatagaggcttccgaccttagccttgggaactggatctggaccgatggcgcgagggccaccgctgcgcaggccgctgcgggtgggcgccgccacacgctgtatcgccgcgtgcgagccagggccatagcgcgagcactcagcttttggcctacgagctatctctctctgcgattcaagaactccggggtagaaaagcttgtcgtagcaattgttgtgtgcatgcaagtgctagtacatggagccgagcgaacgaaaacaaagtctgtcgcgtacgacagttcggctaggccggggacctgccggcttgatggagagtcggtgcagatcggcttcgcagcaacgtcgaggtag

SEQ ID NO: 1101 - DNA, 534 bp, Zea mays
  Peptide Sequence Number=SeqID_42880
atgccgtcatctccgtcggctaacgctgccagcgccccggtcgtcattggccatcttatggcgaccattgggttgattgaagttagcttgcaaaccgaccgtgtcatcctgtgtaggagagtcgttgtggctccctttccttccggccacatgatgccccgcgggactggaacctcaacccttccattgctggtgatggccaagccgcgggggcgactggaggtgtcccgcttggtcgtgaggacatccggcatgcacatcgtaggtcttcaagcgtggctcaccgtcgtggagactgaactagtggagcttcgccgggaggttgatgcagtgaaccgaatcatctgggctcacggggtgacctggctacaatgcttgctcgacatgccgagccatgctagacatgtcgcgaactactttcaccgcggggccatcattgccttcgtcgtcgcccagttctacacgtgggttgacctccatgctccgatgacccccccgggcaccccgtttgtggccttcgagatcctgatttag

SEQ ID NO: 1102 - DNA, 516 bp, Zea mays
  Peptide Sequence Number=SeqID_42881
atgtcgtcgggaccccgacgatgcgctgcgacccacgaatgcgggtgcctactgcgagattgtggatctggggttttcgtgtacgtgagggttggtgaatgtgtcgcatggccatggggagaagatggagaggaggggtgccatggggagaagatggagaggggaggtggctggcggctctgtgagtgcgcgacatgggtgccaaagggagcggtctggcagttgttcttgtggggaagagctggtggggccaagcggcgctggtgcaaccgcccactcacgcgagcacgctgggcgcagtgcggcgtgggcgagcgcccctgcgcgagtgggctaggggagggtatcgctggaccggtgcacgagcacagggcagcttgctgggttgtgcgcgtgtgggcccatgagcgagaagagagggtgtgggacatgcataggtgggctagccaagagaaaaggggcgctgggccgcacgtgttaggcaggccgcgcgggagtgggccgcgagcaggatga

SEQ ID NO: 1103 - DNA, 1401 bp, Zea mays
  Peptide Sequence Number=SeqID_42882
atggcgcggcgcctcctcctcctcctcctccccattattcttacgtcctccgctaccgctagcaagaacaagagcagcagcctgctgccactgccagacggcccagacccttgctccggccgccgcatccacatccgctggctccccgcgcgcttcaacacccacctcctcctctactgcgccacggcgttcccgctggccgacccagactccaagtcaactccggcgtgcgcgtccctcgcgaaccacggcctgggcccccgcacccacaacggcacccgctcctggtaccgcaccgacgcccggctgctggagcccttcttccaccgccgcctcctggagcgcgcatgcctcgtggcccgacccgcccaggccgacgccgtcttcctcccctactacgcggcgctggacgcgctgccctacgtcctccacccggacctcctcaactcctccgcgctccacggcctgccgctcgcgcgctatctggcgcgcaaccagccgcgggtcctggcgcgccgccacggccacgaccatttcttcctcctcgccggcaccgcctgggactactcgcagccgcacgacgccgagccccggatgtatggcaccacgtcgctgctccgcctccccgagctcgccaacttcaccgtgctcacgctcgagtcgcgcacctggccctggcaggagcatgccatcccgcacccgacctccttccacccgtcctcgctgccgcgcctgcgctcctggaccgcccgcgcgcgccgctcacgccgcaccgcgctcatgctttacgccggcggcgtctccaggccgtccaggcccaacattcggggcgccatcctcgccgagtgcgccaaccgcacgtcgtccaagtccaacaacgtgtgcatcgtcgtcgactgctccgccgccgcgtgcgcgctcaaccccgtggcgtacatgcgccccatgctcagagcaaacttctgcctgcagccgcccggggactcgccatcccgccgctccacgttcgacgccatagtcgccggctgcgtcccggtcttcttcgagcacgccgccgccagggcgcactacggctggcacctgccccgcgggaggtacgaccagttctccgtcaccataccaaaggactcggtggtgatgggggacgtcaggatcaccgacgtgctggcggcggtgcccgcggacgaggtcgccagaatgcgggagcgcctgctggagatagcgcccagggtggtgtaccggcggcacgggagcgcggcggacctgagagagtccaccaaggacgccgtcgacctcgccgtggagggcgtcctgaggaggatacggaggcgggtgagcgcgctggaggacggccacccggacgccatctacgagctggaggacgacgacggcgcgcactag

SEQ ID NO: 1104 - DNA, 1644 bp, Zea mays
  Peptide Sequence Number=SeqID_42883
atgacgcaggatgttgcggcggtggttccaccggtgacacgcctcatgctgcgagggctcctccccatgtacggttggttcatcattggagatagagccattctccaccactgcattgatgcagagaacattgggggacgtgccgacacgggtctagccataaccgaatggggttcagcgacggccatcaccaaggccatcctggaactcggtagggggctctcctccgttgggatggcgatgcgggaccccgggcacgtccggcaattcagttcattgccatgccgcctccgctctcgctccgcgtcgccgtcatcggcgcgggagccgcggggctggccgccgcgcgcgagctgcggcgcgaggggccacgtgcccgtcgtgttcgagcgcgcccacgcagtcggtggcacctggctgtacgaccacgacgaccgccaccgctccagcagcctgtacgcgtccctgcgcaccaacctgccacgcgaggtaatgggcttcctcgacttccccttcgccgctgtcccggactccgccgacgcgcgcaggtttcctcggcaccaggaggtgctgcgctacatccaggccttcgcgcgccgattccaccttgacggcctcatccgcctccgcacggaggtgctcgccgtcagcaaggacaacgacgaggggagcagcggcggctggagggtgaggtggcgccggaacgcagccggagacgagtccgagcaggagcaggaggaggtgtttgatgccgtcgtggtctgcaacggacactacacggagccgagaaccgccgccgccgacatccccggcctagacgcctggccgccgggcaagcagatgcacagccacagctaccgcgtgccggccccgttcgcggaccaggtggtggtcataatcggcgccagcaacagcggggccgacatatccagggaaatcgccggcgtggccagggaggtacacatggccgacagatcggcccccaccgccacctgccacacgctccccggctaccgcaacctctggctccgctccatggtggagcgcgccgaccaggacggcaccaccgtcgtgttccgagacggcagctccgtcagagcggacgtcgtgatgcactgcaccggctacacgtacagcttccccttcctcccgacgacggcggcgccggcgggcgacggcgccgtcgtctccgtggatgacaaccgcgtccacccgctgtacaagcacgtgttcgtgcctcagctggctccccgcctcgccttcgtcggcctgcccttcaaggtgatcccgttccccatgttccagatccaggccagctgggtcgccggcgctctgtcgggccggatccagctcccttcagaggagatgatggaagacgtgagcgcgctctactcggagctggagaccgtgggatggcccgtcaggtacacgcactgcatgaagcacagccagttcgagtacgacgagtggctggcagagcagtgcggtggtgggcacgccggcagagtggaggagtggaggaaagacatgttcgacgccgccaagaggaagaaggtgcagtgcccagaaacgtaccgagacgagtgggacgatcaccatttgctggaacgagcgtaccaagacttcaacaactactcctcttaa

SEQ ID NO: 1105 - DNA, 720 bp, Zea mays
  Peptide Sequence Number=SeqID_42884
atgggttataatgttgtagtccatccattgaacatccctccccaaccttcatttgataagacacctgttgcacatggttcatccacggaattgttggttgaagtcccaccgaaggacctccctgtttttgacgagacgccggtcaccgaggggttcatcgactgtgttcagtcagagcatgcttcgcacactcctgatcctatcacggacgttataattcttgatgtcaatgttggggatatacttaacatcgaagagcgagagcaatacaacaaggatcctcaggcatttcaaataagtatattatctgattacctagctcgcactcttccttcggactacgagtttcaaaaatgcaaatgcttaatagtaccaatgttacgccggggacactggacattatatgttgttaacttccataggcgctgcatagatatcttagactcaaacttgtatggtccttcaattggcggtaccacctggaaacaatatcacaatgaaataataacttttgagaagaaaacgtatgcttggtctagattgatgatgtcccgactcagcatgggaatgcaactagctaggtcgaaggcaatgcttcctaaatttgggaatttcaaggacctatcccttgagaatcgtgctactcttctacattacttgacattccacagtctgaacaagatcaaactactccgagctgatattaggaggttcagctga

SEQ ID NO: 1106 - DNA, 459 bp, Zea mays
  Peptide Sequence Number=SeqID_42885
atatattatctagaccatcttcatcacgaggcaactccagagaacaaatatgacacttcacgtattaaatactttgataaagagacaattgatgcactgaccaaggctgacaggaggaagcctcgtcatgctggcgaaacgtatggtcattgtcatttttgtagcaggacagacacatgctatgttgctgctcctaaacagccagcaaatgatacgttccatattcatgttcctcgcatgaaagatttgatctctagcaaggttacttgccttccaccgccataccgttcaagttttgactctttgttgaaagctcatgacaaagaggttgacaagtattgtgcaaggcttgaacattctcaccgcaaattagtatcaaatcagctccagctagctgagatatttgcagacatgatcgatgatgtcattcgtcttgggtcacaggttcaagaatcctag

SEQ ID NO: 1107 - DNA, 366 bp, Zea mays
  Peptide Sequence Number=SeqID_42886
atgaaggacatgtctgactctctccgagatcttggcaagcatgtctccgatcgcatgcttatcctcaacctcctgtgtggtctgagttggtgttatgaccatctgaaggccttcatcaagtgctccatgccctttccgtacttccatgacttccgcaacaagctacttcttaaggagctcaccttagacactaagtccagcacgtctacctcgactctctatggcacgtcctccaccaaccaaccccctcgccctctatcgctaagggggctccttcatgccctcatgcctccactcctcctaaagcttctcagtcgtctccaagctcgaaaggtggtcgtcgaccccataagggcggccacggag

SEQ ID NO: 1108 - DNA, 972 bp, Zea mays
  Peptide Sequence Number=SeqID_42887
atggagtcgacggcggcgcccgccgcctgcgagatcgcgcgcctgccggatgacctcctgtcggcggcgctcggccggacggggccgctggacgcctgccgcgccgccgcggtctcgccggcctttcgcgccgcggccgacgccgacgccgtctggtccagcttcctgccgcccgacctgcccccgctcgccgatggggagctccccgccgacgcgacggccaccaagaagcagctcttcatgcgcctctccgaccccgccagacccgtcctcctcgccgacggcctcacgagcatgtggctggacagggccaccgtggccaagtgttacatgctgtccgccaggaagctgaccatcatttggggcgatacgccgcagtactggcgctggatccccctcaccgactccaggttctcagaatgcgcagaactccagcacgtttgctggctggaaatccgcggcaagataccctgcgacatgctgtcccggaacaccacttacgccgcctacatggtgttcaagatgtccgacgaatcctatgggctggactatccgctccaggaggctgaagttagcatcggggcaaccaggtccactcgtcaggtctgcctagggtacgtcgacgacgacgaggacggggaagaggtgcctcagaactaccggtcgttcggggcggtgggaactgtatttagaccaaggatcgggaggcggaaccgtcgccagcctcctggagtgcacgtcctgcaccctcagacaagagccggcggctggatggagatggagatgggtgagttcaggaacgaggaaggtgaagatggcgaggtgtccgtcagcctcatggagaccaggggcggcaactggaagagaggtcttactgtgcagggcattgagatcagggtgaagaaggccacaggggcgtgggcgtccatagccaagacggcgacggaggagaaggcgatcaccacagacacg

SEQ ID NO: 1109 - DNA, 300 bp, Zea mays
  Peptide Sequence Number=SeqID_42888
atgacacggaaggcttcgtcaccggtgcttccggcttccggcgctcgcaccgtgcagcgcaccttcccaccgcattttacacaaaaagtccctctgcgcagccttgccacttgccagctctgccccggtcttccattcccgtcccagcccacccctggtcatacacgctgcgctggtgtgctggcgcgatccgacggcggcaagggagggcgcaagatcgcatcaccagtgacgtcccccggatctcctgtggattttgcgattcggcaccgtgctgatgttcctcctgttcaactttga

SEQ ID NO: 1110 - DNA, 471 bp, Zea mays
  Peptide Sequence Number=SeqID_42889
gattcgaagaattttgggtgggagattaacggagatattaacttcaattggaaaacgctattggaaaataagactaaagaaattgttagattaaatggtgtgtatcagaggatccttaccagtgccggtgtgacaatgattgaaggggcaggcagtctagttgatgctcatactgttgaagttagccagcctgatggttcaaagcaaaggtatacagcgaagcacattttgatcgcgactggtagccgtgctcaacgtgtcaacatacctggaaaggatctggctattacttctgatgaggccttgagcttggaggagcttccaaagcgcgctgtaatcctgggtggcggatatattgctgttgaatttgcttctatctggagggggatgggtgctgaagtagatttgttttatcgaagagatcttcctctaaggagagctgcgtatcaatatattaagaagaaagggtga

SEQ ID NO: 1111 - DNA, 801 bp, Zea mays
  Peptide Sequence Number=SeqID_42890
atggggaggtggggagctggagacattgagaagcggtgcaggggacattgggtgacattggtgtgggtgtgcgtgatccggttggggcaggcgacggcagagggcacaggcggggtgaccgagcagggtataccaggagagagcaagccagcgaaggataatgtggcagtgggaagcttggagatgtttagaaacaggaagcttgttgctatgattgatgtggacaggaaatatgggcataccattattaacaaactcacttgcagaggttttgatgatgagatgagagctattgttgcaagcaaccttgagggaaggggaatcaagttgcatccagggacaaatctctctgagttgagtaaaacggctgacggaataaaagttgtaactgataaaggagaagagctcattgcagatgttgtcctatttgcgacagggcgcacaccaaactcccagagactgaacttgcaagctgcaggcgttgagattgaccgggttggagccatcaaggttgacgaatattctcgtacttctgctcctagtgtatgggctgtgggtgatgtaacaaaccggattaatttaacacctgttgcattgatggaggcaacttgctttgctaaaactgtgtttggtggccagcaagttaagcctgatcacagagatgttccttgtgctgttttctccattccaccactatctgtagtgggcctcagcgaagaacaggccttggaggaagctaatggtgatattcttgttttcatctcatcattcaacccaatgaagaacagcatatccaagtaa

SEQ ID NO: 1112 - DNA, 1077 bp, Zea mays
  Peptide Sequence Number=SeqID_42891
atggacgagttcttcgccgacgccgtggcgggggtgctcgccaggacgggcgtgcgcgcgcgcgacgtcgacctggtggtcctcaacgtgggctccttctccccggcgccgtccctggtgtccaggctcgtgcgccgcttcggcatgcgggacgacgtgatggcgtacaacctctccgggatgggctgcagcgcggggctcgtcgccgtggacctcgcgcgcggcgtgatgctgacgcggccgcgcaccatggcgctcgtcgtcacctccgagtcgtgcgcgcccaactggtacgtcggcaccgacaagtccatgatgctcggcaactgcctcttccgctgcggcggcgccgcggcgctgctgaccaacgaccgggcgttccgggcgcgcgccaagatggagctgcgctgcctcgtgcgcgccaacatcggcgcgcacgacgacgcgcacgccgccgccgtgcaccgcgaggacgccgacggccgcctcggcgtcagcctcagcaaggcgctgcccaaggccgccgtgcgcgccttcaccgagaacctgcagcgcctggcgccgcggatcctgcccgcccgcgagctcgcgcgcttcgcgtcccgcctcctcctccgcaagctcctgccggcgggtaccccgcgcaacaagcacgccggcggcagccccaagatcgacttcaaggccggcgtggaccacttctgcctccaccccggcgggacggcggtgatcgaggcggtcaggaagagcctggggctcaccgcccacgacgtggagccggccaggatgacgctgcaccggtgggggaacacgtccgcgagcagcctctggtacgtgctctcctacatggaggcgaagcggaggctcaagcgcggggacagggtgctcatggtcaccttcggctccggcttcaagtgcaacagctgctactgggaggtgaccagggacctcgccgacgccggcgcgtgggaggactgcatcgaccagtacccgccggagacgctcgtcaacccctacatggacaagttcggatgggttaacgacgtccagggacaggggagcggcttcgtattttaa

SEQ ID NO: 1113 - DNA, 231 bp, Zea mays
  Peptide Sequence Number=SeqID_42892
atggcacagctcctctctaataccctgtactacaagtgcttcttcccatattacgccttcaatgtgctcggtgggcttgacagcgaggatgctgtcacaccattgtcggagtcagaggccatcgatctagttaaggatgtgtttgcatctgaacctgagagagacatctacacttcaaagtacatgctatttgttcttcctggggcagtgagaggatacgagaacaattga

SEQ ID NO: 1114 - DNA, 645 bp, Zea mays
  Peptide Sequence Number=SeqID_42893
atgtcgctctgccgggctggcctactcgtcagtcagctccaaacccttccagttgtcgtctccgcaggatttgcggaccacgccgaacacctcggcgctgtcgttgggtcacctgatttccccgcggcacgactccgtctcacgctggctacaaaggcggacgacttccccacatctccattttccacccgccattgttgccgtgagcggaacctcgccggaatcggtgtgccgcccgaattgagtaggtcggggagctccactatgcctcggcgagcgtgtctgcaacctcagtatcgggttgggtgctccgacgtccttctaatccctcaccgaagactggcgggtgcgcagatccaccgtgagcactcctatgccaagtctacctcccttgttggtgagccccggtttcttacccttgcagtgttcctttacctagttaatgctgcgccatcgctaatcaggggcggattgagcacgaattttggcctaacgactcggggggttcgtcgggacgccgccgcatcgcggacaggaatgctcgactgtgtggcggacgatgtaatcgtgccctgtgtgttcgccttggggctagcttcgggttgctcgggcttccttcaaggttgtagcagccgcgcctcgtag

SEQ ID NO: 1115 - DNA, 231 bp, Zea mays
  Peptide Sequence Number=SeqID_42894
atggacctcgatcgcacgctcttcctcctccgctcctacctcctcctggagaaggcattttggagggctgtaacaactgggatgacaaagtctctggcctcctcatctcgtgttgatgatgtagagagtccagttcttcaaagggtgggaatgtgtccaagaagacaaaggcatcgacccgccaactcttcgctacaaattcaaacagcactaggggtgacaaacctgtag

SEQ ID NO: 1116 - DNA, 318 bp, Zea mays
  Peptide Sequence Number=SeqID_42895
atggactttggttgtccaatatctcatacctggactcctcggcggcacacacaaagaaagaccaggagtaagattgactcgctcgtacccttgtcgacgagcgtcggtcggctcacagctgcgaccgtgggcgggggcagcaggttgggaatgaagaacaaggcaaaggccggaaagacgaatgggacgtctggcgacggcgaaaacgatgccactgcgcaggtcgatgtcagggctggtgtcggacaaatacggggaggaggcgcctgctcccatgccatctggcgagaatggggtggcgcagaggcgaaggcatga

SEQ ID NO: 1117 - DNA, 156 bp, Zea mays
  Peptide Sequence Number=SeqID_42896
atgactactccagatgtcgacgagtcaaccaccaaggaccttctcgatggagatcatgttcttgtcctcgaagcattgaacaaactcaaatcacaatccgacaaagatctcgagcattcgtggaatgtcgacaacctgagaaaattttatgtctaa

SEQ ID NO: 1118 - DNA, 225 bp, Zea mays
  Peptide Sequence Number=SeqID_42897
atggagagggtctatgaggaaaaatctccttccaattctggaggggatattcagcatagcaaggagggatctaaggctgtccgcagtcgcatgctcgaaaggaacaaggccatatcagataaaagcagatggagctttcataggaggtctacaaggcatcgagttttgaagaaatatgatatctcagaacctgaagctcttcgttcctgcaaagcaaaaggctga

SEQ ID NO: 1119 - DNA, 1110 bp, Zea mays
  Peptide Sequence Number=SeqID_42898
atggagatcagcgaccctcggcaggaaagtaggaaaccgaacatctccaatctccatggcggagaaagctcggatggcatcgtcgcgggatatcggatagcagagagcgcagaagcggaagagccgcgccccgcaagcgaaccggcgagaatgagaagcgagcccagaaggtgtgtgaacggtgaaccccggcagcgcggcggcgaagaggaagaaccggagggagggcacgggaaggttgcggcagccgccgctgcggacgtgaggcgtggcgcggaggtcgtgccccggcccgcgttagttgctgagcacacggcagagcgcgccgacgagccgcggatcggggcccggggccggatcgggccgcggatccagctgtccggcgggcgaggcggagtagaagccgcacaggaggagagaacgcgggcttcgcggcacggccgcagcgcggagcctggcggcagatttcatctcgcgccgatgtgggcgcagggggttgttcagtgggagcagattcgcgggtcccgcacacaattgtgtcgtgattatcatgagttgggcgtggaggtgtcacccttcaacaagaagggaacaaaccttgacaactggttccttggttggcttgaggacgagctcaagagccttccatctgtcatcaaggggctaatgtcctactctgccctggttacccacaaaggtaccatgactgcccttgcgcacgtaggttgccgccactttgaaccttttggatatattaatttggacttcaacggtgctgtgtacgatgttgaagaagacctaactctaaagctgcctgttggggtgctctttgactggatgtgggggccgcacaatgtctctgttgtgcgggagagcatagaccgagaggttctgatgcttgggcccatgcaggaaattttggatattgtagatacttggaaggagcctaatgacgccacggtctttgtttctctgttaaattgtcggagttcctctgtggattctgaagagttgtacatgttttttgattcggaggagtcttcagatattgaagacgagctagcgtactttgtgcttttggatgaagtgtcgtccatccccttattatag

SEQ ID NO: 1120 - DNA, 279 bp, Zea mays
  Peptide Sequence Number=SeqID_42899
atggtggccgccagatttgctcccatatcgattcacgtcagcgacgggctctcgggtgtcggctcggaacctcaccaggtcactggggaggcgctcggggccgtgccaagtcaagaggattgccgccgccctgggaactcgccctcactgcctgtttgtgccatggccagggctctgtgctgcacgaatcaagatcattatgttaattggaacatggagcgaccacccggaaaaacagtgctaccacaagggtttaatgggacgcccttggctgactaa

SEQ ID NO: 1121 - DNA, 1092 bp, Zea mays
  Peptide Sequence Number=SeqID_42900
atgactagggatggagtgaatgatgccccggctctgaagaatgctgacattggtattacagtagcatactccaccgatgcggcttgtagtgcttctgacattgtcctgtctgaaccaagccttagtgtgattattggtgttgtgttgacgagccgtgcaattttccaaagaatgaagaattacatgtttgacttcccaccatttatggtcctgatcattgccatcctcaatgatggtaccattatgactgtctctaaggacatagtgaaaccatctccacaacctgaaggtgagatttttgcgactagagtagttcttagtgcttatttggccacgatgactgttattttcttctgggatgcgtacaagaccgactttttcccggtatggaccagcaattgctactctgattaccgtatacgccaactaggcatttgctatgatcaagggcattggatgaggttgggccgacacatctggttgtacaatatcatctccttcttcccgccagatatcatccagttcctcattcgttatgcgctgagcaggagagcgtggaacctcgtccttgagcagagggaggccactacaatgaacccttcatacaaagagccagatccttcacatgacattatggagttcagctacaatgtttcaaccaccaccattgacacaaattcttctgatgggggatgttggcaacaacatctaagaattaaagtgcctagggagaaaggcgagtccattgtagccaagcttggggggagtccgagtttgtccaagtcaacagccacaacgcagagcttgaagtcaagaggagtgtggtttcctggacgtgacaatgagatattggctcccatatttactccaccatcagttgctgaagttgatgttgaagcaaatttgccccaacaggcgttaaaagatgtccatgttcatgcatatactgctgaagaaacaaaagaagcattttatgtagctcgactgttctttcttcttcccctaagcagggtgctttataggtactgtgtcccagttttagttaactttccatttattttgtttgtcaagttctgtaccatcctgaggtga

SEQ ID NO: 1122 - DNA, 350 bp, Zea mays
  Peptide Sequence Number=SeqID_42901
atggcccttgtcttaggaggtggtacttcctcagggtgcaaggacaactacttcaactatggagaccccaatcatttcatcgccaactaccccaagatgaagggacaaccaaaagttagcaagcacgactaccactttagttacaataagggcaagcgcgacaacctctacaatgactttgataatacttcttcttcctcgagtaatgacaaccttgaggtacgggtcaacaacaacatgaatagactttgcttcttcgccaataccgcgggaggattctatgccattgcacttggtgaggatgcggtgggcaacaataataagacatcaatgacaaccctacatctgag

SEQ ID NO: 1123 - DNA, 327 bp, Zea mays
  Peptide Sequence Number=SeqID_42902
atggggccgtcgccgccagagaagtacaaggttgtggagcagatcgaccctgaacaagcgatggacgccgaggtggtggagcagatcgactgggcgcctacaggcttcgccgccaaggccgccgcgctcttcgcatgggcctcgaggcaccggctccggggctacaaaggcacgccagtgtgggaggctgagatccagcaccgcgtagtggtggagaacgggggacaggggttggaagcggggctggcggcgcgcgtgtggggggagcggtggttcttggtggatcagacagtgggaggcacggggcgtacggacgcacagtgctga

SEQ ID NO: 1124 - DNA, 402 bp, Zea mays
  Peptide Sequence Number=SeqID_42903
atgggtaaagccaacagcctggtgtacctgcacgctgccctatgcgagtccctgaggctgtacccacctgttccgttcgagcgcaagaccgcggtcgacgccgacgtgctgccgagcgggaaggagttgatgcccggcgacagtgtgctcatctccaactactgcatgggcaggatggagggcgtgtggggcaaggactgcatggagttccgcccggagagatggttcaacgacgaagggggcctacgctacgagccgtcctacaagttcatctccaacgccgggccgcggacgtgccttggcaaggagattgcgttcgtgcagatgaagaccgtggcggcggccctgctgtggaacttcgccgtcgaggtggtgcctgtaatacccaaattgcaagagtag

SEQ ID NO: 1125 - DNA, 204 bp, Zea mays
  Peptide Sequence Number=SeqID_42904
atggtggccgccagatttgctcccatatcgattcacgtcagcgacgggctctcgggtgtcggctcgaaacctcaccaggtcactggggaggcgctcggggccgtgccaagtcaagaggattgccgtggccctgggaactcgccctcactgcctgtttgtgccatggccagggctctgtgctgcacgaatcaagctccaaattga

SEQ ID NO: 1126 - DNA, 535 bp, Zea mays
  Peptide Sequence Number=SeqID_42905
atgggcgggggtagcaggttgggaaggaagaacagggcgaaggccgagaagacgaacaggatgtccgacgacggcgaaaatgatgccgccggccgccactcagccgcccttctgcttccgcccgccgttcgccgagccgtcgaggccgagaccgagacgccgagtgaccacgcgcccacgcctgtgccgctgtgccttctgccgctgccttccacactccgcagttccgctctagccgcggcggcagcacgcgcacacgccgacgcgccgtgggccgtggcgtcagccactcagcgtccggaccggcggcggcaaaggcagcagccgcgccgggaggagcatccggctgggccagtcactggcgagtgtcgtccgcccggtccctctcccgcgcgacgcgccgagctccgcctgtcagcccgccgctcaccggactgtgtccctacgtccaccggattccaccctgttggacatggcagtcggcacacagtagacgcccacgcggccacgcctataattgtaagcaaaatcagag

SEQ ID NO: 1127 - DNA, 876 bp, Zea mays
  Peptide Sequence Number=SeqID_42906
atggcgagcatggcagccgtcttcggcgaggccaagccggacaaatccaacaaagatgccgatgctctcctgcgccgacccgtgctcttccacgcccactcccagggcggcctccgcgtcgtcgccaccgacctccactccttcgcttggcatcgctccctcgacctcgacggcctccgcgacctcgctcttcttccctgccgcggccctaggtattcagttcatatcttctccatcctaccctgcctggctgaacgtctgaacctgaacgccttcgcctactgcacgatgtcgtatgcaggtcctgatactgctgagcttgtggctaccaaggcaaagggactacctcgcatcactctctctctcgatagagttgccgcatctgcgctcaaagatgtcattgctgatttctcccttgcgctctatgaatcttacaagaccaggcaggaacatgcatccagagaacaagaacgagtgtcacagctcatggaaaatctagactctgaaagagtatgttatcctaccatcactgcctatattagtacgaatttggtactggtgctctcatttatgctggtgcttgatgaatacagttgggaaaaaaacgaagtaatgcaaaagcaacttgaagccctttcattcctcgacaaaagaaaggctacaaagccaaagcttgtgactgataagtttccaagtgtgtcgggtgcacctccaagctctgatcaaatgattgttgctgtacagcagcaaacaccaggttgcgtgcttttttttttgagtaaactacatggcttcttcttgatgcatacttccaaggcaagagtacgaggagctttgttgcaagatactgaagaaaatgctgatgataatacttag

SEQ ID NO: 1128 - DNA, 601 bp, Zea mays
  Peptide Sequence Number=SeqID_42907
atggcctccgactcgggcgatttcggtggggagaacaagtcgttggaaacggcgaggcggctgctggaggagaccttcacgagtgaggcagaggcggaggcgctaccgagcttgccctcggggttctacgacgccttcgtcctgaggggaatccgcgtcgtccaggccctccagcccggcacactcctctgccacttcaacgtgccctccagactactcaactcgggcggcttcctgcacggcggcgcaaccgcctccctcgtggatctggttgcctccgccgccttcgccactgccgggctacgcaccaggggctcaccccttgagatgaacatctcctaccttgatgctgcttttgctgatgaagagattgatatcgaggcgaaggttcttcgcgctggcaaggcagtaggggttgccgttgtggaactgaagaagaaatctggcaaaatcatcgcccaagctcgctactccaaatatcttggtgttagcacgagaatcacagctgttattgcggttgtcacccatgacaaatacgtgaccttcaggaaggcgctgcaggagtacgagaatacttactttcagctgactgaggatccag

SEQ ID NO: 1129 - DNA, 234 bp, Zea mays
  Peptide Sequence Number=SeqID_42908
atgggcctcagatggtggatgatctttttcttattggatggatgggtgggtacctggatcctcagtcagctgaaagtcacgtatttgtcatgggtgacaaccgcaataacagctgtgattctcgtgcctgagcctaacagtaatagtggtgcttttggtttcagggggcctcttcccgttgccaacatcgttggaaggtacatgacatcatttacaagatcctctttccagtaa

SEQ ID NO: 1130 - DNA, 273 bp, Zea mays
  Peptide Sequence Number=SeqID_42909
atggccgtggggggccttctgcggggcctcgtttcgccccccgcctggctaccctgccatgagctcttcgcctcctggcaccactggcttccctccctcccgcgcctccgcccgcccgcatccgacggcttcaagcttctcttggtgctgctgctcttctccgccgctctagccgaggtccgctacatcgcctcctcctccatggcgcccacgcttcgtccaggcgaccgagccgtcgccgagaagtgtagtagatccacgctgcctgcctga

SEQ ID NO: 1131 - DNA, 1038 bp, Zea mays
  Peptide Sequence Number=SeqID_42910
atggccttaaagcaggggctgcacgtgccgcgaactccgagtcaaccggcggcattccctcgccgcaactgcggtcagtgcggaggttcggtggagtcgtggagacgctcggatttttcggaggtgtggttgcgcggtgaagacgacggcgctgacatggtggggtccgcaagtcaacacgcggacgcgttgtctgggatgggcgcgcgagtgaccgacaacgcgggcccgagcgtcagcgccaacaggttcgtgggctgcgcggatcacaaaccacgaaatagagaagctgaccttgtagagctgactatcggattcacggaccaatcctcgtcttctcccaattctcattgcatcgaatcgggctcgatgctgcccctctccctcttcgtttccctcttggtgctccatctcccccacgcatccgccgacggcgacatctgcatcatcggcggtggcatctccggcgcctccaccgccttcttcctcaccagctacaccagcaccctcggtggagcgcagctgcgcgtttttgagcgccgtcagaaggtgggcggccgcctgggcaccgtcactctcgcgggcgacagcttcgaggccgggggctccatcatccacccccgcaacctccacgcgcgccgcttcgccgacctcctgggactcgccgtgaagaccggcggcgacgactggctagggatctgggacggcaaaagcttcgtcttccagacggcccgcccacctcctgtcggcagctcctggtggcggcgcaagctgcacagtctcgtcaactcgctgctgctgctcaggcgatatggtctgtccctgctaaagatggacaagtttgtccaggaaatgttgcggcggtttatgctcttctacaatggcatggagtctcgccctgtgtttgccacggttgaggagatgctccaatggacgggtctctatggcctcacccgcaggacccttgaggaggagctgctggatgccggcctcaacacccgaacgatagcagagcttgtcactgtatgcttctcctga

SEQ ID NO: 1132 - DNA, 192 bp, Zea mays
  Peptide Sequence Number=SeqID_42911
atggcggcgttgagcagtggaaccagactgtcgtcaccatggcacggtgaggcggtcaccaccgttgtctccctacttaaccgagcacccactaaagtcgtcgacaacatgacattgtatgaggactggcatgggcacaagccgggtgtccacttcctgcgcacttccgagtgtgtgggacgcagtctttga

SEQ ID NO: 1133 - DNA, 1347 bp, Zea mays
  Peptide Sequence Number=SeqID_42912
atggagaggaagcaagccgcctacagcaacctcgtaaggatcctcttcttccaccgtcgtggtctcctccattcccttgtcgatcacctatggtctcagctcaacggttgcattggggactgcaggatgagagtttttaagagagttcaggcaaactttttcctgcacattgcagtcactacagtgttaggacttgaagaaggaaaggattgcataattgttggaactttatataagcacatgaagttgaagccttcaattcttgatgaatatgccaaagagaggtctgcaattccccttgtcaaaccacataatttcatgcatcctgatgatcatctcattctggaagatgaaagcggaagagttacacttgcaggagccatacctccagcagcattcgtgactggggttgtagtggctctccatgggaaggaaacaagtgctggcaattttcttgtggaagatgttcttgaggctggtcttccaccccaaagtgcattgtctagcgcagaagaagacaagtatgtagtattcatatcagggctaagtgtaggaagtgacacattcaatcctctacagttccaacttcttattgaccatgtcacaggacatctgggtgacgagaatgagcaatccatagcatcaaatatagtacgcattgtggttgttgggaattcagtgcatatttcaccaaggtttgtcaatggtcagacggtaccatcaaaagatcaatcaaggatagcagaacctattaaggaactggatataatgcttacccagctcgtggcttcgttgcctgtagatatgatgccggggtgtcatgatccggcaaatttttctttgcctcagcagcctctgcacagatgccttttctctggggcatccacctacaacactttttcgtcttgttcaaatccccatcaattcgagcttgacagtgtccagtttcttggaacatctggtcagaacatagatgacctgtacaagtactctgatgctaaagacaagctggaattcatggaaagaacactgagatggcgccatcttgctcctactgctccaaatagcctaggctgttatccatacacagacaaggatcctttccttgttgaaagttgcccgcacgtctactttgttgggaatcaagataaatatgaaactcgactgttggaagggcaagaaaaacagaaagtgaggctaatctccatcccaaggttctcggagagtggagttgctgtaatgaagacttcaatgtacaatgttgagcggcatgaccacgagggtgtatttgtactagagcagttctttattagatgtatgatgatgaccttaggttttgccaagtag

SEQ ID NO: 1134 - DNA, 549 bp, Zea mays
  Peptide Sequence Number=SeqID_42913
atgacgtccttgtcacgcacgctgtctcggggcgggccgatgcagtcgccaggggctcgccgcatccaaaggacgcagactgctgtgaattttggtgagcccatgtttgacagcgaggtggtgccgtcgtcgcttgttgagattgcgcccatcctccgtgttgccaatgaggttgagatggccaaccctcgtgtcgcttatctctgccggttctatgcattcgaaaaggctcacaggttagatccgacttcaagtggtcgtggtgtccgacagttcaagacagctcttctgcagcggcttgaaagggagaacgagcccaccttgatgggaaggggacaaaagagtgatgcacgggaaatacagaccttctatcatagctattacaagaaatatattcaagcactccagaatgcttctgaccaactggatcgtgctcaactaaccaaagcctaccagactgctgctattctgtttgaagttttaaaagcagttacacaacaacatgctgttgaagttgatcatgaggagagctgcgcatcattaaattaa

SEQ ID NO: 1135 - DNA, 2214 bp, Zea mays
  Peptide Sequence Number=SeqID_42914
atgggtcagggtcataaaaggagcactctcgctgcaagacagtgcagtctctcgaacgacgccggcgacgaggaacttgagcagcgttggtcgggcggacggagcgagcagtcacgaaaggtgggacggaaatgggatgtgtgcaacgcgtctgagactgttcgtgtgtgctgtgaccagaagcagcctcacctcttccgtatatgtacacgcgcagaggaagggcggtccaaggcccagcgctggcgcggcgacgcttcagctggaggttcctctccatcttctcgttcctttaaagctgcactcctctccagctcggtttgcgccgctggtctctcccccttggctagccatgtctcgccctccccctccccttctgcgctagctgctcctgttttccccgccaaggtgtcgtctgaggtgacccttccggctgttgaaggtggctggcaggtggttgatcgcagacagaggaatcgtggtgtgcacctccctcgtcgagggtcccgtgtggatctccgaggtcggtgttacaactgcctctctacttctcaccgggctgctacctgccggcgtccaacaaggtgttttcggtgtctctgctttggacatcgggtggcagactgctcatctctgccggccgactctcagaagcagccagtgtggcagcgcctgggcatcgtcaagcggtgtcttccgggcagtcaggattcctcccagcgggccttggtgaggccgaggactccggtgaggcctccggtgtggcagaggttatctggcatggacaaggttcattctctggggggcgcgcgcaagacctcggtctggagacgtcttgcttcgtcgcaggatcgtgccgcgatggagcctgtcatggatcttgagaagcagccgtccttacagcccaagcggaaaagaagacgttcaagacgcgggaaaggggctgcggtggtggggaacagtcagtctccccctgctgacttggttcctctcacgtcgaacttgccctcttgtgttttggaactttcaacggacatggcaggagaagaagctgcgctccgtcgagcattatttgtcactgttactggtaccagacccgctgttctcggctcggaggtgttggaggaagtgggccgtcgttattgcatcaatattgacgatatgtctattcaccagtccaagccagaagacttcctgctgtttttgccggatgaggaagtggcgactagagtgcttaatgaaggaaagccattcagaggccctttgttctcgctcgtgttcaagcaatggacaagatttgcacatgcctcagctacgtctttctctcacttgatggatattgagatcagggggatcccagcgcacgcgtggggtctgaacacagccaagacacttcttcgtggctcctgtcacatcttggagttgcaccccgcctctgcgtgcaagacagatctctcctcactcaagcttcgggcatggtgtctggatccgaagaagctttgcagggagatggatctccacatcattgagcgagagccatttattcaggaggcgagatgtctgacctacaagattagcattgctgctagtccggctccccttcagttaccctcggacagcagtctctctccttcagatgagaatgcgtttcatggtgaggaagatggagatgtccggggcccgtccaatccccggttccgacaaccacgccctttgcagcgtcagcctgtccaccttcgcctcggatcacatcagggcgtgggcagagaacggtctgtggctgtgcatggaaataggatggtggcgccggtcctagctctggaagatggtgctgctgtctgtgctggtgatgggctgctgacctcacctggaccttcctcgcctcagcacggatgtttggctgagccgctggagaaggctaggttgagctcgccccttcctgccactcatgtgccatgcatgacaaccttggagaatatcttagctgggccgtctgggtctgctgctgtggggtcgctggattctgtcctccctgtttcgccccagcgacacaggactgttgctgttgctgggtcgctggaacaggctggtgcgaattcgcccctcccaggtgattcatctaatgctgtggcccccctgagagtctactcgagatgcagattccgaagcaaacacgccccaattcaggaaggacagttgatacaggttgtggag

SEQ ID NO: 1136 - DNA, 939 bp, Zea mays
  Peptide Sequence Number=SeqID_42915
atgcgcgggcgcgcagataacagcaagtgggcagagttcgcgacgcgagtgtccggcgagtgggacggcttcggcgcggacttcacggcgtccggcgaccccgtggagctgccggagaaggtggtcccggaggcgtaccgggagtggggcgtgcaggtggtggactggcagacgcagtgccccacgctggcggacccgggcgcgccgtgcgcgctgcactaccgcctggtccgcctgctccccacggtggggtgcgaggccgacgccgccaccgtgcacacctcccaccagcgccacgcctcctccgccgccgccttcgcgtacgccgccgcggggtcctacgtcgccgcgtggcccaggggccccgcgctcgtgctcgaggtggagcactgcgtcgtgcgccccgacgcgcccgccgaggaggccggcagggtccgggtggtgcagaccgtggcgctgggcagggaggcgcgtctccgcgggctcaaggtcttcgccgagcagtggtacggcccgttccgcgacggcgagcagctcggcggctgcgccgtcggggagaccccgttcgcggccggggagaagctcgacgtcgccgaggtgatcgggcagtgggagaccacggacgccgccgccgcgaggttctccggcgacctggaccccgagacgggaaagttcgcggagctgtcgccggaccagccgaggaagctggtgagggacgcggagggcgtcgtgacgctgccgaagcagctgtggagcgcgttcaaggagctcggcgacggcgagttcctgtgcgaggtcggctgggctctgggcggcggcggcgccgtcacgtcgcgctgcgttctgtccaaggacggagacgtcaaggcaagggttccagcggtcgatcgacacgcagagtggttcagttcgcagctccagagtgaattcagagactaa

SEQ ID NO: 1137 - DNA, 1576 bp, Zea mays
  Peptide Sequence Number=SeqID_42916
ggctgaggctgccgagcgtgctctgctccgctcgactggcgacgccgcggccgccctctgcgctgccaaggctggaacggtgacatatggcccccagcacgtgtgggacacgcgtgtctgtggcctgggctgggtctgggttgggctcgttttcctccgtctggtggcggtgacgacgctgcccctcaggaagctcggatttcggccccgctccggcggaccgcttccgttcgtgctctgctccgaccgagcgcgccgcgccgtggggggcagctgcgaggactctcgttcggcggctctggtttcaccatacgcggtggagagcgctattagcttgaggagtagatttcgtgtagcggtgagcaaagtttgggtgtcaagtctggtggtggaagccttcaggcttgagattttctccaaggagcacgccgtctctggaaggaatttcctgccatcccagaggttcgctgatggttgtcttgaggacgatcgctactctgacttgaagaagtttgacaagccatggcctgaggtgaactcgtttaagcccactgctgttggtattttgaagaggggattggatccaacgtcaatcactgtccttgaaaggaagacggccgacataagggaacattatatcattggtcggaggcttggtcaaggccagtttggcacaacattcctctgcaccgagatcagtacagggtgtgagtatgcatgcaagacaatcccaaagcgaaagctcatcaccaaggaggatgttgaggatgtgcgccgtgagatccagataatgcaccatttgtcaggccacaagaatgttgtttccatcaaggatgtatacgaggatgggcaggcggtgtatattgtgatggagctctgcgccggtggggagctctttgatcgaattcaggagaaagggcattatagcgaacagaaggctgcagagctcataagaatcattattagccttgtggctatgtgccattcacttggggttatgcaccgtgatctaaagccagaaaacttcctcctttgggataaagaagatgacctgtcaataaaagcaatcgattttggtctatctgtgttcttcaaaccaggtcaggttttcactgagctggttggaagtccatactacgttgctcctgaggtgatagctgaacgactttctgaggaggagattgctgggttaagacaaatgttcaaggcagttgacgttcaaaatagaggcgtaattacttttggtgaacttagacaaggtttaaaaagatatggtagcgaattggagaatagagaaattagtgatataatggaagtggctgataatgacaataatgtgaccatcaattatgaagaatttatcgctgcaactgtgcctcttaacaaaatagaacgtgaggagcacctgatggcagcttttacctacttcgacaaagatggaagtggttatatcacagttgacaagctgcaacgagcttgtggagaacatgacatggatgacactttccttgaagagataattttagaagttgaccaaaacaatgaaaaggttgcaatggttccttatcctgaatga

SEQ ID NO: 1138 - DNA, 483 bp, Zea mays
  Peptide Sequence Number=SeqID_42917
atgatatggcacaagcatgaacagtttgcttctatccagtattcacagccatatgcttttgttgggtcacttgttctgatggaattgaacaattttgtttgtcaggctgacccagagttggaagctatcaggcagagacggatgcgagaactacaacacggtgcggcaaatcagcaaaatgcgggccaacaaaaggctcaggaagacgcgaaacaggaagctgaggaacgccggcagatgatgcttgctcagatattatcttctgaagcaagagaaaggctttcccgcatagctttggtcaaacctgacaaagcaagaggggtggaggatgttttgctgagagctgctcaaactggtggaatatctgagaaggtgtctgaagaaagacttatctcccttctagaacaaattaacagccacacaagcaagcaaaccaaagttacgattcagaggcgtcggaatgtccttgacgacgatgattag

SEQ ID NO: 1139 - DNA, 3081 bp, Zea mays
  Peptide Sequence Number=SeqID_42918
atgcagatcaatgcgtccttccaccccaaccgtgctcctcgcccttctctcgtcgtcctcgttccccctagactggcgtggagtgaagatccatccggactccgattgatttcttctcctgctggtcccaacgttcacctgtatgcgcagttgcaggatgaaacatcattggtttggtattcccatagcaaagtgaagtaccttgtactgtcttctgtctctagaatcattcctggacaaagaactgctgtatttaggaggtttttacgccctgagaaggactacctatcattttctttgatatacaagaacggacaacgttcccttgacctggtttgcaaggatcaagcagaagttgaggtctggttttcaacgcttgaggcacttattacttcatgccgtaaaagttattcagctgatggtccaagtgatagattatcagtttctgacgaagtatcacattaccaagatacttttcatgatacaacactagatattgcatcgagtatcacacgtacttttaactcagcaaaaacagatgttgtatctgatcgtgcaaatatgctaagagcaagtacagacagtagccggcttagtatttccagtgcccctagttcttcaagtcaaggttctggacaagatgacattgaatcccttggtgatgtttatgtgtggggtgaggtgtggactgatatgatccctgcagaaggatccgcaaactatttgtgctccaaagcagacattttaattcccaaaccacttgaatcagatgttgtcttggacgtacaacagatagcgtgtggttataggcacattgcactcactactaggcaaggagaagtatttgcatggggcgaagaacttggcggacgacttggtcatgggaccgatgcagatattagccgtcctaaacttgtcgaagccttagcagtgtcaaatgtagaatatgttgcgtgcggcgagttccatacttgtgctataactgcctctggtgatttgtacacttggggtgatggatactacaatgctggattgcttggacatggtgctggaactagtcactggcttccaaaacgagtctcaggacctttagaaggggttcaggtattgtctgtttcatgtggttcatggcattcagcactgaccacatcaagtggtaaagtgttcacctttggtgatgggacatttggtgcccttggacatgggaatcgtcatactgtcgcatatccaaaggaagtcgaaactttgagtggatttagaacaataaaagttgcctgtggactctggcattctgcagcgattgtggagaccactaatcaggcaggtgtgaatgtgatatccaggaagctatttacctggggtgctggtgataagaatcccctaggtcacggggataaagatgctaggctagttcctacttgtgttcaatctctcattgattataatttccatcaggtagcttgtggacatagtatgaccattgccctttctacatctggtcatgttttcacaatgggcagctctagcaatggccagcttgggaatccaaaatctgatggtaaacatcctaccccagtacaagataggctggctggagaattggttgaagagatctcatgtggctcatgccatgttgcagtcttgacttcacgaagcgaagtatatacatggggaatgggagccaatgggaggctgggacatggtggtgttgaagataagaaaaaaccaactcttgtggaagcattaaaagatcgtcacgttaaaagtatagcatgtggttctaatttcacgacctgcatttgtatacataagtgggtttcaggtgctgatcagtctgtctgctcaggttgtaggcaaccatttggcttcacaagaaagagacataattgttacaattgtgggcttgttcattgccatgcatgtagttcaaaaaaagttctgaaagctgctttggcaccaactcctggcaaaccacatcgcgtatgtgattcatgcttcatgaagcttaaggcagcggagaccagcagcaacagctcacatagcaaaagaaatgccattgctcgtcgctctgttgatagcaaagacaggtcagagagaccagaaataaggtcttccaggcttgcaactggatcaacagcagaaccactcaagcaagctgagctgaaagcagttagaaacgagataaaaccagatcctatgtccacgatgagggcaccccaagttccttccatgctaccttttaacaatcttgcttttggcgcaacatttggtggtccagctagtctgaagcccatgacaatggctccaatgccaatggccatgcctatgtcaccagctcctctcacaaagaagccaactccagcagcagcaactcctctttgtggtaaaagtgataccgataacttgaagatggctaaacaggtgctgaatgaagatatctcaaagttgcaatctcaggttaataaactgaaacaaaaatgtgatgcccaagaagagcaactgcagaaagcggaaaggagagctgaacattctgcctctacagctgcagaagagtcttcaaggcgtaatggtgtcttggagttcattaggttccttgacaatgagctcaagagcatcgcagatagggtgcccagcgacgctgccgacggcttaaaagccttgcaaaaccattcggagaggtttctcacagaacaaggtgttcgtccactggaagccacaggtatgcatcgtaagtgcgcaagcataggcaacctcgtaatgtctcaggacggcagtgctggaaacgcgagcagctcggctgcttccttggcgagcgagtctccatgccaccgtatcatggagaacagctcgagagctaacggcgacttagcaccgaagctcggtggtacccatggagaagtgcagctgattgagcagtttgaaccgggggtgtatgtgacgctcatccagcttagagatggcactaaggtgttcaagcgtgtccggttcagcaagaggaggtttgcggagcagcaggccgaggaatggtggagggagaaccaggagagagtgttcaggaaatacaaccacccggccaactaa

SEQ ID NO: 1140 - DNA, 597 bp, Zea mays
  Peptide Sequence Number=SeqID_42919
atggaatccgacgccgaggaggcggcggcggcggcggcggtggacccaggcgctggacggctgaaggggagcccggagctgactgtggacgcggacatgcgggaggtggcgaagagggccgcgtggagcgtcagttccttcaaggacggcaacggcgtcgcagccctgcgcgacgacaacctcgacgcctactggcagtctgatggggcggagccgcacctggtgaacatccggttccagaagaaggtgcagctgcagcttgttgctctctacgtggatttcaagctcgacgagagctacacgcccagcaagatctccatccgggccggggatggcttccacaacctcaaggagattaaaactgtggagcttgcaaagccagttggatgggttcatatatcattatccggggctgatccacgcgaaacattcattcacacatttatgctccaaattgcggttttatccaatcatctgaatgggagggatactcatgtccgacagatcaagatctatgggccaagaccgagccctgtcccccaccagccgttccatttcatttccagggagttcatcacgtactccactattagatga

SEQ ID NO: 1141 - DNA, 375 bp, Zea mays
  Peptide Sequence Number=SeqID_42920
atggaggaggccgacggtaatcgacggggggagaagggccggatcttccgccacgaaggagaggcagagagcgggggagcgtggagggcagaggacgcagaagtcgccggggtgacgccgatggggtcgtgctgtgctgcggaggacacaggacagataggtgagtactggacgatacgtgtggccgccgcgcgccgtttggcagattcacggcgcattgggctggaccaggccttctgtgtggcaggactggtggcccctcagcccctcccctgctggctgctgcggtgtaactgctctgctcctttgaactcgaagcgcaagtgcgcaacagcagctgtacctccggcatggcagctgtgcgcctgtgcctaa

SEQ ID NO: 1142 - DNA, 928 bp, Zea mays
  Peptide Sequence Number=SeqID_42921
gagaagcggacgacgcttcgccttcgccataatgaccgcgccaaaaaagggaccgggaaagggggataccccgaaaaggatccttccccgtgaaggaaccaggctccgagcctccctattgatcagaggttcgaaggctggcccctcggaagggttcggcagccgcctcagatcgcgtgggctctacacccactactggtcagaggttcgaaggccggcccctcggaagggttcaacggccgcctcaggctactcgggctccgcgcccattactgatcaggggttcgaaggctggcccccgaaggggatcagtccatatgagggactcgatcacgcctcgcccgagcctggcctcggacaagggcagccgaccccagaggctcggactcgggctaagccccggaagacggcgaactccgctccgcccgacccagggctcgaactcgggctaagccccgaaagacggcaaactccgctccgcccgacccagggctcggactcgggcttggccccagaagacgacgaactccgcttcgcccgaccccagggctcggactcgggctcggccccagaagacgacgaactccgcttcgcccgaccccagggctcggactccgccccgacatcagccggcgaactccgctccgcccgacccagggctcgggctcgggctcggccccagaagacgacgaactccgcttcgcccgaccccagggctcggactccgcctcggcatcagctggcgatctccacttcgcccgaccccagggctcggactccgccccggcatcagccggcgatctccgcctcgcccgaaccaggggctcggactcgacctcggcttcggaggagcttccacgtcgcccaacctagggcgcagaccagccacgacaacgggaggcgccatcatcaccctaccctgaactga

SEQ ID NO: 1143 - DNA, 936 bp, Zea mays
  Peptide Sequence Number=SeqID_42922
atggctgacgacgagccgaactactgcccggactgccaccgcacgacggaggtggtgctggaccacgccaccggcgacacaatctgcaccgagtgcgcgctcgtcctggaggcgcactacatcgacgagggctccgagtggcgcaacttcgcggacgacggcggcggcgaagaccgcgaccccagccgcgtcggcgggtccagcgacccgttcctcgccaacatgccgctggtcacccaaatcgcctacgccggcccgcagaaggcgcagggcgaggggggccacgcgctgccgaggctgcatgtcagcgccagcggcggcgcgggcggcgagcaaacgctggtcgagggctttcacgccatcgccgacatggccgaccgcctcggcctcgtcgccaccatccgggaccgcgccaaggacgtgtacaagaggctgggcgaggccagggcgtgccccggcaggggaaagaagcgagacgcgttctacgccgcctgcctctacgtcgcctgccgcaacgagggcaagccgcgcacgtacaaggaactggccaccgtcacctccgacggcgccgccgccaagaaggagatcggcaagatgactatgctcatcaagaaggtgctcggggaggaggccggccaggtgatggacatcggcgtcgtgcgcccctccgactacatgcgccgcttctgctcccggctcgggatgggcaaccgggagatgcgcgccgcgcaggaggccgcgaggaggctggagaacggcctcgacgtgcgccgcaaccccgagtccatcgccgccgccatcagctacatggtcgtgcagcgcactggcgccggcaagaccgtccgcgacgtgtccatggccaccggtgtcgccgaggtcaccatcaaggaggcgcacaaggacctcacaccgcacgctgagaagctcttcgcctag

SEQ ID NO: 1144 - DNA, 246 bp, Zea mays
  Peptide Sequence Number=SeqID_42923
atggatggatggggcgtgcaagtgacaaaatctggcagcccgtttggtggctccgcaccacttgtgcccttttgtctggcctggtccctttggggcccggacgttgcactgcacacctggactgctggacaggtctctagatgcagcaatacgagtatgcatgccaagtttgttgacagttggaggagctggcacctggcagccacacaagaattcttgggcagggctgctctttcgtgggtttag

SEQ ID NO: 1145 - DNA, 105 bp, Zea mays
  Peptide Sequence Number=SeqID_42924
atggacccggctcggcagtgggtgtttctcaccagccagtcacccgcctgctctgttctcccgacgatcgagagatcgagggaggtgcaggcccgagtgacgtga

SEQ ID NO: 1146 - DNA, 342 bp, Zea mays
  Peptide Sequence Number=SeqID_42925
atgacctctcttttgtcatcatcatcgtcatcacagaggatgatgagcgctcaccagggcacctggagggttcaggagtcaggactccaggggtggggcagtgcaagaaaaggtagccatggaggctcccagtggaagctccacctcttggagggtccatggacgtggggagggtgcaaagatggccagctagacgtggatatacagacgtggctactgaccacagctcgcgtcggtagagaatcaggccaggaccgccgagagcacctccggcgattttcagctggctccggcaattcgtcgaacgacgcgcgtgcggccgcggaaggaagtagaacttga

SEQ ID NO: 1147 - DNA, 891 bp, Zea mays
  Peptide Sequence Number=SeqID_42926
atgcgttgcgccgccgccgcgcttgcggtcgccctcatcgctgtcgttgccggcgcaaccgcgccggggtcgccggccgcgggcacgtgcgcgcggaggggtgcgctaccgttcctcgacgccgtcggatcccgctgccccttcgtccggatcgagccgtccccgcctctcgaggtgagaggagaggctgtggatactgagttgaaccttcgaaggaggggtgcttcatactccattctcttctatgctgcatggtgtcctttttcgagcaaatttcgaccgatatttgaaactgtcagcactatgtaccctcaggtacatcactttgctgttgaagaatcttctgcgacaccaagatatggagttcgtggtttcccagccattcttcttgtaaatgagactacaatggttcgatatcggggttcaaaagatcttaactctctcgtcgatttctataaagaaactacaggtctggatccagttgcatacattgatgttgttgtccagcaagagagcacagcaagcttgagctcagttgcaccatgggatcgttctccgcttgagatggccaaagacgagccgccgtatctgttggtcgcagttctcttcatcatcctgaaggccgcagcgcgcttggtacctgctgccatgtctcatctgagggccttcttggccgtccgtgtccagaacctgaacctagggatccgcaggggatcaagccaggtcttggaacgagccttgaacgcccttgacgtgaggaggctgtgcagcaagctggggctgagcaacagggcaacagatctgaggaagggtgcaagcaatgctcgagcctgggcttcctcgtttgcttccgtctcactgggtgaaccttcatcttcgagacaagcttag

SEQ ID NO: 1148 - DNA, 312 bp, Zea mays
  Peptide Sequence Number=SeqID_42927
atggccaaaggggatggagtggatcgagaggagcaggtggggagaacactggcaaccactccaaccagtgtacaggctagagatgaggggagcaagcagccgcagcaaggagctcacaactcacaggtactggtgggaggagggggcggagcctgcggatcatattcatatctactgtgcgtaatcgcaaaagatcttcaagtttggggcgaggaacggccagacaatcaggaaaaggaatcggtcaaaacgcttgatgaacccatgctcaagaaaactcagacagacagacagacagacaggcacaagtga

SEQ ID NO: 1149 - DNA, 1062 bp, Zea mays
  Peptide Sequence Number=SeqID_42928
atgtcgtcgatgatgaacgcgctgtcaaactggctggtgaacccgcgccgcaacccgctcgcgcgcctccacatgcacaccgtctcctcgcgcctcaggaaatacgggctgaggtacgatgacctgtacgacccctacttcgacctggacatcaaggaggcgctcgggaggctgcctagggaggtggtcgacgcccgcatccagcgcctcaagcgcgccatggacctctccatgaagcatcagtacctccccgaggacctccagcgtccgaggttgcgtaagataggttctatgtcgaaaactaatcctgacgtgattcattatcggtgtaaagttgcggatgattgcatgtcaagtgagatcaaggcgctgcccaaggccgccgtgcgcgccttcaccgagaacctgcagcgcctggcgccacggatcctgcccgcccgcgagctcgcgcgcttcgcgtcccgcctccttctccgcaagctcctgccaggccccccgcgcaacaagcacgccggctgccccaagatcgacttcaaggccggcgtggaccacttctgcctccaccccggcgggacggtggtgatcgaggcggtgaggaagagcctgaggctcaccgcccacgacgtggagccggccgggatgacgcttcaccggtgggggaacacgtccgcgagcagcctttggtacgtgctctcctacatggaggcgaagtggaggctcaagcgcggggacagggtgctcatggtcaccttcggctccagcttcaagtgcaacagctgctactgggaggtgaccagggacctcgccgacgccggcgcatgggaggactgcatcgaccagtacccgccggagacgctcgtcaacccctacatggacaagagagatgaggaagacgacggccagggaagggagaatggaagacgctcgaagacggcggccagggaagcacagcaggtcccattcagaggatatttgagtgacatgttggctctggtgaaaaaggaaaacgctgagcgtgaagcactgggagcccttccactctaccagagaacgcttccctaa

SEQ ID NO: 1150 - DNA, 651 bp, Zea mays
  Peptide Sequence Number=SeqID_42929
atgggcatgaagaagggtgtgctgatgctggctctcgggctcgcgatggccgttacctcgtcggccgtcgtctacaaggtcggcgacgcctctgggtggacgatcctcggcaacgtcaactacaccgactggacttccaagcagaacttccgtgtcggagacaccataggcaaggtagagttcacgtaccccccgggcatccacaacgtgctggaggtgaacaaggccgactaccacagctgcaccaactccacgccgatcgccacgcacacctccggcgacgacaagatcgtcatcaagagccccggccaccgcttcttcatctgcggcgtgcccggccactgcgccgcgggacagaagctcagcatccgcgtcctcaagacgcgctcctctgacgccccttcccctgcgcccgccgcgcgctcagcctcggcggcgtcgcccagccccagcggcagcaccagcaccgatccgagcggcgccggcgcctcggcgtcgccgcctgcgtcgtccacggacagcacgcccgacgcgacgaccaccaccgcgcccgcgcccgacgccaatggcgcgggggtcagtgcaggccaccgggccgtcgtcgctgccatggcactggcggcggccgcctccatggcgatgctgtactag

SEQ ID NO: 1151 - DNA, 996 bp, Zea mays
  Peptide Sequence Number=SeqID_42930
acggtgttccgggagtcctcgtgcatcctcgacggttgcaggttgttcgcggtggatctcctcggcttcggccggagccccaagcctgccaactgcatgtacagggtgagagaccacgtggaggcgatcgagagaaccctcatcctcgccggcgacggtgaatcgcagagtctgatgagctccttccacctggtcagccactccatgggctgcaccatcgccctcgccttggctgccaagcacccgacgcgagtcaaatccatcacgctggttgcaccgccgtacttcctgccgtgcgagcagagagcgagccaggtggcgctcaacaggctggccgagaagaagctgtggccaccgctgctgttcggttccgcggtgatgtcgtggtacgagcacgtcgggaggaccgtctgcttcctcgtctgcaagaaccacctgctctgggagtggctcttcagcctcctcaacctcaacaggggcgtggatttcagggtgagggatctgacgaagcacactcaccactcggcgtggcacaccatgcacaacgtcatctgcggcggggcggcgctgcaggacgcgaacctggaggccgtcgcggcggccggcatcccggtgcaggtgctccacggcgccgacgaccaggtggttccggtcgagtgcggccgccatgtcaaggcgaagatcccgcgcgccaagctccgtgtcatggagaggcgcgaccactctacggtggttctcggcagggagagaggcttcgccgaggagctcaaggcgttctggtgcgcttcaaggtccccggttcacgtccaggatgcggagcaacaggaaacactagacatcagcagcccctcaaaagattcaaagatcatccaacatgacaacacctcagtgcccaccatcctcgctcggcgtctgcggattgatctttgcattagcagccttcaacaggagcttcgcgccatcatgcagcaagtcctggagttcccttttgcttaa

SEQ ID NO: 1152 - DNA, 378 bp, Zea mays
  Peptide Sequence Number=SeqID_42931
attctggagaattccagccagttgtgcctgttgtgaaagccgagccacttaaaaatcagtgggctgatgaagatgttgaagaagatgatgttgtcgatgacatgctggatttcacccagtcagccgaacaacttggcaaaccagcagcaagtgacttggcaaagggaaacctgactgctccagtcatcttcgctttgcaaagtgaaccagagctaagggagatcattgattccgagttcagtgacacggattcgttagctgctgcaatagagctcgttcatagaagtggtgggatacggagggcacatgagcttgcaagagagaagggtgacttggcaatccaaaatctgcagtgccttccaagaagtgacttcagaa

SEQ ID NO: 1153 - DNA, 424 bp, Zea mays
  Peptide Sequence Number=SeqID_42932
atgccgacgttcccgcgcgccggccggtggtccacctccagcacatggccacggaaaaccgccggcgcggcgtccacggcgctggccgccgtcgtcttcgcggtcctggacgtcgccgacgtgatcctctgcttcgcgtacgccctcctcgacggcgtgctcgaggacagccccgtgcgctgctactgccacaggagctacgacgacggcatccgcgaggcggccgcgggggcatcagtggatggcggcggccacgaggaggtctccgacacgctgtacgcgtgcggccggaggagcaccgtcagggacgcgctgctggggctcgtgcgacgcgtcgtgccgaggactaggaggacacgggcgccgccagatgagacggtggcgccgtgcaagtggcgcagccccaggtggtctgactgcgcgt

SEQ ID NO: 1154 - DNA, 456 bp, Zea mays
  Peptide Sequence Number=SeqID_42933
atggtggtgatggtgtctgggtctgcggctgctgctgctagtaatgcgcggacggcgcaggcgcgatactgggaggtccgccatccacagcgcggtactgggtggcggatccacggcgcgaatctctggcttggggcaaggatggtggaaaggacgggatggaagggcaaaatctctggctatccaccatctgtagagcttgggaccgcgcggaagggcgagatctctgacgacagaagggagagatgcattgctcgggtagagtggatctgcgtggtggtcgggtcggggatcgtgcccttccatggaggagtggactgcgcgtaccttccatggagagtcgggtttgccgaggtcaggccgcgggggccggcgagattgctgcgggtgagggcgagcttgccgcgacgtcctcggtggtccaagaacgggtgggtaggaggagggagagcctag

SEQ ID NO: 1155 - DNA, 1597 bp, Zea mays
  Peptide Sequence Number=SeqID_42934
atggccaagactgatcagggcggcgatgtgccgagcggagagaaggtcctgaagaagccagacaagatcctgccgtgccctcgctgcaacagcatggacacgaagttctgctactacaacaactacaacatcaagcagccaaggcatttctgcaagagctgtcagaggtactggaccgcaggcggaagcatgagaaacatccccgttggtgctgggaggcgcaagagcaagagctccagcgcgagttgccgcagcgtgttgattcccgttccaggcagcagtagtgtagctaatcctggcggagaggcttccctgtttccgttgtccgtaaaagcaaaccaagcagcagttagcttcgggcctgattcccccctctgcacctccatggcctccgtgctgaagatcggaggaggaggagagcaggttaagagctgcagccctgcctcagcagcagcacagcccaggaacggagaaacccagacccagacgtgcgcaccttcttctgctgctacaacaccatcagatggtccagggaatggattgcagaaaggagcagagagcgcacaccaaaaccaaaaccaaaaccaaaacggaatcattgggcacagcaacggagtcactccagtgcatcctataccgttcttccccggaccgcctttcgtgtacccctggagtccagcatggaacggcattcccgccatggcagcggcggtgtgcgcagccccagcgacagccgaagcagcgatttcatcagaacacggcaccgcgagcagcaccgtccagtggaacgtgccaccagcgatcgtgcccgtgctgccaccgggattctgcggcccgatcccagtcccggtaatcccgccgccttccgtctggccactgatcactccctggcccaacgcagcatggagcgcgccgtggctcgggcctagcgctagcgtgccgccggggtcatctcggagcagcggcagcagcacgtgctccgacagcggctgcggctccggctcccccgtcctgggaaagcactcgagggagtcgaggccgcagggcgacgagaaggcggaacgacggtgcctgtggatccccaagacgctccggatcgacgaccctgtcgaggccgccaagagctcgatctggacgacgctcgggatcgagcctggcgaccggggcatgttcaggccgttccagtcgaagcatggacggcagcaggagctgcaagcgtccggcgccgctcgcgccctgcaggccaacccggcggctctgtcgcgctcgcagtcttttcaggagacgacagcgtgcccccaacatgttgggttggaggtgatcaggtttccagcgcccataggtcatgccttcgagataaaacaactcgacgtcatagactatgacgacgagctcgacatcataaactatggcgacgaggtaactgatgcacttagcatcatagactatggctcctcgggcgtcaagggcctcggacgtcctcatgtaatgacgagccagagactcactttccaccttccctgtggtgagatgaccgtgacgctgcaagactgtcagaagtcgcttggtctcagcattcgtgctcgtctagtgaccg

SEQ ID NO: 1156 - DNA, 4503 bp, Zea mays
  Peptide Sequence Number=SeqID_42935
atgaacattgagttccataggagtgtcaactgtccactaatcatggattctattggctgggtacatggtgatagtattgttattgggtgtgttcgattaaacgaagatgacaatgaagaaggataccttgttcaagttataaggactgaagaaagcacattttgtgagagcccaggcaagacagatgtttatacctataacgattttttccatggcattatggatgatgttttaccacccggagctggacctaatcttcttttgggttatctgcatcgctggggtctcatggtggcttccaataaaaagagcgtcgatgaacacattgcccttcttaagtggccatctgcacatgatgatgaaaaaactgtaacatatcttgaaatgttggaggataaatacagtcctaggattgacttgcaagagaatggcgatgacaatgtcatactagggtttggtgttgagaatgtttcattatttcaaaagatcactgtaccagttggacctgaacaaaaggaggttgcccctcaacatattctcctatgtttgactggtgagggcaaagtagctgtatattacctcgccaggatttcggacccttctgatttacctcatgctactgtgtctaccaatgaggactatggtgaaaaacatatttcacctgcaactgtatctgaaaaggagttgactccaagtgttgcaggctcagtatataagagtactctcacagaacatggtgctgagccatctagtgcgcaaacaggtagcaaccagcaggaatcaataaatgtgaaaaacagtagctcagcttcaaaagaacaggaaacaactgacaattcattgtttatctcttccaataagaagcccttagacaccaagcaagtgaatgtgactggtccacctgcagccttgcgtagcttagcgttaacaggaaacacaaaacctacaatattttccagcttttctactgaaggcatgaatccaacaggaggcaatgcacctaatgaattagcttcttccttgcaaccaagcagcagaagttttggaaacaaccaaactggtaaagaaggcctggattcagttcaatcagtgggaatatttggtggatctcaaaactccaataaagatggcaatgtctatggtttcaagtcttcattattcacctctagtggatctgtccctgccaagatcggagaaaggaatgaggttggttttggagttccttcgctgcaaaccagttacaccgctgatagaaaagtttttggtgctccagttgccttaagctctgtaccttcatcatctatatctccggctaaaccttccccaattggatattcatcaagtggatttcggacagcaaactctgaagcacctcaatcattgcgtggatcacctccgtcacagcaatctatgggcaaatcacataacagcaggacacaagcaccggcagaatattctagaaactccaagaagggcacaggattcgattctgaacaagacttgtctaaaaaattttacagtataaatgaaatgacgaaggagttagatgccctactagcatatatagaaaaggatggtggttttagagatgcctgcataaccatccaacagcgtcctctttctatgtttgaggatggcttacaaaactttttgcagctgttgcaggtcttcaagggcaaagtagaggagcaatgttcaaaaattgaagatctgaggaacaacatgtttcaagtttctgctaggcaaacttacatgaaaggaattgttagccagtcttcagataatcagtactgggatatatggaaccgtcagaaattgagtccagaattcgaagtgaagagacaaaatattctcagagctaaccaggatttgacaaatcagctggttgagctggagaggcacttcaataatctggagatgaacagatccagtgaaacaggaagagtggcttctaatcgaagagctgtttattctaacaagacaagttcgagtcagacacaattatccagtgtatatagtgcactgaactcgcagttggcagctgctgagcagctatctgaatgcctttcaaagcagatatctgtgttaaatattggttctcctagtaggaagcaggggatggtgaccaaaaagttgtttgagtcaattggtttagcccacacaactgatgcaaccaaattttcaggcagcactcctaagccagttaagcggtttccatcagtgaatgagcattcaaagggaatattagggtcttccaagggtggtgagcctgagactgctcgaaggaggagggaatcactggatatgagcctggctagtttggaacctcagaaaacaactgttaaaagaataacacagcaacaacgcctcaagatcagcagtgatctaccattcaggtcaaacaagaaaatatttgattctcaaatggcagcaatatcacaggaaaagtcaagcgatagctccaattcatctatagtagaatcatatgtaagcagactgcgttctctgagtgaagatgtaaacgataaactgtcaggaccccaacagaaccctttgttcaaatgggtaaaggaatcaactgggtcatctcaaacctcagagcaaaagcatttcgagttaccagggcaaatgaaaagtactgcacagtcttcaaaactgacaccatcttcaccaccatcattcagttacacacgtatgggtgcacaagatagtatcaacccatccagtgttccatcctttggaacaaaacatactgtgtctaagccaaatactctaaccttcaaaaccactataagccctaaaagtaatgccaacacagagccaaatatattaccttctataacagctccaaaaacttctctaagtccactgtctgtaaaaactgctggggagtctggagatttgcctacattaactatgaagaacagacaggatggtcagtcaatgccatctttggggaacataaaaggaccgggtgcttctctgcagaacaagggtggcatatttagagatctcgacaaatcgtcttttaattctgaacattccaagcctgctgcattacatgagaagactgaccagctaagtggggttggcgatgctgtgcagaacactgtgaaagatacctccaaaatggcacctcaaccttctgctttcttgccagctcctgttactcagaccaattcatactccttaaggccgactgtttcttcttcagccacatcaggtgcgaaaacttcagatgttttatctagctcaatgcagaaagtttctccaatagtacctgggggtactgtgtctagctcagtccctactcctgctaaggattcatcaactggattgagtcaaaatgcttccaaacctgaaacgctaatatcaaaggtaactagtaccatagtttctgcaagttcgacttctgtcatatcagtcactgaaagcaaaccttcagtgcctccaacaactggcgccagcttgccttctactcatgtctctgctcctcaaacagcaccaacaacatcggaatcagttttcacttccacaggaaaaaatgtaggaccaaacactgacaccatctcaaccgatgaagatgacatggaagaggaggcaccttctgcaagtgccgaactgaacttgggagcccttggtggattcggccttgggtcccagccttcttcaagtcctcaaaagtctaatccttttggtgcctcctttggtacatctggcaataaaagttcaggcacaccatttactttgacaaccagtccaggacagcttttccggccagcgtcgctaagcattccttcagctcagccagcccaaccatctcaatcaactagttctagttctttttctaattcgttctcaagtgggcttactggatttggacagcctgcacaaattggatctggccagcagtcagcttttgggaagcctgcacagattggagctggccagcatgcaggatttgggcagactgcccaaattcaatctggttttggccagcctgcccaaattcaatctggttttggccagtcagcacaaatcggaactgggcaacagtcaggatttgggaagcctgcacaaattggggctgtccagtcaggatttgggcagcctgcacagtttgctgctcaacagacacttggatcagtgctgggttcttttggacaacctccccagttaggaggcataggttctggaggatttggtggattttcaagtgcttctacatctgctggttttagttctttatcttcaggtaatgctggatttgctggtgctgcatcaggtgggggcttttcagcaccaactgcttctgcaggtggtggttttgctgctgctgctactggtggaggttttgctgctcttgcttccaaaagtggtggttttgttggtgcagcttcatctggtggtggttttggaggtgcctcccagggaggtggctttggcagtggtgagatctctgaagtcgtgttctgttttgaacaaatacttacttttggataa

SEQ ID NO: 1157 - DNA, 192 bp, Zea mays
  Peptide Sequence Number=SeqID_42936
atggccaagccggttctagggctcgtagtcgtgcagggaacaatagaaggggtggccttctgcgggattcgcaaggggcagttggccgacgccgagctcgggcgaggcggagtttgttccgaggctgagccggcttcgggtcttgttcgtgtaaatatgcagaagggctgtagggacgaccaggtcgactag

SEQ ID NO: 1158 - DNA, 1059 bp, Zea mays
  Peptide Sequence Number=SeqID_42937
atggaaggcggactgagcccggagcggcacgcggcggctgagccggtgcggtcgcggtggacgcccaagccggagcagatactcatcctcgagtccatcttcaacagcggcatggtgaacccgcccaaggacgagacggtccgcatccgcaagctgctggagcgcttcggcgccgtgggcgacgccaacgtcttctactggttccagaaccgccgctcccgctcccgccggcgccagcgccagctgcaggcgcaggcggcggcggcggcggcggcctcctcgtcctcgtcgggatcgccccccacgagcggcctcgcgccgggacacgcgacggcttcgtcgacggcggggatgttcgcgcacggcgccacctacggctcgtctgcgtccgcgtcctggccgccgccgccgtcgtgcgaggggatgatgggcgacctggactacggcggcggcgacgacctgttcgccatctcgcggcagatgggctacgccagcggcggtggctccggctccgcgtcctcggcggccatcgcacaccacgagcagcagcagcagcagctttactactcgccgtgccagccagcagcgagcatgacggtgttcatcaatggcgtggcgacggaggtgccgcgggggccgatcgacctgcggtccatgttcgggcaggacgtgatgctggtgcactccaccgccggcctcctccccgtcaacgagtacggcgtgctcacgcagagcctgcagatgggcgagagctacttcctgtcacatcaggcattatccatccatccatcgggctggcatcggacggcgtgtcgagcgcactcggccgcaagtggcgacctcaccgcccgcgccggccaaatggaggccaccgcgtgtctccttccgagacctctatctctgccgaccgaccgaccgcccgcccgcccgccagcttcagcaatcagcaatcagctagaagcagacaacactcaacagagcgagcagcagctacccaccctcttcattcttcaccgtactgtagttgccatagacagacatcagttcaagcacaagtga

SEQ ID NO: 1159 - DNA, 309 bp, Zea mays
  Peptide Sequence Number=SeqID_42938
atgccgcgtggcgtggcctccagctccagctccagctccatccccgttcctggaatgcagccagcacctgcgcgtcctagctgccatgcatacgccggtgacactgacgggaggacggtcagccagtctaaagtagcagccggcaaccggcagccatacccgtcacattgggggcggcagacggacgggatttcggcgccgagtgccgagtggaaaagggggcggtgtgcatggggacggcaggccgacagcggccagccggaaaaggagctcgcctcgttcgtttgtccatgccaagcatctgcctag

SEQ ID NO: 1160 - DNA, 1345 bp, Zea mays
  Peptide Sequence Number=SeqID_42939
atggcgaagacccgcaagcctccggcccctccttctccgccgccgccccccgcagaaacgccatccccgcagcggcggcgcaagaagaagggccgcccgtccctcctcgacctccagcgccgcagcctccgcctgcaggcccaaaaccctagccccgccgcctcgcccacccgccgggaccccaatccctccgacgacgatgaggacgggaccgggagcgggcggcggcggcagaagcgcctcaagagcgtcctctccggcgtcgtcaaggaggagcagggggaggggaagaaggatgcagcgaaagcgacggggaaagaggacgctgcgtcggatggtgggcccacggggactcccctcccagacaaaaagttgctactcttcatcctcgataggctccagaagaaggatacttatggagttttctcggagcctgtcgatgcagaggagcttccagattactttgacattattgaccatccaatggacttctcaacaatccgtgagaagctgttgaatgactcgtattctaagttggagcagtttgaggatgatgtgtttctactcacatcaaatgccatgtcttacaattcagctgatacaatctacttccgacaggcacggtctattgaagctcttgccaaaaaggattttgagaacctgaggcaacccagtgatgaagaggaacccaaaccaccagctcgaaggggtaggccaccgaagaatcccaagacagagggtgatgtgtcaccagacctatctaatgtgaaagcaaataaacctgaagacaatgtcgatacattcagaaaaaggtcaactggagacagaactcgaaatacaaataccccaatgaaagatctgtccagttttcacgatacgtttggttcttttagtgcaaaaagaacagataaaattggtgattattctggttcatcgaagtggggaaagaaacctgttagtctagatgacgaccgcaggagtacatatgatcagcactattcacgtaatagctctctgtttgctgccctggatgatgagaggaaactactggtgccagtaggggttcagcagccacatgcatatgctaggagcttggcacgatttgcatcaaaattgggcccagttggctgggatgtggcagcaaatcgtatcagaagggcactcccccctgggacaagtttcggcccaggatgggttgtagatggtgaaccacctcaaaactctcagtgggctcctgcagcatcgactaatccctcctctgagcccactgctccacccaatatgccatccaagaatgatgtactcgatcacaagtctggaccgtcttctaatggggatgttactg

SEQ ID NO: 1161 - DNA, 2394 bp, Zea mays
  Peptide Sequence Number=SeqID_42940
atggccacgcctctcctcctcccctcccgcgcagcccatgccgcctccgctaccacctgcgcctcccagcacctcaaagccaccacctccaaggagcctccgccccgcgctcgcccgaagcacggcgagggaggggctccccgccccgtccccgttcccagctccgccccccgtcccaagtccctcgtcctctcccacatcgcggcgggccgaatggacgaggccgcggacgccttcgcgggcgtcagcagccccggcgcgttcctccacaacgtcatgatccgcggcttcgcggacgcgggcctcccgctcgacgcgctcgcggcgtaccgcgccatgctcgccgccagcgctcgccccgaccgcttcaccttccccgtcgtcgtcaagtgctgcacgcgcgccggcgcgctgggcgagggccgcgccgcgcacgcggccgtgatcaagctgggcctaggcgccgacatgtacaccgccaactcgctcgtcgcgctctacgccaagctcggcctcgtcggggacgccgagcgggtgttcgacggaatgccggcgcgggacatcgtctcgtggaacacgatggtggacgggtacgtgtccaacgggatgggagcgctggcgctggcgtgcttccgggatatgaacgacgcgctgcgagtgcggcatgacggcgttggggtaatcgcggcactcgcggcctgctgcctggagtcggcgctggcgcaggggcgggagatacacggctatgccatcaggcacgggctcgagcaggatgtgaaggtggggacttctcttgttgacatgtactgcaaatgtggcaatgttttgtacgctgagaatgtctttgcaacgatgctgctgaggaccgtggtgacgtggaattgtctgataggtggctatgcgctgaacgagcggcctgtggatgcgtttgattgcttcatgcaaatgagagcggaggggttccaggtggaagccgtcactgctatcaatttgcttgccgcctgtggtcaaactgaaagctcactgtacggaaggagtgttcatgcttatgtggttcggagacattttcttccccacgtagtgcttgagactgctctcctggagatgtatggcaatgttggcaaagtggaatcatctgaaaagatatttggtcagatgacagagaaaactgtggtaacatggaataatatgatcgctgcctacatctacatggaaatgtaccaggaagccatcgcattgttcctggagctactgaatcaacctctttatcctgattatttcaccatgacaacagtagtaccggcgttcgtcttgctaggctcactaagacagtgcaggcaaatgcacagctacattatcaagttaggctatggagacagcactctgattatgaacgcagttatgcatatgtatgcaaggtgtggtgatattgtggcctcaagggagatctttgacaaaatgccaggcaaggatgtgatctcctggaatacaatcattataggatatgcaattcacggacaaggaaagactgcattggaaatgtttgatgagatgaagtgtaacggtattgaaccaaatgagagcacctttgtctctgtgctgactgcatgcagtgtttctggcctggagactgagggctggaaggagttcaattcaatgcaacatgagtatggtatggttccacagattgagcactatggatgcatgactgatcttctgggccgtgcaggtgacctcagggaggtgctgcggtttattgaaaacatgccgatagctccaacatccaggatttggggttccttgctgacagcgagcagaaataagaatgatatcgatatagcagaatatgcagcagagaggatattccaactggaacacaacaacacaggctgttatgtcgttctgtcttccatgtatgctgatgccgggagatgggaggatgtggagaggataagatctctgatgaaggagaagggactccgaaggacggaggcaagaagccttgtggagcttaatgctgaagagtgcagttttgtcaatggggacatgtcgcaccctcagagcgagaaaattcatgaattgtctgatatcctatcacgaaatattggagaagatttagatagcccaactaatctccgtgattcagatccttttgcctcagggaaaactgtacttcccaataagcatagtgtaaggctggctgttgcctttggtctgatttcatctgagcctgggaccccaattcttgtcaagaagaatgtgcgtgtatgcaaccactgccatcgtgcactgaagttgatatcaaaatattcaagacggaagattgtagttggtgacacaaagatatatcacatattttcagatggctcttgttgctgtggtgactactggtga

SEQ ID NO: 1162 - DNA, 1140 bp, Zea mays
  Peptide Sequence Number=SeqID_42941
atggtgacttcgggcgaggcggggatttgcctgaggttggagaccctcggggagatgcctcgggttaggaggtatctgagctgcttccctttggagtccgacgaggcacgtcaagaatttggctcaccaggaagagacggccagacggctctcgtcgtgccccaactcggcaactccccatcagctcaccccgatctagggtttgtgcaccctccgcttacgcgcctccccaccaagcaactacccatggcggctacagggcaggagggggatgacgtcgaccactacgaggtactctgcctcccgtcgggggaggaaggcgcggcgctgaccatcgagcatatcgagaaggcctaccggacgcagtcgcggctgcgccaccccgataagcgccccgacgaccccaacgccaccgccgacttccagctcctctcgagttcctacaaactcctccgcgacgagtcccttcgccgccagttcgacgcgcgcctccgcggccgccgcgaggccgcagcccgcgccgccgccacgggcgttaagcgccggaaggccgtctccgacctcgaggagcgcgagcgcgccgccgccgcgggccaccccgccgatcccgaggagctcgccaagcgcgaggcccagcggatggccgccgacattgagcgcgagctcgcagcgttccgcgccgccaagcaggcttctgcatttggtgccacatcgacttcggcacatggagataagaagggtggaaccccacaggatggggtgaaaacggacaagggaaaaatcttgaaggtttcatgggatgggagtgctgattcgtacagtgcggcaaagttggaggagatcttccagaaatttggcaaagttgaagacattgttatcaagacaaggaaatcaaggagtaagggctcagcaattgtagtaatgggctccaaagaagctgcattattagcaatacagaaccatttctctctgtttccgttaaatgttgctcctgttcaagaatctggtggattatcaacaagaccaacagaaacatatgaatcaaggacaaacaatactgatggaactggatttaacgatttggaagcgtcggtgttccgtaaacttcgagaggcccagaaaaggaaacattttggttaa

SEQ ID NO: 1163 - DNA, 855 bp, Zea mays
  Peptide Sequence Number=SeqID_42942
atgacgcacgcaacagggccgtccctgtgggggtgccaagggtgccgccgcaccgggcccccaaaaatagagggccccgtagccactgatatgtcacgactcacgacgacggaaacagtagtgctgccagtagagctctcagaactcgggaaaaaaatgtcagaggccgccgtgcgtgtgatcggcctatggccgagcccgttcgtgatccgcgtcctgatcgccctgaagctgaagggcgtcgagttcgagttcgtggaggaggtggtgggcaggaagagcgagctgctgctgaggtcgaacccggtgcacaagaagatccccgtcctgctccaccacggcaagcccatctccgagtctctgatcatcgtccagtacatcgacgaggtctggtcctccggcgcgccggccttcctccccgtcgacgctcacgcccgcgccgtccagcggttctgggcgcagtacgtcgacgacaagctgccttgggcgatccgcatactgaagggaacggacgacgggggcatggagcaggcggcggggcagctgtccgcggccctgcagctcctagaggaggctttcgcgcagctcagccaggggaagcgctacttcggcggggacagcgtcgggtacctggacatcgctctggtgtcgcatgtcggctgggtgaaggcggtggagaagatcgccggggtcaccctgctggacaaggccaaggtcccgaacctggtggcgtgggctgatcgtctgtgtgcccacccggccgtggtcgacgccatccctgacgcggacaagttcgttgagttcagcgtcacctatggctccttctccaagcctatcaatgctcccgccaagtga

SEQ ID NO: 1164 - DNA, 444 bp, Zea mays
  Peptide Sequence Number=SeqID_42943
atggctaggggaacctttgccaacattcgtcttgtgaataagttcttgaagggtgaggttggacccaagacaatccatgttccatctggggagaagcttgcagtttttgatgctgctatgaaatacaagaatgaagggcatgacactattatcctggctggtgccgagtacgggagtggaagctctcgggattgggctgcaaagggcccaatgctgcagggagtgaaggctgtgatagcaaagagcttcgagaggattcaccgcagcaatcttgctggcatgggaatcatccctctatgctacaaagcaggggaggatgcagacaccctgggcctaaccggccatgagcgctacacggtccaccttccaaccaatgtggagcttgcttactacgatcatggtggcattctaccatatgtcgctagaaagatagcggaacaatag

SEQ ID NO: 1165 - DNA, 201 bp, Zea mays
  Peptide Sequence Number=SeqID_42944
atgtcgcgcgagacggagccgggcgccgccgagccattcgccgtgtggataaattccccgatggggacagagatgggagaaaaaaacctgcctatgaacgttcacgggacggacatagggaattgctgggacgagaacggggtgccattcactgacggtgaattctgcattgccatctctttgagtgatttggttgggtga

SEQ ID NO: 1166 - DNA, 1472 bp, Zea mays
  Peptide Sequence Number=SeqID_42945
atggcgggcgggcagaacatgcaggtgctctcggcactggacggcgccaagacgcagcggtaccacttcacggcgatcgtcgtggcggggatgggcttcttcaccgacgcgtacgacctcttctgcatctccctcgtcaccaagctcatcggccgcatctactacaccgtcgacggctcgcccaggccgggcagcctgccgccgcacgtgtccgcggccgtcaacggcgtggcgttcgtgggaacgctgtcagggcagctcttcttcggctggctcggcgacagggtgggccggaagagcgtgtacgggatgacgctcctgacgatggtcgtctgctccgtcgcgtcaggcctctcgttcgggcgctcgccggcctgcgtcatggccacgctctgcttcttccgcttctggctcgggttcggcattggcggcgactacccgctatcggcgaccatcatgtcggagtacgccaacaaacggacgcggggcgcgtttgtcgccgccgtcttcgccatgcaggggttcggcatcctggccggcggcgccgtcgccataggcgtcaccgcgctgttccggagccgtttcccggcgcccccctacgacgtcgaccccgcggcgtccacgccggccgaggcagacctggtgtggcgcatcattctcatgttcggcgccgtgcccgcggcgctcaccttctactcgcgcatgaagatgcccgagacggcgcggtacacggcgctagtagccaggaacgcggagcgcgccgcggcggacatgtccagggtgctccaggtcgacatcggcaataaggagcagccgggggcagaggaagaagcgacgacgggtacagaggcgcggttgcgcggcgaacaggaagaagcgacgacggggccgccgttcgggctcttctcccgcgagtttgcgcaccggcacgggctccaccttgtgggcacggcgtcgacgtggctcctcctagacatcgcctactactcgcagaacctgttccagaaggacatcttcagtgcggtggggtggatcccggcggcggagacgataagcgcgctggacgagctgttccacatcgcgcgcgcgcagacgctgatcgcgctgtgcggcacggtgcccgggtactggttcactgtggcgttcatcgacatcgtggggcggttcgcgatccaggcggtgggcttcctcatgatgacggccttcatgctggggctggccgtcccgtaccgccagtggacgcgcccgggcaaccagacggggttcgtggtgatgtacgcgctcaccttcttcttcgccaacttcgggcccaacgccacgaccttcatcgtgcctgcggaaatctacccggcgcggctccgcgcgacgtgccacggcatctcggcggcgtcgggcaaggtgggcgccatcatcgggtccttcgggttcctgtacctggcgcagagccaggacccggccaagactgcgcacgg

SEQ ID NO: 1167 - DNA, 218 bp, Zea mays
  Peptide Sequence Number=SeqID_42946
ccacactgggcagcggcagctggagcactgcgaattggctggtggctgcttcactgcgcactggctggttgctggcggctagctggagcactacgcactggctggtgtctggcggctggagcactgcgcactggctgggggcaagggcaacggctggagcattgctgcactgggcggcggcgcctggacctgaagcaatggcaccatggcgcctgtag

SEQ ID NO: 1168 - DNA, 237 bp, Zea mays
  Peptide Sequence Number=SeqID_42947
atggatgacgggagagtgaggatggggaagggtaaggtgggcaggcgcgtaacggatatccgttggataacggatacccggcgggtacgggtacccacgagcgtaaatgggtatgggtatgggtttggttttatctcgtggatatggagcgaaccatatatccgcgttctacccgcccgattgccatccctatccttaccctccgtagacatattgagctcaattcacgtgtattag

SEQ ID NO: 1169 - DNA, 654 bp, Zea mays
  Peptide Sequence Number=SeqID_42948
atgtgcaaagacatggttgcaggttcaactgttattcggccatggatccatctatctgtggagaaaaaaacatggaaagatgatgaagataagtcaagccagttgttggagatgcctcaggaagatattaatccactgaatcaggctcagatgcatggtggaagcactaagaaatcggcacctgatctatccccgaccaaacagaagaagcaacaagcagttcaagaaaggaaaaggaagcaacagtcaaagaggggaaaaaagtggctgaaacagacaattacgagtagcacaccttcaccaaatggtgccaaggggcaaaagagagctcaaaggagaaaccagaccaaaaaaaggaatcaaagaaaaatccttggagatgctgaccttgcatgccagcctggagtgagaaaaagctcaagaacacgctcaaggcctttggagtattggcttggtgaaagattactatatgggcctatacatgacaatttgcatggagctattggcatcaaagcatactcccctggccaagatggcaagagatcattgaaagtgaaatctttcgtgcctgaacagtattcagatcttgttgctaaatctgcaagtgttatggctcatgccgtcaaggtatcatgtggtgtgatagtatcttga

SEQ ID NO: 1170 - DNA, 3648 bp, Zea mays
  Peptide Sequence Number=SeqID_42949
atttgactccatgtcggcggcgctcgcggtgacggacgaggtggccctgccgatccgggcggtgggggatctagcggccgccgccgaggtctcgcgggaggaggtcgccgtcatcacccagtgcgcggcgctcgtcattaaaaacgtggaaagcttgagggagcaattggttgctgaaatcaggcgggtgctgaaagctggtggaagagtattggtgcagagccctgcaccctcatccagtcagaagccgaacactgatattgagcgcaagttactgatgggtggatttgctgaagtgcaatcttctgctgcaagctcgcaggatagcgtgcaatctgttacagttaaggcaaagaaggctagctggagcatgggctcttcttttccccttaagaaaacaacaaaagcccttcccaagattcaaattgacgacgactctgatctgattgatgaagacagtctcttgactgaggaggacctgaagaaaccacaacttccagttggtagagcaacaaaacccgtcaacttagttcaactcccaaagaaagcatgcaagaactgtacttgtggcagggctgaggccgaggagaaggttgggaagctggagctcactgcggagcagatcaataaccctcagtcagcttgtggcagttgtgggttgggtgatgccttccgctgtggaacctgtccctacagaggtcttccaccattcaagcctggcgagaagcctggatgcctcttcttaattgagacgaaggacgtggacacggacaacctatacattttcccgcctcccgcgctcccctgctcgcttcttctcctttccctgctctgtttccgagggacggcggccgccaagaacaattgtccagccacgagccaagaacaggcgccttactctagcgccatgtcgtcgtcgctagtgtccaccccattcgccgccgcggcgcagaagcagctcctggcggcgcccgtgccgctgcactcgttcctcctgagcagccgtcgccagcagccgcggcgcgccggcgccatccggtgcgcggtcgccggcggcaacggcttgttcacgcagaccaagcccgaggtgcggcgcgtggtgccggccgacccgcggggcctgcctcgggtcaaggtcgtctacgtcgtgctggaggcgcacagctcaacgctgacccgcgccgcgccgcgtcgttcgaggtcgtgggctaccttccgcgccgacctcgccgacgtcaacgtcttcatcggctccctcatcttcgtcgaggagctggcgctcaaggtcaaggccgcggccgagaaggagcgcgaccgcatggacgccgtccttgtcttcccctccatgcccgaggtcatgcgcctcaacaagctcggctccttcagcatgtcgcagctggggcagtccaagagccccttcttccagctcttcaagcgcagcaagtccaactccagcaacttcgccgacagcatgctcaagctcgtgcgcacgctgcccaaggtgctcaagtacctgccctccgacaaggcgcaggacgcctggctgtacatcctcagcctccagttctggctcggcggctcggcggacaacctccagaacttcctcaagatgatcgccggatcctacttgccggtgcttaggggcgccggcatcaagtacgacgaccccgtgctctacctcgactccggcatctggcacccgctggcgcccaccatgtacgaggacgtcaaggagtacctcaactggctcaaggaccccaacgcacccgtcatcggcctcgtcctacagaggagccacattgtcaccggcgacgacggccactacgtcgccgtcatcatggagctcgaggccaggggtcacattgtctggggtgccaaggtcattcccatcttcgccggcggcctcgacttctccggtcccacgcagcgctacctggtcgacccgattaccggcaagccgttcgtgaacgccgtggtgtctctcaccgggttcgcgctcgtcggcgggccggcgaggcaggaccaccccaaggccattgccgcgttgcagaagctcgacgtgccgtacattgtcgcgctcccgctcgtgttccagaccacagaggagtggctcaacagcaccttggggcttcaccccattcaggtggcgctgcaggtcgcgctgccggagctcgacgggaaatcacatgcattgcataggagagtggagcagctctgcactagagctatcagatgggcagaactgaagaggaaaactaaggaggacaagaaactggcgatcaccgtcttcagtttcccacctgacaagggcaacgtcgggactgcagcatatctgaatgtgttcagctccatctactctgtgctgtcagacctcaagaaggacggctacaacgtagagggtcttccggacacacctgaagccctcatcgaggaggtgatccatgacaaggaagctcagttcaacagccccaacctgaatgttgcttaccgcatgaatgtgagggagtatcaggcgctcacctcctatgcctccttgctggaggagaactgggggaagccacctgggcacctcaactctgatggcgagaacctccttgtctatgggaagcagtatggcaatgtcttcatcggagtgcagcccactttcgggtacgaaggcgatccgatgcggcttctgctctcaaagtctgccagccctcaccatggctttgcagcatactacacctttgtcgagaagatcttccaggccgatgctgtcctgaactttggaacacacgggtccctcgagttcatgcctggcaaacaggttgggatgagtgatgcctgctaccctgacagtctcatcggcaacatccccaacatctactactacgccgcaaacaacccgtcagaggccacagtcgccaagcgccggagctatgcgaacaccatcagctacctgaccccaccggctgagaacgccggcctctacaaggggctcaagcagctggcagagctcatctcttcttaccagtctctcaaggacactgggcgtggtcctcagattgtgagctcaatcatcagcaccgcaaagcaatgcaaccttgacaaggatgtcccactgcccgaggaaggggaggagctcccaccaagtgagcgtgacctgatcgttggaaaggtgtacgccaagatcatggagatagagtcacggctccctccctgcggtctgcatgtgatcggcgagccgccaaccgctattgaggcggtggccacactggtgaacatagccgccctcgaccgccccgaggatggcataatctcgctgcccggcatacttgccgccacagtgggcagggacattgaagatgtgtacaggggaagcgacaagggcatactggctgacgtcgagctcctgaggcagataactgaagcttcgcgtggcgccatcactgcctttgttgagaagaccacaaacagcaaagggcaggtcgtcaatgttgccaacaatctcagtaacatacttggcttcggcctttcagaaccatgggtgcagtaccaagacaatgagctgggcagcggcagaggctactgggagacatcggaggagaacctggacaggctcagggagctctactcggaggttgaagacaagattgaggggattgaccg

SEQ ID NO: 1171 - DNA, 1008 bp, Zea mays
  Peptide Sequence Number=SeqID_42950
atggcgatggcgatgccgatggcagtggcgcgggtgaccagcctcgcctgcgccccccgacaggcgcagcatcgccgccgccatagccttgccccgccgtgcgcctcgggtgcggtggaggtgcgggtctgcacgaaccgcacgtgcgcgcggcagggtgggcgcgaggtcctggctgcgctcgcgggactcgcgccgccggcggtcgacgtggcctcctgcgggtgcctcgggcgctgcggcgccgggcccaacgttgcggcgtccgtccctgggagcgccgcggtgttcggccacgtgggcacggcggcgcgaggcgcgcagctactggagcacctcctcggccccgcggaattcgatgcggccctagggctcaccgcgctggccacgagggagaaggcggaggctgccctcgagaagggaaacgcggacgaagcggaagcccttctcaccgaggttattgggttcaatgcttgtggtggtctgcatttggtgtacatgagcaggtctaaggcgagattggaaattggggatatccctggtgcacttggggatgctgaggaagcaataagaatagctcccagatttcctcaggctcacttattgcgaggcgacgcactttttgcaatgggtgaatattctgtcgcggaagatgcctatgcagatgccttggatcttgatccatctattcgccggtccaagtctttcagggtgaaggtaacggaaatgcaacatggttattgtcttgcacttagccggtgctatatccatttttttgtgtatgaaggttgccctagttcaaagctacacatctcagacttcaggtgcaccctcccccagctccccctcactgtaaagcaatgtttggttggtgggatgatccctccttttggtgctgtttggtctgtctacgtcaaacggggccttgattccaggcttacactctttcttaaagacttgttcgtcctcattatccatgtgcttgtgtgcagttcaagcatcgcctga

SEQ ID NO: 1172 - DNA, 912 bp, Zea mays
  Peptide Sequence Number=SeqID_42951
atgccttccacttccctcgccgtccccaccggcgccgtcggcgtcgccggctctcgccgctatccattcatcagcaaccgatcagcctcaagcgccccgcgcctccgccgcgcgccccggctcgtcatggtctccgcctcggcgtctctcgaggccctcatctttgattgcgacggcgtcatactggagtcagagcacctccaccgccaggcctacaacgacgcgttcgcgaacttcggggtgcgctgcccgccgggctccgccgacctgctgtactgggacgaggccttctacgacaacctacagaaccgcatcggcggagggaagcccaagatgcggtggtactttggggaaaatgggtggcctccttcaaagatctttgagacaccaccttcgactgactctgataaggagaagctggttgatataattcaggattggaaaacagagagatacaaagaaataataaactctggaactgtgaagcctagacctggtgtcttgcagttgatggatgaagtaaaggatgcgggtatcaagcttgctgtttgctctgcagcaactaaaagttcagtcataatgtgccttgaaaaccttattggacttgagcgatttaatggcctggattgcttccttgctggtgatgatgttaaactaaagaagcctgatccaacaatatatataacagcatcagagaaattaggtgtggaaagcaagaactgccttgtggttgaggatagtgtcattggattacaggctgcaaaaggagcaggaatgtcatgtataataacatatacaccttcaactgctagccaagatttcaaggatgcaattgctacctatcctgaccttaataatgtcaggcttgaggacctcaagctattactccagaaaactcttgttactggatag

SEQ ID NO: 1173 - DNA, 1680 bp, Zea mays
  Peptide Sequence Number=SeqID_42952
atgtgcgccttctcggggaggctgaggacactggtgaagcaggagaagaagaagaagaagggcggcggcaggaaggaagccgtgtccatcaatctcgccggcggcttcccgggcggcgccgacggcttcgagctcgtggccaggttctgctacaacgacggccgcgtcctgctctgcacctccaacctcccgctcctgcactgcgccgccgtgtccctggagatgaccgaggaggtgtgcgcctgcaacctgctggcgcaggcggaggccttcgtcaacgggctctactactggacctggggcgacgtgctggccgcggtccggagctgcgagcccttcgccgcggcggccgacgcctcgggactcctggacaggctcatctccgcgctcttctccaagatcaccggcgccaccccgggcccgggcccggggacgccgaaccgctcctcgtcgtcgtgctcgtcgtcgcccgacaccgcgggcttgcgccggtcgtcgtcgtccgccaacaagacgccggactcgatgcggccctgcgccggcagggagtggtggttcgacgacatgacgtcgctgtccccgccgaccgtcgagaaggtgatgcgcgtgctcggctgctacggcgtcgagaacaagaacctgatcctcacgcggttcctgctgcactacctccgcgccgccacgcgcaggccgccggcgcttgagcgggagggcgccgcgctcgccggcctcgcggaaacggccgtccacggcgtggcgctcgtcgggggcacggcgttctcgtgccggggcctcttctgggtgctccggatcgtgtcggcggtggggctgagcagggagtgccgccacaagctggagcggctcatggggctgatgctggaccaggccacgctcgacgacctcctcgtctccggcgacgacggcggcggcgtgtacgacgtcaacctggtcatgaggctggtcagggtgttcgtggcctccgaagaggaggcagacgcgccgtcggagaggatgcggaaggtggggcgcctggtcgacaagtacctcggcgaaatctcgccggaccaggggctgaaggtgtccaagttcctcgccgtcgccgagagcctgccggactcggccagggactgctacgacggcgtgtaccgggcgctggacatctacctcgagtcgcacccagcactgtccctagaggagcgcacgacgctgtgccggtgcctcaactacgagaagctgacgctggaggcgtgcaaggacctggccaagaaccggcggatcccgccgggcgtggcggtgcaggcgctggcgtcgcagcagtgcaagctccacatcagcgagccgggccccggcgggagcgcgacggcggcagcggggaaggagcgccggcccgacccgtcctcctgctcccagtcccagacgccgaggaggagggtcgcccgccgcgccacccgcagcgtggacctcggcagaaggagcggcggcgacgacgacgagaaggagctgctgcggctgaacctgcagagaatgcagagccgggtggtggagctggagcgggcgtgcaaggagatgaagggccagatgtccagaatggccaagggcaagtccttgtccttgtccttcggctccggcgccgcctcctgccaccagaccggcggcaggggcttgcctaggctctgctga

SEQ ID NO: 1174 - DNA, 569 bp, Zea mays
  Peptide Sequence Number=SeqID_42953
atgcatcagttggtgcggttcttgcagtcattaaaaacgtggaaagcttgagggagcaattggttgctgaaatcaggcgggtgctgaaagctggtggaagagtattggtgcagagccctgcaccctcatccagtcagaagccgaacactgatattgagcgcaagttactgatgggtggatttgctgaagtgcaatcttctgctgcaagctcgcaggatagcgtgcaatctgttacagttaaggcaaagaaggctagctggagcatgggctcttcttttccccttaagaaaacaacaaaagcccttcccaagattcaaattgacgacgactctgatctgattgatgaagacagtctcttgactgaggaggacctgaagaaaccacaacttccagttggtagagcaacaaaacccgtcaacttagttcaactccttggggactgtgaggtgggggcagcaaagaaagcatgcaagaactgtacttgtggcagggctgaggccgaggagaaggttgggaagctggagctcactgcggagcagatcaataaccctcagtcagcttgtggcagt

SEQ ID NO: 1175 - DNA, 537 bp, Zea mays
  Peptide Sequence Number=SeqID_42954
atgaagacgccagtgaagttcttcttcgccttcttcagtggttctacaccgcctgcgggctgcggcttcatgtccttccccactctgggccagtgggcctcgaggcctagaggcagaaaagggcgactgatggtatggtacctcgccgacctcaaacccagcagcaggagctccagtggcatcgtgagctaccgggtacgtaagcaggagacggtgggaaagatccaggtccagccagggttcttgcaaatccatccatccaatccgccgcctacatcccgctgggcgctggccatggccatggccatcccattctacctcggcccctacttcgtcatcggcagcctagtgcgcctggtgtgggaccgcctggacccgggcagggtcaaggcgttggtgccccccgtcgcgtcgggcctcatctgctgcggcgacggcatctggacgctgccgcagtcggtgctggcggcctggcgctcggccgctcgccggcgtcaagcctcccatctccatgaagttcctgttccccagacctag

SEQ ID NO: 1176 - DNA, 651 bp, Zea mays
  Peptide Sequence Number=SeqID_42955
atggcgagcgcgcgggtgccggcaggcgcacggaaaaggaggggcctggcactggcagcctggctgccttcgtccgccatgagcctcgcccatccatgggcagagagccagacagagggaggtcagaggagaggaccgagagtactcggctacggggctacggctgggtaccggcccgtgcctctgcgctctggccgctgcctgccgcctgccggtgccgctaccacgccacccgccaccgccagcccggtagctagggggggtggttccggccttgtgaatttctcggtgcgggttgcttggctcctcggatgcgagttccgccttcttttctttgtttcgctgcgggtttcttggctcctaggatgtgttccttccttccctggatcttgcacagtttcgacgaatgcatttgctctgccacgatttcctcggcgccgccgctatgaagatgcagtcaggagccactggatggactcgagggaattcctcgtgccagggaagctttcagatttcgtgttgcttcgtcctgaagcagatcgtcaggcttgtcgtgctgcttcgctgaaacgtcttcatgctttccctctctcctgcagttgcacagcagctccagtgaggatccatccatacatgaagaaaacgtgctga

SEQ ID NO: 1177 - DNA, 579 bp, Zea mays
  Peptide Sequence Number=SeqID_42956
atgacgtaccacgatcaggagatggggatcccaccagaaatccgatgcacaccaagcagcagtagcagctggatcacgcactccacacaatccttgaaggatcagcaagaggttgatgagaggaacacgctatccttcaggtttggtcgcgggcgtgacggtgggtcgcgggtgagacgacggggcgcgggcgacggtcgagggcgcggcagcgtgggggcagcggcggcgaggcgcaacgacgtggaaggcgtgcgcggtcgggcgaggtcgaggggcccgggcgtggcggccgggcgaggggcgagggcgcggtggtcgggcgagggcgcagcgggcgagtgcacggcggcggcgacacgtgagagtgagagggcgagggcgcggcgggcgggcgccggcgagggcgcggcgggccagggcaggggagtggcgggcgagggctcagctggcgagggcaggggcgccggcgagggcgcggcgggcaagggcaggggcgcggtgggcgagggcgggcaggggcgcagcgggcgagggcgcagcggcggcggcgtggagagcagcggcggcggcgcgtga

SEQ ID NO: 1178 - DNA, 1776 bp, Zea mays
  Peptide Sequence Number=SeqID_42957
atggacgcgctgccggaggcgtggtcgcaggtgcgcgcgccggtgatcgtgccgctgctgcggctggcggtggccgtgtgcctcaccatgtcggtgcttctgttccttgagcgcgtgtacatggccgtcgtcatctccggggtgcgcctgctccgcctccgccccgaccgccgctaccgctgcgaccccctccccgaggacgacccggagctgggctcctccgcgttccccgtcgtgctcgtccagatccccatgttcaacgagcgcgaggtgtaccagctgtccatcggcgccgtgtgcgggctgtcgtggccggcggaccggctggtggtgcaggtgctcgacgactccacggacgaagtgattaaggagatggtgcggatggagtgcgagcggtgggctcggaaggggatcaacataacgtaccagatccgggaggaccgcaaggggtacaaggccggcgcgctgcgggcggggatgaggcacgcgtacgtgcgcgactgcgagtacgtggccatcttcgacgccgacttccagcccgacccggactacctcaagcgcaccatcccctacctcgtccacaacccggagatcgccctcgtccaggcgcgctggagattcggtcaatcagacgccaacgccaccgacagtccttgcggtgcacccggctgcctcttgccgcgcgcgcgcgcgctgctctcgcgccctgacagacgcaccgccacgggtgacgggaccccccacttcctcggttactgcgcggcggtgcgtttactattgcggcctgtcctgacactgtcagcgcagcgctcaggaggaggagtggcatattcgctcgtgccgcgccagatgcagatgcggaggcagaggcagagggacgaggaggtggagatgtccctggactaccacttcaccgtggagcaggaagtgagctcctccgtctgcgccttctttggattcaacggcaccgccggcgtgtggcgcatctccgcggtgaacgaggctggggggtggaaggaccggaccacggtggaggacatggatctggccatccgggccagcctcaagggctggaagttcgtctacctcggtgacgtccaggtgaaaagcgagctgccgagtaccttcaaggccttccggttccagcagcacaggtggtcgtgcggcccggcgaacctgttcaggaagatgctcatggagattgtgacgaacaagaaagtgacgatctggaagaagatccacgtcatctacaacttcttcctgatacgcaagatcatcgcgcacatcatcaccttctcgttctactgcgtcatcatcccggcaaccatcttcgtccccgaggtccgcatacccaagtggggctgcgtctacatcccctcggccatcaccctcctcaactctgtcggcactcccaggtctttccacctgcttttcttctgggtcgccttcgagaacgtcatgtccctgcacagaacaaaggccacgctgatcggcttgctggaggccggcagggccaacgagtgggtggtgacggcgaagctcggcagcgccatgaagatgaaatcggctaacaaagcggggctcaggaagcagttcatgaggatatgggagaggctgcacgtcacggagctcggggtggcagccttcctcttctcctgcggctggtacgatcttgcgtacgggagggaccatttcttcatctacctcttcttccagtctgtcgcgtttttcatcgtcggcgtcggctacgtcggcaccatcgtcccgcagtcgtag

SEQ ID NO: 1179 - DNA, 399 bp, Zea mays
  Peptide Sequence Number=SeqID_42958
atgacgcgcagccgtacatctagccccgctttgcttgtggctatcgagtcgctatggctggctgcgttccggccggcgagcctcgccccctgcctgcgtcaaagtcctggtcccacgaatcgacgatcaagcttcggcgaccaaatgatccagctcttcgagttctacaaagttgaagatcctgagcatttgtttggtgaaggcaagaactggggtgtagttcgcttcgccgtcgtgccgttaatggggctcggtgtatgcggctcgctctgccaagagatgttcggactacaggcggtgatgaggatgatggttttttattatgattatggtaatggtaaagaaggtgtcgaggcggatctccaggagttccaggacttcgacgagttcgaggattag

SEQ ID NO: 1180 - DNA, 195 bp, Zea mays
  Peptide Sequence Number=SeqID_42959
atggctaatcctcgcgcttgctgccattgtgtgttcaccgggagctcggggatgatggtcgggggcctcgggccaccagatcgaaaaccatgcccatggcgccactacgcccttacttgtgccgccgcaccgtctttactccgccgcccgggtgtttgggtgaagaagacaagctctcggtcgttagatgtgtga

SEQ ID NO: 1181 - DNA, 159 bp, Zea mays
  Peptide Sequence Number=SeqID_42960
atgacgagattaagcatctctagcttttataaaacaggtgacaaggaaggtggtaaatgcaccggggcttgccttattgcaggagaagatctaaaacctttctactctggtaagcagttagatgaaactccaccactggatcagcaggcactgaagtga

SEQ ID NO: 1182 - DNA, 375 bp, Zea mays
  Peptide Sequence Number=SeqID_42961
atggcaggaatagaggccgagctagagggcgacgttgctggagcgtacagaccgagctggggcttcacggcgagctcagagggagcagagaccagggcgaactggcggctgggcggtcaagcgctgggaataggaagcgccgagcagggaggaagaagctttggggagatgggacgagcagaggaagtgccgcgcagaataagagccagagagaagctgggagccgcagcacggaggagcatggggaggaagatgagcagggatgggcgagctcaggctccaagaagccatgggagggagagcgagccggagggagccgcacacagcagcaggcgcggtaccaagcgcgaccatgggagcgagccaggcgcgtga

SEQ ID NO: 1183 - DNA, 336 bp, Zea mays
  Peptide Sequence Number=SeqID_42962
atggcgcgcgtgcacgaagtggtatcccgagatctgggtcgtgcgatcaggatcggacggcggcgctgctcctgctcctcggcggtgaagtcgccggagcttgggcgggtgtgggctaccggggttctgaggtcggccaggatcggcgaggcgaaaccgacgaacacactagtggggttctggccacgagaacgggggtcagagatgggagaacagtggagggagagctccgggtgggtcgagggtaacaccgacgaggaatcccggccgcggggagaggcaatcgagtgcaatagggttcggtctagcttcggtgggggtaggggagtgctatag

SEQ ID NO: 1184 - DNA, 651 bp, Zea mays
  Peptide Sequence Number=SeqID_42963
atggtcgttgggaggctgtttgtcgacgggcgcaccggacagtccggacgcaggccgcgcagccgcgcagggcgcgtcgcgcactctcgtcgtctcgcgctggagctcgtgagagcaggccggcagggcgcaggcgcgccgccgagcaggggcggctccagtcgcgctcgccgagcaggggagcagaggcggctctgtcgagcaggggcgactccgccgagcaggggcgcaaaggcggctctggtgaccgtcgcgctcgcgcaaggacgcagggcgcagtcgtgcaggggctgcttcggtcgcgccgtcgcggtcgcgctggagctaggggcctcctggccgcctgggaggctgagacggcggctggacggggacgggacacggccacacgggacgggagcaagaggactcgacattttagggtttctgggaaatgggccgcgccttaggcccatccgccgtggacaagtgcgctgccggcctgccgctgccgaggccgtggaggcagccatttcgggccttttcgtgcctgttaacgggccatttcgggtctgcttaaacgggccgggctcgtgcccgcccgtgggcctcggcgtcggcccaagtttagccgtgacttgtcagcaatcaactggtataacatgcatatag

SEQ ID NO: 1185 - DNA, 495 bp, Zea mays
  Peptide Sequence Number=SeqID_42964
atggagaacaatatccaggagtttggtggcagcgttggtgttcctcgacatcgaactgccatcgcgaagaggctgagaaggtcgacagcatcgaagaaagttgctggggagaaatgcaagcgcagctcgtcgcccccatcatcatcatcgtccactcgctcgactgctccagatccaaagagaacaagagttgtggagcagcgttgtgccgacatcatcgatgtcgtccacggtgccttccaaccagttaactcaccagtcatcaatgaaatgaaccatgctttagttgagatagaagaccttgcaaaggaccttgatcacctagcactggaaaaagactgggaggtggaccacatggaccattcagaaaatgtcgaatcatcagatgcagatgatgagcttctgattgactatgattcagagttgaacaatgatgatataatcgactacgatgacggacgtgactactctacggacgacacctatccctactag

SEQ ID NO: 1186 - DNA, 1284 bp, Zea mays
  Peptide Sequence Number=SeqID_42965
atgggcaagagctgcgtgccccccgtcgccatggtgctcgtgcagctgggctttgccggcatgaatgtggtgtcaaagctggcgctggacgccggcatgagcccctacgtgctcatcgcctaccgcaacctcatcgccgccgccgtcatctcccccgtcgcctacttgcttgagagacgaagcggggcgacgatcacaaagaaggtgctcctccagatcttcgtctcctccatcttcggggcgacgctgaaccaggtgctgtacttcgtgggcctcaagtccaccagccccaccgtggcgtgcgcgctcaccaacacgctgccggcgctgacgttcgtgatggcggcggcgctgaagatggagtcggtgcggccgggcacgccggcggggcaggccaagctggtgggcacggcggtgtgcgtgggcggctccatggtcatacccttctacaagggccccgtgctggggctgtgggcgtccccgctccactggcgcttcgtcgcggaccacgcgccgtcgcccgccgccgccgccgcacactcgggagccgccgtgctcggggacgtcctcatcatcgccagctgcgtcgcctgggccgtctggttcatcctccacaccaagatgtccgagggcttctccgcgccctacaccagcaccgccatcatgtgcctcatggcgggcgtgcagtgcgcgggcgtcagcgccgccatggaccgcagcctcgacgtctggaagctcggctgcgacatcaggctctactccgtgctctacatcggcatcgttggctccggcatcgggttcacgctcatgtcgtggtgcatccaggtgcgcggcccgttgtacgtgtccatgttcagcccgctgctgctcgtcgtcgtcgccatcatcggctgggccatcctcggcgagaagatacgcgtgggaacgtacgttgatcatcaattaacgtcgcaatccgttcacggagagattttaattaaattaatgtcatcctcctccgctccatctatccttcacactctacctgcatacagtgctgtcgggtccgtgctcatcgttgccgggctatacatggtgctctggggcaaagggagggagatggacaggccggacctcgacaacgacgacgacatagccgacgaggagaccgccgtgggccttgttggcttcagcggcaagggcggtggcgcggtcgccatcgcaagcagccgcgtcgaggccatcagcctgccggtgtcgttctccacaactagccccaagcggctgcaacacatccacgggtga

SEQ ID NO: 1187 - DNA, 412 bp, Zea mays
  Peptide Sequence Number=SeqID_42966
cgagatctacgagatcgagcccacaaatcgcgctccgatgcccccgcttgcatgcctccaccgcgcccagcgtgcccccagtagaaccacgaatctcacccacagccgtggctccctcgacaccgtcgcctcccggctccctctccccccgccctgttccccctggtcgcatgccacggttcgcctgcccactctcgatgcacaccccccacaccctaggccttccgcgacgaggagctcgtctcctactacctctaccgcctcgagccccacgtgcacagccaccgccgcaagagatgccccacgtctcggccttcagcaacgtcgccgcgagagatgcccctactatctccgtcgccacgttctcggctgccgcctccgcgtcgacgccatcgccgagatcgacctctaa

SEQ ID NO: 1188 - DNA, 1308 bp, Zea mays
  Peptide Sequence Number=SeqID_42967
atgggttgcttcgggtgctttgcgccggaggtggatgaggacctcaggccctccaagcacgacgattcgtcaggggctgatgcgaggaggaaggtcgcgccggatgtggccagcggctacgcgcacagcttcaccttcaaggatctgcttgtggcaactggctacttcaacgaggccaatttcatcggagaaggtggattcgggaaggtgtacaagggcaagatcaacggacagatggtggcagtgaagcagctcgctcgagacggcgtgcaggggaggaacgagttcttggtcgaggtgctcatgcttacagtgctcaaccatcgcaaccttgtcagcttggtcgggttctgcgcgcagggggacgagaggctgctggtctacgagtacatgccgttcggaagcctggagagccatctgtttgacgtgcctctcggcaagaaaccactcgactggaacacgcgcgtgaggatagccgtgggagtcgcggaaggggtttcctacctgcacaacgtagccgacccgcctgtgatctaccgcgacatgaaggccgccaacattctgctgggcgaggacttcagcccgaggctctccgacttcgggctcgcgaaggtcgggccggttggagacaggactcacgtgtccacgagagtcatgggcacctatggctactgcgctcctgactacgtcgtgagcggcaagctcaccatgaaatccgacatatacagtttcggcgtgctcctgctggaactgatcacggggaggaggatctacgacgcctcgaggcctaaaccggagcagagtctgttgacatggtcgaggccgttcctgcatgacaagaggaagttctacaggctcgctgacccggctctgctgggctgctacccgtcctcggcactgaaccagctggtcgtgatcagcatcatgtgcctccaagaccagccccacgtccgcccgatcatctccgatgtcgtcataggcctgaaccacgtcgcgagccagccatacaccgctgagcgcccgccgcccgcgtccgcagtgtacataggatcagtgtcctctgtaggggggtcgtgggatgttcatcatcaattcaccagccatgtacagagctgccatggctggcctgtagatgcaataagaagttcaccagggtttaagcttaagaggcatatcacatgttggtcatccgtggtgtttctgagctcagctcttggaaatctgttgcgtttgcgtcttgagacccaaagcctcatgccagaagctgtcccgtggcctggaacaagttcagatccctgtgggctgtga

SEQ ID NO: 1189 - DNA, 1611 bp, Zea mays
  Peptide Sequence Number=SeqID_42968
atgccttgggccccaagatgcgattggcatcgttacggttgtagtgctcgtactgctgagagcagacatcaaggcgtcgagcacgtgtgcaggcaggatgccgaagggagggcgctgaggaccctaggctgggggcggcagacgcggtggactgggcggtgggcgctggctagtggcgacctggcagttggtgtggagacagaccatacaatccacatggtacgtggtgctgcgccaccaccagcatccactgcacctgcagccaaccaagaacctaccactgctgctcctgccagttccccagcagcaggattgggtggcttgttgcaaaatctgggtgctacaggggctgctgctaacagtgggggtttgggtttgtttggatctggcctccctgaattagaccacatgcaacaacagctagctgaaaatcctaacttgatgagggaaataatgaatatgccactcatgcagaatttaatgaacagtcctgaactgatacgcagtataataatgaacaaccctcaaatgcgcgagctcattgatcgcaatccggatcttgctcatgtcctcaatgatccaagcatcatgcgccagacttttgaagcagttcggaatcctgaactcatgagggagatgatgcggaacacagacagagccatgagcaacattgaatcttctccagagggattcaacatgctccgtcgcatgtatgaaactgttcaagagccttttctgaatgcgacaacaatgggtagcgagggtgatcgaaattcgaatccatttgctgcacttctaggaaatcaggggtctaaccaagcaagagactcagctgcaaatggaacaactacagcttcagacaccacatcaggggctccagctccaaatactaatccacttccgaatccttggggtccaaatgctggatctgcccaaggagcagcaagatcccctcctgctaccaacactaggagtactacagcaggtggcccaggagggttgggttcagcagattttggaagtactcttggtgccagtggtggtggctctgatgctaccttcttgactcaagttttgcaaaacccaactatgatgcagatgatgcagaacattatgtctaatcctcagtccatgaatcagctgcttaatatgaatccaaatgtacgtaacatgatggaatccaatactcaaatgagagaaatgattcagaatccagaatttattcgccagttgacgtctcctgaaacattgcagcaattaatttcattccagcagtctttgatgtcacaacttggccaacaacaaactggacaggagcggacacaatcagcctctggtgcaggcaatgtgaacctcaacaccttgatgaacatgttcagtgggcttggtgctggtggtggcctaggtgttccaaatgctcctaatggttttctcatcaacaaagtaatgtcaaaatttgcagtgccaccagaagaactgtatgcaacacaattagctcagctccaagaaatgggtttttttgacacacaggagaacatccgagccttggccgccactgctggaaatgttcatgctgcagtggagcgacttcttggaaacatgggccaatag

SEQ ID NO: 1190 - DNA, 387 bp, Zea mays
  Peptide Sequence Number=SeqID_42969
atgggtgctggaaggagagggatggagcaggacgttccgggacggagctgcagcagcgccgctacggccagggtgcgctcgcgaggaggccaattcagcctgggcctatgctgcgcacgcagggggaggggcgcgacgagcgcacgccggagatcgggatgggcacctgttcaatctgctgcacgcgctaggagggactcgaccgccagtgtcgccggggaccgcttgcaacgctacacagcacactacaacaggaagaagaaaggctgggagagagagaatgagagggctcacctagaaccgccatgtgcagggacatcagcttctgcgcgatttggatctaaagagggagacgagaggctatgtgacgtcacgttggttatataa

SEQ ID NO: 1191 - DNA, 447 bp, Zea mays
  Peptide Sequence Number=SeqID_42970
atgtacaccggtagcatgttcgaggaggctggtgtcgtgcacgtggataccctctgtctgttggccccgccggcgccgtgccatgcggcctcatcacgtcgctgctccaggagtaggaggtgtgcgaggggtggcggcgtcgcaccaggtcctctcgtgcgagcttgggctccgcaggcgacggcgtggggtagccgcgaacaaggtggagatccacgggcgaccgcaaacatcgcctccgcgctggataaggaccagcagagtgtgttcgggattgacagtgtggatccgaccactgattcccctttcttctccgaggaaaagatcaagaactgtggatttaatctaattagaaagacataccgatcaattgtgtataggaatcgaaagctgttgcataatacagttcgactaggcctgagaacctatcagcttgacggagagtga

SEQ ID NO: 1192 - DNA, 2544 bp, Zea mays
  Peptide Sequence Number=SeqID_42971
atggcgagggaggaggacggcccgcagttcgtgcggtggagggaggagttcgtgtctcaggagcgcggcagccgcgtcgtgcactactacctcgaagacgcggccggcgtgtcacatctcgccgtcatcggcaccgagaggagcctgcgccatatgctctacgtggtctcggaggacttcaacgccgcgtgggggtgcggcggcagcgctgacggtggcggcgcgccgccagtgtttgcgcgcaagtggcggtcacgccgggaggtggtggattggctcgggtccttcctcccggtgaaggcacttgactcaaaattctcaaaatatggatcttttgcggataatgacattgggtcagatggatacggggaaacaaatggttttttgcaccaaaatctgggtaaagactgcagctcagacattacatggtctggttcgttctggacatgtagcaagcagcttcggcactatcaagctttttgtcgcaatggaaccacaatatctacccacacttttgtgctggtcttgtcagaggaacaaaaccgctatcttgcatacttggaagacatgtatgaagataagaagggacagaagaagatcaaagtgcgatggtttcatcaaaaccaggaaattgcttgtgctatacctcctccgcctcatccttgcgaagttttcatcactcctttcacacaagtaatcagtgtggaatgtgttgatgatattgcaactgttttaactcgtgatcattatgaaaaatgctcccatgcaatgtcaattatgactgggatccgtttctgctctcgccagtatagtaaaaataagttcaagtattttgatttaagaacgttgcgtggatattttagtcaagcagttgttaggtccatgaaatttccagctgagtcagaaaaggacagtgaatattgtacacctgggaaagctaaatttccaaagcaattagagaggctttattcaaaatgtttgggcactaaaatttgtcgaagcccccaggcagactccataccatcttatcaaatattaagtaacgagcagcctcctgggaagcatctctcaatcaagtttatagtgccccagaatcaactaaagccgacatataatactggtgacagattagagatcttatctcaagacagtggcattattggttgctggttcaggtgcactgttctgaagtcatgcactaatcataacagattgaaggttcagtatgatgatctccaaaatgctgatgatagtgggagattggaggagatggtacctgcctctgcattggctcttcctgataaactgggactgagacaccaagaccggctaagaatcaggccacgtcctcaagaaaatagttttgttgatggggctgctcttttacctggaactgctgttgatgtctggcaatttagtggttggtgggaaggagttgttgtcagtttggacaacattgtggcagatagccttcaagtatattttccaggagagaactttttccgtgcgtgccagctaaggaacattagaatctctaaagattgggtcaagaaccgatgggttgatattgaaacaaagtcagatgtgttgtcacagataccttcagatagtatccaagcaaagcaaactgataatcatgcactgtctgttggtgtgacgggctccagcagttctgcaatgcctgagcaagagattgcagctacccaagcaaactccaatggagatgcagcggtgcctaagcaagagcttacagttgcccaagcaaactccaatggagatcaacctgtgcctaagcaagagcttgcagctacccaagcaaactccaatggagataaatctgtgcctgaccaagagcttgcagctatccaagcaaactccagtggagataaacctgtgcctaagcaagagcttgcagctacccgagcaaactccaatggagataaacctgtgcctgaccaagagcttgcagctatccaagcaaactccagtggagataaaccagtgcctgaacaagagcttccagctacccaagcaaactccaatggagataaaccagtgcctgagcaagagcttccagctacccaagcaaactccgatggagataaaccagtgcctgagcaagagcttccagctacccaagcaaactccagtggagataaaccagtacctaagatagagcttgcagctacccaagcaaattctaatggagataaacctgtgcctgagtttacagctacccaagcaacctccaatggaaataacagacaaatagaagcaagcaagcaatccgaagttagtatgacagatgaagcctctcctttggcggaggatgacaagcgaacaattctagggaagcgtcccagggatgttagtatgactgatgaagggtcagctttggtggaggatggcaagcgaacaattatagggaagcatcccagggatgaagctgcgcatgttgatctgaaagtgttgcagaatgagagcattttttcactcccaaagccatgcgccatctatttgtggcatttggcatactggatctga

SEQ ID NO: 1193 - DNA, 1953 bp, Zea mays
  Peptide Sequence Number=SeqID_42972
atgggatgtcttgcggctctgagccgcttcatctcacgcctcggcgaaagaggcctgcctctgtactgcctcttaaggaaggtcgagtgcttcacttggacccctgaggccgaggaagccctcgggaacctgaaggcgctcctcacgaacgcgcccatcttggtggttagcgtcgcgatcgtggttgagagacaagaagaagggcatgcattgcccgtccagaggccagtctacttcattagcgaggtactgtccgagaccaagatccgctacccacaagttcagaagctgctgtacgcggtgatcctgacgcgacggaagttgcgacactacttcgagtctcatccggtaactgtggtgtcatccttccccccgggggagatcatccagtgccgagaggcctcgggtagaatcgcaaagtgggcggtggaaattatgggcgagacgatctcgttcgcccctcggaaggccatcaagtcccaggtcttggcagactttgtggttgagtgggtcgacacccagctcccaacagttccaattcaaccggaactctggaccatgttcttcgatgggtcgctgatgaagacaggagccggcgcaggcctactcttcatctcgcccctcgggaagcacctacgctatgtgctatgcctccacttcccggcgtccaacaatgtggctgagtacgaggctctggtcaacgggttgtgcatcgccatcgagctaggggtccgacgcctcgacgctcgcggtgactcgcaactcgtcatcgaccaagtcatgaagaactcccactgccgcgacccgaagatggaagcctactgcgatgaggttcggcgcctggaagacaagttctacgggctcgagctcaaccacatcgcccgatgctacaacgagactgcggacgagctggctaaaatagcctcggggcgaacaacggttcccccggacgtcttctcccgagacctgcatcaaccctccgttaagatcgacgacacgtccgagcccgaggcaccctcggcccagcccgaggtaccctcggctcagtccgaggcaccctcggctcactccgaggcaccctcggctcaacccgaggcaccctcagctcgacccgaggcaccctcggttcagcccgaggtaccctcggcccccgagggtttctactggccaacggcggtggccgacaccactagaattgtccgcacctgcgaagggtgtcagttctacgcgaggcagacccatctgcctgctcaggctctgcagacgatacccatcacctggccttttgccgtgtggggtctggacctcgtcggccccttgcagaaggcacccgggggctacacgcacctgttggtcgccatcgacaaattctccaagtggatcaaggtccgacccctaaacagcatcaggcccgaacaggcggtggcgttcttcaccaacatcatctatcgctttggagtcccaaactccatcatcaccgacaacggcacccagttcaccggcagaaagttcctggacttctgcgaggatcaccacacccgggtggactgggccgccgtggctcaccccatgacgaatgggcaagtagagcgtgccaacggcatgattctacaaggactcaagcctcggatctacaacgacctcaacaagttcggcaagcgatggatgaaggaactcccctcggtggtttggagtctgaggacaacgccgagccgagccacgggcttcacgccgttctttctagtctatggggccgagtccatcttgcccacagacttagaatacggttccccgaggacgagggcctacgccgaccaaagcaaccaagctagtcgagaagactcgctggatcagctggaagaggctcgggacatggccttactacactcgacgcggtaccagcagtccctgcgacgctaccacgcccgaggggtccggtcccgagacctctag

SEQ ID NO: 1194 - DNA, 1077 bp, Zea mays
  Peptide Sequence Number=SeqID_42973
atggcggacaagagatccaggacatacaaaccccagagtgaacttcgatacggacactctagaaaccttattggagttagcttcggtagtttagtacgtactcaaccagaggggcagaggatctccacgatcgtcctcaaggttgaccttgaatgcgagagatgctacaggaagatcagaaaagtcctctgcaagatccaagacaagatgaacatcaagacgatctcgttcgacgagaagagcaatgccgtgaccatctccgggccgttcgacgccgacacggtctgcaacaagctctgctgcaaggccggccgggtcatcaaggcgatggacgtcaagggcaaggacaaggacggcggcaaggccgggaaggagggcggcggcgacaagcccaaggacgccggcaaaccggcggcggccgagaaggacgcaggcaaggccgggaaggagggcggcgccaaggcggagaagaaggaggagaaggccgagaagaagaaggaggagaaggccgataagaaggaggggggcaagggcgacaaggaggcgaagccggcggagaagggcaacaaggacgggaaggcggaggccaagaaggtgaagttcgccgaggtccccgcggcggacgcgaagcccggcaaggccatgccgcccggcatgaccaaggccgacctgggcccgctcctggagaagatgatggcggccaaggccgggtccgagccgcagccgatcgcgccgccgccgggcgccgcgcagggcgtggccgtgccgtccgtctggcccgcgcccgccgggtccgtgtccggctacggctacggctacaacccaggctacgaggcgccgccgccgccgtcctactacgccgctggcgccgggggcggctacggctgcggctgcggcggctacaacggctactgccggtgcggcaagccggccgcgcccgggcccggcgggtactacggcgtgccggtgtacgatagccaggggtggtactacggcggtggcggcggcgcccggcagccgtactacccgcagcagcactgctgcgaggaccccaatgccgggtgcagcgtcatgtga

SEQ ID NO: 1195 - DNA, 306 bp, Zea mays
  Peptide Sequence Number=SeqID_42974
atgccgcaataccagatgggtcccacagaacgtgctctcggtaaggttgagacttgcttggcgggagcttggtcgtttgtcccgcctcgcagacttgttcaacaacgacatggtcggtatataggccagagagaggtttatgggcctcgccttgggtacccctttcctgggtacacaatagcatccccgagccttcgcgtgactccttggagtcggtcgaaggctttcttgctaggggtcagaagccctgagtgcacacaagcgcatcagtatgatgtagcccccgagcccccaagtcatacgtga

SEQ ID NO: 1196 - DNA, 513 bp, Zea mays
  Peptide Sequence Number=SeqID_42975
atgaaggtttctcaggaggtgagggaaacaacggaggcggaggcacgcaaaatctcgcttgcatatgacggtgccatcgccgcgcaaatccaggcggagacctccgttaaggagcggagcaccgagctccagggacttcgccagctcatgggcgaggtgtgcaaccgcctctcgcccccaccatctaccgaggtgcctttggctaagcggcttcgggcgcttcctaggcacgtggtgcgggtggtccttgaaggcatgtacctcaggagcagcatagccctaggtcagatggtctctcatttcgatgagattgatgtcatcatgatcgtcgaaggttatgccgccggatggagcgaggaggagctagatgccattgaagaacaagtcagccctcatgtctgctcactcgcaagacaaaacgacgtgaagctcctcctaaccagccccctgaatgcggaagccccaccggcgactctcctgcgggtgtcctggactatttttatttgcttgtaa

SEQ ID NO: 1197 - DNA, 261 bp, Zea mays
  Peptide Sequence Number=SeqID_42976
atggggggtgcggttcgccggtcgttcgacgccttcgctatacttcggagcactatggggcggctgcgtcatcttgtcagcgctggtgaaccccctttgaatgtgctcaccagaaccatgccattgcggtgccgcgccatcgccgtgggcaaccttctgggcgccgtagccaacactgacgagcaagccactgtggaatctgaggttcagcaagtagagatagctgagcaggagctcattgaaggcaagttgtgcccttga

SEQ ID NO: 1198 - DNA, 327 bp, Zea mays
  Peptide Sequence Number=SeqID_42977
atgccattgcggtgccgcgccatcgccgtgggcaaccttctgggcgccgtagccaatgttctcgacgcatacacagggtcacgtagcatcaccaatttagccagatttgggacggaatcgccggtttgccgcacaccggccatggcgtcgccggcatgcgcgcgccgccgcagccctctgtcggagttgagtaggggtgggttcggtcgttggatgaccaatggatggcctcgattagatcaggacgagcaagccactgtagaatctgaggttcagcaagtagagatagctgagcaggagctcattgaaggcaagttgtgcccttga

SEQ ID NO: 1199 - DNA, 393 bp, Zea mays
  Peptide Sequence Number=SeqID_42978
atggcctgcaatgaggttgtcaccccccaacgaggtccctgcgcaccagacccactgcccccgtcgtctctgcagatcgacgagcggtgtagattcaggtttgggtctggggttcgctcgggtctccttgcctcgccgggcccccaccgcggcggttggggagcatggtgggcggggggaggcggaaaagagcagcgaagaaggatggccaaattggatcttattgcggttgctttacaggaaagttcggatggtgaacatgaacttgaaagacctaataatatcacgccggatcggaggagtctagctatggagatagtgctggagaggaagaagggttttgagggggtccatgctcaccacacgtggccaatgtcgatgaggctgtcatag

SEQ ID NO: 1200 - DNA, 342 bp, Zea mays
  Peptide Sequence Number=SeqID_42979
atgggctacattggggataaggttaatcagggtgagcaaatgaactggcaagttttacttgataatgtggacgtcaagacgctgcaattgaagcaacttagagaccagaccggcttgatgaatcaggaacctgctctttttgcatctacaattcttgagaatattcttgatggcaaacctgatgccacaatatcactcaaagagaaaatccaactccatttcacctcacttttatttatggaacaaataggcaccgacgagctgatgtggtcgtgggatctaacacagcacgcggcgggcgagttctccttcgccatggtgcaggccaacgacgtgttgtag

SEQ ID NO: 1201 - DNA, 2565 bp, Zea mays
  Peptide Sequence Number=SeqID_42980
atgcccgtgaaagaaatccacgaaaatcacgcaacaatacacgtccagcagagaccagagtccagactagcaaatgattccttagcagttccctgcatgccttctcgctcgccggcatgccggccgcgtggaagaaaccgccgatcagccgctgacgcggttgcacgaccactcgccctggcgctcattctcgtctctaccctgcctcgcgccgcgcactcgcaggatctggcgctgccaccagtccagccacgtggtgtgaggaggacgatgacgtgcgacaacatcccggagcccttcggcacaagatctagaggcgcgtcgcgtctacccggcttcgaggtgacgtgcgggccaaacagggaggccatgctgtccatcggcggcgatgcatacatgatcgatttcgtgtcggtgtcgggcagctacgtggtcgtcttcgcggagcccatcacgcaggtgtgctacgacggcaagggcaagccgacgccggacactggaaccggcgccaagagctcggaagggacgacgacgacgttcacttggagcttggaagggacgcccttcactttctccaagagtaacaagctggtcaacttcggctgcaaccgcacgctcatggctaacttcttcatcgtgcccggtgattccagcccgctatacaccagctgcaccaccacgtgcaacaccctccaaatcagcggctcttgccttggggaagcctgctgcgaggcccccatggaccaggtgaacggcgccaaggcgttcagcctgtcgttcgaaaggaccacggccaacggcaccggcgaggaggacggaacctgcagcgccgcgttcttcctggacaaagacgagacggtcttcacgttcagtggcgatgaggtacggccgctaaaaacagccttgctgccaccaggtgagcgcaggatggttttggattgggcgattgggagcaccagctgcgagcaaactcagagctacaccttcgagaaactgtgcaagtacggcacctgcgtcgacgcgcccaccggagcgggctatctctgcaaatgccctagcgggtacgacgggaatccgcatatacaaaaaataagggaggttattgacacttttttgtctgcacttacctcatctaatgttcaaggtattaatttctatatgaaagtttctccttcacaacaacctcaaggtatcaacgtgtgtgatcacccggaaaagaacccttgtacatacattaagtattgcattgatttggaaggagttgtttcgtgcgcctgccctgaagggatgagtggcgatggcaggaaaaacggtgtaagtcttgtgcttatggttacaacgaccactgctgcgtcgtgctactgctgggcagtaaagaaaagagagctaggaagaaagagagcggaattattcaggaagaatggtggcttactcctgcagcagagattttcaacaatcacatctcaaggcgaggaccaatattcatcaaagatattcagtgcggaagagctcaaggctgctactgacaactatagcgagagtcgaatacttggccgaggtggacaaggcacagtgtacaagggcattcttccagatcaaactgtagtcgccataaaaaagtccaaggtgttcgatgagagccaagtggagcaatttgtcaatgagattgccatcttgtcacagattgatcacccaaatgttgtcaagcttttgggatgttgtttagagacacaggtaccattgctggtttatgagttcatatctaatggaacactcttccagcacatccacaacagaaatgcaactcgccctctaacatgggaagactgcttaaggatagctgcagagactgcagacgcacttgcctatctgcactccgcgtcttctatacctatcatacacagagacatcaaatcaagcaacattctgttggatgggaacttcgtggctaaaatagcagacttcggtgcatcaagatcagtcccatttgatcaaacccatataactactcttattcaggggactattgggtacctcgatcccgaatatttccaaagcagccaactcaccgagaagagtgacgtttacagtttcggagtcgttcttgcagaactgttgaccaggcaaaaacctatttctgcagcaaggccggaagattcatgtaacttggctatgcatctggtggttctatttaataaagggcgcctacttcaggagatagagccacacattttggccgaagcaggtgaagaccaatgttatgccgttgcagagctttcagtgagatgcttaaacgtgaagggagaagaacggcctgccatggtggtggtggcttctgttttacaagagctaagaaggtcattcaccatagaccaggctgtcggaataaaagatgaatcgatacaggaaaacagtgaacaagaagagaaacatctacatgagtccagatcaattcccagtttgcagtcatcagaaaacgagggcttcaaagacatgctctcccaaccgctagtttacacggatgttcgggatacagagactctggcggctactactaagaactaa

SEQ ID NO: 1202 - DNA, 270 bp, Zea mays
  Peptide Sequence Number=SeqID_42981
atggaagggagctccgcctcgaccgaccccagcctcggcctcaggaggggtcgtcaccacgtccgatccaggcctcggcctccgctccggcctcgggaggaggtctccgcctcgcccgacctaggcctcggccttagcttcggtctcgggaggaggtctccgcctcgcccgaccctagcctcggcctcgggagaggtcaccacctcgctcgagacggcctcggaccgactacgtgagcagggaaaccatcattatcctacccctagctag

SEQ ID NO: 1203 - DNA, 681 bp, Zea mays
  Peptide Sequence Number=SeqID_42982
atgcggtggctacccaggctgctctctcactccatcgaggtcgggagggcctccgcggcggggaggtccaaccctagtctcgtcaaggcaggatcccatgggttcgccagcggcggctgggatgggtcaccagcggtgccccgggagtggctgcggaagctgtgggtagacgtgctgaagaagcagaaggaggacgcgaggaggtggggcatcggcgcgtcacccgggaacgccggcagcggtgcggagccttcgctatgcgcgttcgcgaattctgtggaggctgcaggagcgaccagggaggcaccttcaaggagctatcagtacgaatacaggggtctcgccgggccattttggtggatcaacagctcaatttatgcagaagtggatggtaaggagataggcgtagtccacaggcgttggcacctttggcagagaatctatgacctgtacttagggaataggcaatttgcagttgttgagaatccaggattctggaactggacctttagcctagtggatgaagatgacaaactgttggctcagattgatcgtaattggaggggcatcggctttgagccttttatacagtactgggctttgccattgcctgatgacacagctatgatggttctatctcacaagtcacaacagatccatgttgcagtacggttcatctga

SEQ ID NO: 1204 - DNA, 2340 bp, Zea mays
  Peptide Sequence Number=SeqID_42983
atggcggcgctggatgacaaggccatgacggacctggagacgctggaggaggaggaagtgctgcgccggttaggcacagcggaggaggcgggcctcaccgacaacgaggccgcgcgacgcctccgtctccacggccccaacgtcgtcgtcctctcgcaccacgagggcagcatgcttcatggattcctaatggcgctcttctcgctctggggatgggatcatgtcttccccaagtacaataacatggtccgggtcatacttaactccatgtcgtgggttacagtactgactatagttgtgtctcttgctatcacctcagctggccaaagatcatgcgagctggccatcataattttcgtagtagctacatgcctcatagcatgctttactgcaatgcttgttttagagtatgctaaggctccgctggaggccaaagcccacgcaccaagggccaaggttctgagagatgggaattggagagatgtacatgcagcaaatctggtcccaggggatatcatatttctcaaagttggggacattgtcccagccaatgctcgcatactccgatttcagaaaatcgacacaatgacttgctgggccaaaaggtctgttgattgtgcgcatggcttcctcctatactatgcttggactgtttcctgtggccaaggaactgccgttgtcattgcaactggacgtggcattcccagaagtacattgcggctctacccacaacgttatgctcgacctgggcagcttaaagaaggagccatgcttactggctgcttctgtgcttccctggtacttgttggcacttttgctgagatagtcttaagatttttgttccaaaaacaaaattacagaggcatgccactcgacgcccattttatgccattgattggtggaatcccgatggcaatgcctacttttttttacctggcattggcattgggatctgtaaggctttgttttctggggattgctagccggggaacagttgcacttgaagatctagcaagtgtggatgtaatcctcttcaacatgactggtactttaacgtgtaatcagccctgttttgtacgggacaagattgagatgtttgcagatagcgttaataaagaccatgccatagttttagctgcacgggcatcaagatctcaacatgagttgtacattgaaccaattgatgcagctattctaagcctccttgatgatccggagcaggttgctcatcactgtggcagcagcaaagaagttaaagagaaaataagcatgataatggatgaacttgcccttgatggatatcaggccatagctgtaggacatcaagtagactcttgttgggactttattgcccttctgccttacacagatgaccttagaagcgatagtgctgatgttgtcgatagccttatcgatctaggtttagatataagagtcctcacagaaagtccattgtcgaccacaaagcaggtctatctttatcttctatgtacctcctgcaaagttttgtttttgcaagttcttgttaccattttgctatcttcatatcttagtacagaggacaaaagcgatataatattcaccatttcatcaactgtccatcttgatcctgcaggtctaactccaatcttaattgtaatgaagtttggtgtccgtgtcattttacatttatggaactttgacttgtcaaatatcctggctttcatgattacagcttgtaattactgtacgtcctttgcaatgttatttgaaagggtggaattgaacaagtcaccagataaatggagagttcagaaaatcattacaagcggtgctgcttttggaagctacatagttcttactactgccattttttatagggttgcaacaactgcaaacccttttgcaattagcacagtaaaccaggctattgcactctttgttcattctgatggttgctgtatcataagatggcctggaccttttgtcacatttgcctttgttgtttctcaaacggtggcaacacaaaaagttgtccatggcgacttgaattttgcactaacaaagggtattggctgtgttagggccggattgatatggttgtataacttagtcctacttttggccctggttttagtttgtcgcaaatggagacacgcaaagatgactagtgaaaagttgttgacaatatgcttgcgttcagctatcctacacatagttcttacctggtttctgtccctcgtgccttgttcggtgtgccaggcagtcaaaggttccactgtcggcttggcattagaaggaacagaccgcagacagaaggaaattgagataggaaagggcaacgaccaggggctcatttga

SEQ ID NO: 1205 - DNA, 672 bp, Zea mays
  Peptide Sequence Number=SeqID_42984
atgtccggtgctccggcttggccttgggtggctatgcttctgtgtagcctgtccgcgtgtcaatgttcagtcaggatggtgaggaccaagaatgtcaccccagtagggggaggcgatgaccaggaccctatttgccccttcagactggacaagggaaagtatgtctaccttgagcagcagggaggcaagaagaagagaaagatggatagagctagtcgagcagcagtagcagcagcaacaactgagagagcagagcagggaggccaattgaggatttgctctaatcagatcaccttccgtgtctgtcgcctctcgtctcagactcgctccactccagctcggtttgacccctcatctccagtcaccactaccactccaccttcctccactacgccagcttccgccactccagtgcctatcaccacaatcgctacgcctacagcctccaccacacctacttccaccattctcactccctctaccactccaccaattcctccacctcgtttccgagagcgtgacaagatagaggtgcgaccacttgctgaggatcctcggctgtctgaccttcagagggccactgctgccaaagtttgtcggttcagacgttttgtgcttgcgctctcttctttacatttatgcgtgttgttgctatgttgtgctcttgtgtga

SEQ ID NO: 1206 - DNA, 177 bp, Zea mays
  Peptide Sequence Number=SeqID_42985
atggcaaaggagctggaagcagatgttcaagagtgttcgaaggagaagaacgaagtgcggctgcatcggcagaagcacgacaatgtccgagttactggtccagggtgggccatgcttctagagggtgctaacagtcttccacaagatgatcgccagatggtctcttacgtggattaa

SEQ ID NO: 1207 - DNA, 1434 bp, Zea mays
  Peptide Sequence Number=SeqID_42986
atggctcttgcttctgtggccaaggtggtgctgggctccatcgccttctgtgtgttctgggtgctggccgtgttcccgtccgtgcccttcatgcccatcggccgcacggcgggcgccctgctcagcgccgtcctgatgatcgtgttccacgtgatcagccccgacgacgcgtacgcgtccgtggacctccccatcctgggcctcctctttgccaccatggtggtgggcagttacctcaagaacgccggcatgttcaagcacctgggcacgctgctggcgtggcggagccagggcggccgcgacctgctgtgccgcgtctgcgtcgtcacggcgctggccagcgcgctcttcaccaacgacacctgctgcgtcgtgctcaccgagttcgtgctggagctcgccgccgagcgcaacctccccgccaagcccttcctgctggcgctggcctccagcgccaacatcggctccagcgccacgcccatcggcaacccgcagaacctggtgatcgccttcaacagcaagatctccttccccaagttcctgctcggcatcctgcccgccatgctcgccggcatggccgtcaacatggtcatgctcctctgcatgtactggaaggacctagacggcagcggcagcggcatggacctggacggcaagcggatggaggccgtcgaggagggggccgtcgtcgtcgtcgagccgagccccaagcagcagcagcagcagctgggcggcagcaacgggtacatgtcgccgctgatgacggagaacatctccaccaagcacccctggttcatgcagtgcacggagcagcggcggaagctgttcatcaagagtttcgcctacgtggtgacggtgggcatggtgatcgcctacatggtggggctcaacatgtcgtggacggccatcaccaccgccatcgccctggtggtcgtggacttccgcgacgccgagccgtgcctcaacaccgtctcctactcgctgctcgtcttcttctccggcatgttcatcaccgtcagcggcttcaacaagacggggctgccggcggccatatggaacttcatggcgccatactccaaggtcaacagcgtgggcggcatatccgtgctctctgtcatcatcctgctgctgtccaacctcgcgtcaaacgtgccaacagtgcttcttatgggcggcgaggtggcctcggcggcggccctgatctcgccggcggctgtggtgcggtcgtggctgctgctggcgtgggtgagcacggtggcgggcaacctgtcgctgctgggatcggcggcgaacctgatcgtgtgcgagcaggctcgacgggcgcagcgcaacgcctacgacctcaccttctggaaccacatcgtcttcggcgtgccctccaccctcatcgtcaccgccatcggcatccccctcatcggaaagatcaacatctga

SEQ ID NO: 1208 - DNA, 348 bp, Zea mays
  Peptide Sequence Number=SeqID_42987
atggcgaaggggtatcggcgtatcagggccacacgatctgatccagacggcttggattacctcgcggtcttacctgaaccggcagaggcgaatgtccggggagtcttcttaccagtggttgtgccgtgcagtccccagaccgcgatgaattgcggttccgtggcaattgatggcgccgatgagaaattggggcagcaccaaaggcttcttccactagtgagtgcctcaatgatcatcgacgtgcttcgaggaagcccactgacccgagcttgcgcctcgaacgatgacggaacacaatttccacggcggcggcgtctcttcctcacaattcgcgacggggaaggatga

SEQ ID NO: 1209 - DNA, 153 bp, Zea mays
  Peptide Sequence Number=SeqID_42988
atggcgcccaagaggaagactgcgaactcgtctgccgcagtgatccccgccatcgaccccaacagtcagttacccttcgcagccgctgaaagacagggcctatccggcatatctttaccgagggctggccgactcaacccgagttaccaatag

SEQ ID NO: 1210 - DNA, 336 bp, Zea mays
  Peptide Sequence Number=SeqID_42989
atggcgtacggctccgacgacgactgcacgatggtggcaaggctagacgactgtcgccgttgcgctgcctgtggtgtcacccgatctactgcaacaggtgtgcgctcgcgcagccgtgttgggccctccggcgatgttgccgccggtggcatggacctgctgcactgtcgtgccctcgagcactctttcttcgtcgccctagacatgcttcatgttccctcacgactctgcctagtcatctgctccacggtccttgcttcgcagccacagcaggcagtaccggggcttaatgcgatctacgtgcttgacgaaagcggtccaaatcaacttatatga

SEQ ID NO: 1211 - DNA, 285 bp, Zea mays
  Peptide Sequence Number=SeqID_42990
atggagaacgcggtggtgctccgggagtggtttgaccgcgtcgacgccggccgcaccggcaacatcaccgctgcccagctccagagtttctggctcttaacaaattcctacagaaggggtcgtggatttctaagtcttgaggaggtgtaccaggcattaatcaaacttggtttctcgttggattcaccagccttctatactgtttgtgaggtaaggaagaggattcagctgccttctactttggcccatggtgaatcctgtcttgttaaagggagttcatcctag

SEQ ID NO: 1212 - DNA, 1113 bp, Zea mays
  Peptide Sequence Number=SeqID_42991
atgcttaagaaaaatatattcaggagatctaggattgtaggcaaacgctttccaatatgtcttcttaaaatgcgtgactctgtaattgagatttcgagctttcgaacagttgctaattatgggaatagaagtgaagtggtagattatgtggcagagttgaatggctctgacgttagggatattcttcgctggaaggattctatgagaagagacttcacaataaatggtcttttctttaacccgatgaactgcaaaatttatgattacgtgaatggagtgtgtacagtgattcctgctcacatttctttcatggaggaccctgcagcaccttctgttaggttgcttagaaaatatggactacttgatattttgctgcctttccagtcagcatatttgtctgagcagatgaaaggtggttcaagtgacagacatctgatgcttatgtggctaaaggggtccttttttgggaaattactgtctaatcttgataggttactctctgcggaccgaccatgccatagctctttgtggctggcgttgttggcatttcacagtacattggttatatatccacaagacaccttggtaataagagcttttgctgcagtgttgtatttcggaacatgggaaacaacagtcaaatttctgagagaagaagttggagctgaagttccatttgccccagagacaatggggccttctcggaccaaactggattgtcttaaggaacaaacgtcacatctagcatcactagtcaattcttcagtagatatattgacatgtcctcatgatctggagcaatcgctagccagattctcggaacctctgcaattttcaggagtggtagtcgcatctaacaatgataggaaaaagttgtcggccgtatttgagggccttgcttctgacctacattcatatgatgggagaagagggatgcgtgggattgattactcgtcgctgaaacttggggatcttgccgaggtccgatttgttctcggtaaagtgatcatggacacaatgtacgacaagttaccatgcgaatctactgaggatgagggcgctgctgcagatgttgctggtggaagcctacctccattgtccgcattgttttaa

SEQ ID NO: 1213 - DNA, 426 bp, Zea mays
  Peptide Sequence Number=SeqID_42992
atgacgacgccgcggcggcacgctgatccgtcgccctcgccctcgccctcttccccgccgcagcttctctcccgcctccgctccggggcctccagtttcctggcgcggcagtacagcacggggaagggaggcgataacaccggtccttcgaagccgaaaggtggtggctcctccgcgccaaggcacctcaggccaggattcgtggatccttcatcatggaaacattttgactcaagggctgttggcattaaaccgggtgctatacatacagatgcatgggcggttttaaaaaagctcagacgtgaagactccaaatcctgcatggatcttggggctggagctgttttacacaaggccatgatacagaggtggcacaatgttgtagattcttttgtgggaaggcattatgctaggcgccagatttag

SEQ ID NO: 1214 - DNA, 1512 bp, Zea mays
  Peptide Sequence Number=SeqID_42993
atggagaggaccggagcccacagcggtaagcgctggctaccgggcctcctggtcctcgccgccacgtcgtggcttttcgtcatctacttccatctcgcggtgttccgcggcccgccgatcgtcagcgcgccacgcgggcccctcgccgaggacgcgtcaggcggtggcggcggcggcggcgacgggcagcggttcctgctcctccatcacgaggagcggctcaggaaggtgaaggccccgcccgccaccaggggcgacgcgctccggacggcacgggacgacgactgccaggggcggtacgtgtacatccacgacctccctccgcggttcaacgcggacatcctcgccaactgccgccactggtacccgtggatggacatgtgcgtgtacctcgagaacggcgggctgggccggccggtggacaacgcggacggcgtgttcgccgacgaggggtggtacgccacggaccacttcggcctggacgtcatcttccacagtcggatgaggcagtacgagtgcctgacgggcgactcctcccgcgccgccgccgtcttcgtgcccttctacgccggcttcgacgtggtgcagcacctgtggggcgtcaactccacggcccgggagaaggacgcgctggcgctcgacctcgcggactggctcacgcggcggcccgagtggcgcgccatgggcggccgcgaccacttcttcctgtccgggaggacggcgtacgaccaccagcggcagacggacagcgactccgagtgggggaacaagctgctccgcctgccggcggtgcagaacatgacggcgctcttcgtcgagaagctcccctggacgagctacgacttcgccgtgccgtacccgacctacttccacccggccagcgacgcgcaggtcgccgagtggcagcggcggatgcgcgccacgaggcgcgactggctcttctcctttgccggcggcgcgcgcggcgacccgtactccatccggcaccagctcatcggccagtgcgcctcgtccagcttctgcaggctggtgcggtgcgggaagaaccagcggaactgcctcgtcccgagcaccttcatgcgcgtgttccagggcacgcgcttctgcctgcagcccacgggcgacaccatgacgcgccggtcggcgttcgacgccatcatggccggctgcgtgccggtcttcttccacccggactcggcgcacacgcagtacaggtggcacctccccgacgcgcacgacacgtactcggtgctcatcccggaggcgcacgtgcgcgccggcaacgtcagcatcgaggagacgctccgcgcgatcccgcaggacgtggcggagcggatgacggagaccgtcatcgggctcatacccaggctggtgtacgcggacccgaggtccaagctggagacgctcagggacgccgtcgacgtgacggtcgaggcggtcatcgggagggtcaacaagctcagggaggagatgggccgcggccaagggcacctgctgcaaatgcaaacctag

SEQ ID NO: 1215 - DNA, 192 bp, Zea mays
  Peptide Sequence Number=SeqID_42994
atgggatggatacaacagagaatgaatacgtcaattctttggatgaataaaaagatattccgtgatcttcatgatgcgttggttgagagaaataagttagaattagttgaagaggaagatgttccatatgcttcaacagtcatagaccctgtaaacgactctttgaaatatcattatgaggatgttagctaa

SEQ ID NO: 1216 - DNA, 1650 bp, Zea mays
  Peptide Sequence Number=SeqID_42995
atgtggctgtatgagaggcttgaggtagggagagccaagcagatgacactcagccttggcaagttgcctagcgagggccttcgttgtgttacgttcgtgctcccaggtgagggtggcggcacgttcacattctcggcagcaactacaaccgccttagcagcggataatgccaattttgagcttgaaaaactcaggattaaactagaacatatgaaaggagtgtgcaaacttgttcaggatgagtctaccagtgcttctcagcaaatgattgacctagttgaaagacgtgctcaagaggaagctcggctggcggaggtccgccagaggatcaacattaccactgaggcagcgcggaaagagagggagcagcggtacgctatagaggcgcaagctaggcatgtgagggaccttgcaaaagaggaagctttgaaaaagcagaatttgcagcttaggttatcaagggaggctgataatgtgcaaaagctggagaaacttcttgaattgggaggcaagtcatacacagtatttacatgggaggagatggaatctgctacatcatcgttttcggaggcacttaagattggatcgggagcattcgggacagtgtacaagggcaaagtccaccataagactgtggccataaaagtactcaaatctgacgacagccacattgccaaacattttgaaaaggagcttgagattttgggtaagacccgacatcgccatttgttgctgctgctaggtgcctgtctggacagagcttgcttggtatacgagtacatggagaatggcagccttgaggatcggctgcagtgcaaaggagacactgccccactcccatggtaccaccgtttccgtattgcatgggaaataacattggcacttatcttcctacacagttcaaaaccaaagccaattatccaccgtgacctcaagcctgcaaatatactccttgacagaaatttcactagcaaaatcggtgatgcaggccttgcaacatttcttccattaagggacacttcgtcaacacatacaattcgaaaatcaacagatctagttggtacactgttttatctggacccagagtatcagaggacaggtcaagtttcagcaaaatctgatgtatacgctttgggcatggtgttcttgcagcttctgactgcaaagtcaccaattgggctagcagacactgctgagagagcaatggaagaggatcaccttattgacattctggaccaacgtgcaggaaattggcctgtgcgagaagcgcatgagctaactcagcttggcctccgttgtttggaaatgcgaagcaaggatcgacctgacctgaagtctaaggttcttgtagttttagagcggctgaacaatcttgccagcactgtgtatcattcggtgcagcccatcccaactgcaccaccaagccattttatctgccctatactcaagagggtaatgcaggatccatgcattgcgtctgatgggtactcgtatgaacgggttgcgattgagatgtggcttaatgagaatgatgtgtcaccattgacgaaggcgcgacttcctgacaaaaacttggtgcccaatcttgccctgatatgcctgatcaattcttggaagggagaggtaggagctactgggcccattcgctga

SEQ ID NO: 1217 - DNA, 873 bp, Zea mays
  Peptide Sequence Number=SeqID_42996
atggctacccaagaagaaaccatggtaactgaatcatcaccctctagtgattcatctatcactattgggttggccgtgagcagctccaagtccagcaagtatgcagtgaattgggctctgaaaaacttcggtaccagacagaggataaggttcatgctcattcatgtccggcaaaaggtcacactcgttccaaccccgatgggcaactatgttcctgttgatcaagtgagggatgacattgccagtgcatatgaaaaagaagtcgaatgtgaggcccaaaatatgctccttatgtacaagaacatgtgtgatggcaaggttgaagctgaagtattggttgtcaagggtgatgatgtggcagaaactatttcaggtgttgtcttagcatgccaaattcacaagctttttgttggtgtctcttctcatagcaactttataaggaagttcaagggcactaggatgttctctcgaatatgcaagtgtgttccaagcttttgtatggtgtatgctatttcaaaagaaagtgacaacagttctaagatactccaggtcaacgagagttctaacagtgaactttattcagataagtcatcagtatcagttaccaccagagtagttgtgtggagcctccttgtatttgtgaagctgtctttacaagaacacctctctagaagcacttcatctaccattggtaaagatcaaaggatcagtccttgtactgatggatctagtaacttggggatcttagacaaaaccccaaccatgagcagggcactgcaggaattgatgttgttagaggacgaggagcttccatgccagacctctatatctgtgtctccaattagttatctgcaatgttttcaagtcgcctag

SEQ ID NO: 1218 - DNA, 1314 bp, Zea mays
  Peptide Sequence Number=SeqID_42997
atgcaggcggtgcggacgcgggcggagcagcgtggtgccgaggcggaggcgaccccgcacgggagcgcgcggtcgtggagccccgaggcggagatcggcatgcgcgtggaggacatctgggacagcctggacgtgcagcagcggcagctgagccacggcgacaagctcaacagttgcttcgacagcatccccgtcgcgtccttcccgcacgccttcgacggcgcccagctggtggagatcccctcggacgccacgctcgccgaggccgtcgacatcctgtcccgcaaccggatcatcagcgcgcccgtcaggaacgtcgacgcgcccgaggacgccagctggatcgaccgctacatcggcattgtcgagttccccggcatcgcctctgaagccgcggcgacggccgaagtaggcgccgacgagctggcagcgaagctaggcaccgtcacgctggagggcgccgccgcagccgcggcggcggcggccgtcacgtccaaagcggcggcggagcctgagggagccatcgcggaagtcttcggagccctgccgtcttcggacctgttcaacaaaacgaaggtgaaggatatctccgggtcgttccggtgggcgccgttcctggcgctgcagagctccgacaccttcctcaccatgctgctgctgctgtccaagtaccggatgaagagcctgccggtggtggacatcggcgagggcaccatcagcaacatcatcacgcaggccgccgtcgtgcacatgctctccgagtgcgtcggcctccactggttcgaggagtggggcaccaagacgctctccgagatcggcctgcccatcatgaggctcagcaagatcgtcaaggtgcgcgaggacgagccggcactcaaggccttccggctgatgaggagaaaaggggttggaggcataccggtggtggacgatagcggcagggcggtaggcagcataatgatcaaggatgtcaagcatctccttactgcatcggagacaaacagagactacaggtcagagaccgctgcttgcaggaccctaacagccaaagaattcatcgcgaatgcgagacagagctccggcgaaaggcaaatgagcatcataacgtgcaaaaggggggacagcgtcaaggacataatactgaagctggatgcagagaagaggcagaggatctacgtgatcaacgaggaagggaacctggacgggttgatcaccctcagagatataatcgccaagctggtgtatgaaccgcctggctactttggggacttcttcaatggtgttatccctctaccatccaacagcagggtctga

SEQ ID NO: 1219 - DNA, 348 bp, Zea mays
  Peptide Sequence Number=SeqID_42998
atgacgatggaaaggggcgggcgcgatagctgtggatgggagggcgaggagatacgggcgccaatgaaggggagatacggggcagggccgtacctagaagggcgaggagcttgggggcgcacacgtacctggaagggcgtcaatggaagggcgatgagcgagggtgaggattgtggggccctttggagctcaagagatgcgaaagcgtgggtagtccgtcgtcgatggaagggcgcagtgggggaggatttgggggcgagcgaggatttcggcgtcggctgtggatgcgctgatggcggctacgccctggcgcggagggagaggttttcgggagcggagtgcgcgtag

SEQ ID NO: 1220 - DNA, 1128 bp, Zea mays
  Peptide Sequence Number=SeqID_42999
atggactgggacgccaagatgctccctgcctgggacctgggcacggtggtcgtgcccatcggcggcggcggcggcgcgctggacctgaagctgggcgcgccgacgagctcgagggcggcggtggccacggccgcgcccacgctgccgtcggcgaaccctccgccgccgccgccgccgccgtcgtcgtccgcgccgccgaagcggccgcgcccgggccacgcgcagcaggcggcgccggcgtgctccgtgcagggctgcgacgccgacctgtcccagtgccgcgactaccaccgccgccacaaggtctgcgtggcgcactccaaggcgcccttcgtcaccgtcgccggccagcagcagcgcttctgccagcagtgcagcaggtttcatctgctcgaggagttcgacgaggtgaagcgaagctgcaggaagcgcctcgacggacacaaccggcgccgccgcaagccgcagccggaccctctcagccctgccggcttgtttggcgatcaccaccatggaggagtgacaaggttcacatcgtacccacaccgcttcaccacatccatcgcaaagcccgaatggggggcggtcgtcaagacggagaccgacgcgttccaagaccagtactaccctgccgtccacctcaacggcgccggcgccggcgccctcttccacgacaaggaccggaagcacctcccattcctgaccaaccacaacaatggatgccagccattcaccgtcaccacgacggcttcctcagagagcagcagcaagcacagcaacggcaactgtgctctctctcttctgtcagacaacccgacaccagcacaggcacagacggccacgatccctaccgcgcagcccctcgtcgccacggcatcgcagtacggcaggctccctggcggcgacgacgacgacgtctccctcgccgggatgtcgtacatgagggtgggagacagccggcaggcttccaatctgacaacgtcctcacccggtcctgccactgcagctgcaacacagcagcacctgcagtaccaccatggctactactaccatgtgagcggtggcgagcagggcaacaacagcccagatggcgccgccattcaggccctccccttctcgtcgtggtag

SEQ ID NO: 1221 - DNA, 1335 bp, Zea mays
  Peptide Sequence Number=SeqID_43000
atgaggacgaggagcgggtcccggtattctaacggcggaggcgaggatgccttggtggggcagaagaggaagagggcggcgtcggccgtcgccggtgagtgcgcctgctgcgagcgcaggaagcggcctgccgacgggccggactacctggacgcactccccgacgacctcgtcctctccatcctgaccaaggtcgcggccgactcctcggcgcccgccgacctgctctccgtccacctcacgtacgtctgcccgggcaccactcgctttttcatcaactcctcgtgttccatcggatggcgaacgctccctctccctccacgtcgcgtggggggagagttcgaagcagttttgcggtttacggaaaacgttagggataaggcggatgccaaggatcgggcgcttgctgatgtcttgggcgtgtgcaggtgcaagaggctcaacgagctgggcagtcacgacatggtgttcgccaaggcctcgccggcgtcgctgtccgtgaaggcggcggcgtggtccgaggcagcgcagaggttcctcaagcgctccgccgacgccggcaacctcgaggcctgctacattctcggcatgatccgattctactgcttgggcagccgcagcggcggcgcggcgctgctggcgaaggcggccgtcggcgggcacgcggcggcgctctactcgctggccgtcatccagttcaacggcagcggcggcgccaagtcggaccgcgacctccgcgcgggcgcggcgctgtgcgcgcgcgcggccgcgctgggccacgtggacgcgctccgcgagctcgggcactgcctgcaggacggctacggcgtgcggcgggaccccgccgagggccgccgcctcctggtgtcggcgaacgcccgcgagctcaccctcgcgctctccgcggccgcctcgcgccacgccgcgggcgtcgtcgtcggaggcggcggcggcggcgggtgccctctcctgtccgacttcgggtggagcctccccgaggcggagccccacgcggcgaaccagttcatggtggactggtggtgggcctccgaccgctgcgccgcccaggcgggcgggaagataaccggcgagagcggcgtggacggcgacggcgcggagctccggctgtgctcccacgtgcggtgcgggcggcgcgagacgcggcggcacgagttccggcggtgctccgtgtgcggcgcggccaactactgctcccgcgcgtgccaggcgctggactggaagcgcgcgcacaaggtgcagtgcgtgcccgtggaccgctggctacttggcgccgtcggcgacgctcaggatcagcagcagcagcagccgcagtga

SEQ ID NO: 1222 - DNA, 330 bp, Zea mays
  Peptide Sequence Number=SeqID_43001
atgaagctgtggaaggagacttccaggagttccaagattacgacgagttctaggtgtgggttagcggcaacccccagtcggctgcctgtgaaggccgcggttatctacgtttcttttccgcactttgatttattatggctcgacttagacacactgcacgaaagtcagtcatccccttcttaccctcccgccttgctgagcgtccgcttcgccgtcccgtggccggacagtccagccacttggagagactacaccaccgcctgcgtgaggagcaggagcgacgacgacaggagcagcagagctcttccttctcgctccaccaggagatag

SEQ ID NO: 1223 - DNA, 726 bp, Zea mays
  Peptide Sequence Number=SeqID_43002
atggtgtttgccgagagcaagactctcggcacaggaacacactcggcaaagaagcaatacctgatcaccggcgtccactaccctcttggtgcacggttctgccataccccgcctccgcgattcgcgtctctgccgctgctcgtggaaggacgaaattctaggatgcctccccggccgccccgccatcctcgcactcgccccgctcatctaaggaagggcgccattccagggaatacctatgcggcagccccgccatcctcgcccccacccgcccccaccatccacaagggcggtaccatgcccccgctcctctcccctccgcgccatccttgccccgcgcgcgcccgcacatctcgcaagggcgccccttcccctgcccccgtcgtctccgcgcaagggcctgtcgtctcgcaagggcgccccttcccctgcccccgtcgtctccgcgccatccttggatccggggttcgctcaggttgcctcgcctcgcaaggtccccaccacgcgcggtcagggagcatggtgggtggggaagacagggaggagcagaggagtagggcccgcactacagcagagcaggaactgcctcaaaggaggcgcatggcgccatggtattgggcgagggcgtcggtgccgcgcatgcttgagttcgccgagagggcgccaagctcgagcgacgcgagtcgcttccacaagcgcgagatctcccaggcccgcctccagaag

SEQ ID NO: 1224 - DNA, 378 bp, Zea mays
  Peptide Sequence Number=SeqID_43003
atggcgccgccgtccctgacacgcgtcactgtctacgctcaactagagctggaagagagagtggcgatagaggccccatgccgcccgtcctaccgcccccattggcaccacccttacagagcaaccacttcatcctcatcctcggcctccgtggccacccttatgggcaccgcatcctccagatcatatgcgcgctcgatcacccttagctggcgtgcgcatcgccgcagcggcttggacgagtccagaccgagcccaacatgggtgatgacggggacgcgagcttggcagcgaggtcgagatgaggtggtggtagcagcgcagtcgagaggatgtggggtcgttagaggtggtgtggcagggaggcgaggttggtag

SEQ ID NO: 1225 - DNA, 1071 bp, Zea mays
  Peptide Sequence Number=SeqID_43004
atgctcgtgaggagcgcctccacgccggtcctcggcgcgctgcacccttccggctgccactcgccggcggtctcctccccggccgtgcacttcgccgagtcgccggcgtcggccgcctaccacgcgccgcccatctcctgccacctgggcgggcccgggtccgggtccgaccacgagcgctcgcgcagccgcggcgccggcgccggcatgcgccgcacgtgctccgaggacaacctcgcgtctctggccggcggccgcgcggacgaccacgaccaccaccaccttctcctcccgccgtccggcaagggcgcgccacgggcgcggccggtgccgctcgagaccatccagtcgttcaggggcccgcatgcgtccaccgacgacgaagaggaggaagacgacgacgacgaagacgcgtacgaggtggagcgggagctgcgcttcggccagttcagctttgccggcggcgcctactcgcaggagcacccgctgttcctggccaggggcctcggcatcgaccgcctcggctcgggcctcctcagcgccgacggcggcggcgggttcggcggcagcgacggcagcgggagcggcggcggcggcgggaatttggtgacgtcggggaacggaggggaccgctccggcatcgagacgcactacaagaagatgatcgaggaggacccctgcaacggcctctttctcaggaactacgcacagttcctgtaccaggcaagcagcagcagcagcagcatctccttctcgccttctaccgtgaaaggggactacaggagggcagacgagtactactcccgcgcgatcctcgccgaccccgacgacggcgagctcctgtcggagtacgccaagctggtctgggaggtgcaccgcgacgaggaccgcgcctccagctacttcgagcgggcggccaaggcgtccccgcagaacagccacgtgctcgccgcgcacgccgcgttcctgtgggacacggacgacgaggagggcggcgccgacgcgctcagctacgcggccttcgctcagccggcgcactcgtctctggcttcggcgacggcaacaacctga

SEQ ID NO: 1226 - DNA, 1941 bp, Zea mays
  Peptide Sequence Number=SeqID_43005
atggaggcagctttgtcattctccaaggacagcccaccaatttcgataatttgtgctgcaaagattgtgggtctacccctaaccatcaatcatagcctcgctgctggctcggcacccaccctacagtttgcttctggagaatcactccatggtgtcaacccaatcatcctctacattgctagaggtgcatcaattgcctccttatctggaaagaatgatattgagtttgggcatgttgttgaatggcttgaatatgcccccaccttcctttcaggctctgaatttgaaaatgcatgcttatttgttgatggattcttggcctcccggacctttctggttggtcatggcctgacaattgctgacattgcagtttggtcaaatcttgctggaattggtcagcggtgggagagtctaaggaaatcaaagaaataccaaaatcttgttcgctggttcaacagcatagattcagaatacaaagaggcactgaacgaagttgtggctgcatttgttgggaaacgaggtattggaaaatctcctgcacctagccttaaggagaaggtacatgactcaaaggacccatcagctccagaagttgatctccctggtgcaaaagttgggaaagtctgcgttcgttttgccccagagcctagtggttacctccatattgggcatgcaaaggctgcactattgaacaaatactttgctgaaagatatcaagggcgcttaatagttcgatttgatgacacaaacccttcaaaagaaagcaatgagtttgttgagaatcttttgaaagatattgagacgttggggatcaaatatgatgctgtcacatacacatctgattatttcccaaagctaatggaaatggctgagagtttgataaagcagggtaaagcatatattgatgacacaccaaaggagcaaatgaggaaagagaggatggacggtattgagtcaaggtgcagaaataataccgtggaggaaaatctctcattatggaaagagatggttaatggaactgaaaggggcatgcagtgctgtgtacggggtaaacttgacatgcaggatcctaacaagtcactcagggatcctgtttactaccgctgtaatactgatccacaccatcgtgttggttcgaagtacaaggtctatccaacatatgactttgcgtgcccatttgtcgatgcattggaggggggtgcttcaaaaaatctgaatctcatggaatgggataaactctggacaatcaacaagaagataattgatccagtgtgcgcaaggcatactgctgtgctaaaagaccagcgtgtcatctttactcttacaaatggtccagaggagccatttgttcgaattttaccaagacataagaaatttgagggtgctggaaagaaggctacaacctttgccaacagaatttggctcgattatgctgatgcggcagctattagcaagggtgaggaagtaacccttatggattgggggaatgctattgttaaagagatcaaggtggagagtggagtaattactgaactagttggagaactgcatcttgaggggtctgtgaaaacaacaaaattgaagatcacatggctagcagatatagaggagctagttcccctttcattggttgaatttgattacctcatcagcaagaaaaagaaagactccctgttccttggcaaattaatgttgaactattctgttggtggcatctggcagctagaggaagacgaggacttcctcgacaatctcaacccttgcactcgacgggaaatcccagcccttggagatgcgaacatgaggaacatcaagcgtggagaggtcatacagctcgagaggaaaggctactataggtgtgatgccccttttatcagatcgtccaaaccggtggtcctgtttgcgatcccagatggcaggcagcaggcctcgcttagctag

SEQ ID NO: 1227 - DNA, 195 bp, Zea mays
  Peptide Sequence Number=SeqID_43006
atggcaggaattgcttcgacctgtagctactgcctgtatgacagatctagcaataaggtgaaaactacatcaattgttttatctgcgcaccgttggcgcaccgttggcgcaccggacagtccggtgcctcttcccgaccgttggctcggccacgtgtcgcgcgccgatcgcgcggccgaccgttggcccggctga

SEQ ID NO: 1228 - DNA, 762 bp, Zea mays
  Peptide Sequence Number=SeqID_43007
atgctcgccgtggccgcgtccctcagggcctcggcctccgcggtggccgaagctggcggcgacccggccgttcttcacgcggtcctcatcaagaccgcctcgtcctctcgcgccgcctacaacctcctcttctcccgctaccatccgtcgctctcgctgcacctcctctcccacctcccgttctgcttccgccccaccgccggctcgctcacctcctcgctctcctccctctccgcttcctccccggcctccgcgctcccgctcctccgccgcgtcctcggcatgtcccctgctctcctctgcgacggcccgctatcctcactcctccgctccatgccgccgtccatcgcaccgcacgtgcacgccctcgccttcaagctcgccctctcgtcgtccccctactccgcctcttgccttattactctctactccagagcccgctccccggcatgcgcccgccacctgttcgatgaaatccccgttgcaaatcgggactccgtttgctactcctccacgattgttgggctcgcacagaatgggtgggttgacatggcagaatccatgggacagaggcttctggagattaatcccaaggatgactcagcttatgtcatgcttgccaacgtctactcaacagctgggaaaacaaatgaggaggctgaggcatggactgcaatgagggaccatggggtcaggaaggaaggtgggcgaagttggattgagtggtgctgcaccatcaggaaaggtgttgagaatagttaa

SEQ ID NO: 1229 - DNA, 429 bp, Zea mays
  Peptide Sequence Number=SeqID_43008
atggacgtgatcccgactcctaaggcaggacatgattgccaccaagaagtatgtccgctgctctgctgcgtggggatcaataccttggacgcggccacggccgcgaccgaccgccaggccacctgtgcctggctcaggcaaaccatcaccagcatgggaacgctcaagcatgatctcatcgtcgacacgtgcaaattgtgcctgcgtggaaatggacatcccttcgggggattgactgtgacgatcagaccgacgctgccaccacctacggcggccagcaatagggtgttacagaaggataaggtgtccgacgagaatgagactctcaacaacgagatgaagggagaaaagcccatcgactcaggatctgggaagaaggaagatgggaaaaaagaagcacatcaagaagatcgtctactacgacaatga

SEQ ID NO: 1230 - DNA, 288 bp, Zea mays
  Peptide Sequence Number=SeqID_43009
atgaatcatgtacttgtcaagaaaaacaatgagagtgaccggatgcaagctctttttgctctgatgagcggtgacttccctgagggtcgacacggcctcctcgactcgaagatttgccctacgaaggtcctcctgaagtcgggacctctcttcccgaaggggcttcgtgtcgccccatgcgtcgttacgctccttgcgcaagcgcgcggtctcgccatgaagctagtcagcctcggagttgagagcataactcagacatacttcaagaaagatcaagcctcaaaatag

SEQ ID NO: 1231 - DNA, 2388 bp, Zea mays
  Peptide Sequence Number=SeqID_43010
atggatctactaggagatcgtgaagatgctcttagccttgtttcatggtgcaggagcgaggagaaagaagatccctggagacccggtgagagggtagagcggctcgtcactcttcccaaactgtccctgcctccatttcttttccttttgtttgtcgcctctcccttcgctcgccctgtctgcgctttcgctttcctttcgcctcccaccaccaaaaagaggagcagaggagaggtttcatctatggggcaagatgctggcttcaaacgcgaggatcattctggattgggatcaggtcctcaaactttgaaggtctcctgctgcactagtgaagaaaacgagagtcgaaacagaagataccatcagttgaaatgctcagagagcaactcgaggcagttgcacctggactacgtcccaaatttccactgcaggagcttgccaacgagaagccgcaagacgaatgctgagcaaagcaccgtggggaagcgtggttctatgtaccagagctccagcgaaataagcaggatcagaaagatccaggagggcaggaggaaaatagattctgcattcgatggggacgcgttcctgtcctttgatattgtcgatgcatcctctcgccctagcacaagtggagcttatctgcattcccatcagaatcggaggtcgggcgctaagccttctgtggacaccgctaagcgagcgtcaaaggacttcctggaccttcagttccgtgaacatcctgatgagaattttaagctagatcgaccacgcttggatagtaccttgttgaaaaacgatgatggtttcttggagatttctctcgagaaagagatagcaaagggtggcccgtgcagaaatgcagctcctatcctgctaaacactgggtcaggcaaatgcactgacctgcaaaagatgaatggatgccccagtgagaacaactgtggtgacaaggggagagattcagcaagcagttccaaatcaacgcctgtgaaagtaagctcctttgacggatcctgccaatctgacggtgctcaacaccatatcacagagaacaacactaaagctcgatcaagccccttcaagaagatgctggaccctattatgaagtccaaatctcctaggagcccatctatcatggaaagaggaggctccaactccgcaactgggccaggaagcaggaaaaactccgtgtctcgaaaatcactgctgggtgatttttcaagaagtgaacaagcatctaattgccagcccaatgggcaaacacagaagcgtgtaaacaaatctgctttgtcacctgctcatctccaagcggttcttagattggattccaagaacggtgtccaggtttttgaattctgtgttgacggcccaggagaatccatttccgccaggaattggaaaaacggtgatgagttgagctctatatacaccttccatagtggcgggaaacggtccagtgctgctggaaggatctccaaagatggaggctgggatttacccccaatcgttgggcaggtgcaggtttcatcatacttatgctctgaagttggaaaagacggtacggtgaataactctgtcgtcaccgagtttgtttcgtacgacattggtcatgcgaggcggattgttgaggagaagacaggggcacttcaacagccacagaggactagtctgacggaagagaacaagactgggagaaataactcagatgtatcgacatcttgcccgtggtccgaagaagaccttcatccttatttggagattgcggcgactgtgatagaggttccgtttagcagatacaagtccgaagaggtgaagaatggttcatctccttgtactgtcaaagttgttgcacctagtggactgcatggttcgccgagtgacgatgaagccggcggcccatctcccttgctagatagatggaggtacggtgggggttgcgactgtggcggatgggacatggcttgccccatcgacgttattggcaacacatatgataatagctgggctgagtctatagctaccaatgtgaaacatcccatggagctctttgttcagggtagcaaagaagagctccccgtcctttctatgaaggagaacgggagagggcagtttgtggtggatttccatgggcgactatcagcgttacaggcgttttcagtatgcatctctctgctgcactgttctgaagcttcgatcgccatcagcctcaagaaggggaagcagaagctgtattccagctcgctcaagttgctcctcgaggaggacgtgaggcacctgatcgaggcagtcacagctgaagagaagaagaagaagaagcggagtagagaaaaggcgcctcctccgtctgttctgcttgacccgcctttttctcccatcggaagagtgtag

SEQ ID NO: 1232 - DNA, 216 bp, Zea mays
  Peptide Sequence Number=SeqID_43011
atgggcaaaggcaagaggggtcgaggctcgcctcatcgtgtcggcgacaagcggaaacacaatccaagtcctcccttggaggacttcggcgactctgagtactcaaaggaggaagtttcctccgagttcgaggggtccctcgctctcgcctctcccctgacgttgtccgatgattcggacgactcccaggggctggacactgagtgtccaacataa

SEQ ID NO: 1233 - DNA, 2017 bp, Zea mays
  Peptide Sequence Number=SeqID_43012
ggttccagtccactccatcgccaagggcccaaggcttctctatctagggattcatcttcctctcgtcttccctcttcctctccgaggatacaaggcgccgtcccaggggcaatcccccttatcaattacaactgggactggtagaggtagggtcgccaccatgctggaggagctgctcatcttcacccggggcggcctcatcctgtggtcgtcctgccgggcgctcggcgccgcagccctcaagggctcccccatcgacgccctcatccgctcctgtctcctcgaggagcgatccgccgacgccagcttctcccaggacaattacgccctcaagtggaccttccacaacgacctcggccttgtcttcgtcgccgtataccagaagatactccacctcctctacgtcgacgatctcctcgccgccgtccgcaaggagttctcccagatctacgaccccaagcgcacctcctacgatgactttggggacatcttccgccagctccaccgcgaggccgaggcgcgcaccgaggaaatgaagaagtccaagcaggccctctcgtcccgtccgcagcctgctctcacccagaagaagcctggtcccaagggccgcggcggtgattcccgcggcggcgctgctaacaagggcggctctggtgccaaggatgactctgatggcgacggctatggcaaccaggaccaccgtactctggcaaatggtgccttcaagggccaagagaatggcgtccgcaaggagaattcttctcatggccgcactgttgttgtcaagggaaaggagaatggggcccccaaggatgaaggggccttcgatgtaagtaaactacagaagctacgggccaacaagaagaatggtgccactgacaatggaaccaagaagctgaccaaacctgacataaagaagaaagggaagcaagatagggtgtgggacgacaaaccttccaacaagaagctggattttacagacccggcagacgagagaggggacgaggtggcagacaatgtggcggtcatcgagggagaaagcatgatggataaggatgaggatctgagcagcgacagcgaggacgaagaggtggaagatggacccaaaaagaaaggatggttctcatcaatgttccagagtatttctggtaacaatgtattggagaagtctgatctgcagcctgcgctcaaagctctcaaagataggctgatggcaaagaacgtggcagaggaaattgcagagaagctttgcgaatctgtcgcagctagccttgagggcaagaagctaggatctttcactagaatatcatcaacagtccagacagctatggaggatgcgcttcttcgtattttgaccccaaggcgctctattgacatactgagggacgtgcacgctgccaaggagcgtgggaggccatatgttattgtttttgttggggtgaatggagttggcaaatccaccaatcttgcaaagcataacctcagtgttacacttgcagcatgtgacaccttcagatctggtgctgttgagcagctgagaactcatgcaaggaggcttcagatacctatatttgagaagggttatgagaaagatccggcagttgtagcgagggaggctattcaggaagcaacccggaacaaatcagatgttgttctggttgacactgctggacgtatgcaggacaacgagccactcatgagggcactctccaagctaatcaatctcaatagcccagacctggttttatttgttggagaagcattggttggaaatgatgctgtggatcagctcactaaatttaaccagaaactagcagacctatctgctgttcccactgctagattgatcgatggtatcctgctcaccaagtttgacaccatcgacgacaaggttggagcagcgctttccatggtctacatatctggagctccagtcatgttcgttggctgtggtcagtcctacacggacctgaagaagctgaacgtgaaatccattgtgaagaccctcctgaagtga

SEQ ID NO: 1234 - DNA, 639 bp, Zea mays
  Peptide Sequence Number=SeqID_43013
atggaaccttcaagtgggaaaccttcaattggatggcaaagggaaccacaaaatagatggaaagggcaccatcactttgtaaatgtcataaagggggagaagttgtgcattaaagcttacctcgaccaccatcactttgtaaatgtcacaaagaagttctacattaaagcttacctcaacctaagagaaaagcttatcttaagagggaagtgtcatacgcatcacggtttgattctttacactatgcaccccacaggtgagatgaatatggacaatggacatcataagctaagtaaaggtggacattgcttatgtgagactcggaaggaggcaagacaaactttgaggtaccgagtgcacgggagaaggtcaaggaggctgaggtacctaaagccaggggtgaagaagaagacttgcaaagtcaagagtctagcacttgaagtgataccaggggaagcaaacaaatccaagaagaacaaggacaaggagaagaagatgaagaatatttcatccactctagatcaaagaacaactgcaagaactccaagaaggaggagtgtcaaagcaagaactgcaagaactctaggaggtggttatctcctcctccaacaatggcacctctcgatcaagctcaagtag

SEQ ID NO: 1235 - DNA, 609 bp, Zea mays
  Peptide Sequence Number=SeqID_43014
atggcaaccgaacgaggaatccacctctccaaaagggaaaatgagaccgaggacatggatgaagaggagattcgcaagttctacacccatctcaacaaagtagacaagatgcttttgatgaagctgttgagaacgaacaaggaacaaggcgtgacgcttctcaggctagaagaaactctcatcaagaccaatgacggtttggataaggtgaccaaagaacatgaggagctaagcaaaaagaggatcagaaagagcggatgcttcagatgcaaggagttgggccatttcatagcttcatgtcctcacatggagaacaagatccttgcatcaccaaggatgaccttcaccaacaataagtgtcatgttaggctaagcgacgcttctgcaacaaacatggtgagcaaggtcatctcaagatggtttgtattgaggagttgcatgaacaagcaaaaagaagcattcaattggtatcaacaagtgccttcaaactcatactgccttaagaatgaacctcaggttattcagaccaaggtttgtggtgcccctttagttctgaaaatgctagatgtgctggtgcaagttattcaaaaatttgatgcacatctttag

SEQ ID NO: 1236 - DNA, 258 bp, Zea mays
  Peptide Sequence Number=SeqID_43015
atggccactatgtgggctccgagcggtaatcgtcgaccaggtcgacgcgggcggcacccagtggtgtcggtggctaggcctacttggctatgggggaaaagaaaggaagggaagagcttggctcccccatttatggccgcccaaggcgtacgcgaaagccggagttgcgggtcaacgcccacggacgcgaggattgcgatggcgtccgcggtgtttggctttgcggttggggatgaagctgacgaagtcggcccatag

SEQ ID NO: 1237 - DNA, 1821 bp, Zea mays
  Peptide Sequence Number=SeqID_43016
atgacatcctcatccggtggtggtctgtctccctacctcaccgatggccacgaaaaaagggacccgaaccaagcacaagattgctctgggtcaagcacgcttaacccagagattctttcgaggtacttcattgttatcgatgatgtatgggacgaggaaatatggaaattgttcgaatatgctctcgttgacaatagctgtggaagcagggtgattgtgacgacccgcaattttcgtgtggcaaaactgtgcgcaactcctgttgctggtgcattgtttgaactcgaacctctgtctaacgcagactccaagaggttgttctacaaaagggtatttggtaaagatggcggaaatcataatcagttggatgaaatagctgggagaattttgaagaaatgtggtggggtaccattagctatcattactacagcgagtttgttggcttctaaacccaaatcaataaatgaatggtatcgtgtgtacagatcccttggttcaggacttgagaaagataacactgatataaagcgtatgcatgatattttatctctcagttactatgagcttccttcctatctgaggccttgtttactgtatctaagccttttcccagaggattgcagaattgacaaagacagccttgtgaggagatgggtagccgaaggccttgttgtggatgaacaaggtggggggaatctgtatgagttgtatgaccgtggagagaaatacttcattgagcttgttaatagaagcttcatccagccactagacatcgatggtgtagatggcattccgaatgcttgctccgtacatgatctgatacttgaccttctgatttctctgtcagtcgaggataattttgggttaaggttggattctcagaacttcaccacctcaacagatagtgaggttaacattcgtcgattgtcgctgcaagacaatgaggtggaagtgagtgtgccggaaacagtggacttatcccatgtgaggtcagtaatcgcatttggcgatgcttttaactgggcgccacctctgtcaaggttcaagttcctccgtgccttggatttggagggtttcccacggaagaacaaccatccaaaggaactacgacgcctgcaccatttgaggtatctgcagctacgtggctatcttcagaaagaggtgctagaagaaattggaaacctacaacatctgaagatgttggacttgagccatgcatatgtttctcagctgccagtaagcatcactcggctcagaaaccttcagagtctactcgtcggatcggatgtgaagatgccacaggggatcgggagtctaagcaagctggaagaaatgtcatggatcgaggtggaaccaaacactgcagcggagctgggaaagctgacagaaatgagggtgttgtgcgtacatggactgggttacgatgaggctggcgaccaggcttttctccagagcctgtccaacctacgcaacctcttgggtctattcatcactgagtctgagatgtgttccttagatgacctgcccgatcctggacaggccccagtaggcctccgtttctttcgtggaaccgagacgaccttccagcagatgccacgttggttctcttggctctccgagctgtctggcttaaccatcactgtgaataatctcacacaggatgacatcgatatgcttggagccttgcctgagctacgtcttcttcagctagaagtagccgagaatggcaccattgcccaagaacagctgtccattggtagcgataagctctttcagtcattggaagcattcaaatttaagcactgcgcaagatgttggctg

SEQ ID NO: 1238 - DNA, 1038 bp, Zea mays
  Peptide Sequence Number=SeqID_43017
atggcaactcgttgtcggtcttctggtttcatcgaaatcaaggtcgacttcgcaggatccatcagccgtcctgccatcgaccacaccgtccgctccgacgatttctcggcaggcgggcatatatggagtgtagaattccacctaacgggtgacacgactggtaatggcgtttacttctctctctccctgcagctcgtcaacgaatccaagtccaagagcgtcaaggccatcaccgacgctttcctgctcggcagaggtggcacaccgtcatcttcgcacggaaagcgttgggtgcatgtgtatccaacacccgatggttcgccatcatcgcggaattatctaaagttcgtgaaacggagcgttctagagtctggctactacgttacagacggctacatcacattcatggttggagtcatagttctcggcgtcggcgatagccccatacccgtaccatcctctgatattgccgaccatctcggccacctcctggatcacgccgacagttccaacgacgtgactttctctgtcggcctcaagaccttcggcgcgcacagggccgtgctcgccgcccgctcgccggtgttcaaagcgcagctcttcggctccatggcggacgccgagatgcgctgcatcacgctgcacggcatcaggccagagacgttccggatcctgctgcggttcatctacaccgatgcgttgactgcaggagacgactgcgatggagacgagatgcagagctcttccgacatcgacctgttccaggatctgcttgcggcagctgacatgtaccagctggaccggctgaagctcatgtgcgcccgcaagctatggggctgcgtatcggtggagactgttgccaagattctcggctgcgctgaactgtacaactgctcggagctgaagagcgagtgcctggacttctttcttctcgagaaaaacttcaagattgctgtactgacggatgggtggttccagctaatgcagagtttcccgtctgtcatcgatgagataagagcgcgggttcctcagacttaa

SEQ ID NO: 1239 - DNA, 198 bp, Zea mays
  Peptide Sequence Number=SeqID_43018
atggcgccgagatttttttatccggcgagcacagcagctaatgttttttttgaagtgaagatgcaccacgttataatgataatagtttctaacctccaagggacttgtaagttccttctaatcctcattaagttatcgcaggtgaaggagtccaaaggcatagaacgtcgcctgaggagggagcgggttggcatttag

SEQ ID NO: 1240 - DNA, 189 bp, Zea mays
  Peptide Sequence Number=SeqID_43019
atgggttacaggttcttggtgcggagcataatgccagttcacaccggaaatgtcgaatcacaaccggaaaaaagaagagtgatcctgccggggagcaaccaacgcgacggagggagatggaacaagcaaggagcacacgatcatatgatgccctgtcccagtcttttaagcggtgtaacctctgtttag

SEQ ID NO: 1241 - DNA, 303 bp, Zea mays
  Peptide Sequence Number=SeqID_43020
atgaccgcccccacgcagaggctgagcgcattgccagagcagcgctcgatgtcgggatatgctctcaacggagcagcatccgaggcgggccgggctcgccgagttaggactgcgcccgtgccgtggtcggggcagcacccgcacgccaagaagcgtcaggccagggacgtgccatggccgcactctggatgggtcccgaacctgcggccttcgtgcgctcgatggagattagccatcgccggttacaaccagactgccatgaccgaaaccgctcggtggagagtaaaggttagagcgcactga

SEQ ID NO: 1242 - DNA, 303 bp, Zea mays
  Peptide Sequence Number=SeqID_43021
atggatattggtggtggtccagaggtttgtgtctctgtctcacacttaaccctctttctaatttctgttgtgattggtttggtactgaagcaattgaaggacaaagcactaaagagagcggggctgactgaagaaacattgcaagagcagattgagcagagaaacgttgcaaggaagaataaacagtttgagatatctgatggaatcaggaaaaaccttgctaccaagggcatcgccctgatggatgaaccttctggtacagtgtggagaccatgcgaaccagagggatctgaagagtcatga

SEQ ID NO: 1243 - DNA, 2052 bp, Zea mays
  Peptide Sequence Number=SeqID_43022
atggtgcagtggtggggccgtgaggcgtcgggtggccgggggacgtcggtggtggtgaagatggagagcccggaatggaccatcccggcggaatcggaggtggcggcggggggcaaggccggccgcggcaagaacgcccgccagatcacgtgggtgctactgctcaaggcgcaccgcaccgcggggaagctcacgggcgccgcctccgccgtgctttccatcgccggcgccgcgtggaggcgggtggcggcggggcggaccgacgaagacgaagacgaagacgccggcgccgcgccgcccggggagagccccgcgctgcgcagcaggttctacggcttcctccgcgcctccctcgtcctgtccgtgctcctcctcgccgccgacgtcgccgcacacctccagggctggcacctcgccgtcgacgtccccgacctgctcgccgtcgagggcctcttcgccgccgggtacgcgtcctgggcgcgcgtccgtctcgagtacctcgcgccggcgctgcagttcctggcgaacgcgtgcgtcgtgctcttcttggtccagagcgccgaccgccttatcctctgcctgggttgcctctggatcaagcacaggggcatcaggcctgtccccaaggctggtggcaaagggtcagacgacgtcgaggccggcaccgggaacttccccatggtgctcgtgcagattccaatgcgcaacgagaaggaggtgtaccagcaatctattggtgctgtttgcggtctggactggccaaggccaaacttcttggtgcaggtgctagacgattctgatgacgctgccacttcaacacttattaaagaggaggtggagaagtggcaacgggaaggcgttcgcatattgtaccgacaccggttaattcgtgatggctacaaggctggaaatctcaagtcagccatgaactgcagctatgtaaaggattatgagtttgttgttatctttgatgctgattttcaaccccagccagacttcctgaagcgaactgtgccccatttcaagggcaatgaggacgttgggttagttcaggcaaggtggtcttttgtgaacaaggatgagaacttgctaactaggctgcaaaacataaacctttgcttccactttgaggtggagcagcaggttaatgggatcttcctcaatttctttggattcaatggaacggcaggagtgtggagaataaaggcactcgaggattcaggtggatggatggagaggacaacagtggaggacatggatattgctgtccgagcacacctcaagggttggaagtttctgttccttaacgatgttgagtgccagtgtgaattgccggagtcatatgaggcatatcgaaagcagcaacaccgatggcattctggtcccatgcagttatttagactctgctttgtggatattatcaagtcgaagatcggattctggaagaagttcaacctcatatttcttttctttctcctccgcaagctcattctgcccttctattccttcacccttttctgcatcatccttcccatgacgatgtttattcccgaagccgagctccctgcctgggtcgtgtgctacatcccggcgaccatgtccctgctgaacatcctcccagccccgaaatcgttcccgtttatcgtgccctatctcctgttcgagaacaccatgtcggtaaccaagttcaacgccatggtctccggcctgttccagctcgggagcgcccacgagtgggtcgtcaccaagaaatcaggccgttcttccgagggcgatctcgtcgtcgagaagcagcctagacagcaaagggcagggtccgcatccaaccttggttcccttgcaaaggagccttcctccagtctcagaaaggactcccaaaggaagaaacacaataggatatacaggaaggagctggcgctctccttccttctcttaacagcagctgctcggagcctgatatcggtgcaaggaatacacttctacttccttctgttccaaggggtatcgtttttggtcgttgggctcgatctgatcggcgagcaagttgagtga

SEQ ID NO: 1244 - DNA, 291 bp, Zea mays
  Peptide Sequence Number=SeqID_43023
atgaagaactcacagcgcaccactgacatatcgtttggcagtaaccttgaagtcgattatgggtctgaagaaaatgcatccatagtctacagaacgttagcagttgacaaggagttgcagcctgacaaggtgaagagggagatgactctatcaggcagcaagctggccgtccacttcgcagccgtggaggcccgcttcctgcgagcatcgttcagctcatttgtggatcttatgggactcgtgacgaagctcgtcgaagaatatggtgtggccaatgcagggcattcttga

SEQ ID NO: 1245 - DNA, 303 bp, Zea mays
  Peptide Sequence Number=SeqID_43024
atggcggtgcagcctcgcacagggcagggcacagccgtcaacagcattcgcagtgcacaaaggaatcgtaacagcaaattagctgagcaaggaagctacgtacctaaacagtacgcaaatctgactgcatccgcacactgccggccagggatagaaggcagggagactggaagacgggcagggagggaagactcaccagctccgcgagtaagagttttcgaggcagaggcggcgctcggagttggaggcgccgttggtgaatggagatgggttgttcctaaaccccttccccagttcccctga

SEQ ID NO: 1246 - DNA, 2913 bp, Zea mays
  Peptide Sequence Number=SeqID_43025
atggcgagcccgcgctcggccggcggtgacgaggcgatctggatgaagctgcgcgaggccgggttcgacgaggacgctgtcaggcgccgcgacaaggcggccctcatcggctacatctcgcggctcgagtccgagatctatgaatatcagcacaatcttgggcttattttattggagcggaaggagttgacgtccaaatacgaacaactcaaagcttcttttgaagccactgagatcatactcaagcgagagcgagcttcgcagcagtctgctttatctgaaacaagaaagagggaagaaaacctaaaaaaaaatctagccattcagaaggagtgcatatcaaatcttgaaaaggcacttcatgatatgcgcggggaaacagctgaaataaaagtttcatatgaagcaaaactggctgaatcccttcaaatgatggagacggcacagaaaaagtttgatgaagcagaagagaaacttctcactgcaaaatcattagaagcagactgcattcgaactcgcaacacctctctgagaagactgcaagacattgaagatcgcgaagatcagctaagaagataccaaacatcttttgaacttgagaatgcatcgaaagagaaagagattaacctcctgaggaaatcgttggatgataccaaaaaaattttgcatgaaaaggagcaatgtttactgaaagaacaagtacttcttaatcagagggatgacagcatccttgagagacttgcgtacataactagctcagagaaaaggttggaggaggaaaagttaaatctcgaagatgaaagaaaggttcttttggaagagaaaaataagctggatctgaacatgcaggcaattatatccagggaggaagctataattcagaaggaatccatacttgacaaacgtgaaagtgaactattgattctccaagagaccattgcaagcaaagaaagggctgaaatagaaaggctccgtcaagaggaagaaattgccttggtgaggaggaggcaggaatttgacactgacatggaaattaagctcacttcttttgaggaagagattgatgcaaggaaagccttgctcgatcaaagggaaaccaccatcaatgagaaggaggatgcagtggcgcaaagggaacagaatctcaaccttaggtttgctgagttagcgaacaaggaagaatctttggtgaagaaatcagatgagttaagggaggaagagaaaaggctctcctctgagagagagacactgcacattgatctgcaaaaagaaaaggaggaaattcataacatgaaattggatttagagaaggaaaaatctttctttgaggaggagaagcgtgaagcgattcaagctcaggagaatctagcaataacccaaaatgagcgagaagatttacaaagtttgcaggtgaaacttaaagatgaaattgatagtctgagagcccaaaaggttgacctaatggctgatgcagaaaggctattatcagaaaaagaaaggtttgagattgaatgggagttgatcgatgagaagaaggaggaactacaaaaggaggcagccaggattgctgaagaacgaagagtaatagatgagcatctcaagagcgaatttgatattatcaaacaagaaaaggaagatctccgtgttcagttaaaaattagtacagaatcccttgctcatgaacatgctgaattcatgaataagatgcagcaagagcatgctagttggcttagcaggatacaattagaaagagaagatctgaagaaagatattgatatccagagaaccgagttactgaattctgcaaaggctaggcagatggaaatagattcatatttgagggaaaaagaagaggagtttgaacagaaaaaatccaaggaacttgaatacatcaattctgaaaaggaaactatcagctcaaaactagaacatgtcaggcttgaattgcaaaaacttgaggaggagaggaaaaggtctatgctggagcgagagagaagagaggaagagctgtctgaaacaaagaagactatagacgcgcttaatgagcaacgcgagaagttacaagagcaaagaaaactgcttcattcagaccgaaaatcaattacacagcaaatgcagctgcttaatgagttagaagagctgaagattgaatctgagaacaggcaactgtctttgagacagtgtgggaaatcaaagcatgctggtgtggaaaacctggaagacaacggtgttcacctgtctcctgatgaggatcaaaatgctagtccaaaacaaactactgtaaagaaattggaagtgtccccttcagtctccacaccaatttcttgggttaaaaaatgtgctcaggtgatattcaaacgctctccagagaagagtgctgatcccaacaatgatatacctccaaagttgggaaatgtcaatgactgtacctccttagctactgcctattcagatggattgtttgcttgtcacctggaaaatggtgctgagaaagtaccacaagctatcgacggtctgaaagttgggaaaaagaggcttaataatgcactctctcatggtgactccgaaatttcacagccaaaacgcaagcagcaaaagagcgctactcagattttgagagtgattggaggagaaattgattccaactgcagcccatcagttctagaagaaaaatgttcaaagaatgaacatgatgcagtcccagttggtttgtgtgggaagggaccacaaaatccccaagcagagcattcagaggatatttcagtgtctgcatctgaaccgtcgaacggacctggtgttgtggactctgaggacaaggatggagcagatgaggagtctgacgatgaaggcgaggacgaggaggaagagaagacgtcatcggcgaagaagctgtggcgtttcctcatcacatga

SEQ ID NO: 1247 - DNA, 312 bp, Zea mays
  Peptide Sequence Number=SeqID_43026
atggcgaacgcacgaacgtggagagggccacacatgaaaccgctgccagagatcgacatcatcggttggaagaagactctgagcgtccctagcgatgcgggtgggccgcgggcggaggttcagaatagcatgaatgaaggtttgcaaggggctgcattctttgatatgaaaaagcaaacgcatacatcaaatgaagaattaacgtatttctcaaccagtcatgctaggtgcagaagaaccatccaaatagcatcagaccattatattgttagaaaatggaagatgactcacaaacttctaagaaaacactga

SEQ ID NO: 1248 - DNA, 1383 bp, Zea mays
  Peptide Sequence Number=SeqID_43027
atgtttttcgacgggtcgctgatgaagacgggggccggcgcgggcctgctcttcatctcgcccctcggaaagcacttgcgctacgtgctgcgcctccatttcccggcgtccaacaatgtggccgagtacgaagctctggtcaacggattgcggatcgccatcgagctaggggtcagacgcctcgacgcccgcggtgattcgcagctcgtcatcgaccaagtcatgaagaactcccactgccgcgacccgaagatggaggcctactgcgacgaggttcggcgcctggaagacaagttcttcgggctcgagctcaaccacatcgctcggcgctacaacgaaaccgcagacgagctggctaagatagcctcggggcgaacgacagtccccccggacgtcttctcccgggatctgcatcaaccctccgtcaagctcgacgacgcgcccgagcccgaggtacccccggctcagcccgaggtaccctcggctcagcccgaggtaccctcggctcagcccgaggtaccctcggcccccgagggcggggcactgaacatcgaggaagggcagagcggggccacgccagatcaagattggcaggccccgtacctgcagtatcttcgccgaggagagctacccctcgaccaagccgaggctcggcggaaggcgcccgggggctacacgcacctgctggtcgccatcgacaaattctccaagtggatcgaggtccgacctctgaacagcatcaggtccgagcaggcggtggcattcttcaccaacatcatccatcgcttcggggtcccgaactccatcatcaccgacaacggcacccagttcaccggcaaaaaattcttggatttttgcgaggatcaccatatccgggtggactgggccgccgtggctcatcccatgtcgaatgggcaagtagagcgtgccaacggcatgattctacaagggctcaagcctcgaatctacaacgacctcaacaagttcggcaagcgatggatgaaggaactcccctcggtggtctggagcctaaggacgacgccgagtcgtgccacgggcttcacgccgtttttcctggtctacggggctgaagctatcttgcccactaacctggaaaacggctccccgagggcgagggcctacaccaaacaaagcaaccaagctagccgagaggaatcgccggaccagctggaggaagctcgggacagggccttactacactcggcgcggtaccaacagtccctgcgacgctaccacgcccgaggggtccggtcccgagaactccaggtgggcgatctggtgctccggctgcggcaagacgcccgagggaggcacaagctcacgcccccctgggaagggcattcgtcatcgccaaagttctga

SEQ ID NO: 1249 - DNA, 225 bp, Zea mays
  Peptide Sequence Number=SeqID_43028
atgcagagggccccaaggacaaggagagatttcaacgtttatcccttattgctacgtctccctggcgtgcggattaattactacctgattgggaaaggcgcaatagcccagctgtttgatgtggggaaagaggagtgctctaccgtcttcctgtggtgctgcccttgctgtgacactgtggccaacggtgttcaggtcactcgtgctgtgagctaccagttctga

SEQ ID NO: 1250 - DNA, 543 bp, Zea mays
  Peptide Sequence Number=SeqID_43029
atggtcggcaagcgcgcgcgggtgggccgctgcactgctgctaggcgagagcgggcgggcggccgcgtcggcccagctaagccactgtcgagccagcgcacgcacgcgtgggcggccttcaacgtcgccgccagttgtttgcctacaatgagctctgatgtcaatggagaatatgtcatggataccaaatatgtcttaatgccagaggtgcctctttggtcaacgatagctgatgaagaacttatatatgcaaagaaagagatcactaatgcaccattgatcttagacgaccttgatctttatgcacccttgttccagaatgtgtccatttttaaaaggagttatgaacttatggagagacttcttaaggttttcatatatcatgatggagaaaaccctattttccattccccagagttgaaagggttttacacaacaaaactgcatggtaaattgtggaagtacactattaaagctctttgcaatgcagataagatttttcccttccagaaacatttcttaaatcaccaagaagacctctaa

SEQ ID NO: 1251 - DNA, 1260 bp, Zea mays
  Peptide Sequence Number=SeqID_43030
atggagaggaagcaagccgcctacagcaacctcgtaaggatcctcttcttccaccgtcgtggtctcctccattcccttgtcgatcacctatggtctcagctcaacggttgcattggggactgcaggatgagagtttttaagagagttcaggcaaactttttcctgcacattgcagtcactacagtgttaggacttgaagaaggaaaggattgcataattgttggaactttatataagcacatgaagttgaagccttcaattcttgatgaatatgccaaagagaggtctgcaattccccttgtcaaaccacataatttcatgcatcctgatgatcatctcattctggaagatgaaagcggaagagttacacttgcaggagccatacctccagcagcattcgtgactggggttgtagtggctctccatgggaaggaaacaagtgctggcaattttcttgtggaagatgttcttgaggctggtcttccaccccaaagtgcattgtctagcgcagaagaagacaagtatgtagtattcatatcagggctaagtgtaggaagtgacacattcaatcctctacagttccaacttcttattgaccatgtcacaggacatctgggtgacgagaatgagcaatccatagcatcaaatatagtacgcattgtggttgttgggaattcagtgcatatttcaccaaggtttgtcaatggtcagacggtaccatcaaaagatcaatcaaggatagcagaacctattaaggaactggatataatgcttacccagctcgtggcttcgttgcctgtagatatgatgccggggtgtcatgatccggcaaatttttctttgcctcagcagcctctgcacagatgccttttctctggggcatccacctacaacactttttcgtcttgttcaaatccccatcaattcgagcttgacagtgtccagtttcttggaacatctggtcagaacatagatgacctgtacaagtactctgatgctaaagacaagctggaattcatggaaagaacactgagatggcgccatcttgctcctactgctccaaatagcctaggctgttatccatacacagacaaggatcctttccttgttgaaagttgcccgcacgtctactttgttgggaatcaagataaatatgaaactcgactgttggaagggcaagaaaaacagaaagtgaggctaatctccatcccaaggttctcggagagtggagttgctgtaatgattttgctatgtatctag

SEQ ID NO: 1252 - DNA, 1347 bp, Zea mays
  Peptide Sequence Number=SeqID_43031
atggtcgcgtgctccaggggactcgcgtggccgccgttcgatctgaccacggcgaggggggcggcgtcctggccgcgccggcgtgccgcgatccggtgctgctgcgccggagcagacgcacagccgcagaggcgactctcgagggcggccgcggtcgcgcccgagcgcgccgaggagtggcgcatcgatgggaacaagccgtccgccgcggcaccgggacggcggcgcaccagcctcaccgccatgcccccgctccccttccctgcacctcgctctagaagacaggtcaagcaaccggacttctacccgcggtgcactccgagggggtcggctcctcaatcccgtgataccccgcccaagagagacactggtattgctagtgagaaggaatggggaatcaacttgctggacgaagccgtcaaggagtctggaataaatgaagatggaagcacttggtacagggagagtggagatgatattggcgagaacgggtaccgctgccgctgggcaagaatgggaggacagagccatgatggttccaccgaatggaaagagacttggtgggagaaaagtgactggactggatataaggaattaggtgcggagaaatctgggaggaatgctgaaggagattcttggtgggagaaatggaaagaagttctgtaccaagacgaatggagtcagaaattagaacaatctcacttgagaggcagtgacatagtttaccttgtcgaatacagcaatcttgcaagaatagagagaagtgctgagaaacaagcaaaatcaggcatagaaaatgctgggtggtacgagaaatggtgggagaaatatgatgccaaaggttggacagaaaaaggtgctcacaaatatggaagattgaatgagcagtcctggtgggagagatggggtgaacattatgatggccgtggatttgttttgaaatggacagataagtgggcagagacagacttaggcaccaaatggggggacaagtgggaggagaaattctttgcaggaattggttctcgacaaggggagacatggcatgtatgtcctggcggtgaacgttggtcaagaacctggggagaagaacactttggtaacggaaaagtccacaagtatggaaagagcacaaccggcgagaggtgggacttggtagtcgacgaggagacatactacgaggcggagccccattacggatgggccgatgtcgtcggagactcgacgcagctgctgtccatacagcccgtggagaggccacccggcgtgttcccggccatcgacttcagctccgcgccgccgccgaaggacgctccgccgggcatgcccccttctcctctggactga

SEQ ID NO: 1253 - DNA, 1938 bp, Zea mays
  Peptide Sequence Number=SeqID_43032
atgagagccgccgcggcctctgcaatccgcaggctactcccccgctacagcatcagcagcggcggcgggttgcaccggcactcccaatcgcagaatcagtccggctactgctttaatccacattgggattacactaatcgcctcgcgcgacctcgtgcgctgcttgatttctcgccatgccacccgcgctggtcgtcgccttcttcccctcgttccgtggcgtctccgcaattcttctgcagcctctcgggaacagaggaggaggaagcggtggtgctggacatggacgccggcacggtgcggtgcgcggccaaccacgcgccactgtcccccatcagcttcatcgagcgcgccgccgccgtctacggggcccgccccgcggtggtgtacggggaccggcgccacacgtgggcggagacgcggggacgctgcctccgcgtggcggccgcgctcgccacacgcttcggcatcgcgcgcggtgatgtggtcgctgtcctcagccccaacgtgccggcgatgtacgagctgcacttcgccgtgcccatggctggcgcggtgctctgcacattgaacacgaggcatgacgcggccatggtgtccgtcctgctgaagcactccggcgctaaggtgttcctcgtcgagtcgaacctcctcgacgtcgggagagccgcgatgaagcgcctcgccgagtccaactccgccgccgctcttccggtcctgctcaccatctcagacgacaccgactccgacgactacgaggatctcgtcaggaacggccccgcccggttcgacatccggtggccggcggacgagctggacccgatcgcgctcaactacacgtccggcacgacgtcgcggcccaagggcgtggtgtacagccaccgcggcgcgtacctcaacaccatcgcgacggtgctcgcgtacgacatcaccgccatgccgacgtacctgtggactgtgcccatgttccactgcaacggctggaacctgccgtggggcgtcgccatgcagggcggcaccaacgtgtgcctccgccacttcaccggcgaggtcatcttcgacagcatcacgcggcacggcgtgacgcacatgggcggcgcgcccacggtgctgaacatgatggccaacgcgcgtaccgcgaccgcggagcggaagccgctgccatggcccgtgcgcgtcatgacggggggcgcgccgccgccgccgccgcgcgtcctgttcgcggtggaggagctcggcttcgtggtgtaccagatctacggcctcacggagacgtacggcccggcgaccgtgtgcacgtggatgcccgagtgggacgcgctgccggcggaggagcgcgcgcggctcaaggcccgccaggggttccaccacgtcgcgatgcaggacgtggacgtcatgaacccgagcaccatggagagcgtgccgcacgacggccagacggtgggcgaggtgatgttccggggaaacaccgtgatgagcggctactacaaggacctcaaggcgaccaaggaatccatggccggcgggtggctgcacaccggggacctcgccgtgcggcatcccgacgggtacatccagatcaaggacagggccaaggacatcatcatctcgggcggcgagaacatcagctccatcgaggtggagtctgtgatcttcagccacccagccgtcctcgaggcggcggtcgtggcgaggccagaccaccactggggcgagacgccgtgcgcgttcgtcaagctcaaggacggcgccagcgccacggaagcggagatcataaacttttgccgggagaagctgccccactacatggcgcctaagacggtggtgttcgaggatttgcccaagacttcgacggggaagacgcagaagtttgttctccgtgacaaggctcgcgccatgggcagcctcacaaaggttgcctgtagcagcaaaatgtaa

SEQ ID NO: 1254 - DNA, 311 bp, Zea mays
  Peptide Sequence Number=SeqID_43033
atggccgactctggacaatcgccggcgatggcaggagatggaggtgtaattcgtccagacactgagggagtcgttgatggtaaattaatggttacaccacctcctgttctaatggggcctataatcgatgagataagcaatggggaggaaggagaacatcggattcgacctccgatgtccaatattagctctcgggagatggatacacctcaagtactacattcacatcaaacaaccattgatctgaatatatttccaacaatagagatgactttcaaggatattgatgatgcatataaattttataaaag

SEQ ID NO: 1255 - DNA, 192 bp, Zea mays
  Peptide Sequence Number=SeqID_43034
atgaacaatattgacaaagtgaccgataagagagggatagctctaggagaaatagagaaggacaagatcatggtcgctaaagcctacaacaagaaggtcaaggctaagtcattccagatagaagatctggtaggcgaagctcctggcacctggtccctacatgacggaggaacggagacaccacgtggctag

SEQ ID NO: 1256 - DNA, 150 bp, Zea mays
  Peptide Sequence Number=SeqID_43035
atggcagaaccacgggtaaggaaccatctgatagaatctgcatatcctaggcatcatgttgggctgctatttcatggggttggtgaacaggcagcccaggactcagggaaaataggagaaatgaatttagaaaatgaatttccaatataa

SEQ ID NO: 1257 - DNA, 613 bp, Zea mays
  Peptide Sequence Number=SeqID_43036
gcaggcaggcagcagcctgcgcgcatggctgcatcaggcgtgggggggaattgaagatggcagaacagcatgggccatggctgggccaaagcgtgcgcgcgctcggccagctgccaaccaacgccacaggccacagcgcgacgcctcaaccacggcaccacgcgcggtacccaatcgggctgccatggctcgcagaccaatggcgtcgagtacagcgcgtggactgtggagcgacgcttctgcctgtgcgcgaccggccggccgggccggcggaacggaacggaaccccgcggcgcgcgggagggcgaaccgagggagtgcgtgcgcgcccgtgcctgtgcccctgtcctgtcgtgctgccaccgaggtggttcgtgcgctgcttggaatggaagccaacaaagagatcggccgtgccgaggcagtggaaagtggggcggccgcatccgctacacatggagatggtgcgctgccgctcgagctcgacaggacgcatcggaatcctcgtttccacgtcaagatgttggaggaaaatacgcagacactagcgctgccgcgcaggatttgccccaccgacccatcattagcgctgccgcagacagctggggccccg

SEQ ID NO: 1258 - DNA, 105 bp, Zea mays
  Peptide Sequence Number=SeqID_43037
atggggcttgagagactctgcgtctctctgcctgaatatctcggcaagctggtgagtgtgccattgcatggcaagtattatgttggaacaagaatcatagcttga

SEQ ID NO: 1259 - DNA, 237 bp, Zea mays
  Peptide Sequence Number=SeqID_43038
atggctccagcccagacgcgttggcatcctggcatggatgcatggtcatggcatggggaccccttcggccttcagcactgcaaagtaggagtactggccatggagattctagacggagcaaaagctgagcttgctgcgtcgcagatgatcgggtaccctgcctccaccagcctatacaacagtcgcctgcctacttccttcgccatacgtacaccgggcgcactcacgattacctaa

SEQ ID NO: 1260 - DNA, 732 bp, Zea mays
  Peptide Sequence Number=SeqID_43039
atggatcccgcggcaggaggcgccggccagcagcgccagaacaaagcttcggcgggcaagaaggtaaagaagggcggtggcagcggcgggagatggccggcggtcaagcccaagaaggatctccagatcaatcgcctcaagggcacccacctcctcaccattccagacttcttcacttctgcggaggcgaaggctttcattgatatcgctgagtcgatgggcttcacgcaccagggcagtttggggccactaaagggggaggcttacagagacaacgaacggatatctgtgacggatccattgcttgctcaagccatttgggaatcaggaataaacaggatttttacagacatcagcgtctctggcaaagtagcaacaggattgaatccaaatatcaggttctacaggtacactgaaggtcagcgttttggtcggcatatcgatgagagtgtctccctcggggatggttctaaaacgtattatacgcttttaatatacctttctggcaaaggaagtgcaaaggattcatctgggcaagctcttgtcggaggggagactgtcttttatgatcaaagaggtggagttgtcgctgaggttgctccagtgcaaggtatggcactcctccacctacatggcgccaaatgtatgctgcatgaagctcgggctgtgaaaaagaatgccaaatcaacccgtctagggcataatggatctggggctgggaagtacttctag

SEQ ID NO: 1261 - DNA, 231 bp, Zea mays
  Peptide Sequence Number=SeqID_43040
atggctttcagaacagaagcacagcctaatcctctcgcgtacggtaaccattcgagcatcaccgcatggaggcccatgatgaagagagtgcctgctactgttgctgcttccgctgctgatcgtcatcacgagctacgaacagatgagaagactgcgctaggcctacgctacatgagattggttcggttacagcagcttgagcagttaacaggttacagtgaggttgtgtga

SEQ ID NO: 1262 - DNA, 1143 bp, Zea mays
  Peptide Sequence Number=SeqID_43041
atgaacgggggagaaggagaaggaggaggagcgggaagcggggcggcagccggcggggccggggccgggacaccgcgggtgccgacgtggagggagcgcgagaacaaccggcggcgggagcgccggcgccgcgcgatcgcgtccaagatcttcaccggcctgcgcgcccacggcaactacgctctccgcaggcactgcgacaacaacgacgtgctcaaggcgctgtgcgaggaggccggctggaccgtggagcccgacggcaccacctaccgcaaggcacgcggatgcaagcctccgggcagcagagatccatatacggctgcctttatccccggcggcatggtgtcctgcccggtgagtccgcgagcttacaacggcctcagctacccgtcgtcgccctcccacgtcggcggcagaggcagcagcttcttctacggcggtgcgggcagcagccgcggcgttgtcattggcggaggcgtaggcggactcccgtggctcaacaacctgtcccgctactccgacgacgcctcgtacgccgacgactactccttcagcgcgccggtcacgccgcagaacggctccccgccgcggcgcaagatggcgcgctgggcgtcgggcaacgccgccgccggctccaacgtgcagtcgccgtgggccgccagccctggccccagccgctacgcctccctgccagtaaccatgccgcatacccctgtccacggcgaggccgtggcggccgacccggtgagcctgctcacggggctgcagatatccgccgccgcggccaacaagccaccggcgtacagcatgttcgacttcgacgccgggagctactcgtcgaggcctgggcagagcagcgacggggcggcatgggcggcggcatcgtctcgtggcgccgccggcgacggtgacgcacaggtggccccgcacgggttctccttcggctggagcggcgggccggcgttcagcgcgtgggagggggagaaggcgagcgtggcgttcaacgcgtgggagggggagaaggcgagcggggcgttcagcgcgtgggagggggagaaggtgagcgacgagtacgtcgacgagggcgacctggagctcaccctggggaactcgagggccggcgccggcgctgaccgcgcttga

SEQ ID NO: 1263 - DNA, 1059 bp, Zea mays
  Peptide Sequence Number=SeqID_43042
atggcgcttcctgttgacgtggcgcccgagtccgagccctggggtcgggcggagcggagtttcgtcgtcttccgggtcttagcccgagtccgagccctggggtcgggcggagcggagttcgccgtcttccgggtcttagcccgagtccgagccctggggtcgggcggagcggagttcgccgtcttccgggtcttagcccgagtccgagccctggggtcgggcggagcggagttcgccgtcttccgggtcttagcccgagtccgagccctggggtcgggcggagcggagttcgccgtcttccgggtcttagcccgagtccgagccctggggtcgggcggggcggagttcgccgtggcggcgctgtccttctgtcagactggccagtggagcggtggagtgacggcggtcacttcggctctaccgggggcgcgtgtcaggatgaagctttatgctgatgggggttaccagctgagaattaggcgtcttgaggcctgcagcgctagcgagccctcgccttcccttccccattattcccaggattccccttgcgactgcaccacgccccacccaaacccacctaccgcctccgctcccctctccagcgagtcgggggcacggacgggaccagacgaccaggccatggggaagtacatgcgcaagggcaaggtgtccggggaggtcgccgtcatggaggtacccggcggcgcgctgctcggcgtccgcacccgctcccgcacgctcgcgctgcagcgcgcgcagaggccgctcgacaagggcgacgcggaggacgccgccgcggagtacctcgagctcaggagccggaggctcgagaagccgcacaaggagcatccgtcgccgcccgcgaccgcgaccaagaggggcgccgggaggaaggccgccgccgccgccgcggtgcagcacgtgctgatgcaggacgaggtcgaggtcgaggtctcgttcggggacaacgtgcttgacttggacaccatggaaaggtgcgattcttcggcctcctctgttctcgtccaagttgttccctttgcgagagagattgggtag

SEQ ID NO: 1264 - DNA, 975 bp, Zea mays
  Peptide Sequence Number=SeqID_43043
atgggcggcagaggaaggccgaggcaaaggcaatcaggtgtggggtcaacgtggcatccgtgggacccttcgcggattgcggagtggcattgggttggcagcacgcccctgcacacggtgacacgggccacggcgcggcgcggcgcggcacggggagcgagcgccgagcgagagcaagcaaccgctgtccgccgggccggccacggcgctgccccctgcttcgcgccttcgccggtgcgctcacgcctcacgcagttgtgttcctctctctctctctcccacgcgcgggctttctggaccggtggacggacggctgctctgctccttcaagcccccggccgcggtcgtgaagctgacgcagaggaggtgcatgcatcgacctacggtatcctagtctgggatcagaaaagaacacagcaacaacaaagaagaaaggcgcgagcgatggacggtgacgccggaccagagcaacacgggcactgccacaacgaagccaaggtcaagtctcgagttgcatcggtcatgcttcatccaaatgcacattcattcaccccagtggactcgctggaggtcagcgtccacgaccgccacgtgcttccccgtcacgacatcaagctggttatctgctctctctgcaacaaagaacaggatgtgcagcaagactgtgcgaactgcggagcatgtctcggcaaatacttctgcgcgaaatgcaacttcttcgacgacgatgactggtggcgcagagaatttctatcactgtggcagatgtggttttcatgcccggtgtgcctgaggtctgcctgcaacatgtccgacatctggcaaaagctggatcagcaggtatggatcctttgcaacgactgtggcgtgacgtccaacgtgcagttccacatcttggcgcacaagtgccctggatgcagctcttacaacacccggcagacgaggggcgatccagccgcatgctctagagtttga

SEQ ID NO: 1265 - DNA, 408 bp, Zea mays
  Peptide Sequence Number=SeqID_43044
atggctggaggaagtctccgcgaaactggaggatgccattctcccccagacgccaggggaagaaaagggagcagtgggcgacgcttcgccttcgccgtaataactgcgataaaaaagcagggaccgggaaagggggataccccgaaaaggatccttccccgtgaaggaaccaggctccgagcctccctactgatcagaggttcgaaggctggcccccgaagggttcgacagccgcctcagatcgtgtgggccctacacccactactggtcagaggttcgaaggccgaccccccaaagggttccacggccgcctcaggctactcgggctccgcgtccattactgatcaggggttcgaaggctggcccccgaagggttcacagtcgcctcagacgccgagcgagggatga

SEQ ID NO: 1266 - DNA, 378 bp, Zea mays
  Peptide Sequence Number=SeqID_43045
atggcccggggtgagggcgagctgaccggtggggcccaggggcaggggtgcgcgctcgaacaagtatccggggaatcgggctgttggatcaggagcgagcggttgagatcgagcgctagggggttaacggtggcgaccgacgttgtttcatccgtgacggcgaagtcgctggagccaaggcaggcgcggtccttggggactctgaggtcaccggagctggacaggaccggtgagggggtgcccgacgaactcgattgcagggttccggctctaagaacgggactgggggcgagggaatggcgggaagggcgctccgggtgggttggggctactccgaagactaatctcggcacggggagggggaatcgagtgcgctga

SEQ ID NO: 1267 - DNA, 2208 bp, Zea mays
  Peptide Sequence Number=SeqID_43046
atggatcgccgcgtgagccttgcgacccggagcgtgcgcgtgctgatccccgaccagctgccgacgctgttcgagccgcagaaggcggtgatgaccccgcacgtccgcgcgagcgtcgtggacgacgcggcgccgccggagcgccggctcaccatgctggcactccagctcgcggtgctcgagaaggcggccagccggctcggcacgttgggcttcatctgggccaccgtcgtgctgctcggaggcttcgccatcacgctgggccagatcgacttctggtgcatcaccacccttctgctggtcgagggcgcccggatcctgggccgcagccacgagctggagtggcagcacgagaccacgggccgcgcgcccgtgtcgtgggccgtcggccgcgtcttccactggctgcagctgctgtccgcgtcctcctgcgccgcgctctcgctcgtccgcctcgtccaccagcgctacggcggcagcgaggaggcccacgtcaaccgccactccgcgctcgacatattctacggcctcgcgctcgccgaggcgctgctgttcctcgtcgagaaggcgctgtggcagtggagggtgggccaccaccgcctgctggagcgcgtcgccgccgactgccacctcaacaccgcctgcggcgccgtcgccgtccgccgcttcttctacgactcctactccaggtgcctcaacggcagcatcttcgaaggcctgcacatggacctcgtgtcctacgccgacgacctgctcacggcgggctcgcacgacgagcagcgcctcggcgccagcatcctcgcggcgctcgtcgagtccgaccgcttcgccgacgccacgctccgcaagatcggcacgtccgggcccaccatagagcgcctcatcgagatgctcagctggaagaacgcctcggagaaggacgtgcgccgctccgccgcggtcgtcgtgttcatgctcaccggaagaaagctcaacgcgctccgcgtcactggcattcccggcgccatggagtccgtggcttccttgctctacgccgacctcgacgagctcaacctcctcggtctgtccatcctcaacaagctggcgcgcgaccacgacaactgcgacaagatcgggaggaccaggggtcttctcgacaggatcatctcctacgcgggcatagtggcaaacgggccggcgacggggccgccgacagacatgcgcctcaaggcggtcaagcagtcgctccgcgttgtgaagaggctagcgagcacgacggggaccaccggaaagctgcttcggagggagctctctgacattgtgttcacggtgagcaacatcagggaggtgctgcagctgcagcagcagcacgacgagaaggacgtgtccgagctgcaccgcctggcgatcgagatactgaccaacctcgccatggacgaggaagcgagggagatgatcggcggcacggggggtgtggtcagcacgctggtgtcgatgttcttgccggaagagcaggaggcagagccagcgcccgaccggcacaaggacgcggtccgggtggaggccggcgaggctcttgcgatgctggcgctggacagccggaggaactgcggcgcgatcatcatggcgttcggcggaggtgtggaccggctcgtcgagacgctgagtgatcccgtcgtcgtcatcagcgccgcaaggatcctgcgcaacctgtgcacctacgctggagaagagtatcatcttacactgagaggagttaccgccggcgccaccaaggtattgcgcaatatcatggtggagaagacgaagctcctgaacatctccatcggcctcgcggcgcagatgctccggttcatgcagcctgggaagctccgcgcgagcctcgccacagcgggcgtcacggacgcggcgctggcgaggacgctagtgctggtcctgcgggagtacagtcacccgtccctggtgctgccgcgcatccggctgcacacgctggagctcgccatcgcgttgatgcggtcggacgcgcgcttcgtggctctcttcgtggagctcgggatggaggccgagcagaggcgcgtcgcggaaaccacctccgggctcgagtgcttcaatgtgttctcgggcagcgtcgggctcagccgccgcgtcgtcagcgtcggctcgctcgtcgaatccgccatggagctgatgaggcagcaggcctgcacatcgcagtcacagaaacgctga

SEQ ID NO: 1268 - DNA, 396 bp, Zea mays
  Peptide Sequence Number=SeqID_43047
atggcgacgcatgaggcgcgaggttcgagcgagcggcacggaaggcgcgagatacgcgcagcgatgatcgcgcgtgacatcctccgatccagcgcagtttgggcggctcgagtgacgacctacatttgtgctcgtgtcatcgacgacatcctccggccactacctccttcatttcgtgttttcttttcaattattgtgttttatgcctatcacatacgtggggagggtggcgcacccgacaacctcattgagtcgggcctcctggagttcattgcctcgacagattggtcacacgcgaggctcgacatcaagcgccactgcggcgagcacctcgacccacatttaatgaacccctttgttagtgtgtccttctgtggcgtcaagccagagttctga

SEQ ID NO: 1269 - DNA, 729 bp, Zea mays
  Peptide Sequence Number=SeqID_43048
atgaaatatgttgatcatcctccctccaatccaaagaaaattacaatcaaatcaagtcaggaagtattcactgttgaaatccctcgccctaggaataatgccaacaagccgaggcagtcgattgctccagatgttgatacaccaaaacaaatgaagcaactttatgttaggcgtaatacaaagcggtctgcaggacgcgggaaaaacaaactgacaatcgacatgtcagatttgatgagaaaccaatgtctcctcagcgacaatcgccacatatattatctagaccatcttcatcacgaggcaactccagagaacaaatatgacacttcacgtattaaatactttgataaagagacaattgatgcactgaccaaggctgacaggaggaagcctcgtcatgctggcgaaacgtatggtcattgtcatttttgtagcaggacagacacatgctatgttgctgctcctaaacagccagcaaatgatacgttccatattcatgttcctcgcatgaaagatttgatctctagcaaggttacttgccttccaccgccataccgttcaagttttgactctttgttgaaagctcatgacaaagaggttgacaagtattgtgcaaggcttgaacattctcaccgcaaattagtatcaaatcagctccagctagctgagatatttgcagacatgatcgatgatgtcattcgtcttgggtcacaggttcaagaatcctag

SEQ ID NO: 1270 - DNA, 408 bp, Zea mays
  Peptide Sequence Number=SeqID_43049
atggcaaccgaacgaggaatccacctctccaaaagggaaaatgagaccgaggacatggatgaagaggagattcgcaagttctacacccatctcaacaaagtagacaagatgcttttgatgaagctgttgagaacgaacaaggaacaaggcgtgacgcttctcaggctagaagaaactctcatcaagaccaatgacggtttggataagagcaaaaagaggatcagaaagagcggatgcttcagatgcaaggagttgggccatttcatagcttcatgtcctcacatggagaacaagatccttgcatcaccaaggatgaccttcaccaacaataagtgtcatgttaggctaagcgacgcttctgcaacaaacatggtgagcaaggtcatctcaagatggtttgtattgtga

SEQ ID NO: 1271 - DNA, 439 bp, Zea mays
  Peptide Sequence Number=SeqID_43050
atattcatgtgttgattgcttatatggtgctttacttggtatccttatagtgtatagtgtgtcatacgcatcacggtttgattctttacactatgcaccccacagacaattggacaagccaaggaaggaggcaagacaaactttgaggtaccgagtgcacgggagaaggtcaaggaggctgaggtacctaaagccaggggtgaagaagaagacttgcaaagtcaagagtctagcacttgaagtgataccaggggaagcaaacaaatccaagaagaacaaggacaaggagaagaagatgaagaatatttcatccactctagatcaaagaacaactgcaagaactccaagaaggaggagtgtcaaagcaagaactgcaagaactctaggaggtggttatctcctcctccaacaatggcacctctcgatcaagctcaagtag

SEQ ID NO: 1272 - DNA, 426 bp, Zea mays
  Peptide Sequence Number=SeqID_43051
atgaacatagtaatcccaaatatggatgacacaataccaattagaggcagatcaaggtgtcgtggaactaagttggtgagttactaccatcattttcataatggattttttattgttgcctttgatcaagttcttgttgagttcaacaatcgcttccctgaaagatcaactcagttacttggatgtattgcttgccttgatccaagggattcttttgccaactttgatttagagaagttaattgagctatcaaagatttatgatgctgattttagcgattatgaacgtacatgccttatagaccaacttctcttattcattgttgagcgggatatgtttgtagatattcaagatgaaaagattttgaagcattttcaaggcttaagaactcagaagataaatttacctcgcagcatcaactcatga

SEQ ID NO: 1273 - DNA, 213 bp, Zea mays
  Peptide Sequence Number=SeqID_43052
atggacaaatttctcgtcaagaaccagaagaaagatgcttctaattctaaaacaattggaacaaatgagggccgtgtagaacagaagagaccacgtattgagctagatatgaatgatatagttgcagatcctggccttagaaaattaattgatgagtttccccatgaaattagagatgatgctaaaagagcttatttacaaatgggctcatga

SEQ ID NO: 1274 - DNA, 609 bp, Zea mays
  Peptide Sequence Number=SeqID_43053
atggcgtcgttcaagtgcatgtgcgtcttcttagtctcgcttatgctcgccctcatcgtcaataacgcccaggaagagcggacgctcccgccgttcccctgcatcccaggccagccacgacccccgtggctcccaccctgcccgccagcgccagctgagtgctacacgtcggtgtcggggctgatgccgtgcgcggacttcctcacccacatcgggctgccaccggcaccacccacgaccgcctgctgcgacggtctcaggtcgctcgtcaccaacgcgcccatctgcatgtgccacgtcgtcaatggcgacatcaacaagctcctaccggcgcccatgatacccgtgcgcatggtggcgctcccccgcttgaggccatgtgccaccgatgaaccctccatctccaccaccgactccgtcaaaatcatcaccgccaaaatcaccaccgtcgactccacccgcggcatcaccaccagaaccaccagcagcatcgccaccggaaccaccatcgacgccaccatcggaatcaccgtcgactccaccaccgacaccaacggcgacgccaccggaatcaccaccctcgactccaccgccagaatcaccatctga

SEQ ID NO: 1275 - DNA, 1089 bp, Zea mays
  Peptide Sequence Number=SeqID_43054
atgcattttcatcgccgaaggtcaggagctcttacaagagatacactcggggcttgcggccatcacgcagcacctcgaacccttgttgggaacgccttccaacaaggtttctactggccgacggcggtggccgacgccactagaattgtccgcacctgtgaagggtgtcagttctacgcgaggcagacccacctgcccgctcaggctctgcagaccatacccatcacctggccgtttgctgtgtggggtctggacctagttggccccttgcagaaggcacccgggggctacacgcacctgctggtcgccatcgacaaattctccaagtggatcgaggtccgacccctaaacagcatcaggtccgaacaggcggtggctttcttcaccaacatcatccatcgctttggggtcccgaactccatcatcaccgacaacggcacccagttcaccggcagaaagttcttggacttctgcgaagatcaccacatccgggtggactgggccgccgtggcccaccccatgacaaatgggcaggtagaatgcgccaacggcatgattctgcaaggactcaagcctcggatctacaacgacctcaacaagttcggcaagcggtggatgaaggaactcccctcggtggtctggagtctgaggacaacgccgaaccgagccgcgggcttcacaccgttctttctagtctatggggccgagggcatcttgcccacagacttagaatatggttccccgaggatgagggcctacgctgaccaaagcaatcgagccaatcgagaagactcactggaccagctggaagaggctcgggacatggccttactacactcggcgcggtaccagcagtccctgcgacgctaccacgcccgaggggttcggtcccgagacctccaggtgggcgacctagtgcttcggctgcgacaagacgcccgagggcagcacaaactcacacatccctgggaaggaccgttcgtcatcgccaaagttctgaagcccggaacatacaagctgtccaacagtcaaggcgaggtctaccgcaacgcttggaacatccaacagctacgtcgcttctacccttga

SEQ ID NO: 1276 - DNA, 940 bp, Zea mays
  Peptide Sequence Number=SeqID_43055
atgacgcatgaaactgacgatttaaagggtatatatccttactactccttaagagagttttgtaggcgtccacacatacggttctgcctccatccagatctcgcgctctccctaagcaccacccagcaccaggcgccatgcccgcccgccatctccgctgcgccaaatcgaggaatccgcctccgctatggaaggagatcgcctctgctgcgccccaattctcggttggcatcatcgtccgcgtcctggctctcggtccttcgcccacgttgtccatggaaggagatcgagaatcacggtcctcggccaggctctaaatggatggagatcgaggaatccgcctccgctgcgccctggcaccctctacgaccgccgcctctccctcacctgcccgcccgcgagacaatcgccatcgtccccctgccccgcgctgctcgcgatgaccccctcccccgcgattctagggtcttcgcgacccatggcgtgtcgctctgcgccgacctcctcctccatctggtaagcgaccacctcctctgtctggatttgagtgagaaaataataaacttgtattggtcggtgtattgcgccgaggggattgggaccagcagcggcagccaggagtggaaggccaacctgagctgggtgctcgctgccctcgccccccgccggagcagcagcgggtgcttcatgctccctgatactgacgaattcaggacagacaacaatagcggtcttggcatcgaagaatatcgtatccccaggctttcttatggaaccgatgatcacagtctcagagatgagtttgccaaatatggagaagtcgttgaaggtatcaagctcattgctgcacttggtggtctgctcaagaatgggctttcttatggaactgatgatcacagtctcagagtcgagtttgccaaatatggagaagtcgttgaag

SEQ ID NO: 1277 - DNA, 159 bp, Zea mays
  Peptide Sequence Number=SeqID_43056
atggcagcgccgtttgaggctgccatccggggccccgctgaaccatcccttttcactgttctgtttgcctctcggatcgcactcgcacagggcatagtagccgagggccgaggcgacgggctaccacgtcaaaaggcgacgcgccgacggataaggtga

SEQ ID NO: 1278 - DNA, 1344 bp, Zea mays
  Peptide Sequence Number=SeqID_43057
atgctaatcatttttccgcaacatggcagtattttagagtcaagtcatggaggctcatatcaaaagcatgatggcacaaccacgtgggataaagagtatcagttgtttcaaccatctggagctatcaagtttcctctacaagtcacgaccacagatgcttggctagaaaagataaaaaggctggaactgctacttacggtgaaggaatctgctatggatgttccttcaaacctagaagccagaaggcgtcttacattttttaccaactccttatttatggatatgcctgatgcacccaaagtccgaaacatgctctcgttttccgcattgaccccttattacaatgaaccagttcttttctctataaaagaacttgaggaagaaaatgaagatggagtttccaccctattctacctgcaaaaaatttatccagatgaatggaaaaactttaaggaaagggttggattggaggaagaacttaaagagagcgaagaaagcgaagaactaaaggaggaacttcgtctatgggcctcatacagaggccaaacactagctcgaacagatgttgagactggatcgaaactcagtgaatacactcgacgacaaccccttggtgaagatgtcagcgaactgcgaccacgtggtcaggtcgctgagaacgcgaacatcactggcggcgatacgctcgcggacgaagtgaaggtcgatctccacgtgcttcgtgcgctaatgttgcacaggattgggaggtgtggagcagggcttatagtcagacatggcagcaggctccaggatgtcgagtgcgtactggcgctggtggaggaagagaccttgaggccgtcgtttggcggtgatctcgaggaagtggtggagaagtctcaagtccttcatcgcgaactcgcgctgaggagcgacaatcgtgcgctgaagaagggcatcactagacgctgtgaccacgatgtcatcgatatgaacaaggtcgtgttcgactttgcctcgatgaaatcgagggaaggccaagtagaaggcgaagcgactgtacgaagccctcagcgcctgcttgaggttgtacagagagcgattcagccgacagaccagattcgagcgagcagagtcgatgaaaccggtgggctagctgtagtagaccgtctctgtcagagtgctgtggaggaagacattcttgacgtcctactgatggaccgcccagtcccaggagagggggagagagtggacggcctgaacgttggcgaacttgacgatggggctgaaggtcttaacgtagtccactccgggacgccgagtgaagccttgaaggacccaacaggccttgtagcgctcgagtga

SEQ ID NO: 1279 - DNA, 3378 bp, Zea mays
  Peptide Sequence Number=SeqID_43058
atgaagtacttggggctgcctctttctctcaagagattgaccaaggcgcagctgcagccccttatggataagctggctgatctcttgcccgcttggaaggttgatttgatgacccgtgctgaaacattgttaaatcatgtttttgaggaccttcggaagccgaaggtccccaacagtggtcttggcatttctgaccttcaatgtttgaattgggccttgcgagttaggtggctctggctgaacaagacagactcctccaagccttgggctgatcttcctttatggctcatggggcagagactggaggatttggcttcccatgttcacgctcttgttccatttaggatcgctaataagaggacggtggtggaggcctttgatgacatgtcttgggtcagagatctgagaagttcagtcacctgggagatcatttcagattttctgaccttgtgggctgctatttctgatgtggtgcttcatgcaggagtccctgataaacatgtttggaggttttctagctcttgtcagtattcggttaagtcggcatatgagctgttgtttagtggctcaacttcttttggagcctatgagagaatttggaagacctgggttccggccaagtgtggcttcttatggctggtcatgcacaataggtgctggacagcagaccgtttggccaaaaggggcctcccgcaccctgcttttttgcccatccaccacctcttagtatcatgcgtcttttcaagacaattctggttcttgttgctgcaaaagttggggctgccgaccctctctcctggcaatgatgaatctaattttgatgagtggtggagcaaagcggctgggatggtgcatggtgattttaaagctggttccaattccttaatggtgttaggtgcttggtgtatttggcgccaccgtaatgactgtgtgttcaacggtgtgcggcctagtatctccaaggccctcattctggctgaagatgattttagattgtgtctgtatgaagttcatctcggccacgtcgtcgccttcggtggttgctttaatcttttgggtcctagtttgcgtgtggaggtggaggcttgcaccgtgaaatcaaagctgctacgtcaggggatgtggcttggtaacgatgacgtggagcgaccccccttcttcgtgggcttgtttgcttcgaagatgaggcatttggcggaggcggggcggtggatcaatgttttggaagtctcgctggtgaagaatcggagctgtctcgagtggggtttctcgtggcttggcaacgacggcgcgccacagtcttccttctcttctgccgttagaggcatgatgtactacaagaaagctttgaatcttgaagcatttctagacatggccaaacgtgaagatctcatggaaggatacaaagcagccgagtcagtaaatgatgaacaatggaagatacaccagaggtccttatttgctcaatgtgaagcagtggctgatatgaaattcacctatgttgtttcatgccagcagtatggaaatgataagcgtgctgcacttgctaatgcccaagacatattgcagctaatgaggaactacccttctctccgtgtagcatatattgatgaggtggaagatagagtaggagacaagaaaatggagacagcatattattctactttggttaaggttgctctaactaaggattctgaatctgcagaccccactcaaaatcttgatcaggacaactatttggaagaatcccttaaaatgagaaacctgctccaagagttccttacggagcatggagatgctttcatgctacttcacaaccgtggggttttatttcagtacactgtttatgtatttctgtatggacgcctttatcttgctctcagtggacttgaagaggggctatcgcagggaagattgattcataatcatccccttcaaattgctcttgcctcacaatctcttgttcaacttggttttctgatggctcttccaatgatgatggaaattggtcttgaaagaggatttggtcaggcactaagtgatctaatcatgatgaacttgcaattggctactgtctttttcacattttcccttggcactaagactcactactatggaagaatgttgcttcatggaggtgctcagtacagaggtactggcaggggatttgtcgtctttcatgctaagtttgcagagaattatagactctattctcgcagccactttgttaaagggattgagctgatgattctgctcattgtataccaactatttggtcaatcttatcgctcaacaattgcctatatttttattaccttctctatgtggcttctggtattgacatggctatttgcaccctttctgttcaacccctcgggatttgagtgggcaaaaattgttgatgattggtctgattggaacaagtggatcagcaatcgtggtgggattggtgtgtcaccagacaagagctgggaatcttggtgggaagtggagcaggatcatctaaaatattcaggaacaataggacgctttgttgagataatcttggctatacgttttttcatataccagtatggccttgtttaccacttacatgtcacacataacaaaagcatcttggtatatttaatttcttggctcgtaattgtggcggttctgctcgttatgaagactgtgtcggtgggaaggcggacattcagtgcagatttccagctattcttccgtctgatcaagtttttgatatttgttgctttcattgctattttgattgtcttgatagtattacttcatatgacctttcgcgatatatttgtgtgctttctagcattcttgcccacaggatgggggatacttctgattgcacaagcttgcaagcctcttgctcgacatgtaggattatggggatctgttcgtgcccttgcacgggcctatgagataattatggggggagacctctctgtcatcgagtactatcgcaaaatgaaggacatgtctgactctctccgagatcttggcaagcatgtctccgatcgcatgcttatcctcaacctcctgtgtggtctgagttggtgttatgaccatctgaaggccttcatcaagtgctccatgccctttccgtacttccatgacttccgcaacaagctacttcttaaggagctcaccttagacactaagtccagcacgtctacctcgactctctatggcacgtcctccaccaaccaaccccctcgccctctatcgctaagggggctccttcatgccctcatgcctccactcctcctaaagcttctcagtcgtctccaagctcgaaaggtggtcgtcgaccccataagggcggccacggaggtgatgtcactccctatggtggacctcttgtga

SEQ ID NO: 1280 - DNA, 3171 bp, Zea mays
  Peptide Sequence Number=SeqID_43059
gaggtggcagaaggagtgaaggagaagggaacagcagaagaaccgagcatgacaagtgctactccaaggcttggtagcactccacacctcttcttccccttctccttctccttggcattcctgtgctgcattgccgtgtgcaatgccgccggcgatgaggccgcggcgttgcttgccgtcaaggcgtcgctcgtcgaccccttgggtaagctcgggggctggaattcggcgtcggcctcgtcacgttgtagctgggatggcgtgcgctgcaatgcccggggcgtggtcaccggcctcaacctcgccggcatgaacctgagcggcaccatccccgacgacatcctcggcctcaccgggctcacctcgatcatcctgcagagcaatgcgttcgagcacgagctcccgctggtgctcgtgtccattccgacgctccaggagctggatgtcagcgacaacaacttcgccggccacttccccgctggcctcggcgcactcgcctcgctggcacacctcaacgcgtcgggcaacaacttcgccggcccgctccccgccgacatcggcaatgccaccgcgctcgagacgctcgacttcaggggcggctacttctccggcacgatcccgaagtcctacgggaagctcaagaagctcaggttcttgggcctctccggcaacaacctcggcggcgcgatcccggccgaactgttcgagatgtccgcattggagcagctcatcattggctctaatgagttcacaggcacgatcccggccgcgattggcaacctcgccaacctccagtatctcgacctggcgatcggcaaactggaaggccccatcccgccggaattcggccggttgtcgtacctcaacaccgtctacctatacaagaacaacattggcggcccgatacccaaggagatcggcaacctcacctccctggtcatgctggacatctccgacaacacgctcaccggcacgattccggtggagctggggcagctcgccaacctgcagctgctcaacctcatgtgcaacaggctcaagggaggtatcccggcggcaatcggcgacctccccaagctggaggtgttggagctgtggaacaactccctcaccggcccgttgccgccgtcgctcggcagcacgcagccgctgcagtggctcgacgtgtcgacgaacgcattgtctggacctgtgccggccggcctctgcgacagcggcaacctgacgaagctgattctgttcaacaatgtcttcacgggcccgattccggcgggcctgaccacgtgcgcgtcgcttgtccgcgtgcgcgctcacaacaaccggctcaacggcacggtgcccgcggggctcggcgggctcccgcggctgcagcgtctcgagctcgccggcaacgagctgtccggagagatcccggacgacctggcgctctcgacgtcgctctccttcatcgacttctcgcacaaccagctgcggtccgcgctgccgtcaaacatcctgtccatccggacgctgcaaacgttcgcggcggccgacaacgagctgaccggcggtgtaccggacgagattggcgagtgtccatcgctgtctgccctcgacttatccagcaaccggctgtccggtgcgatcccggccagcctcgcgtcgtgcgagaggctcgtctcgctaaacctccggagtaatcggttcaccggacagatccctggtgcgatcgccatgatgtccacactgtctgtgctcgacctctccagcaacttcttctccggtgtgataccgagcaacttcggcggctcaccggcgctcgaaatgctcaaccttgcgtacaacaaccttactggtcccgtgccaacaactggtctgctgaggacgattaaccccgacgaccttgctggcaatccgggcctgtgtggtggcgtactgccgccgtgcggggctgctagctctcttcgggcctcctcgtctgagacgtctggcctccggcgctcacacatgaagcacatcgccgctgggtgggcgatcggcatctcggtcttgattgcgtcatgcggcatcgtcttccttggcaagcaggtgtaccagcggtggtacgccaatggagtatgctgcgacgaggcggtggaggaaggcgggagcggcgcgtggccgtggcgcctcacgaccttccagcggctgagtttcaccagcgccgaggttctcgcgtgcatcaaggaggacaacatcgtggggatgggcggcacgggtgtggtctaccgcgccgacatgccacgccaccacgccgttgtcgccgtcaagaagctgtggcgcgcggccgggtgcctcgaggaggtcgccacggtcgatgagcggcaggacgtggaggcgggcggcgagttcgccgccgaggtgaagctcctcggccggctccgccaccgcaacgtcgtgcgcatgctaggctacgtgagcaacaacctggatacgatggtgctgtacgagtacatggtgaacggcagcctgtgggaggcgctgcacgggcgggggaagggcaagatgctgttggactgggtgtcgcggtataacgtcgcggcgggcgtcgcggccgggctcgcgtacctgcaccacgactgccggccgccggtcatccaccgcgacgtcaagtccagcaacgtgctcctcgacaccaacatggacgccaagatcgccgactttggcctcgcccgcgtcatggcccgcgcgcacgagaccgtgtccgtgttcgccggctcctacggctacatcgcgccagagtatggatccacgctgaaagtggacctgaagggcgacatctacagctttggagtggttctgatggagctcctcacggggcggaggccggtggagccggattacagcgaaggccaggacatcgtcgggtggatcagggagcggctgcgtagcaacagcggcgtggacgagctgctcgacgccagcgtcggcggtcgcgtcgaccacgtccgggaggagatgctcctggttctgcggatcgcggtactgtgcacggccaaatccccgaaagaccggcccacgatgcgggacgtggtgaccatgctcggtgaggccaagccgcgccgcaagagcagcagcgccacggtgcccgccaccatcgtggacaaggacaagccggtgttcacgacgtcgccggactccagttacctatag

SEQ ID NO: 1281 - DNA, 657 bp, Zea mays
  Peptide Sequence Number=SeqID_43060
atgcaatccgccgcggcggccgcgccctcctcccttccgctcagcgtcttccccaaggattcccgcccgctcccgtgcctcctcctcacttccctgctgctgctcctgaccctccatttcctctcctcctcccccaccccctcgccgcctccaccgcagccccgcctcgcgccgctcccgtccacagcctccgcgggcccggccccgtcagcgctcgcgttcctcctcacgggatccgcgggcgacgcagaccgcctccagcggctgcttctcgccacctaccacccccgcaacgtctacctcctcctgctcgaccgcgccgcctccgcggccgaccgcgcgcggcttgctcgcagcgcgcgggctgcccccggccgcgacaacgtccatgtcgtcggggaccccgggttcgccaacccgcgcggtgcatccgccctcgccgccaccctgcacggggccgcgctgctgctgagggtcgaccagggatgggactggttcgtgcacctcgacgccgatgagtacccgctcgtgacccccgatgggggaaaaatcacctcatctataaaagcatactcatatctcctgcatgttttttcatacctacctaaggatctcaacttcattcagcacactagctatattggttggaaggagtaa

SEQ ID NO: 1282 - DNA, 258 bp, Zea mays
  Peptide Sequence Number=SeqID_43061
atggcatacgctgccaattcgttattgactcaggaggacaacgacgacgacaagaagtctgtcctcgccgccaacgacgtccacgacgccatgcttctccatgagagagacaaccgctgtcctgaacctacatgcctaggatgttgcagttcagaacattcgaagtctagtccctgtcgtcctcgacctagccgtcaacaattacacccgatgtacttgatcttcactaggcatgacattgcctatgcagtacaatag

SEQ ID NO: 1283 - DNA, 537 bp, Zea mays
  Peptide Sequence Number=SeqID_43062
atggctgggccaaagcgtgcgcgcgctcggccagctgccaaccaacgccacaggccacagcgcgacgcctcaaccacggcaccacgcgcggtacccaatcgggctgccatggctcgcagaccaatggcgtcgagtacagcgcgtggactgtggagcgacgcttctgcctgtgcgcgaccggccggccgggccggcggaacggaacggaaccccgcggcgcgcgggagggcgaaccgagggagtgcgtgcgcgcccgtgcctgtgcccctgtcctgtcgtgctgccaccgaggtggttcgtgcgctgcttggaatggaagccaacaaagagatcggccgtgccgaggcagtggaaagtggggcggccgcatccgctacacatggagatggtgcgctgccgctcgagctcgacaggacgcatcggaatcctcgtttccacgtcaagatgttggaggaaaatacgcagacactagcgctgccgcgcaggatttgccccaccgacccatcattagcgctgccgcagacagctggggccccg

SEQ ID NO: 1284 - DNA, 834 bp, Zea mays
  Peptide Sequence Number=SeqID_43063
atgacgtcctgcgggtgtctgatgctcgagaaggtggagggcgacgcgtcggcgaagacgagggtgaaggccgcgccgggcgccggtgccggcgcctggtgcggctcgtgcgctggggactggcggggccggtcagaggccatcttccccatctacgtgatggggagctcgcgggagagcaccgtggcggcggcgcgcggcatagtcgactcccccgaggaccccatatgggttgccgtcaaggcggaggccaagtctgaggcagaaaaggaacctattttgagtagcttcttgtatgccagtgtgctgtctcatgattgcctagagcgtgcattgagcttcgtccttgcaaataggcttgaagatccaacattgcttgctactcagctaatcgatatttttaacgatgtcatgctgaataacaaagatatatgccgctccattcgccttgatgctcaggctttcaaagatagagatccagcttgtgcccaatatagttgggcactgttatacttaaagggctaccaatcgttgcaatcatacaggatagccaatatattatggaaccagggacgcaaagttttggcattggcactgcaaagccgtattagtgaggtctttgctgtggatatacatccagctgccaaaattggcgagggaatattgttggatcatggaacaggtctagtcattggtgaaactgctgtagttggaaactgggtttcattaatgcagggggcaaacccagtgcttgaggctcccacatgggtggggtttggggaagggataaaccgagacaagcttttccccgcaaatgcggagaggctactttga

SEQ ID NO: 1285 - DNA, 120 bp, Zea mays
  Peptide Sequence Number=SeqID_43064
atggacgcctcttcgatctgctcctccgccatgctccgcgtccggcgatggcaacgggtgagggacgctttagaggaccttgttggaggcgtagaggacctgacagtccctcacatttag

SEQ ID NO: 1286 - DNA, 267 bp, Zea mays
  Peptide Sequence Number=SeqID_43065
atgcggctgcgaattggtgcccaccttttcgtaaccctttttcctgttagggttcgggactatgttccgacggtgtttgacaacttcagtgctaacgttgtggttgatggtaacactgtcaacctcggcctctgggacactgcaggtcaagaggattacaacagactgagaccactgagctatcgtggagctgatgtttttcttctggctttctcactgatcagtaaagccagctatgagaatgtttcgaagaaggcaagacactga

SEQ ID NO: 1287 - DNA, 1524 bp, Zea mays
  Peptide Sequence Number=SeqID_43066
atggcggcgagcgcactgctgacggggtcgccgtggctgcgcatgcgcctcctaccggacgcgcccgcgcgccccttccgccacctccacctccgccggagcttctccgtccgcgcctccggcgccgacggcagccccgcccccgtccgcgtccgcttcgcgccgtcgcccaccggcaacctccacgtcggcggcgcccgcaccgcgctcttcaactacctcttcgcgcgctccaaggggggccgcttcgtgctccgcgtcgaggacaccgacctcgagcgctccaccaggaagtccgaggaggccgtcctcgccgacctcgcctggctcggtctagactgggacgaaggtcccgatgtcggtggggattttgggccttatcgccagtcagagcggaactcactgtacaaacagtatgctgagaagcttttggactctggtgcggtttaccgctgcttttgctccagcgaggaactcgagcaaatgaaggaagtcgcaaagcagagacaacttcctcctgtgtatatggggaagtgggcaagtgcttcagatgcagaagtacaacaggagttagagaaagggacaccttacacttaccgcttccgtgtgccaaaggaagggtctttgaaaattagtgacttaattcgtggtgaggctcttggattcgcaatgccttcatttgctcatgtttcgcttattctggctcctgacaggagtaaactgtctaaacggcatggagctacttctgtcgggcagtataaaaatatgggctatctacctcaggcaatggtcaattatttagcactactgggctggggtgatggcactgagaatgagttcttcactattgatgacctagtccagaaattcactataaaccgtgtcaataaaagtggagcagtctttgatgcaacaaaattgaaatggatgaacggacaacatctaagatcatttccccatgatgaactcatcaaagcttttgaagatcggtggacggacacaggcattctccaggaatctgaaagtggttttgctaaggaagctgccgagcttttgaaggatggtatcgatttgataacagatgcggacgcagctcttacgaatctgttgtcatatccccttcatactactctaagcagcgaggaagctaaacctgtggtgcaagacaagatctccgaggttgcttggagtcttatttccgcgtacgacagcggcgaactcggccaagcgctagctgagggccgtgatggctggcagaagtgggttaaaggtttcggcaagtctatcaaaagaaagggcaaggggctcttcatgccgctccgggtactgctgaccgggaagcttcatgggcctgacatgggtggcagcatcgccctaatacacaaggccggcgtctgctgcgctgtgactccgcagtccaacttcgtgactctagacgagcggttcaggatgctcaaggacgtcgactgggagtcgctggcgaaggagcaggaaacccctgctgtccctgccgccgcttcctag

SEQ ID NO: 1288 - DNA, 2259 bp, Zea mays
  Peptide Sequence Number=SeqID_43067
gataagtctgaaacccaagggaccctcaagcgcttcctcaggagagctcaaaatgaatttgagctcgaggtgaagaagataaggagcgacaatggatccgagttcaagaaccttcaagtggaggagttccttgaggaggaagggatcaagcacgagttctccgctccctacacaccacagcaaaatggtgtggtagagaggaagaacaggacgctaatcgatatggcgaggacaatgcttggagaattcaagacccctgagtgtttctggtcggaagccgtgaacacggcttgccacgccatcaacagggtctaccttcatcgcctcctcaggaaaacttcgtatgagctactaaccggtaacaaacccaatgtatcttactttcgtgtatttgagagcaagtgctacattctagtgaaaaagggtagaaattctaagtttgctcccaaagctgtagaagggtttttgttaggttatgactcaaatacaaaggcgtatagagtcttcaacaaatcatcgggtttggttgaagtctctagcgatgttgtatttgatgagactaatggctctccaagagagcaagttgttgattctgatgatgtagatgaagaagatgttccaacagccgctataagaaccatggcgattggagaagtgcggccacaggaacaagatgaacgagatcaaccttcttcctcaacaacggtgcatcccccaactcaagacgatgaacaggttcatcaaaaggagacgtgtgatcaagggggagcacaagatgatcatgtgatggaggaagaagcgcaaccggcacctccaacccaagttcgagcgatgattcaaagggatcatcccgtcgaccaaattctgggtgacattagcaagggagtaactactcgatctcgattagttaatttttgtgagcattactcctttgtctcttctattgagcctttcagggtagaggaggccttgctagatccggactgggtgttggccatgcaggaggagctcaacaacttcaagcgcaatgaagtttggacactggtgcctcgtccgaagcaaaatgttgtgggaaccaagtgggtgttccgcaacaaacaggacgagcacggggtggtgacgaggaacaaggctcgacttgtggcaaaaggttatgcccaagtcgcaggtttggactttgaggagacctttgctcctgtggctaggctagaatcaattcgtatcttactagcatatgctgctcaccattctttcaggttgtaccaaatggatgtgaagagcgctttcctcaatgggtcgatcaaggaggaggtgtacgtggagcaaccccctggcttcgaggatgaacggtgccccgaccacgtgtgtaagctctctaaggcgctctatggacttaagcaagccccaagagcatggtatgaatgccttagagactttttaattgctaatgctttcaaggttgggaaagccgatccaactctttttacaaagacatgtgatggtgacttgtttgtgtgccaaatttatgtcgatgacataatatttggttctactaaccaaaagtcttgtgaagagtttagcagggtgatgacgcagaagttcgagatgtcgatgatgggcgagttgaactacttccttgggttccaagtgaagcaactcaaggacggcaccttcatctcccaaacaaagtacacgcaagatctgctaaagcggtttgggatgaaggacgccaagcccgcaaagactccgatggggaccgacggacacaccgacctcaacaaaggagactccgactatgctggatgtaaggtcgataggaagagtacatcggggacatgccaattcttaggaaggtccctggtgtcatggaactctaagaaacaaacctccgttgccctatccaccgctgaggccgagtacgttgccgcaggtcagtgttgcgcgcaactgctttggatgaggcaaaccctccgggactttggctacaatctgagcaaagtcccactcctatgtgacaatgagagtgctatccgcatggcggagaatcctgttgagcacagccgcacaaagcacatagacatccggcatcactttttgagagaccaccagcaaaagggagatatcgaagtgtttcattctcgaaggaggattgaaagggaaaaggtggacttggatcatgaaagacttccactgcactccgatgagagggccctgacaggaatcgacgtcggcgtcggcgacgagggaggcgggctctag

SEQ ID NO: 1289 - DNA, 1860 bp, Zea mays
  Peptide Sequence Number=SeqID_43068
atggcggcgggaacggaggcctttgaggcatacttccgccgcgcggatttggaccaggacggccgcatcagcggccaggaagctgtcgccttcttccagggcgccaacctgccgcagccagtcctcgcccaggtatggatgcacgccgatcagaacaagactggtttcctcggccgcccggaattcttcaacgcgctgcgcctggtcaccgtagcgcagagcgggcgtcagctcacgcccgacatagtgcagtcggcactgtatggtcccgccgcggctcgaattccagctcccaagatagccgcgggggcggctcgttcacagatgggtgctgcgggggcgcctaggcctcaggggagcgctgcgatgacgcccgggcaggttggagcagctcagatgaatccggctggcacaccaaggccccagggaagcggtatgatgccgacatctacccaagttagtatgctgcaggtgaaccctggtgctgctccaaggccccaagggatcagttctatgatgccagctgcgagtcagggtggtgctctacaagcaactcaatttgctgcaccaagggcaatgcagccacagcctcctaacctgggaattactcaacagcaaccttctagtaccggtttcatgcggccaccacaggttggaactccagcagcttcatttcaagctcaagcgcctggaatcaatcaaggtttggtccatggaggcagcatggaaggatctatcagttggcaaggcggtaatgctgcctcagttggaggcatcccacgagctataccaggagctgctccttctcagacaacacgtggatttggtccaggtttacctagcacaatgggcatggtgcctggacaacaggtacaagcaatgtcttcatcgccattgcctccacagagcaacagtgctgttttgcctcagaattcaaaagctttggtactgtctggaaatggccctgccagcagctctggatcaagcacagacatcttctctgcacttacacagccaaagccaagcttatctgcacctcagacaagctcgattccgagttcatccagttttatggccacgcctactggctcccagaacctgactaatctcactcagtttggttctttgcaaggtagcagccaacctcaacagactcagcctatcgtaaagtccattcctgctccagctacacctgttgtctctgctgggatttctaattcagcttctcaatggcccaaaattactcaaccggacatccagaagtacatgaaagtctttggggatgttgatagggacagagatggcaaaataactggtgcagaagctcgcactctgttcctcagttggaggcttccaagggaggtcctgaagcaagtgtgggatttgtctgaccaagacaatgatggcatgctttctttgagagagttttgcatcgctctttatttaatggagaggcaccgagctggaattcctcttcccccagcccttcctgactctcttaggcatgatgagacactgttacgagctacaggcttgccttcaacagcatacaatagtccatcatggcaacacaatcaaggaggattaccacaaagaggccctggagcacctggggtgcctgctggtggtgtgcggccacccttgccatcacatttgcattcacaaactgatggagctagcagacaagggcaaccaagatctcacatgcctgggatggataatcatgtggtaattcaaggaaacaaagatgacaaaagtgcgctgaaccaggctgcacaggaggtggtggatgctcctaagaaggtgggatctgggtttgaagtgtggatcattatgtgtgtcatatctggactggtttaa

SEQ ID NO: 1290 - DNA, 111 bp, Zea mays
  Peptide Sequence Number=SeqID_43069
atgaacgacgcgcatgagtccggggtcccgtccggcatcgtccccatcctccaatcattttctctgtgccacatgttattacgccgaagtcacacgggctcgacgccgtga

SEQ ID NO: 1291 - DNA, 526 bp, Zea mays
  Peptide Sequence Number=SeqID_43070
gaacattgtatcaacagtcaacttggagtgcaaggtcgatctgcaacatgtcgccaacagtgctcgtaacgcagagtacaacccaaggtctcagcgtgaccctgatacttacttgacagcgttttgctgcggctatcatgaggataagggagcccaagacaacgacactgatatttgcttcagggaagatgtacgtatctatcctccattgcagtttgcgcgtatcgtccagaagctcggttccccagctcggttcaaagatttcaaggtccaaaatatagttgggtcatgtgacctcaagtttcctattcgtctggagggcctcgctttggccagtggtttgtctgccacttatgaaccagagatcttccctgggctggtctaccgtatggtggaccctaaggtcgtgatcctcgtcttcgtctccgggaagattgtcctcacaggagcaaaggtgcgggaagagatatgcgcggccttcgagaagatacacccgatgcttgtgcagttcaggaaacggtcgtag

SEQ ID NO: 1292 - DNA, 405 bp, Zea mays
  Peptide Sequence Number=SeqID_43071
atgggtacccgctatcccgatgggtacgggtttgggcaaaatctcaaacccgtcatgggtacgggttttttaatgggcatagatatttttcacggaactgactctgttcacatctacgatgtgcatccctatctccatgagccacaccatcaacatgccttaaaaagggccaggggagctggagatcggtttctcaattcaaagtcagatgacaaggaagtcacaaagagaaacagaactgagttgcgccccacgagagtggccaactatcaaccccaccgtctcccaacagtgtatcgtcagctaatcaggcagacagtggtgaatggtgattcaaaactcacaactgaagagattttagcccctgagctagatgtagcaacagttatgtacagaaagaactag

SEQ ID NO: 1293 - DNA, 177 bp, Zea mays
  Peptide Sequence Number=SeqID_43072
atggcaactgacatattttgtccgtgggtaaaagctctaccgattgtattatggatgtttctagtgttcagcatgtccatcaacaacagccaagtgaagactttaagcttgtttgaacatctggactcccagatcctgagaaatggttttggaggattcacatttttgaaagtgtag

SEQ ID NO: 1294 - DNA, 471 bp, Zea mays
  Peptide Sequence Number=SeqID_43073
atgacgaaccgaaccgaacggaaccgaatgccaacgtttctggtgagggaccgccgtttcttttcactgctggatcggggagctgatcaattcaccatcagtgctcaacatttccttgagcaccagtcaagcgtccgcgatttccacgccgaggtagttgaggaacacgaacaccaggagctcggcgtcgccattggcgacaagcatcatgaggtccaccttgccaacgtcatcctcagtcgccgacctcccgtcgtcactcgtctactccctctcgaccacgccgcatgcgttgtactacccatggctcggacgcgtagcttggtgatggttacaacatcttctgttccatgggcaggggcagggacagggaaggcggcgaggccgtcgagctcagcatcgtcgaacgacttcgacgacgacaacgagcaagcgcgggagagaatggaaggagttggcgtgcgtgattga

SEQ ID NO: 1295 - DNA, 864 bp, Zea mays
  Peptide Sequence Number=SeqID_43074
atggccgctgtgccgtcggggttcctcctcatcactggcccgccgggcgtggggaagacgacgctggtcatgcgggtgtttgaaaccctcagaggctcccacccgaacctcaacattcgcggattctatacccgtactgcgttgcctcgccttctcgaactccggagaggtgagagagggcggagaaaggatagggttcgaggttgtcacgctcgacgatatgataaaccactgttattagcactagcattatcaactgttactgtcataatttttcctaacccattccatcaagcatctatcccggagtctgttagatggcctaccgtcgggaaatacaaagtagacgtagcatccttggaatcattagcagtacctgagctgcaggttaaggaagaaacagatctcttcatcattgacgaagtgggtaaaatggagctgttcagttcagcatttttccctgcggtaatgagagttattgaatccaatataccagtgttggccaccatacccattcctaggcagggccgggacattccaggagttgcgaggttgcggaatcatcctggagcagctgttttcaccttagacactggtaacagagatacgatgagagatactatatgcagtcagctaaggagtttgttgcagaggctgtttaatggagaagacatcatgcagtgttatgggtcacagtctgctgaatcgtccggcagcccactgagctcccagttccccctttctctgagccctagcggaaaggcgccattaaacgccaacgctgcgagctttgtttcgatgaaggcggaaagcgcaagggcaaatctcacaggagatacgctcgctactccgttctttgtctaa

SEQ ID NO: 1296 - DNA, 333 bp, Zea mays
  Peptide Sequence Number=SeqID_43075
atgcagcctcgacagcaggaccgaccagacagcagaaccagagcacagcgcgaacggcgagagaagagaagagaagagaagagaagagagacggaccttcgcgtcgctctgttaggggtaggtggtgaaagcgggaagaagatgcaggctgatgagcagctgtgcgtggaagaagaaaccgagctatggagtgcatcatggttcatggatgaagcagcacagggcgtcagaccagcacggctgggacggagcaatccgcaccgcacgcctgatgtcggaactctccaggacatggaccggacatgtaatatctctgcatacgcacagccataa

SEQ ID NO: 1297 - DNA, 516 bp, Zea mays
  Peptide Sequence Number=SeqID_43076
atgggcgcaaggcaggcatgcaacacatgcgtccaggcgagcagcaaaaaatcaacacagcagccagcacactgcacgcgtacaagcgtttcgatacccgctggaaccattcgggcatcgggcttcggaccaaacgagtatgagcttaagtattgcgagtttagggcttcaggctcggattttatgcctaggtttagatggtatgcaaagttgtaccgcctgcggctctcaaggtgttcagagtatgtctcgcctcggtgtcggtcttcttggatccatcgtcttctcgtcgtggagctatctgcccctgaggatggctgctcgtctcgtctggagtccgctacgaacacgaactcagcccccgagtatttagggtctgagtcgtcgcaactgtctgagtcggtgcgaagtccgagttcaaacaattgctatggtggataccgtgccaccatgcaaattggatctaatcgatctgaaactcctgatgccgaagtcatcgtgggcgtcaagtgttaa

SEQ ID NO: 1298 - DNA, 453 bp, Zea mays
  Peptide Sequence Number=SeqID_43077
atggcggtggacccctccgaccgggtgggcgctctgcggccgtcggcaccgccgcgcccggcgggtgttctgggcgtgtcacgggaagcctccgcgcatgtacatgccctcagctcggggcccctcacctcctctgccatggcgctcgacgctcaccaggcccttctccacatccgcctctgccgcgcgctgactgcggggatgtggtcgccatgggcacccgcacctccgtctctgcctgcttgcagtggggccccacactgtcgtgcactctcactgacgcagctcgtgtgcgacggctcctcactctcggtcgcgctgccgtggctccctgttgccacgctgggcgaggccaaacctgacgacatcctcgccatcgacccccggtgtagtagcgccgtcgtgatggaggtcaccaggaccggcgggaatttcttgccaatttaccagtag

SEQ ID NO: 1299 - DNA, 912 bp, Zea mays
  Peptide Sequence Number=SeqID_43078
atgctagtggctgcagctgaaacaacatcaaagtttctgaagagtgatagtcataatcttaagtacatgggcattgatgctcttggcaggttaataaaaataaatccagatattgcagaagagcaccagctggctgtcattgattgcttagaggacccagatgacactttgaagcgcaagacatttgagcttctttataagatgacaaagtcaacaaatgttgaggtgattgttgataggatgattgagtacatgatcaacataactgatcatcattacaagacagaaattgcatcacgttgtgtcgaactcgcagagcaatttgcgcctagcaatcagtggttcatccagaccatgaacagagtttttgagcatgctggagatcttgtcaacatcagagtggcacacaatttgatgcggctaattgctgaaggctttggagatgaggacgaacgtgctgacagtcagctaagatcatcgggctccacaattgaacctattctttccatatcttctctgcttgacctgccagtgccaataacattttttactgctaaagagaacacttcttttgtacttaaacaggtagattcttatgtccgcattgtcggagagccaaagcttccttcttctttccttcagataatatgctgggtgttgggggaatatggaacagcagatggaaaacattcggcttcttatattattgggaaattgtgtgatgtggcagaggcccacctcactgatgacactgtcaagggaaggagagcaggtgttgtgaggaagggtgcttcttttaggagatctgttaaaaattatagtaggactgtggacttcggtatcatcaatgccaagttgaagctctatgtccaatttaacatatacttgattccagaaaagttgcaattctag

SEQ ID NO: 1300 - DNA, 330 bp, Zea mays
  Peptide Sequence Number=SeqID_43079
atgggagataacagggagagcgcgcgacacagaggcgagcagggtgtgaactgggtagagttgagccagggagcttcagcgaacgagaagccgtatgccgaccatgggaagcgggcggtcgagctggaggagcaagggaggggagccgcggcgctgggcgcgtgcaggagagatgcagggaggagagaagcaagggaaggagcgcgcgcgctcaggagatgggcacacggcgcgaccacggagaagaaaatggccagggcgcgcgccaggaagaagcagataaggacgtctgggaaaaaatctggggagaagaagagcggcgtgggatag

SEQ ID NO: 1301 - DNA, 252 bp, Zea mays
  Peptide Sequence Number=SeqID_43080
atgcccacaccagcgcgccctcaccgtcgcctcgccctcaccacttgcgccgtcaccaccgtcgtgcccgtaaggcgcacccgcccaccaccgccatgcccccacccgcccaccgccggtgtgcccgcacgacgcgcccgcctacggccaccgcctcctccccagccaccggacaccttccccactcgtcgtcggctcactccatatttaaggttttggaaacctccccgtataggggagagattttcctag

SEQ ID NO: 1302 - DNA, 606 bp, Zea mays
  Peptide Sequence Number=SeqID_43081
atggagaagctccccggcgccgccgcatcctcggacgacgtggacctcgtcgtcgtcgcatccacgcaccacgccgcagcgctggtggacctcatcttcggcgctccacctcacggtgtccccgcgcggccgccgccaccctctcctcggcgtcccaaccggcctcctcctaggggatccgttcctcgcttgcgccgccacgaggatgctcgcgctccacctcacagtgtccccgtgcggccgccgccacccgctcctcggcgtcccaatcggcctcctcctagggttccatccgttcctcgcttgcgccgccacgagctcctcctctccgtgtctccgcacctgcggtctaccccgctgccgcgacgcgcgctcgcaaccgccctcttcgccgtggccgatgcactttgcgtgggcgccgcggcggccatgctactcgaggatgccgggtgggcggccatcgctgggcttgggttccgaggcgccgtgcttggggccatcttcgtcacgcgctattttggccgtcggaggtggttgctgcaattctccgtcgtgcgggaggacctcgaggggttctaccgctggttcgtgcgctccaggatctag

SEQ ID NO: 1303 - DNA, 519 bp, Zea mays
  Peptide Sequence Number=SeqID_43082
atggcaactaacaatgaagaagttcatcctggagatcgtgatcttttctggtcccatattgatgaagccactggtgcaacatcactacatggctacaattttcctaggatgactaggacctatactcatcaaaatggtgttgcagctgttgtttcaacatccccggatccatcatccaccacaaccacaatttcagaacaagaacaaggattaggagaagaggaagaagctgaaattgactttgttgctcatgttaaggataactatggccaagctcttactacagatgatgaagttgttgcgattgcaagtgatgaagatggttacggaggtagtatgagtggtggtgggaggtcgaggaccatgaccctggcgcttgggtgctgtcgtcatagggttagggctgctggttgggagaggtgtggtgaacagtacctgtggagaacagtaggcgcagaggaaaagcacgagcaagaatacttgcctgctagtgaaagggcctctagccgagttggttag

SEQ ID NO: 1304 - DNA, 1053 bp, Zea mays
  Peptide Sequence Number=SeqID_43083
atgggaactatcagagctgatcatgacgacttctctatacgttttgcctctgctatggatcagatgataaggttgaagtcatcagatggtgtgtataatgactggtcccgcgatatcaaagggaacatgtatgatattgttgttgaaggcttccagcttcttagtcgttggactggcaggatttgggaacaatgtgcatggaaattctctcgccctatttcagattctcaacaaaactccatgacatgttttgactatgaaaaggtagtacgctataactatactgctgaagaacgaagggctctgcttgaattaattggttacataaagagtattggattgatgatgcagcattgtgatactttagtgtctgaagctttgtgggaaacgatacacatggaggtccaagattttgtacaggataaacttgatactatgcttcgtacaacatttagaaagaagaaggacctttcccggattctctctgatatgcggaccctctcagcagattggatggccagcactagtaaagcagacccagagcagcactcgctacaccaagaaactgaggaaatgagacaaaacacattttacccaagaccagttgcaccaacagctgcacagattcattgtttgcaatttcttatatgtgaacttgtatctggtggtaatctgagaaaagttggaggactatttgggaatagtggctctggcatacctgtggaagatcttaaacaactagagacatttttctacaagcttagttttttcttgcatattttggattatacagcgactattggtactctaactgatcttggatttctttggttcagagaattttaccttgaatcttctcgtgtcattcagtttccaattgaatgctcgctcccgtggatgctggtgggccatgtcattgaatcagaagatgctggtcttctcgaaagcattttgattccatttgacctgtacaatgactctgctcaacatgcactaacttctctcaagcagagatttctttatgatgaaattgaagctgagctttcttgctga

SEQ ID NO: 1305 - DNA, 267 bp, Zea mays
  Peptide Sequence Number=SeqID_43084
atggccatccccgttgaggaggccatcgccgccctctccaccttctcgctcgagctatattccaaatttcaggatgagcaaccggatgtgcaggggttagctgtgctcctgtctagtgaaagatatgcgactaacagtcctattgagtacagcgatgttgctgcttatcgtctatcactaggagaagatacaaaagcaatcaaccagctgtgttttcaagtcggtaagtcgagtcgacaaggtaccgacttggtgactagtcgataa

SEQ ID NO: 1306 - DNA, 144 bp, Zea mays
  Peptide Sequence Number=SeqID_43085
atgcagcggcgagcatcgccatgggatgttgggcaagcaatactagagagctattcgagggtgctggagagcctggcgtacaacatcgtaacatgtgtagatgacgttctcttcgcagatgaagccgccagaaagatagcatga

SEQ ID NO: 1307 - DNA, 411 bp, Zea mays
  Peptide Sequence Number=SeqID_43086
atgacggcgatgagtgcagtgcagcgcagtagaagaatagccacgggcgctctgcccgagctgctggcgtttcggggcccggcaggggctgtggacggacgcgctgccgctgctacagggaaaagaaaagaggcaccccaatggcgcatgtggggccagccacggcggccatgtctgacacaaagtgatgccgagcatgccggtcgtcagaatcatggcgacattacggacgccaaaggtggacgtggaacggggaggaccgccgatcatgaccggcggtcctgcgtgcgccggggattgccaccgcaaaggggcaatcagtgccgtcttttacctcggctcgtcccctcccttcctggcatccatggaatggacgacgacggaacgggaggatgcgtcgctttcttctaa

SEQ ID NO: 1308 - DNA, 234 bp, Zea mays
  Peptide Sequence Number=SeqID_43087
atggcctcctgctggggccgcttcggcgccgccgcgctgtggcgcaggctacggcggcgtgtcagcctggtgcggcgcaggcggcggcgcggccgctccctcctcggcgggctaaactacgacccgctcagctacgcgcagaacttcgacgacgggtgcctggaggagcgcgagccggacttcagcgccagtcgcagcgcgccattggaagagtcaagagtggcaggcagctga

SEQ ID NO: 1309 - DNA, 393 bp, Zea mays
  Peptide Sequence Number=SeqID_43088
atggtggcgactactcgtcgagctctgttcctctcctgcttccacggcggctcagagatgagcccccgcctctccctgcgcccgcggtacccgtcaatgccgcggcggccgaagggagtggcggctgctggcggcggaggaaacggcgacctggaggccgcagtcggtacgggggacgacgaggaggagaaggtggcggtgttctccgtgtcggggatgacctgcgctgcgtgcgcggggtcggtggagaaggccgtgaagcggctccccggcatccacgacgccgccgtcgacgtcctctggggccgcgcgcaggtcgtcttctacccagccttcgtctcgacattagatcagctgcttgatgctccagaagatgatcccaaagatacttga

SEQ ID NO: 1310 - DNA, 450 bp, Zea mays
  Peptide Sequence Number=SeqID_43089
atggagcccgcgcgtggagggcgcgtcgtgttcctgctaggacgttttctcaaaatgcgcatgcagttgttcatctggcaatcggcgaacaacaccgctccctggccgagcatccctagccccggcgtctaccccccactccgcgtctccgcctcgtctaccccacccgtcggcggccatggccgcctctgccgtgcagctgcccctccctgcgtgcaacgctgtgcccaagccctgcatctatcgcgtccaccaacctgcgtgcctgcatccgtgccgctcgcctgcctcgccacctcgcgtcgccagtccggcgagctgatacgctgccctggccaccagcgaaccgcccacagccacgcgttcctgggaatagctcgtgccgcgcccagccctgcatgcagctcccacccgagcgctcccgctgctggctgctccagtgaagcctag

SEQ ID NO: 1311 - DNA, 1396 bp, Zea mays
  Peptide Sequence Number=SeqID_43090
agacagcatcgccatcggcacgtttggggccgttgagaagggcgtctttgtcagttggcggccggcaacgccggccccagaggatagcacgttgtcaaacgacgcgccgtggatgctcaccgtcgcggcgggcaccatggaccgtctgatctctgcccaggtgcgcctcgggaacggctcgacgttcgacggcgaatcggttttccagcccaatatctcgacgaccgtcacctacccgttggtctacgcgggcgccagctcaacgcccgacgccaatttctgcggcaacggctcgctggatggcttcgacgtcaaggacaagatcgtgctctgcgaccgtggcaaccgcgtcgacaggctcgacaaaggtgccgaggtgaagagagccggtgggttcggcatgattctggccaaccagatcgcggacggatacagcaccatcgccgacgcgcacgtgctccctgcctcgcacgtcagctacgtcaccggcgttgccatcaaggagtacatcaactcaacggcgaacccggtggcgcaaatcatcttcaagggcaccgtgctcggcacgtcgccggcaccggctatcacttcgttctcctcgcgcgggcccagcatccagaaccccggcatcctgaagcccgacatcacaggccccggcgtgagcgtgctcgcggcgtggccattccaggtcgggcctccgtcccctggaccgacgttcaatttcgaatccggcacgtccatgtccacgccgcacctcagcggcatcgccgcgctgatcaagagcaagtacccggactggtcgccggcggcgatcaagtccgccatcatgacaaccgctgaccccgacgacagatccgggaaaccaataatgaacgagcagtacgtgccggccaacttgttcgccacaggagctgggcaagtgaaccccgacaaggccctcgatcccggcctggtctacgacattgcgcccgccgagtacatcggcttcctctgcagcctgtacacgagccaggaggtgtccgtgatcgcgcgccgctcgatcgactgctcgaccatcacggtgatcccagaccgcattctcaactacccatccatcacggtcacgctcccgtcgacgacgaaccccacggctccggtcgtggtgagccgcacggtgaagaatgttggggaggcgccggcggtgtactacccccatgtcgacctgccaggttctgtgcaggtgaaggtcactccgagctcgctgcagttcgccgaggcgaaccaggctcagaacttcacggtctccgtgtggcgggggcagagcactgacgtgaagattgtggagggttcactccggtgggtgtctgaaaatgacaagtacaccgtgaggagccctgtctccatctccttcgtctga

SEQ ID NO: 1312 - DNA, 684 bp, Zea mays
  Peptide Sequence Number=SeqID_43091
atggaaagcttcaagctctcgttgctccccatccttttccttgcagtcgccgccgcggtgtccggcgatgagctccgtacgttcatcgttcacgtgcagccgcacaagagccacgtgttcggtacgaccgacgaccgaacggcatggtacaagacgttccttccagaggatgagcggctcgtccattcgtaccaccacgtcgcgagcggctttgccgctcggctgacggagcaggagctcgacgcgctgtctgccatgcccgggttcgtcacggcggtgccgaaccaggtgtacaagctgctgactacgcacactccgaagttcctcgggctggagttgccgcagagcgggaggaactacacctccgggttcggcgagggcgtcatcatcggcgtgctcgacagcggcgtgtatcccttccacccctccttcagcggagacggcatgccgccgccgccggccaagtggaagggccgctgcgacttcaacgcctcggcgtgcaacaacaagctcatcggcgcacgttctttcgagtcggacccgtccccgctcgacaaggacgggcacggcacgcacacgtcgagcaccgcggcgggagccgtcgtgccgggcgcccaggtgctcggccagggcgccggcactgcttcgggcatggcgccacgcgcgcacgtcgccatgtacaag

SEQ ID NO: 1313 - DNA, 228 bp, Zea mays
  Peptide Sequence Number=SeqID_43092
atggcgtggagcaaactcaaatgcttcttcatggcttcacttcctctgcggctgtgggtaaaagataaaagtagaaatgatgattgcgcgtttaccccatgccacaaccccaaaagcctaaaaattacaccaaattggttgccagcaagagtggtggatctcctcgattgcaatccactggcttatctcaacccaaatgcgcccgaaatggagaagatcaaggggtag

SEQ ID NO: 1314 - DNA, 1458 bp, Zea mays
  Peptide Sequence Number=SeqID_43093
atgtctatcggtggagtttctaagccgttctaccaagacagcatcgccatcgcgacgttcggcgcgatcgagaagggagtctttgttaccatgtcggctggcaactctggcccgaacgtcagctctgtgacaaacgaggcgccgtggatgctcaccgtcgccgcaagcacaatggaccgttccattcgttcgacggtccgcctggggaacggcttcgtcttccacggcgagtcgctctaccaaccgcatgcctggacccccaccttctaccctttggtctacgctggcgctagcgggaggccgtacgccgagctctgcggcaatggctcgctggacggcttggacgtcaggggcaagatagtgctatgcgaactaggaggcgggccgggacgcaacatcacgagggtactgaaaggcgcggtcgtccaaagtgccggcggcgccggcatggtattgctcaacagatttgcccaaggctacagcacgccagccgacgcacacgtcctgccggcgtcgcacgtcgactacgccgccgcctcagccatcaagtcctacgtcaactccacgtcgaaccccacggcgcagatcctgtttgagggtacaatcctcggcggcacggcgccacctgctccatcgatcgtcttcttctcctctcgtgggccaagcctcgagaaccccggcattctgaagcccgacatcacgggcccaggcgtcaacgtgctcgccgcgtggccgttccaggttggcccgccgtcgtcggcacctctcctccctggaccgaccttcaacgtcatctccggcacgtccatgtcggcgcctcacctcagcggcgtcgcggcgctcatcaagagcaagcaccctcgctggtcacctgccgccatcaagtcggccatcatgaccaccgcggatgccaccgaccgtgccggcaatcccatcctcgacgaacagcgcgtggcggcagactggttcgccactggcgctggccatgtcaaccctgagaaggccgcggaccccggcctggtctacgatatcgcggccagcgactacgtcggctacctctgcagcatgtacaacagccagaacgtgtcggtgatcgcgagaaggccggtggactgctcggccgtcacgctgatcccggagagcatgctgaactacccgtcgatctctgtcgcgttccagcagacgtggaaccggagcgcgcccgcggtcgttgagcgcacggtgaagaacgtcggggaggcaccgtcggtgtactacgcggcggttgacatatttgacgatgatgtgaccgtcgccgtgtacccgcgcgagctggtgttcacccaggtgaaccaggagcgaagcttcaaggtggtcgtgtggccgaggcagaacggcgctccactagtgcaaggcgcgctccggtgggtgtcagacacgtacaccgtcaggagccccctctccatttccttcgcttga

SEQ ID NO: 1315 - DNA, 434 bp, Zea mays
  Peptide Sequence Number=SeqID_43094
atgcaaagcttcaacttctccatgctgacaacacttgtgccattccttcttctcgcggccgttgccgtggtcgccagagatgagctcaccacgttcatcgtccacgtgcagcccctgcaggagaaccggatgctcgctaccgacgacgaccggaatgcgtggtacaggtcgttcctcccggaggacggccggctcgtccacgggtaccaccacgtcgccagcggcttcgcggcccgcctcacgcggcaggaggtcgacgctctgtcgtcgatgcctggcttcgtgacggcggccccggagcagatatacgagctgcacacgacgcacacgcctcagttcctcgggctggacgcccgggaggccaggaagtcctaccccgtcgctgaacgcggcgctggggtcatcatcggcgtgctcgacaccggcgtcgtgcc

SEQ ID NO: 1316 - DNA, 333 bp, Zea mays
  Peptide Sequence Number=SeqID_43095
atggacatgctagtcagtaacctggctgtggtggacatcaactggacgcgcgacaccgagacgctctccatcgccacagacagcttcgtgcctcgtgccagcctctttggcaccgccaagggtgacgcgtcgccgcctccaaggtctgctagtcggtggagtgcgtcgccgccaacgtcctcacgcttcgagtccactatccacgacggcgccgacatcatctctgtctccttcggtcaggacgcacctctcaccgacgacgccaagtccctctttcacgagcctgtcacgctcgactccctccatgttgtccgtcgtatgctccactggtaa

SEQ ID NO: 1317 - DNA, 1122 bp, Zea mays
  Peptide Sequence Number=SeqID_43096
atgccgccccctcccttctcccattacacccgcaagtggatcgagagccatttctctcttctcaaggaggaaatttcaagccccatagctgctcatattctcaacttctacgatggcggccttggtgacgacctcttcgaagcggcgactaccgcctccggtccatttcatgccaccgatgacgatgtttcttcgtctaccactaccacccctcctatctgcggctacagcgacgacgctccggctgctgctggtgccacggcctactccccattgccatccttggacgccactctcacggccctccttgagcaagagcaacaccacggccttgacaccggggaccttccgcagatcaatggcctttcagaagtagcatactacccaaccgccaccgatgaggccagcatagggcaattcaaccagatggggcttccggataccttagctgaacagatgcttccgatgcagatgaacagcagtgcatccgccttgatgccactcacttcggactacgatgagtgcttcacagcggcgttagctgaagggttcatgggtctggatggagccatgtatcatccgcaaactggagcaattcttccaggctgcgatgcagaagcatcacagcaggggttcttcaacagtgccagcagcaatggtctggtgatgattggcgagtaccagaagatgatggagggtgaaggactgacaacaacatatgacgacacagattccatgaaaggggcatttaatactaatgcagagatgcaggtaggaggaaatgatcagcacctggtaaacggatgcaatgggaacccagaactatcaggattggaagactccacattcaaggttgtccgcttgtcacccgaagagaagaaggaaaagatccatagaaaaaccttggcagatagcaggccccgtgtccggggaaggttcgcgaagaatgatgagctctgtgaagcagcagcgcaatcaggctccctgaattatggacattatgaacaaactgaccatatgaaagaagaagccatgctggacacatctgacattcttgcgcatctaagtgaattaaattcctacaactacaagtataaatgcaccatcgaatcatggatgtga

SEQ ID NO: 1318 - DNA, 942 bp, Zea mays
  Peptide Sequence Number=SeqID_43097
atggcggccgcgtccacgtcacgcctcgccatccaaatccgtgtccctttcgttccttggccttttccgtttccaccccgcctcgctaccttggcggtttccacccgcacccggctcgcctcctatggcctttgcctccccacgcggcccgccggcatgcctcctctcgccgagcacgagctcgcggccgcggccgccacctccgcgctcggcgtagccttcggggtgcgcctgctcgtcgccctctcccgctcccgcgcgctcaagccgctggcggccgccacgtccgccgccgccgccgcgctccggacgccgcgggcgctcgccaccgcctcctcccctgtcgccgccatcctagccgcgtccaaggccgcctccaagtcgtacaaggcggcacgcacgctcggccccgccgccgcgcgcctcccctcgctcccctcctccaagcgcctcaaggccgcgctcgccgccgcctcgctcctccgcctcgccgccgccgcgccggcgggcctccacgccgcgtcgcccgcgggcgtcgccgtgctcgccgtcctcaagtccagctacaagctctccaagaacacctccaaggtcgtcgagggcttcctcggcctccagctgcacaagggcttcaggaacgggatcgacgcgctcggggtggtcgtcaaggtcgccgtcattgtctctgaggtcgccgtctgggtcggggcccgattctggggttatgggcgcgctcgctgcgtcatgttcctcggcttcaccagacccactggcttagtcctgcttggctgtagcaaatctgagccccaggttgcactattcgatccggttatagttgggatggatgctcaggggtgcgaattggaggagcgagggctctcagaattgttctctcttgctgtgccagtgccccaggccacaacattaatgactatgagttag

SEQ ID NO: 1319 - DNA, 129 bp, Zea mays
  Peptide Sequence Number=SeqID_43098
atggcgatgactgtgaatggagaagattggaacccggggccggagtgcgttgtgaccggcggtgctgacaacagggccatggcgcttagggtccatgggtgcgaccagttcgacgcctactactcgtga

SEQ ID NO: 1320 - DNA, 3141 bp, Zea mays
  Peptide Sequence Number=SeqID_43099
atggggcgcctccagtaccaacaccgctcgcggtccgactcctccttcgcgcgctcctccgagaccaccgccgccgacctcgatgcgcgcagcctcggctccaccgccgccgcggaaaccgtggagtgccccttcggtcacatcgatggcctctcccgtgccgagctgcgggaggccgcgtacgaggtcttcttcatgtcgtgccgcgccggcggcggaaggggaggaggagcaggcggcggcggcgggctgaactattacccggcaggcggggacggcgggggagacggcgggtcgccgacgattggagccggcccaagaggcggcacggggataaatgtcgtcagcagcagactgaagaaggcgctgggactcaaggcgcggcggtcgtcgcagcccaccatcttgcggagcagcatgaacccgtcgtccgcgccggggtcgcctggccggatgcgcggggtgagagaccaggcgcccgggtcacccgggaagcccaggcgcccgatgacctcggccgagatcatgcggcagcagatgcgggtcccggagcagaccgacgcccgcctgcgcaagacgctgatgcgcgcactcatcggccaggtggggaagaaggcggacacgatcatcctgccgctcgagctgctccggcagctgaagccggccgacttcgccgacggcggcgagcaccaccagtggcagcgccggcagctcaagctcctggaggcgggcctcatccatcacccatccctcccgctagaccgcctcaacgcccccgtgctccggttccgggagatcatgcaggtcgccgacgctcgcgccatcgacaccggcaaggcctcggacaccatgcgcgccatctgcgatgccgtgctcgccctcgcctggcgctgcgctcccggcacggggtccccgggcgaggcctgccactgggccgacgggtacccactcaacgtgctcctctacgtctcgctgctccaggccatatttgacctcaaggaggagaccgttgtgctcgacgaggtggatgagctcctggagctcatgaggcgggcatggcagacgctggggatcgacaagatgatccacaacgtgtgcttcgcttgggtgctcttccagcagtacgtggccaccgggcagatcgagccggacctcgccggcgccgcactcacggtgctcggtgatgtggcagccgacgcgaagcaggagcaccgtgacccggtgtacacccaggtgctctcgagtgttcttggctcgatacatgactggtcagagaaacggctgcttgattaccatgaatggtacgggaagggcatggctgccaccggcgctggggcaatggtgattccgctgtctctggcactttccacgagcaagatcatcgcagagagtgtgcctgggatgggcatcgatctggcagactccgagcacgacggcatcgggagcttcgctggcaaccgtgtggatcactacgtcagatgctccatgagaaatgccttcgctaaggcattggagaacgagctcggacaagggaacagcatggtcatccaacgcgacgacgaccccagcgagaccatggcacggctcgccaaggacacggagcagctggctcagttcgagctggagaacttcagcccggtgctgaagcggtggcacccgttcccgggcgcgtccgcggtggccacgctccacagctgctacggcgtcttgctgaagcagtacgtggccaaggcgacgtgcctgaccaacgagctcgtgcacgtgctgcacgcggcgggcaggctcgagaaggccctggtgccgatgatggtcgaggacgtggcggacagcgacgacggcggcaggtcgttggtcagggaggtcgtcccctacgacgtggactccctcgtggcgcgcttcctccggacttggatcgaggagaggctcagggttgctagggagtgcctcctgaggtccaaggacactgagagctggatacccaagtccaaaggcgagccgtatgcgcgatccgcggtggagctgatgaagctggccaaggcgaccgtcgacgagttcttcgggatcccggtgaccgcgagggacgacatggttcagaacgtcgccgacggcttgggcgccatcgttcaggagtacatctccttcctcgcgtcttgcggcaccaagcagagctacctccctccgctgcctccactgaccaggtgcaaccaggactcgacgatcatcaggctctggaagagggcggcgacgccgtgccgagaagccgggacgaacccgcgcggccgcgcccaccacggccagagcgagtccatctcgggcggcaacaacccgcgcccgtccaccagccgcggcacgcagcgcctctacatccggctcaacaccctccactacctgctcagccacatccaggcgctcgacaaatccctctccttcttctcgcacggcgggtgcgcgtcgccggcgtcggtctcgaaccgccaactggcgccgtccggccgtttcgaccgtgcgcgcgccgcggcgcagtcggccatcgtccacgtcgccgaggtcgccgcgtaccgcctcgtcttcctggactcgcaccactccttctacggcgggctctacgtcgggggcgtcgccgacgcccgcatccgccccgcgctccgcgcgctgaagcagaacctgtcgctgctcgtctccatcctcgtggaccgcgcgcagccggtggccgtccgggaggtgatgaaggcctcgttccaggggttcctcatcgtcctgctcgccggcggcagcgacaggagcttcacggtggaggaccacgcgatggtcgaagaggacttccggagcctgaagcgggccttctgcacgcgcggggaggggctcgtgtccgagcaggtggtcgaggccgaggcccgggccgcggagggcgtcgtcgcgctcatggcgctgacggcggagcagctcgtggaggagtttggaatcgcggcgtacgagtgcaccgaggcggtctccgagaggcagcgcctaccgttgccgccgacgaccaggcggtggagccgcagtgagccaaacaccatcctgcgcgtgctgtgccatcgcgacgacgaggtcgccagccacttcctgaagcgcacatttcagcttcccaagaggcggtaa

SEQ ID NO: 1321 - DNA, 195 bp, Zea mays
  Peptide Sequence Number=SeqID_43100
atgacgacggggagctgccctccccaccggacgcgccgccccgtggcccaacgtgcgtcccgggcgcgggagaacgccaatgccgccctgctcaacctcgtcggcgcccaggtcttcttcctcccagacgaccgcgtctccttccgtcaaccgtcagtgcctctgcagccgcgggcgccgggcgcggccccctag

SEQ ID NO: 1322 - DNA, 450 bp, Zea mays
  Peptide Sequence Number=SeqID_43101
atggagcttgatttagcattcgatcgcagccggtacggtgtcagtggtggttttgacttggcttgtgcagtgatcgacacacctttaaccttatctgcaggaacaagttaccgggatgaagccgatctgttgttgctggaggaagccgaagccgagcagctgagcagcactgcagcagccagcaggtggccgtgggcgcgtggccggctggctgcatcgtccgcgtcaccgcctggaagcaggcagcagcagggagcaccggcaccgaagcaggcagcgcagcagcacactgcagcctgcgggcgagcgaccgtcggcaccatggcaggaaacggaaatggggagcacgagcactgcagggagcggaaacggggagcagccgagcagggctgcacgacgtggagggaggaagctaggtttatcgacttagcggtgttcgggccgggctga

SEQ ID NO: 1323 - DNA, 1042 bp, Zea mays
  Peptide Sequence Number=SeqID_43102
cgagtccgtctcgctcttcggcaacgccctcgcgggcggcgtcccgcccggcttccgcgcgctcgcgcccacgctccgcaagctcaacctcagccggaacgcgctcgccggcgagatcccgccgttcctcggcgccttcccgtggctccgcctgctcgacctctcctacaaccacttcgccggcgggatccccgccgggctcttcgacccctgcctccgcctccgctacgtctcgctcgcgcacaacgacctgacgggccccgtcccgcccggcattgccaactgctcgcgcctcgccggcttcgacttctcctacaaccgcctctccggcgagctcccggaccgggtctgcgcgccgccggagatgaactacatctccgtccggagcaacgcgctctctgggcaaatatccaacaagctcacctcctgcggcggcattgacctcttcgacgtcggcagcaacaacttctccggagctgcgccctttgcgctccttggctcggtaaacatcacctacttcaatgtctcctccaacgcctttgaaggcgaaatccccagcattgcgacctgcggcaccaaattctcacgcttggacgcgtccggcaaccggctcacggggccggtgccggagagcgtcgtgaattgccgcggcctgaggtttttggatttgggggcgaatgctcttggtggagctgtacctcctgtgattgggactctgcggtcgctctccttcctccggctcgcgggcaatcctggcatttccggttcgattccacctgagcttggagggatcgagatgcttgtcacactcgacctcgcgggccttgctctcacaggagagattccagggtccctcagccagtgccgattcttgcttgaactgaatctgtccggcaacaaactgcaaggagctatcccagacacactcaacaacataacctacctcaaggcttatacgcgtaagagcacagatgaggacatgaaggaagaggaagagcaagagcttgccatcaaggtacgaagattgggaaactggaactaa

SEQ ID NO: 1324 - DNA, 1341 bp, Zea mays
  Peptide Sequence Number=SeqID_43103
atgactccaaaatggagtgcatgctcttcaaatagctacagagaactaccttcacatgaaaatggagagtgcaaatcaaccttaacagagtcagtcccttcacctacaagctgttttggcttgcacactgcaaacacaatgtgctccttatcttcacaaaagaaggatggtaatgtttataaaagaaggaagatggataaggattcaaattctcctataacatttgaagatgctaaagaaatggcaacccaaagttgcacaatttctgatgaccactcatcattactgctacccattatctcctcagaggcattgcttttaaattcaacagcaggcatggcaggtcctatcctagattgtgaggagcctgctgatgttccattggagccaaattctggtacagatgatagatgcttcatttcaaacatgtctccaacttccatgactccagacaaaaagaatgctgctgaatgttcctcatcgaatattggccctacagaatcaattaccgagcatatttcaccaagggatctttgcattgccatactgatgaaagatggactaataaatgaatcaagaacaagaatggcacataaagaggaattcactgacaatgatgctaaccctttgttggcatgcaataattgtggctgcttggaacattcattgaagatgctgatatgcgattcttgtgaagcaggatttcatttgtcttgctgcattccttgtattaaggagctacctactgatgaatggtattgtgctccatgcttgtgtaagaaacccaagagtctttatggcaaactctcagagggcaggataaatccttccaggaatactaacacaaggcctcatgggatgagtcacatagagtacatgctgaaggatgctgaaccatatgtaactggggttcgacttggtagagattttcaggcagaggtgccagaatggtctggtccatcatccagcagcgatgtttactttgacgagccctgtgcaattgattctgcagaactaactacatttaatttgtgcaaaatgagtaatcaaagtcattcttccattggtaattggatccaatgccgtgagaccttgaatccaggagattctgacaagcaagttgtctgtggaaaatggagaagatggtttgggtatatccaacggaaacctttagaagcaccaatgcgtagtgggattctaagacgcgatattaatggaaagagagggcacccttatatgttgtacagtcagataattgggattgtttttgttgtcttctttgggatccagtccatgctgattgtgctgttccacagccaactatccaatgtatcttggtaa

SEQ ID NO: 1325 - DNA, 222 bp, Zea mays
  Peptide Sequence Number=SeqID_43104
atgggggtgcaggaggtggaaggcgtgacgtgctcggcgtaccgcgcgagaacaccagacacgggacatccggtcggtcgacagaagcaaagcaataagccgatcaggtatgcgtcaagcatcatcatcagggcaggccggccgggccaagccgtggccaaggaccggaggaacgtacagagcagcgggggggacaccccggccacgggccaccccgagtga

SEQ ID NO: 1326 - DNA, 1236 bp, Zea mays
  Peptide Sequence Number=SeqID_43105
atggtgcagcaaacgctggggatgtcgctgccgatggcggcgttcgtgcccgagcagggcagcgccaataggctgaccaggccgccggggctgccgccgctgccgcaggcgttcgcggcccagcagcgcggggacgtgtgcatggaggccgtcgaccccgcggctggcccgcgcaaggcgcaccggcgctcccgcagcgacgtcccgttcggctacttcccgccggcgggccaccaccagctcccgccgcccaaggtggaggccggctggggcggccacctccccgccggcggcggcggcggcggcgacgacgacctgttcaacgcgtacctcaacctggaggggctggacgggctcaactcctccgacgaccgcctcgacgacggggacagccgcggcagcagcatgaggaccaacggcgccgacagcagcgagaacgagtcggaggagtgcgccgccgacagccgcgccgggatccgcctctgcgccgccgctgccgacaggcgggaggggctcaagagggccgccgctgcgcccgtggcgcgccacgccaggagcctgtccatggatagcctcatcggcaagctcaacttctccgccggcgcgacgggcgccgctagcggcgtcattccgggacccaacaggttcagcctcgagttcggcaccggcgagttttcgccggtcgagatgaagaagatcatggccgacgagaagctggccgagatggcgctcgccgaccccaagcgcgtcaagagcttcggactgatcgagctgcggtgcggttcgtcgcttgctagggtgctggccaacaggcagtcggcggcgcggtccaaggagcgcaagatgcgatacattggcgagctggagcacaaggtgcagatcctgcagacggaggccaccactctctccgcccagctcacgcttcttcagcgggactccgcggggatcgcgacgcagaacaacgagctcaagttccggctgcaggccatggagcagcaggcgcagctgcgtgacgcattgaatgaggcactgacagccgaggtccaacgcctgaaggtcgcgaccgcagagctcggggattcttgctcgtccagcaacctagcccagcagatccaaatcagcgttcaggaccagatgtttcaactgcatcagcagcaggcaacgcctataccgttctaccagctgcagcaggcgcagcagaatggcgcagggaagaagcatgagccgacggaatga

SEQ ID NO: 1327 - DNA, 2169 bp, Zea mays
  Peptide Sequence Number=SeqID_43106
atgacatcctcatccggtggtggtctgtctccctacctcaccgatggccacgaaaaaagggacccgaaccaagcacaagattgctctgggtcaagcacgcttaacccagagattctttcgaggtacttcattgttatcgatgatgtatgggacgaggaaatatggaaattgttcgaatatgctctcgttgacaatagctgtggaagcagggtgattgtgacgacccgcaattttcgtgtggcaaaactgtgcgcaactcctgttgctggtgcattgtttgaactcgaacctctgtctaacgcagactccaagaggttgttctacaaaagggtatttggtaaagatggcggaaatcataatcagttggatgaaatagctgggagaattttgaagaaatgtggtggggtaccattagctatcattactacagcgagtttgttggcttctaaacccaaatcaataaatgaatggtatcgtgtgtacagatcccttggttcaggacttgagaaagataacactgatataaagcgtatgcatgatattttatctctcagttactatgagcttccttcctatctgaggccttgtttactgtatctaagccttttcccagaggattgcagaattgacaaagacagccttgtgaggagatgggtagccgaaggccttgttgtggatgaacaaggtggggggaatctgtatgagttgtatgaccgtggagagaaatacttcattgagcttgttaatagaagcttcatccagccactagacatcgatggtgtagatggcattccgaatgcttgctccgtacatgatctgatacttgaccttctgatttctctgtcagtcgaggataattttgggttaaggttggattctcagaacttcaccacctcaacagatagtgaggttaacattcgtcgattgtcgctgcaagacaatgaggtggaagtgagtgtgccggaaacagtggacttatcccatgtgaggtcagtaatcgcatttggcgatgcttttaactgggcgccacctctgtcaaggttcaagttcctccgtgccttggatttggagggtttcccacggaagaacaaccatccaaaggaactacgacgcctgcaccatttgaggtatctgcagctacgtggctatcttcagaaagaggtgctagaagaaattggaaacctacaacatctgaagatgttggacttgagccatgcatatgtttctcagctgccagtaagcatcactcggctcagaaaccttcagagtctactcgtcggatcggatgtgaagatgccacaggggatcgggagtctaagcaagctggaagaaatgtcatggatcgaggtggaaccaaacactgcagcggagctgggaaagctgacagaaatgagggtgttgtgcgtacatggactgggttacgatgaggctggcgaccaggcttttctccagagcctgtccaacctacgcaacctcttgggtctattcatcactgagtctgagatgtgttccttagatgacctgcccgatcctggacaggccccagtaggcctccgtttctttcgtggaaccgagacgaccttccagcagatgccacgttggttctcttggctctccgagctgtctggcttaaccatcactgtgaataatctcacacaggatgacatcgatatgcttggagccttgcctgagctacgtcttcttcagctagaagtagccgagaatggcaccattgcccaagaacagctgtccattggtagcgataagctctttcagtcattggaagcattcaaatttaagcactgcgcaagatgttggctggtgctttctcaaggagtgatgacaagacttcaaaagcttgagctgtacttcgaagtgaggaagagagatgacggtgcgattgatgtcggcttggagaacctgacttccctgaagcatgtcactgttgaagttgattgctatggagccaacatcaggcaggtagaggatgtggagaccaagctcagggatgcactggatgcccatccgaagaatccaactcttgagttgtcacgagtagctacccactgcatggaacgggatgagcattcttctgggcgtcatcaaagcttcggacggccggcagacgacgatgattacagcgacaatgacagtgatgcttccaaataa

SEQ ID NO: 1328 - DNA, 201 bp, Zea mays
  Peptide Sequence Number=SeqID_43107
atggagcatgcaaggaaggtggggatggatgggaaacgtgagcaggccaggtactttgtgcacttttgtcccggccggcacagcggcactgcacagggtagagaagcctttaccgactatgttggagagagcctaacaactaatcctcctgctgtcaaaccagttctagcatgtaccctgctctgcttctcctgggactag

SEQ ID NO: 1329 - DNA, 249 bp, Zea mays
  Peptide Sequence Number=SeqID_43108
atgcctctgcaccagcacgtctccaagtcccagcacctttcgcccacgccgtcggttctccctcgcctccttgctcctgctcggctcctccatggtcgtgccctggtggatgcaccagccatggtgctcgccggccgcgactcccatcccatctccgttcttgaagtcgcccatgttagcaacattaatctcatgagctcgaaccaacaacaagagtatcaccgaccatatgattctggacaattttag

SEQ ID NO: 1330 - DNA, 375 bp, Zea mays
  Peptide Sequence Number=SeqID_43109
atggcgcagcgggaggcgcgtgcggcggataaggcggtagctgccggcggcggggagacgagggacgccagccacgtcgcgctggagatgggcggcggcgtgggggagctgcgggcggggcagagtgcgacggcgacggcgtgggcgtgcggggcggccgcggcgggcgtggggctggcgggggccggcgcgctggtgtggtgggcgctggcgttccgcccggcgcgccagcagacgtggatggtgcccgtgggcctcgtcctgctcggcacgccgctcctcgcctggctctccctgtcggcctccggcgcgtgccgctggctctcccgcctccgcggccaccagccgcccgtccgcccggccccggagcgatga

SEQ ID NO: 1331 - DNA, 372 bp, Zea mays
  Peptide Sequence Number=SeqID_43110
atggcgaacggcggcggctacgtgtgggcccttgcggcgggcttcaacgccgcgctcgccgccatctccgccaaattcatcgccactctgccgctcaaatatggcacggtgatacttttcaacgtgacaatgtgggggtgctacgtcaacagcctcaaagctttgtcgtccctccaggcaacagtcacaaacttcgccgccaacttcctctcgtctgggcttgcagggtatttcctgttcgaggagccgctgccttctaagtcttttcttccaggcagacgaacaaagcattccactatttctcaggaaggagtaaaaaaacatttcttatgcgatgatgagccgcatgataagaaaatattttcaatttag

SEQ ID NO: 1332 - DNA, 639 bp, Zea mays
  Peptide Sequence Number=SeqID_43111
atgcctactcgtcgggctaggtgggatcccgttctctggctgcatggtgacgccgaacgttttggcaccgattccggcaaaggagtgcctcatgttgtggggctcccccgcatgctatcagtgtttggtcctgactacgcactatggggtagcccacacagtgctttttgggacgacgacgacattgatcgctactcgatgattgcaggtggtcgtggaaggtggaagatgaagttgcctatcgatctaatggagtatcccttttttgtaggggaggcacttaagaagaagtatctccagaaggccaagatcaaggagtgtgccttccctgcctccttcagcgacctcgaccacgactctgatgactcttcttcttcctcaagcgacgaggaactcgagagacaggttgaggacaagctcaatgggccgtgtttcttcaccaacaccatgagaggcctatgcaccatgacacttggtgaggatgtggtgggcaacggtgaccaggacatcgacgatgactccacctccgaggtatttccttctgccaatgatcttaccgttgaggtagatgagctgacaactactttggctagtgaggacaagttgcttaggcttgctgctcataagaagaaagagtaa

SEQ ID NO: 1333 - DNA, 1103 bp, Zea mays
  Peptide Sequence Number=SeqID_43112
atggaatcatgcgtgcccccgggtttcaggttccaccccaccgacgaggagctcgtcggctactacctcaggaagaagctccggccagcctgttccgatccggcctgtcgatctgaactgctggcgatgatcttaaatttcctgctctggctggctctgctctcaatctctcaagggcattgcgggatcgggtacgaggagcaaaacgagtggtacttcttcagctacaaggaccgcaagtaccccacggggacgcggaccaaccgggccaccatggccggcttctggaaggccacgggcagggacaaggcggtgcacgacaagagccgcatcatcggcatgaggaagacgctcgtcttctacaaggggagggcccccaacggccacaagaccgactggatcatgcacgagtaccgcctcgagaccgacgagaatgcgccgccgcaggcaagctccatctccttcacagaagaaggctgggtggtgtgccgagcgttcaagaagagaacagcgtacccggcaaggatggcatggggggaccccagctacgcctaccgcgagatcagcgccatgggcgcggcggcggcggcgttcgtggaccctaacgcggcgtcgtacgcgcagatcagacgccagcagtccaacaagagcgcgcgcttcaagcaggaggccgagctggacggcggcgccgccgccgcgctgctgcagtactcctccagccacctggtcgagctgccgcagctcgagagcccgtcggcgccggccaacaagagccaggcggcgtcagcctctgatgaggttgtggacgccgccgacagcggccggcggccgggcaagaaggcgcgggctgatgaagtggccacggactggagggcgctcgacaagttcgtcgcgtcgcagctcagccccgcggcggagtgcggcttggaggcggcggcagcgtcgtcgacggccgccgccagcaacgtgggctcccagctggaccacgttgaggatgatgacatggcggcattgctgttcctcaacagcgacgggagagacgaggcggagaggtggacggggctgctcggcccggccgccggggacgacggcgactttggact

SEQ ID NO: 1334 - DNA, 246 bp, Zea mays
  Peptide Sequence Number=SeqID_43113
atggccacggaccgagaggtcaagccgatcgatgagccctatgaggtagccaagccaagcaagcctgccggggctcagcgcaggcaggcagctgctgcaccagcagtgactgagagctccatgcaccggtggtggtacttgatcgcagctgcagcggaagggatggaccagaggagatatgcgtgcgtgaaagatggatgcacggccgatgaaaagctcctgcctgccgccgtgacccggccgtga

SEQ ID NO: 1335 - DNA, 225 bp, Zea mays
  Peptide Sequence Number=SeqID_43114
atgaccgacctgaagttgatcatcaagcgggcctacatttcctccgacgacgagtggttcatgaacgtttatttattatcatctttgcgtcaccagtgctttacccatactactcttgaattggcgtaccttgattctaatgttgatatcgtgattattcacggcattgtcttattggatgttcttgacaaggagctcatcacttatgccattagagttcgctaa

SEQ ID NO: 1336 - DNA, 2241 bp, Zea mays
  Peptide Sequence Number=SeqID_43115
atgccgcccggggccgacgcgtcctccctcgccgccgccgtgctcgacgcaggcacgccaccggccgccgccgccgccacatccagagtgctcgactacctctcccgccacgccgacgaccaaccgcgggccttcttcgccgacgccttcccgtccctgctctaccgcctctttgtctccgcaccctcctccccatcattcatcgacctcgccgctgccgaccccgcgctcggcgacctcatcctctccctcatctaccccaccggcccgctcctcgccgccgccgccgccgcagaccgcctcaccctcatacgttacgtcttcccctccgagcgcctccccgactggctccgactcgccctcgcgtctcccccctccaccgacctcgcctcgccgctcctgtcgcgtcgcgtcgcctccgagctccacctctccgtcttcgagtactacctcttctggttcgcctactaccctgtctcgtccgcatcatctgccgccccggccgcatccgcctccaaccctcgactcacctcgcgcgcccgcctcgagacctgggtctctactctcgccaccacggccatccgcaaatccggtcagaagcccgaaaactcgctatacctcaggctgctctatgcctacctcagggagttcgtgccaacgcgcactccacccgttaatatgtccgggggcggcaccctgctccaccgtgcacccagccatggcgtcgatgcaatcgactcgtttgcacgggccgagttcttccttcacacccttgtccacttctggcttgtcggcgatgacttctcgccgctccccaagcagacttgccatgcactcggcttgcggttaccttctcgtgctcatgctgacttgagtgagcggccaccgtcgccaggcctgggtgatgcagtgaagctgcttgtcatgtacctcaactgctgcgatggccgcgcactagccgatgcgtgtgtgccatctcctcaagggttgtcagtgtccaatgggctctgtgatacccaggttgggttctggaatccattgatacagaggcctttgtaccggtttgtactcaggaccttcttattctgccccattggcactgcgataaaaaatgcgtcacaagtcttctctgtgtggttggcttatatggagccatggaaagttacccaacaggagctggataggtatggcaagcagcaaggcggggatgagaaggagccacaaacgactaagatggtgtacaattcatcgtggaggacgtatgtcctgtcgaattacctgttctacaactcaatggttgtgcatttcttgggatttgcgcacaagtttatccattctgatgttgcctcagtgctgctaatggtacacaaggtgttggaggtcttgagctcttccccggagctattaggtcttctccataaagtggacgctgcttgccactctaggctagtggcatcatccccagcatctgatcatgtgttgaagtatgtgccatcaatccgtgaacagctaaaggactgggaggatggtttgtcagaaagtgatgcagatgggtcattgttgcatgagcattggaactctgatcttaggcttttcagttacgatgagaatggggcttataatcttcttcagctacttttggtccgagcagagtcagagatactgcgccttccaggtgagacgcaacaagcactccagacgctggattctatcaagtcacagatgaaaacagccttccaagggcacattgaaagaattaacgggaatacgtcgttggaggaatcacataatcaacagcatcaggtgcgtggggaggtattcacacctaagcatcccagcttgaggaagggttcttgggctgatgttaaatacaaaggtgagtggatgaaaaggccaatctcagaggctgaagtagcctggcttgcaaggattctgatccggctctctgactggttgaatgacgccctggggcttgagtgtgctgatgctgaaggtagtcctgctggcgccacctacattcagtttgatgggaacacgacggtgggcgggccaagggatgctgcgagaatggctctcggtgctgtatgttcattcatggtgctagtggggcaagcggtactgaagttgatgaggtcgcacagggtgaagatcagtctgagagtgtttgcttcgaagaaactgctctcagccgctgttgtgctgtatgcagtggtggccgtgacacggaatgtatcgcgttga

SEQ ID NO: 1337 - DNA, 621 bp, Zea mays
  Peptide Sequence Number=SeqID_43116
tcatctgagtcactaaggagcagctggaacaaaaagctcaaggtcaccagccagcatccattcaagttgaggacagagcaaaggggaaagtttaaggaacagcagttcgtccaaaaggtgcaagagatgcttgcagaggaagagaagaagcgtattcatattgcgcaaggattgccatggactaccgatgaacccgagtgtttgataaagcctgcagtcaaagaaagaactgagccgatagaccttgttttgcatagcgatgtgcgtgctcttgaacgtgcagaatttgatcagcacgttttggataggaacaagtttgctgagcaacaaagattagaatgggaaaggcaacaggaattagacgaagaagaaaggataaggcaactgaggagaaccgagctgattcctaaagctcagcccatgccatactttgaccgcccattcatccccaaaaggtccacaaaacctcctacagttcccatggaaccgaaattctacctcaggccagaaaagttatcctgctttgcttggatcgccttgcctccaagttctgttaatcgctggctctgtgcttcagatgcaatcccaccgaggtttgaaatttgtcgttcaagaaactga

SEQ ID NO: 1338 - DNA, 612 bp, Zea mays
  Peptide Sequence Number=SeqID_43117
atgtcccccgagaacaaggaaccaaagctccgcctcgtccgaggcccacctcatgagtctttcccaaactccgtctcacccgagctcccccgcaagggtcttccaaaacctccgcctcgccccgcgccatgtctcggggggctcggaaacgtgaccgggccctcaacttcaacctcggctctcagcgggaatcgggcaggcccaagtcaacaacaagcacaagaccatgccatctacaggatacacaagacatcctcacacagtacgcagccaattcccgtcctccaggaagtgcctcttgagcctataaatatgacagtctacgacttctcaagggaggcaggtcaagaagggcaagcttcaccagctccaccagtggactggggaaccgtcgggattcaatcccttcaggttcaactccgaccccctagaaggcccatatacgacgaacacctacatcagcctgtacgagcagctccagggatctcagagtacgaaagccccaagaccgaagacgatctaggcttaggactagacttcttcgggctccacgaccccaaggccatgtgtcatctctcaatcgcgtctgaatgcctcgtctccaacgactag

SEQ ID NO: 1339 - DNA, 297 bp, Zea mays
  Peptide Sequence Number=SeqID_43118
ctgaaaccatttcatcccaactacaccccagtgttcaaagtgttgcctcgagtggctgatctgaccaagacagacatcgtcccggtggctatcctggatcggcgtttggtccgcaagggaagtcacgccgtccctcaggtgctgattcagtggtcagatgttccaacagaagctgctacatgggaggattactacgtcgtcaagacccggttcccggatgcaatcgcttggggtcaagcggattctgaagcggggggaaatgtcacagcggaagcagtaagtctagttaatccctag

SEQ ID NO: 1340 - DNA, 195 bp, Zea mays
  Peptide Sequence Number=SeqID_43119
atggatctcagcaatcttgcttacgcccccgtaaatctgaaacccgtagacagcccagatccacaccgggaggaagtggtccccatgggaacggagatgaaaaatgctttctcatccacgtccttgtttactcgtcgggagagaatttttccttgtttacatcccagtgaggaagaccacatccccatcctctaa

SEQ ID NO: 1341 - DNA, 1005 bp, Zea mays
  Peptide Sequence Number=SeqID_43120
atggaaatcaccataaaggcggtggcggcccttgggcataggtgcggcagcccccggccttgtcggcgtgggagcagctccccggcgtgcgcgtgcgggctgcaccagcgcacggcttaccagggcgggcgcgcggcacccccggcggcggtacggccgcccggcacggcggctcgggcgcggccggccccgccccccccccccggcaccggcgcgggcgcgcggttcctggcgcgcatgggcgcggccccaggaggcgcctgcgtagcggccctggcggcgagcgcgggcaggcccccggcggctcggctgcggcggcccttgctgcccggcggcgctgggcacgtgtcacggcgtgggcgcagccgcaggtgcgcgtcgccgtcgcgacttgtggcaccgccacggcccgacgcgagcgcggcgaccccaaccccagcgcgggcgcgacggtttcggcccaagcgcgaccccgcggcggcgggcgtggcctcccccgatcccagcggctcgggcactcggcggccctggccccggtggcctggcgcggcgccctcagccccggcggccctcggcggtttcgccgcggcggtgcccgagcgcgatcccgcggcggccggcgggcgtgtcctccccggtagcgcgattgcctacggtggcggggcatcggcggcccgtgcgcggcacccagggcgcagcggcctccgtccagatcggcgcgcgcagccggcgcacagtgcggcccgcggctgggttgggctcggtcccgatgggcgcgtgcggccaatgcaggcatctgcctcgccaatggcgcggacggcccggtcgtcgacccagcggccatctctagcacgagggcgcggcccccggcagagcgggcatgcggcacctccgacgcgaaggcatgcagcccagtggcgtgtggcccccgatggcgatgacaacggcagtccgtacgcgcagaccccagcgaagcgcagcctcgacgcggacgcggccaggtag

SEQ ID NO: 1342 - DNA, 993 bp, Zea mays
  Peptide Sequence Number=SeqID_43121
atggtggatactgcccccgcctggagcagcccgcgcgaaccgcccgcccccgccgcgaaccacccgcccgcaacccggcctccctccccgttcgcaaaacacagccgcatcctgcgcagctcaacgctgccatcctcctcagtcgcgcgaggattttgccccgctcgccacgccttcacaatcgcccaacaccaaccacctcccctttccttgcaagcccttctcccaaatccgtcgccaccctcatcccagccggccgccccttgcccgtgcaccctggccctgctcgccaccgacaccgccgtcctttttcccgcggtcaccaccaagcaccagcatacaacggatgagaacatctgtgaggagacgtggcaaccagccccgaagcagggcctctcggcgtggtacgagcccttcccgccggcaccaaacgtcgaccccaacgagcgctactccctggacgagatcgtgtaccactccagcttgggaggcctcctcgacgtgtggcccgacacggtggcgctggcccgcttctcgggcgcctattggcgtgacctcttcgactcctgccccgagtgctcgcgacactaccacctcctggaccatatggccctaggatacttcccctatgccgagctcgcggccgcgcccaccaagtgttcgatgatggtcctcaactgtggcgcctactctgttcccaacccttctcaagcctcgccagttggattcatccaatccaccccgtcttctccagctccggtcccaagcaccgccgcaagctcactcctccctgcagcggcgccgactcgaggagatggggtggtgctgcagctggtgcaggagattcaggacacgcttgcacgtggccacggtggagtgagtgatctgctacgaaatggtgcggcggtcggtgcccatctggtcctacggcaactcgatccgttgctcaccattaccgaaatcatcgccaccgacgcgtcaccgaactcatag

SEQ ID NO: 1343 - DNA, 297 bp, Zea mays
  Peptide Sequence Number=SeqID_43122
atggtgctgtgggagctcacggccatcaccgcctacttcctcgggctgaggcgcacctaccgcctcgcgctccgcatccagcgccgcctcatcccgcccaaccaccccaggatccgggacttcgtctacaggtactgccttcgccgagccccgctgccgtgcgtccgcgctcaggacgccgtcgattccgactcaatccgtgtttggggtcgaggccgcctcgattcgatggtcaacatacaacctaggaaaggaaggggaggggagataggaatgaaatctttatttcttagttga

SEQ ID NO: 1344 - DNA, 531 bp, Zea mays
  Peptide Sequence Number=SeqID_43123
atgttggtggtgttgtgtccctacagcataataaacggggcctacaggaagggattgctggaagcgttcatatccttcaccttcgcttccccttgttccttcagtatgtcggtccacaagaacattcagcagagagacatagaggtcggccggaacctcggaaacgcgatccttcgctggcttgatcgcatgaagccatcagcggagatccgcccccgtcttccaggcccaccaaacggcagcacggccgagcagttcagacatgtatcgagcgcgagcaggggcgcgggggcacagaagacctcctcctcctccaaagcttcgccccacgactccagcgggaagatgctgttctcgcgcctcaacattgggcccaagcacttcccggttctgcccacgctagcacagcccaacaggatcagcgcgagcagccagtgcaggcgcttctcctactcctacgccccgttcccgtcggtcactgccaggaggaagggtgtcttccgcgaggacattgcacagctgatggtgtaa

SEQ ID NO: 1345 - DNA, 1146 bp, Zea mays
  Peptide Sequence Number=SeqID_43124
atgacaaaaacactgctacaaaaacagcactacagctatctagctaacagggagacctgggatgggggcagatcagaagtgtactcctcggaggtcaagaaaactgaggtgctgatggaaaatttccgtagagctataggtttgcgtataaaggaaaacaaagaggtttatgaaggagaggttactgaactttccccagaagaggctgagagtacaactggtggatatgcaaaaagcattagccatgtaatcatcagcttaaagactgttaaagggactaagcaactgaagttagattcttcaatttatgatgctctgatcaaggaaaaggtggcagtgggtgatgttatatacatcgaagcaaatagtggagcagtgaaaagagttggtagatgtgattcttttgctacagaatacgatcttgaagctgaagagtatgttcctatccccaaaggtgaagtccataagaaaaaagaaattgtgcaggatgtcacacttcatgaccttgatgcagcaaatgctcagccacaaggtggccaagatattttgtcccttatgggccagatgatgaaaccacgaaagactgaaatcaccgaaaaactacgccaagaaattaataaggtggtaaatagatatatcgatgaaggaattgcagagcttgtacctggtgttttgttcattgatgaggtccacatgttggatatcgaatgtttttcttatcttaaccgtgcattggagagcccattatcaccaatcgtgatacttgctacaaataggggaatatgtaatgtaagaggaactgatatgacaagtccacatggtataccggtggatcttctagataggctggtgattattcggacagagacatatggccctactgagatgatacagatattggctatccgagcacaagtggaggagattgatatggatgaagaaagtcttgcttatttaggcgagatcggacagcagacatctttgagacatgctattcaattgatatcacctgccagcgtggtctcaaagactaatggaagagagaaaatctgcaaggctgatctcgaggaagtcagtgggctctatttggatgccaaatcctcggctcggctgctccaggagcaacaagaaagatacatcacctag

SEQ ID NO: 1346 - DNA, 1653 bp, Zea mays
  Peptide Sequence Number=SeqID_43125
agagagctggaccgtgtctccaaggaaaggaatgaattgaaaaatgaatgcaccgcgctgaaaaaggacagaacaaagaaagatcttcaaatcaaagctaaagaagcggagattcaaaatctgaaaaaagctaatgtcagctccatgaaagatgtttgcagtgcagggatgaacattgatcagtcctttcacgcccctgcaaatgaggctttgcatactggggtttcttctaggcgaacagacaagatgagtggcaaagataaggatgcccattcattgcgagacgatctctatctaaagcaagggcatcaaactgatttacttgaggctttagaactgaggcgtcgcaccatgattgataacggaatgagtacatctggagtagtgtctctggaggaggacacccattttgaaccaagaaacgctacatgcaaggaaattaaggcgataggagtccagacagataacacatctgacaatgaacatcttgactgcaagaaattattggttgagcgtatatctggtaacctacgtgcaatgtggggcatgtcacctaacagtttatcaagcaggaatttgatatcaaagatcaatgtttcttgttcagaagaaattttgtcacttctccagcatacgagattgtcagacaactgtgaaccctcttctcaagcaatctcctccatgaatgaagctatttcccaactgtatgacacgttcattaagttcattaagatgaatagtgggaagatgtcaatacaaactttccttgaagcattgctaaatctatgtgcttttgatgatgctgctatagtcagtagaactttgagggtattcctcaaagttttacagcacttactgcaacatggagccaagtctagtgaaaggaacaatgtttctgttgaaccatatgttaacgtactcatggagaacaaccacaaagactgttcgaccttgttgagaccagtggatgcagaagattcattgagactgcataatatgtttcttccttttactttctggagttcacttttcactggcatgcttcaaattggggtcaagtactcacaagagacaattcgtactgatgcattatccataatgattctcattgtaaggacaacagatcccatagaggaacgccagaaattcggatttacttcagtaatgacgagattgcatctgctattgcagaaagagaacggattgcttgttaagaagcattctgtgcgtctacttttcttgcttctgaattgcccagtgatgttgaagttgctgtgtagtggaggcaaagacggctccaaacagatgggatcggaagcttgtgaaagtaatagatcacaagaagtcataagctcagttcttgtggatttatctgattgtttgacatgtggggaaacttgttctctggggattgagctttgcaggctcgtcatcattctgctagcttatatagcttccagtggcaaattgggatatgaggtgcttttagttccaatgtttggtgatgagagaagctcttatcctgctaaaccggctggcatcacacgcaaactattcgaaaccaaccttggaagtgctgacgagaagcaagttatgcgcgacctggacgatcgatgttgcgaaccggctgccccatacgtggatggcaaatga

SEQ ID NO: 1347 - DNA, 243 bp, Zea mays
  Peptide Sequence Number=SeqID_43126
atggatccacacatccgccgaacggatggcgccaacgatgtggggttgcggctgttcgatgccggagtcagccagtcgagcacgaaccacgatgccagaccgtcgtgtgtagaggcgctggtggacagggtcggggaagctgcgacgatgaggaggatgtcgtgttgtgggagttggagaggacagagacgtggttatcgccgtgacagccgcggctgcgagggagagcgcagcgtcgcctag

SEQ ID NO: 1348 - DNA, 141 bp, Zea mays
  Peptide Sequence Number=SeqID_43127
atggggaggctagaaccccgggcagagtgggaatcacgacttgtgggtaaagtgtacaacctctgcagagtgttagaaacaggaggtgaagctggcaacatggaagatttcgaggagtttcaggactacgacgagttctag

SEQ ID NO: 1349 - DNA, 2145 bp, Zea mays
  Peptide Sequence Number=SeqID_43128
atggacggcggcctcgacgacgagtgggaagctagcttcctcgacgaggtgatacgcgcgacggatgaggctgaggctgtcgtctcccgcaaccctaaccccactcccacccccgcgcccgctcccatccccacgtattatcccttggccgccgcccccgtctcctacctcccagcctcttcggtctcctacatccctgccgcttcgcacctccgctccgcgatcagcttctcccctccacgggacctctcccagaggccgccgctcccgccgccgaccgctgccaccagcaccagggatgcgctggcgacgggggccgacgtcggtcgcgacttctctcctccgccccagctctcccagcgcccggcggctgatgagggcagcctcgtggccttcgcggcgtcgagctcagccagcgaccgccgcttcattagcacgggctgtggagaagcgggcgcgaagagggaagcgagggagatcgagaggctcaaaagagagctggaccgtgtctccaaggaaaggaatgaattgaaaaatgaatgcaccgcgctgaaaaaggacagaacaaagaaagatcttcaaatcaaagctaaagaagcggagattcaaaatctgaaaaaagctaatgtcagctccatgaaagatgtttgcagtgcagggatgaacattgatcagtcctttcacgcccctgcaaatgaggctttgcatactggggtttcttctaggcgaacagacaagatgagtggcaaagataaggatgcccattcattgcgagacgatctctatctaaagcaagggcatcaaactgatttacttgaggctttagaactgaggcgtcgcaccatgattgataacggaatgagtacatctggagtagtgtctctggaggaggacacccattttgaaccaagaaacgctacatgcaaggaaattaaggcgataggagtccagacagataacacatctgacaatgaacatcttgactgcaagaaattattggttgagcgtatatctggtaacctacgtgcaatgtggggcatgtcacctaacagtttatcaagcaggaatttgatatcaaagatcaatgtttcttgttcagaagaaattttgtcacttctccagcatacgagattgtcagacaactgtgaaccctcttctcaagcaatctcctccatgaatgaagctatttcccaactgtatgacacgttcattaagttcattaagatgaatagtgggaagatgtcaatacaaactttccttgaagcattgctaaatctatgtgcttttgatgatgctgctatagtcagtagaactttgagggtattcctcaaagttttacagcacttactgcaacatggagccaagtctagtgaaaggaacaatgtttctgttgaaccatatgttaacgtactcatggagaacaaccacaaagactgttcgaccttgttgagaccagtggatgcagaagattcattgagactgcataatatgtttcttccttttactttctggagttcacttttcactggcatgcttcaaattggggtcaagtactcacaagagacaattcgtactgatgcattatccataatgattctcattgtaaggacaacagatcccatagaggaacgccagaaattcggatttacttcagtaatgacgagattgcatctgctattgcagaaagagaacggattgcttgttaagaagcattctgtgcgtctacttttcttgcttctgaattgcccagtgatgttgaagttgctgtgtagtggaggcaaagacggctccaaacagatgggatcggaagcttgtgaaagtaatagatcacaagaagtcataagctcagttcttgtggatttatctgattgtttgacatgtggggaaacttgttctctggggattgagctttgcaggctcgtcatcattctgctagcttatatagcttccagtggcaaattgggatatgaggtgcttttagttccaatgtttggtgatgagagaagctcttatcctgctaaaccggctggcatcacacgcaaactattcgaaaccaaccttggaagtgctgacgagaagcaagttatgcgcgacctggacgatcgatgttgcgaaccggctgccccatacgtggatggcaaatga

SEQ ID NO: 1350 - DNA, 177 bp, Zea mays
  Peptide Sequence Number=SeqID_43129
atggccgccgcggcgcacgcgctatatatggggcgggccagagacacagacacctccatctccatgctgcgcatgctaggacacgctggggtagtggggtggcagtggcattatttcgaggctgatttggatcttgcggatcacggtgctcagaggtatttcgagtcatacagataa

SEQ ID NO: 1351 - DNA, 1191 bp, Zea mays
  Peptide Sequence Number=SeqID_43130
atggccgagcaaaccctaagcctcctcaaggttcggcgctcctttccgatgggtgcttccgttgctgggttcgaaagttttaattgtatgtttgagttgccagttgtcggtgaggcagctcaacccgcggcagtacactgcagatatcccgctggtgatgttttaagtcctatattctctcatctctctgattttaattactttctaccaaatctgtctgggaggcaaccagttgctattccaaatttggaggtttggtttcaaaggcctaaggacattgttcgtaaacttcagtcaggcgatcttgaccttggtgttgtgggttttgacatagttagtgaatatggaaacggcaatgaggatttagtggtcgttcatgatgctcttgagtttggacattgtcgtttgtcccttgcggtacctaaggaaggcatttttgagaacatacatactatggaagatttgctaaagatgactgaatggacagaagaaaggccactacgtgttgttactggatttggatatctaggcaataagttcttaagagagaaaggttttaagcatgttcgttttttatctgccgatggagctcttgagtcatatcctcctcttgcgagttgttgcgtaaagaggctatcaaggttaattcatgttgctaatttcctcccccctgtgaagatgggtatggctgatgctattgtggatctcgtgagtagcggaacgaccttgcgtgagaataacctaaaggaaattgatggtggagtagttctggaaagccaggccactcttgtagcaagtaggaaatctctgcacaagcgtaaaggtgtgctggaggttactcatgagttgcttgaaagattagaagctcacctaagagcaactgcagaattaatggtcaccgcaaacatgaggggcaacagcgcagaagaagtggcagagagagttcttagccaaacatcaatatggggattgcagggcccgactgtaagtcctgtctatcgcagacgtgatggaaaagttgatgtggaatactatgccattaatgtggttgttccacagaagttgctttacaaatctatccaacaactgagatcaattggtggcagtggagtcttggtaacaaagctgacctacatattcgacgaggagacgccaaggtggcgcaatctcctctcggagctggggttgtaa

SEQ ID NO: 1352 - DNA, 618 bp, Zea mays
  Peptide Sequence Number=SeqID_43131
gcccatctgtcccctctcgcatccgggtccgctgcccctgaccccacctcccgacgtcgtcgccatagtccacagttccacacacacaccaccctccgcacgactctcagcaaccgacacccacgcaccgccgtcacagtcgttcacgcggggatccgtccgccacacctctctccaccccacccgcctgtcatccccgacacgggagatccgtccgaggcggtcggtcgtggaggcgatggcccgacagtgcatggttttgtggtgtgcggcgggtccaaactccccctcgcgctccctcccggtgacggcccctcgcctcagccgcccgcgacgtcgtgcgaccacctccaagaaccggggtggtacaccgttgaggtgcaaatctctgtctctcttccctatatcttgcaggtgcttgaggtgatccacctcgaccacgccaacgtgtccaaggcggagttgaaggagaggcttgccaagatgtacaagccaactgctgctcagtctgggtgcaccggacagtgtccggtggtgcaccggacagtgtctggtgcgccaggctgggctctggcgaactggccactctgggaattcgtcggtggtgtacggctataa

SEQ ID NO: 1353 - DNA, 402 bp, Zea mays
  Peptide Sequence Number=SeqID_43132
atggccgtggagacgtcgccggggccgcaattattggcgactgatgacgggagaaccgccgccgccaccggaccggaaaaacgcactggaacgagcacgggagaggaagaagagagatgggggaaaaaggagtggcctaacgtagaacgcgggagaagagagatcgagacggttgccatgtcgctcaagccaagcgtccgccgatgtgctggcggctggcgagacatccacgtccggcccgacgacgaccgaccggggctatttaattcccttgcaagccatggttgtgtgcgtgccatgccgcccgccgtggtcgcttccggggacgtgacagcgccaccgacacaagacgcttcggtttttgacgcggctgggccagatctggccttcggtctcgtatag

SEQ ID NO: 1354 - DNA, 168 bp, Zea mays
  Peptide Sequence Number=SeqID_43133
atgtcgcgggactcggtccccgtgggggaaccaccaccgcgcgccgcgagcccggtgggtcgtggacgcggagcagcggaacccgaccgtcacggcgccagccagctggggccgcccaccacagacatggtcgcactgccactcgcatcgcagaacgcagatgggcag

SEQ ID NO: 1355 - DNA, 267 bp, Zea mays
  Peptide Sequence Number=SeqID_43134
atgggcaaagatgaggagggcgcgcgtgcgctgcttcgtgccctctctggtgttggcgagaggccggcccagcaggcgcgccttccgcgcatggcgggacagagacgaccaaggaacggaggtggcgggtctaactcgatcggcgatttcggcggcggcatacatgggaaagccaggcatttttctcgcagtccaacaagtaccctttccgttagctttcctctccatgcatattgcagcattgcacggtacggtggtggtggttaa

SEQ ID NO: 1356 - DNA, 630 bp, Zea mays
  Peptide Sequence Number=SeqID_43135
atggcgatgcagacgggggtcgcgacctccaaggtcctcatcctcgtcggtgcagggatgacgggctcgatcctgctgcggaatggccgcttatctgatgtgttgggagaactccaggagattatgaagggtgtaaatcaaggaacttcttcgggtccctatgacattgcacttattcaagctcagattcggaatttagcgcaagaagtcagagatttgacattgtcaaagcccattaccatactgaatggcaaatctgactcgggaggcagtttatcatcctacatactgccagcagcagcagttggagcaatgggttattgctacatgtggtggaaggggttgtctctctcagatgtcatgtttgtcacaaaacacaacatggcaaatgctgttcagagcatgtcaaagcagttggagcaagtttcatcagcactagctgcaacaaaaagacatctaactcaacggcttgagaatttggatggcaaaatggatgaacaagtagaggtctccaaagctattagaaatgagtttttgaagagcaccattactattcaagaaactatgctactgccttggaactctgcatattttgagatacaccattatgtatgtctggagacgacttga

SEQ ID NO: 1357 - DNA, 600 bp, Zea mays
  Peptide Sequence Number=SeqID_43136
ggtaatgatggtccctcctgcgacgtggtcggtccgagcccttggtcgggcgaggcggaggctcctccgaggtcgaggtcgagtctgtcttccgaggtcgaggtcgagtccgagcccctaggtcgggcgaggcggagaccgtcggctgaggccagggccgagccctggggtcgggcgaggcggagttcgtcgtcttccggggccgaggccgagtccaagccctgggtcgggcgaggcggagttcgtcgtcttccggggccgaggccgagtccgagccctggggtcgggcgaggcggagcttcctatggcgcccgaggccggacttggctgttgtcagcctcactctgtcgagtggcacagcagtcggagtggcgcaggcagcgctgtcttcttgccatccttgcattaaatgctcctgcgatacggtcggtcggcgtggcgattcggccaaggttgcttcttggcgaaggctgggtctcgggcgagccgaagccaaggtcagcgcagtctgggtgcaccggactgtccggtggtgcaccggacagtgtccggtgtgccagactggctctggcgaactcgtcgctctcgggagttgattag

SEQ ID NO: 1358 - DNA, 198 bp, Zea mays
  Peptide Sequence Number=SeqID_43137
atggctcggattagatccgctcgtccatcaaccgatcgacgccagcgcgtggtttgccacctcaacaccgacgcgcggtggctcacccccgaccccgcggcggatgccatcgccgacgacccccatacggcgagccatcaggcgattcgtcgcctcctaagcaaatatgagactatctactctatcccaatgagttag

SEQ ID NO: 1359 - DNA, 342 bp, Zea mays
  Peptide Sequence Number=SeqID_43138
atgacgaatgctggtgacgggagggacaatcaaaatactgccgatacaatgataaatcgcttgaggagaggcttcagtttggctgtgacaggcagcaccatcaggacatcacaccagacagtatcgggatctgagatagttattgttgccaccactatatccaggcgcaaggaagaggcagctagcgacggtgccggtgccgatgagctgcgcgcctgcgcgtccttgacctggaactggagcttggcgcgtgtgcacgagcggcacagcgaagtgctagcctcctcggtcagcccctcgcttccatgcccacacctcccaccttggactcagataacttaa

SEQ ID NO: 1360 - DNA, 933 bp, Zea mays
  Peptide Sequence Number=SeqID_43139
atgccggggccgagccgcgtgcacggacgaacaggctacgtgagcgagcgaacgaggccgcggaccgctgctacgcacgcgagcgagttgctgctgcgaacatgtcgcagacgggctgccacgcgtcgtgcaggccgccacgagcaagccgcgcgggctgccacagacgagctaggacgccagggggcgcgccacgccacgacgtcgcgggcgagccatgcgagcaggccgccgagccgggcggggctgcgcaccgcgccgaagccacggcggggccacgaccgcatgccagcagccagggcggggctgcacactgcgccgaagccacgtcagggccatggccgcgcggcagcagccagggcaggcctgcgcaggacgccggggcgggggtcgcgacggggaagaacgacgagtcggggcggggggtcgcgtgcccgagccgcgcgccgcgcaaagaacgcccgtgccggggccgaccgcgggcgagggggctgcgcaggatgccagggggccgcgccgggcgccacggccgagctccggccgccatggccgagccgcgccatccggccgaaccgcgccggggccaaccgcgggcaggcgcggggaccgcgccgagctggggcaggacaaggggacgcgggcgccggaccgagccgggcgcggacgagccgcgtcgccacgccatggccgcgcgcaaggccgcgccatggccgggacgtacgccgcgccgagcgtgacgaggtcgagaacgaagaggaaaagggacggggagaaaggagcgggacgggctcacctcgaggagcgacggcgacgcggccaggtgcagggaggcggttctcctgtggccaggcgatgggagaagagagaggcgtcgggggagcgatttgcgcgagggagagagaagaacgcgagttcgtgggagagagaagatga

SEQ ID NO: 1361 - DNA, 2139 bp, Zea mays
  Peptide Sequence Number=SeqID_43140
atggctgcaatggttggagcgcgtagggcgctcttggccgctcggttctctcctcgcggcaccatcgcggcgtcggccgcgccagctcccctctaccggcccatggattcgccactcagggtcatcctaaaagcatggttcttttatcttgcaggcttccagctgaaagagtttgtctacagtcttgggttccacatcgaggggctggtacctttgcatctgaaaggactgatgaagattatcagcgtgagtggggacaaaacaaagcagagagatgtcacttcagctggttccacaacaggtactcacaaaaataagggtgtggatggtgttggtggcagttctgagcaacattacagaagtggtggatcatatggctttcaaaacaatcatcagccatatactggtacaagagcgaataatgagagatacaatgcatcacaaccttatagaggtagtggtccatacagccagcaaggccttgatggacatttttcaaatgatcgtcaacagtacaatggcacagaagctaatagtacatatagctctggatactacacccaaagtaagcagaagatttatgaaggagagggagctaataatgggcagtatggatatggtccttcaggacaaccatgtccgaacccagttggaaatagccagcgagttcagaaacagcaatatgttgatcatagatctgggggaagttatccagatagatctgggcatcatccctctcaatatgtaaatccaactcattcccgtaaggagcatgttgcagggtttcagcaaggcaacaatagtaattttggatataatgcttcgcaggcatatcaaagcccttatttcactaggcaggctgatacacatagtacttctcaaggatattccatgtacctaaatacagatgtgcaacgcctctctcatggagttcatcaagaaaaacattcacatgcacaatctgctggatcatttgggaaccatgtaaatagtgcacctcatgaatatggcaaatatcatcagtcactacaaggcaacccttcaaatgttggatcgccttacgaagtacctagtgaagctggcagcaaacacaaatgtactgttgaagaactggagaagttttgtgatgatggcaatgtaaaagaagctctggaagttttggctatgctaaaggaaaacagaattgtgctacatgctcctcagtacttcagattgatgcaagcatgtggtgatgcaactgccctttcagaagcaagattaatacatagtcaaatatctgaatcatcacttactgttgacacagattttcaaaacaaaattatggagatgtatgctaggtgtggttctatggaagatgcaaagaagattttcagttctatggatcatcataatttgacttcttggaacactatgatctcaggttttgtgcacaatgttcttggtgaagaagcaatagatttttttgaacggtttaagcagacaggggacaagccagatcatggcatgttcagacatgttttcttggcatgtggaattttgggatctgttaatgaaggaatgttgcattttgaatccatgcagaaagattttggcatacatcccactacagagcattatgcaagcattgttactatgcttggacagtctggctacattgtcgaggcttatgaattcgtggaacggatgcctgtggaaccaagcattgagatcttgcaaaggaaaaggaaaggaaaaaggcaagtgtcgccgaagctcggagcaaggtccatgaatacagagctggcgaccgatctcacccctgacactcctaagatctatgaagagctgaggtatttgttggctcacatgaaggaagctgggtatattgctgacactcgatttgttcttcacgatgttgatcaagaaaccaaagaggatgctttactggctcacagtgagaggctggctatcagttacggtcttataacaagtgctccccgctcacctattcgggttataaagaatcttcgatcctgtggggattgtcacacggctttcaagataatctcaaaacttgttggacgtcagatcattgcaagggatgcaaagaggttccaccacttcgaaaatggtgtgtgttcttgcaaagactactggtaa

SEQ ID NO: 1362 - DNA, 1305 bp, Zea mays
  Peptide Sequence Number=SeqID_43141
atggacccctccccgcagtcgacgccgcccaccggagacgacccggcagcggcggcggatcccgacctaccgaggctcacggtgacgcaggtggagcagatgaaggtggaggccagggttggcgacatctaccgctccctcttcggggccgcgcccaacacgaaatccatcatgctagagctgtggcgtgatcagcatatcgagtatctgacgcctgggctgaggcatatgggaccagcctttcatgttctagatgccaatcgcccttggctatgctactggatggttcatccacttgctttgctggatgaagcacttgatgatgatcttgagaatgatatcatagacttcttagctcgatgtcaggataaagatggtggatatagtggtggacctggacagttgcctcacctagctacgacttatgctgctgtaaatacacttgtgacaatagggagcgaaagagcattgtcatcaatcaataggggcaacctgtacaattttatgctgcagatgaaagatgtatcaggtgctttcagaatgcatgatggtggcgaaattgatgtccgtgcttcctacaccgctatatcggttgccagccttgtgaatattcttgattttaaactggcaaaaggtgtaggcgactacatagcaagatgtcaaacttatgaaggtggtattgctggggagccttatgctgaagcacatggtggggctgggtggcttttcgtcaaggagtggaatgcggatttcaaggacgaactaataaattggttgatggttgctactccttttggcagaaatctagtgtgtgaccagggagctgccattgctttcacacaaaagttaattacgattgttgataagcaattgaagtcctcgtattcctgcaaaaggccatcaggagaggatgcctgcagcaccagttcatatgggtgcaccgcgaaaaagtcttcctctgctgtggactatgcgaagtttggatttgattttatacaacagagcaaccaaattggcccactcttccataacattgccctgcaacaatacatcctactttgttctcaggtactagagggaggcttgagggataagcctggaaagaacagagatcactatcattcatgctactgcctcagtggcctcgcagttagccagtacagtgccatgactgatactggttcgtgcccattacctcagcatgtgcttggaccgtactctaatttgctggagccaatccatccactctacaatgttgtcctagataagtaccatacagcctatgagttcttctcagaagagtga

SEQ ID NO: 1363 - DNA, 315 bp, Zea mays
  Peptide Sequence Number=SeqID_43142
atgacgtattgtcgcgtcctttctggtatacgggtcaatgtagagattctggtgttgaggtctcctacaatcggggttgactggccccacgagacagtggtgatacatttgagaccgtacgccgggacgtttaatcgtgtcgacagtgacctcccggcaccttcggtgcgccgcatgtatgtacggacgtggctcaaggatgacacgtcttgtcatagccaatgtgggtcaatagtacttggttgggaactccgcctcgtggagttgctcggtcttagttggtcggccgctccacctcgccgggttgcttggtag

SEQ ID NO: 1364 - DNA, 318 bp, Zea mays
  Peptide Sequence Number=SeqID_43143
atggcggcggctgcccctgcccccacccccacagaggaggggacgcacgcagcacaccccggttctcctggcggtgacaacaaatcatgggacacgacattggtgcccccggccacccccatcctcagcagacaaaactctcagatctttcgctcctatatgctcccgtcactctgggttcctctaagaggtccactcagcctcgctactacctcctcgcttgctgtcgttaaggacgacgaccacgaggctacgactcgcccgaggccaagctcgggcaggacacatggtcacgactcgctcgaggccatcccctag

SEQ ID NO: 1365 - DNA, 906 bp, Zea mays
  Peptide Sequence Number=SeqID_43144
atggccgaccacaaggaggagcctgtgccggagtctgtgatggacaagatcaccgagaagttccacggcggggactcgtcgtcgtcgtcgtctgactcggacgacgagaagaaggggtcctcgttggcgtcggcggcggaagccatgaaggccaagatctaccgccttttcggccgggagaggcccgtccactccgtcctcggcggcggcaagcgcacggttgtggcgtcagggagggggaaaggacgtagggaggaggagaatggctcgcatctgttgggagcgtcaagctgctccatcgtcgtcgttgtagccatcgcggtcgacatcctcttcaccatggatagtgccgccccggcaaccgagagggagatgaagatctctggcggggtacttgctggtgccacggccatctggctcctattcgaggtcatggagtaccatctcctcaccttggtgtgccactgtctcatcctctcgctggccatcctcttcctgtggtccaatgcctccactttcatcaacaagtccccaccgaacattcctgaggtcaaaatccctgaggatgtggctgttaatgttgccctgtcactgagatatgagatcaacaggggctttgctaccttaagggagattgggcatggccgtgatctgaagaaattcctaattgttattgcaggtctctggcttctttcagttctcgggagctgctgcaacttcctgacactgttctatattgtctttgtggcactgtacactgtaccagttctgtatgagaaatatgaggacaaggttgatgcttttggtgagaaggctatgactgaactgaagaagtattatgccattttcgatgagaagtgcctatcgaagattccaaagggcccccttaaggataagaagcactag

SEQ ID NO: 1366 - DNA, 339 bp, Zea mays
  Peptide Sequence Number=SeqID_43145
atggcggcggctgctggcggcgtgcggcgagccctcgcggcgctgcgctccggttccccgtctactatctctgcaacgctctcccgccaggcggcagctcgctctctggagctagcggccgcgtccctgccgcgcgcctctcgccggcgcctcgcgatctcgagggtgccggttgcggcgctcggcggcgtccaggcttcgctgatgccgatgcacaacgccaccgcgtcggcgctgctcacctccatgctcgggcttaaacctggctcttggggctggctctccgaaggcccttttgggatggttattgaggataggctagaaaccaaggacacttaa

SEQ ID NO: 1367 - DNA, 2067 bp, Zea mays
  Peptide Sequence Number=SeqID_43146
atgaacgaaggttcagcctccaggaaaaaagtcgtgcctagcatttcagaaaaccaggcttgctgtgcaaccactttctgcaatgaaagatcttgggaaactaatgcatggcgtgctcggttagtaaaggcagtttgtcagaaagaatctattttgccaacgaacacagagaatccaattttaccttcttccataggaatttcatgtgatgcagtagagttctcaggcaaattggtaggttcccaaggcaagtttcaaagcctgggtgtaagtagtaatgctctagaaattcattctcatgacaattgccaagatccggttctgcacgaaagccataaggatgagcctgttattgctagaggtgagtcagcatctggtgttaatattgttgcaagatgtgagtcggtacctggagttgattccagcaattttgtgagaggcaaagaaaaagttatgtacaatgacagcaattgtggtaacaatacaagggagggtgatgacagcaatgagagcatcgagagctgtacaagtacaaaagccccaaagcgcaagcatgcgcagtgttgtgcagccacgatgccttcttctggaaacaaaagatttagaagagaagacaatgagagttcttgttcgggattattgcaaaaatgtggtacatctttcttcaactggatgtcatcactcacgaatgggttacccatgctagatggagccactgctgccgttccacttgaacagaagttttcagcaagtacaggagatggatctgcagcaccttcccagccacttcaaaacaaccgcagcgttcctatgcaattttttggcttcaattcgctcttccagtccctgtatactcgtaatgttatgataacttcaggagataattgtcgtcaaccagaaagcaactgtgctggacatgtgttcaatagactgaccctggaattaaatgatagcaattctatgttgaacaaagaaattggcatgggtagagaaactcttgatctggctactcagacttcagctgctgaaggatttcagatgatttctggtggctgtagaggaaatgttcagagtcaaattgatattttccaaatgagaccagaaagaaatatgaaactgcccagttccagtaagtttagctctagatctctagaagaaaaacaaaatcagtgcacagctgcctgctcaaatgatgcaacacaaaataaaggtggtttgagggaaagcttgtgggtaactcggcttttgccaaaagcatcagtagaattgatggaggcaacaccatgcaatgtagagaatgctgttagtccacaggctgtgggtgacaagttgtgttgtccacctcttcagaattttaatttggagaaggaactaaataatatacaatacttcactggaagaggaagcagcgatggtgtaacaagtagtaaatgtccagcaacgcctccagaggaacctaagcaatctgaaacaatggcttctgtttttgcaaagagattggatgcacttagacatgcaaacacctctgcagtaagcttggctatcgcgtgtgagcatggaagtcccaaactgagaaaccacaaaactaactcttttgttgttagttacagcagccatgataaagtagaggcaggacatgaaaatcataaatcttctagtggaaacggaagaatagttttgtgggtaggtgacaaaggcaaggaaccgatgtgtctaaacaatgaagaattaagaggaaacttcatatctgagcgtgagcatcagcatcatggagggaacacagctggaaaattggcaactcagcataatttagaactgaacatattggctgaagatacagacagaagccaagtagaattgaagggaggagtcttagattttatggcaggtccatcagacaacaagcaaattgtaccttatggcactatgtctaatgatgaatcaagtgttatttttggtgccttacataggcttcgcctgtcccgctcagatatcttaaggtactccactggatttctggatcatttgaattttgtgccttccaggaagcacgtgtattttttatga

SEQ ID NO: 1368 - DNA, 324 bp, Zea mays
  Peptide Sequence Number=SeqID_43147
atggcgatggtggcacacaaatggctacctaccccctcggtgttgcgtgtagttgtcgttgccgcttgtgataattgttggttctgccaactcctccagaaacttaatagtcctttaaccaagagaaccctagtctattgcgacaatgctaccactgcgttgatgttttctttgccacaggttcagtcagttgggtgtgtctctggggctactgtggatgagctgaaggcatggtggtctgctgctatgaagggtgagtggaagctaccgtcgaaggaagaactgggtgtgaaactaagagaaaaagagctacttcgctcgtag

SEQ ID NO: 1369 - DNA, 195 bp, Zea mays
  Peptide Sequence Number=SeqID_43148
atgtccttcaaaccgaagcttagaaagcttgagaaactaagcaagcgttggttccttcggattcatgataaaagcgtacacgatgagaagagcatgatcgtgacaaagattgtcgttgctccgaagctacaagcaagggagcttcggcttatccgtgggaaaagaaaccgacttaaaggagaaaaggctatttag

SEQ ID NO: 1370 - DNA, 3615 bp, Zea mays
  Peptide Sequence Number=SeqID_43149
atgattctctccgccttcgatagcgagctctctgtgcgggtctccgaataccaatgggatgcttcgttggccccacgcgtcggcgactactcgggcaaaacagtacgggtacgcggaacccaaggtgtcagccgtggagccgacaacggccaatatcccctccgagtcgccctcgcggacgaggaagaagactctggaaatgtgaccccacccgacaacggtagtagaaggatgcaggcgcgcgggactggcctatgggccctgcatggtggtgatcagacggcgggcacgtgggtggctgagaggctgaccccgaggtcccacaggtatattctagtttaccctcaaggatgcgatgtctccaatcacttgtcattgtttctttgcgttgctaatcatgaggaacttctcccaggatggggccattttgcccagtttactatagctgtgggcaatcttgatccaaagaaagttaaatattcagacacgctgcacaaattttggaagaaggaacatgattggggatggaaaaagtttatggagctatcaaagattcaagatggttttcttgttgatgatgttcttgaaatcatagctcaagttcaagttatcagaaggaaacttatcaggcttattgaagacaaaatgaggtggtccagtttccgtgctttctggcttgcgattgacccaacaaccaaacatcgcatgtccagagagaagagtgacatcatattgaaaatggtggtgaagaatttttttgtcgagaaagacgtgacctcaacattagttatggatgctctatatacaggtttgaaggctcttgaggcctgtagcaatggcaagaaaggaatggtaacttcaattgacttggaggagctatcagcttctatggtccatgtcgatatggacatgtttgttttggctggtgacttcataactttgattgagagggcagctttagagcccttgtcttgtcaatctctgtcaccaaaaggtgacaaatgttcccaaacccgtgctaaggatggtggtactggagaaattaacaaagttcctattgagcatcaagaaaggcgtcttacggagcttggtcagaagatacttgaaatatttgttctatctcatatatttagagccgcccccggcaaatggaaaggggagctggggtgcaggagcccgttcgggtgggggctgggcgcatggaggccgataagggggcttgcagtcagcatggggagtgcaggggtggggacagagccaccgccggcggctgggaaggtggccacgaggaaggaaagctgggggcgtaggagcccgctcgggtggggggccaggcgcagggaggctgatcatgactccggcgatggggagggcacccgctgtcgctgtgaagccgagtgtgggctcgagggccgtgtctgcgaagaggtggagcagaggcatgggggtccacgcgttggccacgggaaagccgagcgtggtaccagcgacgtggaaagcactcaccgtcgccgggaagacgggcgcgggcgtggggccaaacaaaagaagaacaatcgtaaggttaaggacaaggaaagagaagagagatctgattcaaaatttttagaaaggggtaaagatgtaagcacaaatcatgacagggaggattctaagcaggtagggcaatctgctgtggaagctgataactttggacaacgtgctttagatgtatcagacaatctaagtggatcaacaggggtatgccaaactgacacatgtgacaagattacagaacctgtgactgtgaacgcaatgaatgatgttggtattgagatgaacaattcacaaacatggaaagatgattctactgtggatatcgagacactgaaagaaattgagggcagggaactgctcaaggcccatttggaaaagaaggcagctgctgaggctgcagtggattcatccttagcatcctcatccaactccttagaaaagactccccaggttctgaaggggccagatcaatcctcggtaattgttggtgatgcaaaaattaatgcaccacttccaaaggctgtacctgtagccataagtgacgacaacaatggagttattccagcaacggcaacatacaccataaacaccaaacctgtgcttgtcagtcccactccaagtaaacttgagccagttttgtgtgaagaacatgtatcaagttcaatccagcaaacaaataaagctatcctgatgccttcaagatcaccactagttgataatgaggctaatccaactcccccaaaatcacccgtgccacaggctgatacagttgctaaagctactccagctccacccaaatcaccaatgctacagattgatacaattgctaaagctacagcagctcctacaaaatcttctacttcacagcttgataaagttgctaacatccaagctgcccccaaatcacctgcaccccagcctgatgaagttgcctcacatcataactcagtatcgggacagattctgtccacatctatctccaagcctcgagaagatacggtttctaagagggctgcagtcgttactgtacctggaactcctacaccaatgtcaaggcctacaagtgcacctctgctacaggtaccaaaatcaactatgctacctacaccgtcagtccaagtttctccaatgctttcacgttcttggactatgtcagcccaagttcctccaatgctttcacgttcgcggactgtgtctgaacggccgaacaatgagccttcacctaccgccccaatgtatgtaacacagacatatcgaaatgcaattcttggtaagggccatcttgatacaaccccagcaagtcttgagcaatcaacttctgtttcgccgaatactgcagcttcacagccatggtcagcatatgcgatggcaacatctgtcatggcccctccattcgaaaggaatggccagttaccaggtaagcaaggcttcatgtttgggcctagcagggcagaaacccttgataactggcattcatggaaaggtaacactgatgttaacagaaatacgtggaaacatgattttcctaaccagcaaatgaccaattgtgatgctcatttacaccacttgaaagatatttcttatcagcaattgagcagcattgggacggaacagcacagattgggtggactacagtgtagggagttcctccagagggagatacctgctgcaacctttgtttcacgccagcagtatgggtcagtgggcgaagaattcccccacattgatattataaatgacttgcttgatgaagaccaaaacagtgcccatatgacagtctctcctcttcatgagtatcatacgtttggtttgccattttcttcaggaggcaatgtggctgactcagaaataccatccgtaagtagttctgtccggtttgacatgaccgacccttactatggcgagggttaccggagggcctataatacacagaatgctctgcataggttggatggttaccccaacgaaaggttggattcaactgcaccgccgaagcgttgggcatatagccatccaaatccagctgtgaaccttgcatacaattctaatgtatttccacagcagatgggagactactaa

SEQ ID NO: 1371 - DNA, 2781 bp, Zea mays
  Peptide Sequence Number=SeqID_43150
atgccaatctttccccgactatcgagcgcactgtccacggcgttgctggagtggatcttgatgctcctgctgttcatcgatgcggtttacagcttcctggtcactagattcgcccgtctctgcagattaccggcgccatgccctttctgctcaaggctcgatcacttcctgggcaacgagaaaccgtgcttctatagggacctgatctgcaaaacccacaagtcggagatttcgtccttggccttctgcagcctccaccagaagctcgcgggagcccgaaatatgtgtgaagggtgctgtggggaagtcgccggtgatgataagacagatgagactgatagcaatcaaagaattggtgatgctttcaattctcctcgtgaaaaagtctgctcgtgctgtggacagcattttaagcgacggagtgtagctttgtcctctagagagactgcagaactagaacctactcgagcgtttggctcaccaaaaacttacacggagtactctgtagtatgtcaagtggatgagcctttggagcctaaagatatataccaccaaagtgactacaggtctaatgagccagacggtctgctacagatgacatctgactctgagactgaggtcccttgtgccattgatgtgagaagttcacaatctcgtgaagccgatgttaagggcgaagacttgcaagaagatccagcttgtgagcaacccgttcttccttcccctgtggtgatcaagaaatctgaaatagtcgtcaggaaggagcctagtgttgaagacacctgcattacatcttcagcgtgtcctgctgtggatgatcatcctaatagcggaggtggtgtggaccagatggaagaaaaagaaagcctatccagaaaatgggcaccccagcacgatcctgtacttgttatagaaaattcaggtttacaagatgctggtatttcacaaattatgccaagtgatgagctaccacaggtttctggtgagactgaaccatctcagagcacaaatgaaggcaacacggatccatataaatctcagttcacaatactagaggagcactatgctgtttcggaagaaggaaatataaaatataattgtggggatatccgtgtttcacaagtaggtgctggatccaaaacgagtggtgaagttgaagattatactaagaaaattgaacccactggtgacatgggagaacatgaactggtagtacaagatccttctggtagtgctcccaaagatttaatagttaaagattatgtggacgaacctcatgtatcaacaactaccatgagatcgagcggtgaagtacctcaagatcatagtgccaccgaggaaaacccaaaaacaattgacagcattgttgaaaggagaccatctctaagcagtcagattagcattaccctaagatcaagtggtgaagtacttcaagatcatagtgccaccgaggaaaacccaaaaacaagtgaaagtattgttgaaaggagaccatctctaagcagtcagattagcattaccctaagatcgagtggtgaagtacttcaagatcatagtgccaccgaggaaaactcaaaaacaagtgaaagtattgttgaaaggagaccatctctaagcagtcagattagcatgaatgaagcctatagacttgccattggcaacaagggtagcttgacatcccctacattgacggatgtaatccttggaaaggactctacttctagcataaacgaagaactgaggctactgttatcacagatctcagcttccagggggcttgaggcaccatgggccgatccaggccctagcccacgtgcatatggacgtggtgatgagttggtggtgcagaacattaccaatagattatcacttgagaggaatgcttccggtttggagtctctagacggaagcattgttagtgagatggaaggtgaaagcaccattgaccggttgagacggcagattgatcttgatcggaaatcaatacacctactctgcagggaactggaagaagagaggaatgcctcagccattgctgcaagtcaagctctggctatgatcaccaagttgcaggatgagaaggccgcaatgcagatggaagcttcgcattaccaaaggatgatggaagagcaagctgaatatgacagtgaagcggtagcgaaagctaacgagttactcactgaaagagaacagctaattgaagaactggaagttgagctcgaaaactataggagacagtatggaggtggatcaacacagagacgaggcaatcgagtggcttttaaacaagaaaatagggatacaactatgcttgacggtggtggtcttgaagatcctctgattaacacacaacagggcataaattccttggtgggtttggaagaggagagggcatatatagcgactggtttgagaaaattggaacagaagctccaattctactccaacaacagtgtttccgttgagttacccagtccagatgttaaggatgacctctccgacaaagtatatgtcacagaagacttctcgttacactgccaggaaagctcgatggagagcaaggaagctggctcatcgacaactagtggggaggttgatctagttgcagtgcaggaagaaattgcaaagttgaacagaagactgaagacactagaaggagatcgcagttttcttgagcatagcatcaactccctcaggaatggcgacgaaggtttgatgtttatacaggaaattgcttgcaatctgagagaactgcgagcaattgctattggcaaaaaataa

SEQ ID NO: 1372 - DNA, 327 bp, Zea mays
  Peptide Sequence Number=SeqID_43151
atggcgggcggtcttgtcgggagcagcgagcatccaaaaaggagcgtttggtctattccctctccgcggaaggagccaaaaacgaaagcgggccgaggtggtggcggcgctcaggacggtggagtcgccatgccggttaccgggcgggggttggccaggactggacagcgacgcgagccggtctcagccgaaaggcggggggcggtggttgaactctcggtgcgtttgcagacgtggaccggcggcagagtaggtcgaatgcgtctagctctgcagataggtgacgtcgatggatggatggatggagaggcgggcatgagcgagtga

SEQ ID NO: 1373 - DNA, 1326 bp, Zea mays
  Peptide Sequence Number=SeqID_43152
atgcagtggtttggccactttgctgttactggggaatccacacatagaaagggagctaaggcactttcgcagtttgcgtttgtaaatcgtgacaggtgctgggaagaacttgagtggaaaggcaagcatgggcaatctccggctgtagttgctaccaagcctcactattttcgtgatcttgatgttctcgagacagtggagaatttcttagagtatgtcccagatttctggtcttctgatgagcttgctaattctatcaaagatggtgaaatactgcaaatcgatgaagaatattttgtagatcaatttttatacttaatgtatgaggagaattccaaagatgcatggcatgtggttgaagattttttgatggacgagcagttctcttctctttgccagcatcttcttatccatctggatgaggaaaggcttcttggtttcttaaattctttaggcaagctcatcaatcctactatgcagtgcaaggaattgacattcccgtgttgttggcttgaagttcttttatcaggacattatgatcacatatctcttgatgatcttgtctttttgaactgtgtcattgccaagggtagacaactttggcggctcatgaacgatgaagaacaacacgaagaatgggggcaaatggaagaacttttgaagggcggaaaccatttgactgatgctgatcattttgctctcatgaaggaacttgtggagacagaattacctggtgtgcttaagtgggtaggcattcagtcctggataattttctgtgaattgtcgaaagaatgcaaatcaggagattcttgtgaatcttttttctctcataacaaaatagaatttcacaaggctgatgattactcattggttcggaattatgggttctcaatttcacatatgcctgatattgatgttgaagatctaactagaagcagccataaaaggagaaagaggaataggagaaagcgccataggtacgagtctgatgaggacaagtttgatgaactgcttgaacttggatcatctgatggaaagaatggtgttgagtcacagcgtggaagctggcgcctttcaactgatggtttctctgcttcttgggacattatgcattctgggattgctgaacgctgcatgagatccaggacaactctctttagttgggatgctgaaggcattgaatatggtccaggcatttccttgaaacccatttggactttggagttagttgtagagaactcaggtgatgcgcgcaagtacgagtctttattgacacttccagtgatcctgaggaagagatggctgttgaagcaacttaaaaagtga

SEQ ID NO: 1374 - DNA, 675 bp, Zea mays
  Peptide Sequence Number=SeqID_43153
atggcgacgaaggcggcgtgcgtgctggcggtgtgggtgctcgtcgcatcgggcctgtccgacctgggctcagcgcgcgcgcccctgggcagcaagccgcagcgggagttcgactacttcgcgctctccctccagtggcccggcaccatctgcgcctccacccgccactgctgcgccaccaacggctgctgccgctcggagcctctccagacgttcacgatccacgggctatggccggactacgacgacgggacctggccgtcgtgctgccgccgcacccaattcgagatggacaagatattgccactgaaggaggtgcttgacaagtactggccgtccctctactgctccaaatctggaacatgcttcagcggcaagggactcttctgggctcacgaggatgaattacagtatttcacccttgcccttgacctctacttcaagtataacgttacggaaatgctgtcaagtggatggatacaggtttcaaatggtaaggaatatgcactgagcgatgtcatcgataccatcaaacatgcttttgggggatcaccacaaattgtttgcaagaggggttcaatcgaagaacttaggttatgcttcgacaaagaattgaagcaacaacaacaacaacaacaacaacaaagcctttttgtcccaagcacgttggggtag

SEQ ID NO: 1375 - DNA, 1113 bp, Zea mays
  Peptide Sequence Number=SeqID_43154
atggagacgcggcggccgcggcgcggctggaacaaacgcttcgtcctcccgctcgcgctcctctgcctcgccgtgctgctccccggcgcgctgctcccgccgtccgcctcggcgtcgtcttcgtcgccggccgcgggaggtggcagcaggaaacgccggtgggttgggtttgactactatgtactggcgctgcagtggccgggcaccatctgccgcgagaccagcaactgctgcgacaccaatggctgctgccgatcacagcctctcaagtggttcacgattcatggtctttggccacagtataactatgggggctggccatcatgctgcagaccaaccagattcaacataaataaggtgtcagtctcaaactttcttcagaatgagatgtctgaaccactgcaaatcttaatgttgatgccgatactcgagaagtattggccgtccttgtactgtggttcttcttcaacctgctttggtggaagggggccattttgggtgcatgagggaataacgcatatgctaagtgctgaccctattatttcttttgttttgtgtgcatgtgctggtggtttaccggatcttgttcagtgggaaactcatgggacctgtgcttaccctgaaatacaggatgaatatgactacttctccacagcactgtatctctacagcaaatacaatgttacgaaagctctgagaaaagcacgtatccggcctacaagcggcagaaaatacgccgttggccatattgttgccgtcattgaatatgcgtttggggcaatgccgtcactcgtctgtaagaacggctcagttcaagaactcaggctctgcttccacaaggattatcagcctcgtgattgcacgcttgaggccggctctgcaccgaacggcagaagctactgccctcgctacatcacgttcccgtcgtacaaaccgtccggatgcacagccgcaccgcacaggggaagagaattgagtccagatttgtcatggctttgccgctgcactactctgatcggacactgtgattgcgattgcagtggtggccaatactacggaggggatcaacaaccaatccaatggcgaggttccgagctacatgcgtacgtctga

SEQ ID NO: 1376 - DNA, 246 bp, Zea mays
  Peptide Sequence Number=SeqID_43155
atggcgaatgaagccgttatagatgatgatggaaaggttcaccgggcagccaaggcatctagagaagccttacggttggaagaactcatagctcctctctcacctccgcccaagttgtatatacctaagaatgatccggagctcaaggatgccttggtcgtgcttgaagttgcacacaagataatagacgaagttgttgatgaaactttaaatgatgcagctggaaaagttctaaggggagagtga

SEQ ID NO: 1377 - DNA, 711 bp, Zea mays
  Peptide Sequence Number=SeqID_43156
atgcaaattttgcctcatttctacctctccttgaatggcattggtccctcaagtataggtggtaaggagcctcagacttacacgagttccttgctaggtcgctggtcccagggggtgaagccacttcaaaaagaaccatgttgcacactatcaaacataaagggaattatacagtttgaaaatgaatacatgggaaacttaacgtggcttcgcccctggctggtcctggatcccgaggtccttgggtgtttggtgctgctggtccatagttacaaagtttctgggtcgatagggtcgaggaacatgatatatggtgttgtgcggaaagaaatctggtaccgccctgacatgtacttctaccgtgacatgctatacatgctagcgaggaacaagaaaattaatgaaacaaggcaggtatgggcggatctcaagtctgaagacgtgctatttgatcagcacacttatggcgacattgtgagggccttctgtgatgctgatttgattgaccttgcaatggaaatctatgatgacatgaggagctcccccgaccctcctctatcattgccgttccgtgttatcctgaaagggttggttccataccctgaactgagggagaagataaagcaggattttctggagcttttcccagatatgattgtgtatgatccaccagataccttatctgatatagatgaagaattcaagttttga

SEQ ID NO: 1378 - DNA, 249 bp, Zea mays
  Peptide Sequence Number=SeqID_43157
atggcggagaagcttgagcaagaacttggcgccgatggaccgaggcaatggtcaagagcaagcggagttgcgatcaacaaaccaacaagtccacatgatgacatggagtggatcatatcattcaagagagatcaagttgatgcttgtgtagcatcaccactagagatggaatggaatgcgcaaggcaacaatatatttgtagagcattttttcgccggtctaaggttgagtagagaagagtttgactag

SEQ ID NO: 1379 - DNA, 2676 bp, Zea mays
  Peptide Sequence Number=SeqID_43158
atggccgcagagagggaggcaagcagcagccgaggccgagctatctctctatttccccctcgcccagctcagatccgaagcctgaaggaaatcgcgccaacaggccctagccccagatgcgcgccgccgcttgctgcctgcgctgctgctactccttctaggggtcttgcggcgatgctgggcgtcgagcccgagagcggaggcgccgcgtcctcctccgccgcagagaattttgacgctggccagtacgccttcttcgggaaggagccactcgaggggttcgagctcgggggtttggaggaagccggcagtgatggcaatggcggtggattcagcgggccagatgaggggctgtaccggctaaactcggttggagacgagatgcagtacttgaagatgcaagtagctctagtgtcaacctttgaattgataacctttgaagctgatgttctattggagattgacgatcagagtaacttgtctgacattgatgatcttgcaagcaccttcgctaagttgaaccgaagcattagtggaatccggaatcctggtgttattggggacaggagatccatttcaagaggaagttctttaactcttgactggcctgaggatgtggagttttcaaactgggtagatcaagatgtatttgaaaatgaggaattccaggaaagtaaaagatggtggtcatccaattcttcagtgcagcaaggggattccaactccagaccactaagtcgaacatcttcctaccctcagcagccactgcagcaccggtcaagtgaacctatcgttttaccaaagacttcttcatttacctcatttccaccacctgttgctggtggtggtagagccccttaccctgctcaaggccttacacgtcatgggagcattccatcaattggcgctgggctccaaatgggttctccgagcatgtcactttctgcttctccatatcatatggtcggaccatctcatgggctgccatacacgggaggcatgccttatggtgctcttaacctgcctgtaaacaatccagtgcagaatgattggtcgaatcatgttaaccctttcactggggagcatcttaatctactgcccaatttattgcacaaacaattatcacttcctaatagcccaatgtcgtcactcctattttctcagcatcagcagagattggcacaggtccaatcatcccatcagaattacctcaatataatgccacacgtcctatatccccatcactccgcagagattacaagcaggtttggttctgttggcagttcccattcatcaagagacaagagatcaaggtcggggaagggaaaacataacattcgattctctcaactaccatctgatactggtagccagaatggtgacagcggaggtataaagtttagatccaagtacatgtcatctgaagagatcgaatcaatcttaagaatgcagcattctgcaagccacagcagcgatccttatattgttgattactatcatcaagcttgtatggcaaaaaggggtgccacttctaagcaaaagaccaatttctccccaacatcaatgaaagatgtaccatccaagtctcgatccagcagtgatcagcacacatatcttcaggttgatgctcttggaagagtatctttttcttccatacggaggcctcggtctcttcttgaagtcgaccatccttcatctgctgatggctctcatgatcagaagtccactgtgaggcccctggagaaagaaccaatgcttgcagcaagagtcactgttgaagacgccctttgccttgttcttgaggttgatgacactgaccgtctgttgcagtctagccagtcacaggacaacattttcgaactgaaacgaagacggcaagtcctcctggaaggtctagctgcatcattgcagtttgttgatcctctcggacccagcaaatctggtcattcatctgggtcagccctgaaggacgatgttatttttctgcgcattgtttctctgcccaaaggacgtaagtttttagcacgttaccttcggcttcttgtccctggcagcgagttgacccggatagtatgcatggctatttttcgccatttgaggttcttgtttgggggtttgccatcagactctagtgcagcagaaactacagttgctcttgcgaagactgtttcatcttgtgtgcatcacatggaacttggtgctcttagtgcctgccttgctgctgttgtttgttcgtctgaacagccacctctgcgccctcttggtagctctgctggtgatggggcttctcttgttattaaatcagtactggaccgagcaactgagttactgactgatcgccatgctgcagccagctacactgtgccaaaccgtgctctctggcaggcatcatttgatgctttctttgggcttctaacaaaatactgtgtcagtaagtttgaaagtatccaacagatgtttgtcacacagacaccgagctcaggaatcggacctgaggcttccaaagctactagtaaggagatgcctgttgagctacttcgtgcaagccttcctcatacaaacgagcagcagcgccagcggcttcttgattttgctcagagatccatgccagtaacaggtttcaatccctcaggtgctagaggtgggcacatcacttcagaatctgttcctggatga

SEQ ID NO: 1380 - DNA, 444 bp, Zea mays
  Peptide Sequence Number=SeqID_43159
atgaagcaccgggaggatgggtttgggtcgatcacgacccttcttcatcccctggtcaaggcgtctggggttttgggtggtccatcctctggagtgggaactgtgttccagtcgggttcggtcgatttgggtcatctaccgaaactgaattttcctgtgtttgatgaggaaaatccaaagttatggattaggcgtagccataatgattactttgagttgtatgttgtggatcaattgtcaaacaacaacggtgaaggaatatgtcgatcaatttcacgcggaggtggaagggctaggacacaaaagctcctctcacgcacggtagacggggtcgcgcagcgtgggctcctcggctcttggcggtcagccttggcggacaacttcagccagtcacggtgcactcctggcgaccagcaaagcggcggacagcgaggcagaggatga

SEQ ID NO: 1381 - DNA, 201 bp, Zea mays
  Peptide Sequence Number=SeqID_43160
atgggcatggcgttcgtcgccgcggacagcgacggtcgctccaatggacgggactgccgaatcggacgtggaaagcggggtggggaatgggatgaacacccgttcattattatggtgggagcaaatggcttccaaagctccaccgaacgatcaaggtacaagcggcagaatgggtcactggaacaggatttcagtccgtaa

SEQ ID NO: 1382 - DNA, 1206 bp, Zea mays
  Peptide Sequence Number=SeqID_43161
atggacgggcttgagaggagctcgctctcggtggaccaactccccgacgacgccctcgtgcagatcctctcgcgcctcggcgccaagtcgctgtgccgatccaagtgcgtctccaaaccgtggcgcgacctcatcgccgatcgcctctactgcaaggatctcccccaatcgctgcaagggttcctctacttcgacgtcggaagacgcggcgacggccacgatgctgctgctgctaatgcctacggcggcgatctcgccggcagccgcgacgggatgctgcttcgccacggccacgggcgtttcatcgacctgcttggtaaacccatgccactcctcgacccttcgttcgcctttttgaaggagcagccgggcgtcaatgctatcgagctcctcgattcctgcaacggcctcctcctctttggacacaggcgggtttcagacacatacgactccctgggctacatcgtgtgcaaccctgtcaccgaacagtgggtggcgataccatcctccggctggactccgactccagcagaagaaattgtggacgaacacgtcaaggacccgcgtccctttatcatcttcgacccatccctctcctcgaacttcgacattgtgcagttctggcaagatggcacggtggacgatgtggaagggttcctaaattatagggttagattgttgatttgcaatcaccgtgatatggttgttgtaacttccttcttgcacacctactcttctgtgactgggttgtggaatgacaggtcaagtgaatggatgcgatgggaacagggtggtggatgggggaaatggggaggctatgcagagataataaaacctccatatggcagggcctttgtcaatggcatgctgcattttcttgtcttcctatttcggacagaggaatatgtaatagttgcagtggatggccaagggaacacatgccgagtcctcccatggccatatgattttttccctgcagttggttttattggtcaatcacagggacgccttcattgtatcactcgattggttgaatgtaatcgtttcagcgaccctggtctgtcgatctgggttcttgaggactacgatacagaagagtgggttctaaagcatagcctgagcctctttgccagctggtcgaagcaacaaatcttaaatacaattcttactattctattgttgtcattcatacagatcggaatttga

SEQ ID NO: 1383 - DNA, 1143 bp, Zea mays
  Peptide Sequence Number=SeqID_43162
atggcgccggagccggaggatgatattatgaacgagaagaatccccgcccgctcgacgaggatgacatcgcgctcctcaaaacctatggactggggccgtattcgactagcattaagaaggtcgagaaggagatcaaggaaatggccaagaaaatcaacgacctctgtgggataaaggagtctgatacagggctggctccacctagccagtgggatttggtttcagataagcagatgatgcaagaagaacaaccgttacaagtagcaagatgtacaaagattataagccctaatacggatgatgccaaatatgttataaatgtaaaacaaattgcaaagtttgtggttggattgggagataaggtctctccaactgatatcgaggaagggatgagggttggtgttgatcgcaacaagtaccagattcaaatccctctcccaccaaaaattgacccaagtgttaccatgatgactgtggaggaaaagccagatgtgacgtacaatgatgtcggtggctgcaaggagcagattgagaagatgcgtgaagttgttgaacttcctatgcttcacccagaaaagtttgtcaagcttggtattgaccctccgaaaggtgtcctttgctatggcccacctggtactggcaagacacttcttgcaagagctgtagcaaaccggactgatgcttgtttcatccgtgtaattggaagtgagctagttcagaagtatgttggagaaggtgctcggatggtcagggaactgttccagatggcccgctcaaagaaggcatgcattgtattctttgatgaagttgatgcaattggtggtgctcgttttgatgatggggttggtggtgacaatgaggtgcagcgtacaatgttggaaatagtaaaccaacttgatgggtttgatgcaagagggaacatcaaagttctcatggccactaatagacgatcaggttctcacattgccttgcttgttgctccaggagctgatataaggagcgtttgcacagaagccgggatgtacgccattcgcgcccgcaggaaaacggtgacagaaaaggattttctcgatgctgtcaacaaggtcatcaagggctaccagaagttcagtgcaacacccaagtatatggtgtacaactag

SEQ ID NO: 1384 - DNA, 210 bp, Zea mays
  Peptide Sequence Number=SeqID_43163
atgtggcgttgtgatgtggcgaggttcggcgggtcaccggacggtctgttgagtactaacagcctaacaactttccagtttccacaacggctactaacaaaacaggaatggtactatttgaggatggagcagtacgcgttgttggaggagaggtatgatgtgaagcaccaggtagagaggaccaagcaaggagaggtgtgcatgtactaa

SEQ ID NO: 1385 - DNA, 930 bp, Zea mays
  Peptide Sequence Number=SeqID_43164
atgtacctggcgtacgggtggccgcagtcgatcccgctggacccggacaactcggaccgcgtggtcctcctccgcttgctcggccgcttcctcctcgccgtctgcccggcctcgctccacctctggtccgccgcacaacaccgggtccgcctcgcccgctccgaccgctctccggagtctctctccgcccacggctacaacgcgcacgccgtgtggagccccgacgccaagaccgtcgctgtcctgacctcttccttctacctctacgtttacaaggttcagcacttggggaagcaactgatcgtcggtggcaagcaggtcccggggctttgcctggctagcatatccctaatcatcaccgagaaggttcctctcgccaatggcgttgctataacgagcaatttcgtgtgtgacaacaaaagcatgctcctcggactatccaacgggcatgtgcaggtcatgtcctggaacgctgagttctcagacagcttcaagcttggttgctctgtgtgttcgtctgagaaacctactgctgtcatagatgcgttggtgtttgatcctgccagtttgcgagataacactaacgcaaggcctgctccttgctgcacaggcaattcttctattgtccatgttgagctgtcggtgaagctaaggttgctggttgctttgtactcaggctgtcgcattgccctctgtactattggtaagaagggattgaggcagcctggcagcatcagagtggagagatggttggacactgatgatgcgatgtgtacttctgtggcttctgagcaacagattcttgctgttgggtgcagtagaggtgttgttgaattgtatgatcttgcagaaaacacacggcatatacgaaccatttcgttgtatgattggggatattcagccttagaaattgacattggcattggatag

SEQ ID NO: 1386 - DNA, 3498 bp, Zea mays
  Peptide Sequence Number=SeqID_43165
atggcgccctctgctgccgtcccgggtggctctgaggttgaggggtcaccacgcatggccaagttcctctgcagctttggaggcagtatccttccccgaccactcgatggctgtcttaggtatgttggcggcgagacaaggattgtcatgttgccgcgtgacatatcatatgccgacctggctgcacggatgagagagctctataaggatgctgatatcatcaaataccagcaacctgatgaggatttagatgcgctggtctcggttgtgaacgacgacgatgtggtgaacatgatggaggagtatgacaaggtcattgcgacaggggaggcgttcactcggctcaggatcttcttattttctcagcatttggatgatgatgctgcatcagtggatgtgcattacaatgtagacgagcgggaaacagagagaaggtatgtagatgcgcttaacagccttggtgatgttaagtcaccttcctcccctgtgtctgtggagcagctttttggcattggaggcaatgattcaggaattcctgattttgctggcttgagacatttgaatgtccctcgtccaacacatagtcagaggtatggagagatggattctccttggagccctgcctatgtctcaccaggccagtacggggtacatgacccaagggattttccaatttcaccatcatctgcaaggtttcaagtaggagcggaggattttgatgagaggactcctgacgactttgtaaggcagtcaccaaaatatcgtcattatgaggcgcattcaccatcacatatggataatttagtctggcttccacctggtgctgtaattcagcaaaatgcaggctttcctggtaatttgagccggtccaacaatttcttggatgggagcaatggatgtgatcactgccgttcaccattccataaggttcaaggttcagtgaatgatcctatctatatgaaccctcgttggactcggccagtccaacaacattttgaccaaccaagcatgattaatgattatcccggtcaccatgctaattcttgtccagattactgccgccctggtgatcattatgtgggaggtcaagatgttagattggaaaatggtgtttatgttaaagagcaaaatggtggtcatcctcccatgttctataatgagtcacatcctcacgatagagtctggcatgtgcataccaagcaaagtcatcagcgatacgaggatccaaggctgcatcatcctgctaatggtagagtgatcgagccatacattatggatgccaacaaagtatatgaagttcattcagcatctcttgctcgttctagccatgagagtcctcactattatcacggtagcagtgaggtcataaatgacacgtatcacaaccaacaagttggaggcagtgggtcgtatgtgcagccagcagggtttgaagaatcccctagccaccattacaaccactcttcggcctatggtgcagattccttttaccaaatgcagcagaatttgccacccattcaatctctgagaaggagagcgaacagccctgttcacactgcctcaccatatgattccccacacctgccaatatcaaatgggaccattaacacaaacttcgtaagaaatacaggtgatgtcagtccgaggataccagggctacctggatatgatcgaatgccaaacacatggactcctcccaacggcagcataccatatagagttgttgggcatgatgttcatgctgcctccatggaaaacactagtgcctttggtcctaggtctaatccaactgctgctcagtatgttcagcatttcattgctcctgaatcaatccagcatcaacctggagctccattgagggaggttcatcctgaaagatcataccctgaacccatgccgtcgtcatatgttgatggcaaagtagctgtttctgcattgcctctcactgatcaattatccaggttggatacaaacacaataaagaaacctgaaggtccagatgatgttaactcaactcaaaatgtgaatgaaacaactcctttgcatgctgtggatgaaccaagtaccttaccccaccatgttgtagttgtacatgaagttgatactaagcaggggaagccaaccgaacatgaaagcaggcaaaagcaacatgaagctggggctacagcactgcaggaatgtggggatatttcagaggatagattgaatttccttcctgaattgattgcctctgttaaaaaggcagcactggaagatgctgctgagacacggatagcccaatcagatgctaatggtgctgtttcacctgttcctgatgatgatgatgataatgaaaagaagttggatgcagcagctgctggtactacagatgcaaatcaggaccctgatttgcaaggaagcattgatcggcagaagagctccaagattgagtctacaactgctgaagctgaagctttgtctaaaggactacagactataaaaaatgacgatttggaggaaattagagagctgggttcaggtacttatggggcagtttatcatggtaaatggagaggatgtgatgtcgctgttaaaagaataaaagcgagttgctttgtaggaagaccatctgagagagagcgtttgattgcggatttctggaaagaagctctgatcctaagctcactccatcatccaaatgtggtttcattttatggtgtagttcgtgatggtccagatggaagcttagcaactgttactgagtttatgatcaatggatctctaaaacagtttctgaggaaaaaagacaggacaattgatcgccggaagagagtaatattagccatggatgctgcatttggcatggagtatttgcatgggaagaatatagtccattttgacctgaaatgtgagaatctactggtgaacatgagggatccgcagcgaccaatttgcaagatcggtgatcttggactgtcaaaggttaaacagcatactttggtatctggtggtgttagaggaaccttaccatggatggcaccagagcttctgagtgggaaaagtaatatggtgtcagacaagattgatgtctattcgtttggaattgtcatgtgggagttgcttactggggaagagccatactctggcatgcgtgctgctgaaattattgggggcattgtaaacgattccctacgtcctcaaattccttcatggtgtgatcctgagtggaagggattgatggaaagctgttggtccagtgatccagctgagagaccgtccttcacggatatatctcaaaggttgaggaaaatggccgccgcaatgaatgtgaacatcgcagttgatgaccctactccaagtgataatttaacaagtgctgacttcatgggagaaaatctatgtcatggagattccaaagcatgtttgatgttttcttttaatcctggagtaaaccggctaccatttgccttccgccgaaaacaaagaggttgcatcgaatctaggactttggctcggtag

SEQ ID NO: 1387 - DNA, 210 bp, Zea mays
  Peptide Sequence Number=SeqID_43166
atggcggccgagggtgagacggtggcattggagttcatacccatcgctgagcgatgcctccagtacctcggcaagctcaagaaaaaggcggtcaaagaaggtgccccatttcttcttatttttgctttgacacttatcacaggaggtcaggaggattgcatgccgcttggcattatggtttatggttatgagaagcacctcaataactaa

SEQ ID NO: 1388 - DNA, 423 bp, Zea mays
  Peptide Sequence Number=SeqID_43167
atgaacgacggcttcgttagttcacgccgttggggacactcgccagccacgagcccacaacctccgttacagccggttggagcaggctggcgcagcagatcagccgtcgcgtctccggagcagatccgccattgcgtctccccgccgatctcgccgctgcacagatccacgacacccggagccaggtcccgacgcgcgctaaggcagctctcccgctgctatggcgggccctgcttcgacgaggccccacgcgcatctgctgctgctattgcggtctgggcgctccccaccgatctcgccgcacggagtaggtcccgacgtgcgctaaggctgctctcccgctgctatggcggccactgcttcgatgagggcccacgtggagctgctgctgctatgcggtctgggcgctccccgccgatctag

SEQ ID NO: 1389 - DNA, 3015 bp, Zea mays
  Peptide Sequence Number=SeqID_43168
atggcaagcggagctcttggcgatgtgcgcaagtacacggcgctctctctccagcagcaagcaaactttactgctgtggtcaggtcacatcacgtggtaaagaaacggcacctactgctgttgactactcaatttataggcttgaaaagaaaaagttgcactagtttagtcttcctatacctcgaatattcaggtctttttggctctacgtcgtttagagacgtcttggattacctgtcaacaccaaaatacatgctaggatctcttcttccccgacagattcctcccggaatacgagatctaggtccagacgtggactgccccaagaggagctgctcctgcgcgcaggtcacgaaccgtccgaccttgtgtaaaaacaggtcgatggctgccatagatttcagtgagcagtcctgcacagttctcaaggctgcactgtatggtcccagcagctgggttgttgtagtaaactgcagagatctccgcgtccgcaggcagggccgaatccagttgaaggcaggcggcgaagagccaaagatgggactcgacgcaaccaacgccctgctgcacatcaagagcgcgttgcgttcttccgccaggcttgcctgccagtccgcgtccgagtaccccgtggcgctcggcgtcggcacgctgctgctgttcctgcacaggctctgccctgccctgctcgctctcctcctgtcctcgtcgccggtgttcctgctaaccgcgcttctgctcggggcgctgctgagctacggggagccaggtgacggcgctccagcgaccggagacggagagggcccgtccccccctgatgctgtggctgtggctgtggctgtggctgtggctgtatccacaccatccgttgctgagtcttgtccagcagttgccgtggaggttcagcgtgtcgccgccgtcgcccacatgccaaggagttcttctgcgagccccgttgtccgcgccgaggaaacaacgtccggtaccaccttcttccatgaagcccaccgtgacgagggcagtatcgtcgcatctgtctctgctgacgacgctcttcgccgcgcggaagttgttgttgtggaaagagaggagcagccggccaccaaggaaatctgcgagaatgttcagctgcggcagtttcggagcagcgctggtgaaggtgttccgatcgaagtggacagcaaagcttctggagctgtttcgcttgatgctcggtgggtggctatggagtcttctagctttcacagggacaacggtgccatcgctgaaggagagggagaggaggatgagcatgttaaggagatatgccagcaggctgagagcgccgtcgcagggaggtgtggtggctatggagtttgcagccagtatcagttcggtgagctcatgagctcgtgttggcaacctgttacgcggcaggatccttgttccgagtccgagtcggattctagtgaaagctcttcggatgcgtcgatcagtgacatcataccgatgctcgacgagctgaacccgcctgtggacttgggtgctggccacccttcctcagccttcagagagaagttgagcgccggctcatcggatgatgaagatggctcggaggaggacaataaccttagctcagatgaagatggagaagaggaagaggaggaggaagagaaaggtgatggaaacaactggaagggctctgtggatccaaactctctggaagctgaagaaaagaacgggagctcggagagtctgatggcgcggcgaagagcaaagaacgctctcgtgttcgatctcgacaggaggctaatggacctgcaggcagctgatgcagtctcgaaaatggaggcggcgtcacgcttccgcgtccaggtgccctccatctccacaccgaggcggcctggcccttcagacgatccagcagagggggacacagtggagctgccgcagatccctggctcggcgccgccgtccgttctgcttccacggaggaaaccatccgatgatgctccgttcgacgaccagatcgtggaccgcgacaggcgtctgcaggagacctggactcctcctcgctcaggctttccatcatcagcacagggtagtaggacacctgacactggcagcttgttcgtgaggccgtcttcttctccgcgacatggcagtggcgtggtagaagtagaagcagaggagcctggattgtccggtgccaaagatgccgctgacgaccactcggagtcggagagcggttccgaggaggaaccgccgcttccgcttggcagcaatggcaggctattcggctcgctggaaccgcgtattggcgacgagatcagaattctgggcgcggcggtctcagacgtgtgcgtgctagaactagaagcaaatctgggaagaagtaatggaggcagcgctggttccatcgacgccgcagattcctctcatgtccaaaagcccgtgtcgagcagcgggtcggatgatgcggacgattcagcttccgcagatgcaggcaatgcgcgatcggtagtactgcgtcctctatctgaagaagaagaagaagacggcggtgctgaggaacacgtcgtcgttgatgaagaaggagaagaaggctccatgagcgaggccacctcgctgttcaagtgccgcatggagcaagtgctggtgcagtccgtttcggaggccggcgtagggcagcccctggcggttggacccgggcgtgagcggctgagcctgagcgatgctctgttacctcctgcgacccctttggttgttactggtgaggcgagaccgtcggcaaaggagctgctgagctcacggcttgctcaggtggatggagaagaagcgctggcgccggtgatgcctgctgctgctggtagcccagagtcggagctcatgtgtgctgttggttgcggtgtgctgggtcgtgacgcagaacctgcttcggaggacgacgccaacgaccctactactactactcatgtgccgtcaagcatcggcggccgcggcggcggcgacattgctggtgatggccaagtataa

SEQ ID NO: 1390 - DNA, 1074 bp, Zea mays
  Peptide Sequence Number=SeqID_43169
atggagaaatggagaaatcctggggcggcgcaggtccgacgaaccctggggaggcggcggctatggagaaatggcggcggtccaaggaaccctagggaggcaccgcaggtctccgtgatggagaaatggctggcgacaggttctgtgagaggacatagagaaaacagaaggcgcgagatggatccaggagtagtcaccgacggcatgaaagaaagcggaaaatggacagtggcgagtgatgatcgcgcgcatgcagatccaaacacagccaccgtcttttccagctacgggcccacacaagttggcatgcaaggtgcggcggtcaaaaattcaaaatgtatgcgttgttcaactctttaccagtcgtcgcatgccaagcgcaaggtcggtgtagcatttaaaatagcatcatcattggtagcatccgcccaccgtacagcatgcgtacagtcaattgtgctggcacccgcgctcaacgataccttccggatgcgcatggccgccgccgccacctacatgcacagggactccacccacccctccccctcctcccggtccatcatctcgtcgccgccatggcgccctgatgtacctttccccacccaccagctgcaccaggcggcggccggcctctacgacccggacctcgccgcgacacctctgccgccggcgccgccgcgcaacaaccaccaccacctccgccccggtgccgcgcgccgaccttccagcaggcgccgcccacggccttcgcggaggcttcccaccacatacatcaacgcggaccccgccagcttccggcgcatggtgcaccaggcgacgggcgccgccgaggatctaccgccgcctctggcaccgccgcacgaggcgaccctctgccgcccggcgccctcccgcgccgcgacgctggacacgtcggcgctcctgctcggcggcgggtccgccccgaggacgttggaggtggacttggggaccggtggcggcgttggtgtgggagtgggactgggactgggcttcggcggctgcttcccgaccttggagtcgtgggacgctctctcttgcactagccaccgttga

SEQ ID NO: 1391 - DNA, 1140 bp, Zea mays
  Peptide Sequence Number=SeqID_43170
atgacagctttactcctccctaatctgatattgatgcttgctttgctgggtgagcttggctggttgcatcacactgcacttataatatttatgattagtcacctcgctccctgcagttcaagctttggattcccggatcccacaccaccggtctctctcggggagtgtaatccagcgagcgttgagttgaaagccgcgcaagtggagatgagtactctgaagaaatccgacaagaaggctgccctcgacttcgcagcatggagtttcaatgtcaccacatcggttggactcatcatggtcaacaaggccttgatggctacgtatgggttcagtttcggcctgagtcagccatcccacttacccctagcagatctagttaaatttgtgatattttcgaacttgtcaattgttgggatgaatgtgagcttgatgtggaactctgttggcttttatcagatagcaaagctgtgcatgatacctgcatcatgtcttctggaggttgtatttgatcatgtacattattcccgggacacaaagctgagcataatggtcgtgcttataggagttgcagtctgcacggttactgatgtcagtgtgaatgcaagaggtctaattgctgctgttatagctgtttggagcacagctttgcaacaatactatgtccattttctccaacgcaagtactccctgaactcattcaacctcctgggccacacagctccagcccaagctgggtcactgctgctagtgggaccatttgcggattacttgttgacaggcaaaagggtggatcagttcagtttgtcatcgcttgctctgtttttcctggcactctcatgcttcatcgccattggtgttaatctgagccaattcatctgcatcgggcggttctctgccgtatccttccaagtcctaggccacatgaagaccgtacttgttctgtcccttgggttccttttctttggcaaggagggcctgaaccttcaggtagtccttgggatggtcctggccgttctcggaatgatatggtacgggaacgcgtctgctaaaccaggtggcaaagagcggcgcagcatcctgccggtgaggtctgcgagtctcaagggaagttccgaagaaaaggccggtgccgagaaatag

SEQ ID NO: 1392 - DNA, 285 bp, Zea mays
  Peptide Sequence Number=SeqID_43171
atggcggattccgttgagatgcgcgtggttgcaaccggttcccgactgaggcggaggcaggcccggcgagtttgccgcaaccaacctgagatggatgataggactgacgataggggcccacaccacagtggcccaagagggaaaccacgcgtggacacggtgcagggacagtgctgtgggtcggcaggccgtggtgggccgaggggagggtttgggaagtacgtgggccagcagggtgaagggaagaagtgggccgtggggagggagatccagtccaaaacgtga

SEQ ID NO: 1393 - DNA, 756 bp, Zea mays
  Peptide Sequence Number=SeqID_43172
atggaactgcggctgcgacggcggcgaggggttcacgcgcccgacccgagcgtggagtggggacagattccccgtggggttccccatggagataaattccccgatgggtacgaggatgggagaaaaagctccccctcttctaaaggcttacaactacagctccataattttctggagcatctaatgatctcctccaccaactccaccaaaaattctggagctcaagttgtcccaaacaaggtgcataagcctcaacacaaaccaagaaagaaattcagttgtggacacaatcaaaattgggagcaagacataaaagtgtgctgccaagtggcgcaccggacagtgtccggtgcaccaagccctcgaccaaacgaacaggccactctcgggaaatctatgggcaccctccgctataattcaccggactgtccggtgtgcaccggactgtccgatcatgccaagagcgacatcgtgaccggcgacaagcccacgggctcgagaaagactccatcaagggagtccgacaacaagaacaaggaagaatcctcttcctccatcaagtcacatcagaggggtgacaagaagaaggagaaaatgaagagggtggtctactacgagaccgactcttcaacaccctccacatccggcactgagtcgtccactacttctaagcgtcatgagtgcaagaagtatagtagatgcccctacgctatccccgtatttccaagcacgctcctctactttccattcccttag

SEQ ID NO: 1394 - DNA, 276 bp, Zea mays
  Peptide Sequence Number=SeqID_43173
atgaagacgaccaaggggggcaaggcgatgaaccccaccgacgccttccgcaaggagcagcggaagaaggagctcaagcggaacaaaaaggaaaggaagaaggtgcgggaagttggtattttgaaaaaggatccagacgctatacgagagcagattgagaaattggagaagatgaaggctgatggtgctctcgacaaggctaggaagcataagaaaagacagcttgaggatacatacaatcttattgttaagaaacgaaagtgccacggcaattag

SEQ ID NO: 1395 - DNA, 591 bp, Zea mays
  Peptide Sequence Number=SeqID_43174
atggcggccccgccgtcgaggtcgcggggcgactacgaccacctgattaagctcctgctcatcggcgacagcggagttggaaagagttgcttgctgctgcggttctctgatgacacattcacgacaagttttatcaccaccatcggcattgatttcaaggttaggacggtcgagctcgatggaaagcgtgtaaaattacaaatttgggacactgctggtcaagaacgtttccgaacaattaccactgacattaggaactggattcgcaacatagagcagcacgcatctgataatgtcaacaagatcttggtgggcaacaaggtcgatatggatgcgaagcgggtggtctccacagctcaaggtcagaagctcgcagatgaatacgggatcaagtttttcgagacgagtgcgaaaacgaaccgaaatgtggagcaggtattcttcgccatggcaagggacgtgaagcaaaggctcaccgagaccgttgccgctgcggctgagcccccgaccattcagattagcaggccagaccccgaccaggctgacgcagcctcctcgcggcggtggtcgtcgtcctgctgtaacacctga

SEQ ID NO: 1396 - DNA, 360 bp, Zea mays
  Peptide Sequence Number=SeqID_43175
atgggcgagggagaaggagctgacgggtggggtcgggctgccagtgagagagatgttgacctttcagaagcagatgtgccccaaagacctatgggcaagaagaagtccaaggatgcattgcgtcgaggtggtattgatgcttgcaaagaagcattgaacattctttgggctaagaagattgaggatgatgcggagaaagagatgaagaggaaggaggggcttcaccttgagaaagagaagattgcgccggagagggagaaagttagcaatgaggccaatacttcatatttgaagagaattgcagaagaggaaacaattatgaccattgatctgaaatccttgaatgggatgcaacaataa

SEQ ID NO: 1397 - DNA, 123 bp, Zea mays
  Peptide Sequence Number=SeqID_43176
atggcgcaaagagatgtgctcctttctatagttcgacttatccaagctaataactctgataagttagactcaggggatacatccatgggtgacaaaggagttggtggacaattctttaattga

SEQ ID NO: 1398 - DNA, 693 bp, Zea mays
  Peptide Sequence Number=SeqID_43177
atgagcagcagcgggtcgaaggcggcggcgcgcctcaacgcgtcggcggatgccgccaccgggagcagcaacgcctcggcggcggcggtactggtggcgcagagtgaggagtcgtcgtcgtacgccggcgccgacgagctggaggaggcggaggtgtccggttcctccggctgcgcgagatcgccgccgccgccgccgccgtacgacgtgttcatcaaccaccgcggggcggacacccggcacacggtggcgcggctgctgcacgaccggctgctgcaggccagcggcggccgggtccgcacgttcctggacagcgtgtccatgcgtcccggcgacaggctggtggagcgcatcaaccagggcatgggccagtgcaaggtggccgtggccatcttctccgagcgctacctggactccgagttctgcctgcacgagctcgccgcgctggtggaggcgcgcaaggccatcgtccccatcttctacggcgtcaagccctccgcgctggtgctgccgcaggccgtcgtcgacgcccacgcgccccgtgacgtcgagcgcctgagggccgcgctccgccaggccaagtacaccgtcggcctcgcctacgacccagccacgggtgatttggccgagctggtatcagcggcagccaagacggtgatggagaggattgaacaaatagatagcatgcgatga

SEQ ID NO: 1399 - DNA, 225 bp, Zea mays
  Peptide Sequence Number=SeqID_43178
atggccgacgacgctaaagggaagggcaaggtgaccaatgagaaggagactctcaacaacgagccaaagggagaaaagtccgttgactcgggatttgggaagaaggttggcaagaagaagaagtgtatcaagaagattgtctactacgacaacgacacttcttcatcttctccaaaggacaacgatagtgattatgagaattataatgatactcacatgcaataa

SEQ ID NO: 1400 - DNA, 1860 bp, Zea mays
  Peptide Sequence Number=SeqID_43179
gtgttccggcctctgctgaacatcactggtgatttcacggctgaggagctcgaggtggcgcttatcactcccaacgagattctagatgatgtgcatatgccactgctaaagtcaattcctcctgtaactcgcatggctatgggacgtggaacctgggtgactgtcctgtgcagaaagctgaaggattggtggcattgggttgcagaaggtgatctgccaattgttgcatctcatggaactgaaattgagacgtacaaaactatagaaccagctattcgtttactaatcttgaaagcgatatgtgatatccgtgttgagcaagaggatattcggaacttcattgacagttctcttaagcatggacagaacttttctacctttcgtaaagatcggattggaggggattcccttggaatctcatactggtatgaagatgatgagattctcgggcatagattgtatcgtgaaattagacgagtagagcaggtcaagaaggagccaggaaagaggtctaggggaaaaggaggatcttcagctatttcagtcgtgtcctaccagtgggaaactgttgcgtccactttcgacgagtttgatgatgtggcagaaaaactcttttcaagtcggaacaggacagaggtttcacttggaaagaagctgaagattgaatatcttccagagatagaaaagatccataaaaagaaagagaggttgctcaaaaagcaacagagagaagctctccttcttgatagctacttgacatcagatggacttaccaccggccgttctctccgtgatagaaagcccgtgacttatacatttggtttgaatttgtcatacaatgcagatgactatgatcgctcaataaatgaagccatcaaaattacgaaaaaaagagaggagaactcagctgagcctgttgctactactgccaatagaagggtgcttcctccaagagcggaggcagcaagcaatgggaagctaaataatggtccctcaccaacaaccaacgactcggatgatggaaattcttcaaaatcagatgacgaccgagacagcgacggtgaacaagaaaatgaggcacttgatcgcagcaaccggaggaggaaaagatctcagagatacacacaggactttgttgaggctgtctcggatattgatcctaactttgacagtgacgacgatatcatgggagaagcagtgtatgatgaggaatatctgagaagtcgcaaacagaataagacatcaagcgcttctgaagaggatgaggagttccggttggaagaagatggtgaagatgatgatgaagaagaggaatattcattgagtaccagtgaagatctagaggagccgcaacggcataaaaaattggaaactcgtggccggcgaggtaccaagctgaggtcagttgatgaaatccaaacaggtctcagacgcagcaagcgttcttctcgtcctcgtattaactatcaccaatatgatttttctgactcggatacggggcctggaaaggcaaagaaatctgatgcatcagattctgaagctggctctgatgccgagaatgatatggagctctcgacatcgagtcaagagggagaggaagaagaggatgatagtcatgatgaagaaaatggtaataatgtgaatgataaaatggatgaggaccacaccgtggcagaaaataaagtagaaccagaggaggaggagcagaaggagcagccgcctatagagaagatggatgctcccagcacggaaagtagacgtgtaggaagaacattcctagatctaaacgagcttgcacctggaggtggctttgatgagagcccaagcttgacagtgaaagatgacatagacaacatttag

SEQ ID NO: 1401 - DNA, 309 bp, Zea mays
  Peptide Sequence Number=SeqID_43180
atgggagggagcggaggaggtgagaagggtaaaaatgggattccgcgtcgtagaggtgagaggagaggggcaggatgggaaaaggcgacccggggaggccgtggcgtcaagccgtcaacgaacgtgaggcgttggagtcgggctgggtctcgttctcgtctctcgtggctggcgtgtccgtcagataccatactgttttttaagtctctgaacaatagtgcaatggctaaatttgaatcgtccgtgcctaagaaaactgaagagaaagagtattctagtcccttcagtcccgcatgtttacttgcttag

SEQ ID NO: 1402 - DNA, 513 bp, Zea mays
  Peptide Sequence Number=SeqID_43181
gctaaatccagaacccacgcccgccaacgtgacattacacagatcacacagccagccaatgcggcgcgggaggagagggagactggaggaggcagccgtaccgagtcctggcagcccgcgctgctgctggcggcggtgcccgacgtggaaacgagcttggacggctcctcctcggacgacgccgcggcgtcgcgccgcggtctcctgcggctgctggagccgcccccggagcgggcggcggcggtgacgacggacgaggcccggaggtggtggtacggcggccgccaaaactcggcggccaccgacgaggcgggatccatgcgccgcctccggggaggcgagctcggccagatcgggaggtggctggaggccagaggcagtggcggtgtgggcgcggagtcagaggcccagaggtcagagaagaccggaggaagagatccgatgcgatgcgtccaattgccgctcgcgagtcgcgaccgagaaaataataatttgaaattctggtgggcctag

SEQ ID NO: 1403 - DNA, 888 bp, Zea mays
  Peptide Sequence Number=SeqID_43182
atgaggctccgcggcgtgctgcgcctcgtcctcgcgctcctcctcgccgccaccgccatcgtgccggtgctgctccttagcgagaacggcggcggcggcgtcgcacctgcgccgccgttcaactcctcgcgtgtcaaggccgtctcgtggcatccaaggatcttcgtgtacaaggggttcctctccgacgccgagtgtgaccacctcgtgactctggcgaagaaaaagatccagcggtccatggtggcggacaacgagtccggcaagagcgtcaagagcgaggtgcgcaccagctccggcatgttcctcgacaagcgccagagtgtggctgacagtaacgtggttttcctctcgtcttgttccgctcggtcggtcgcgcaggacccggtggtgagtcggatcgaggagaggatcgcggcatggacgtttcttcctcaagagaacgccgagaacatgcaggtgctgcgctacgagccggggcagaagtacgagccgcacttcgactacttccacgacagggtcaaccaggcccgcggcggccaccgctacgccaccgtgctcatgtacctgtccaccgtccgcgagggaggcgagaccgtgttccccaacgccaagggttgggagtcccagcccaaggacgccactttctccgagtgtgcacacaaaggattggcagtgaaaccggtgaaaggcgacgccgtgctcttcttcagcctgcacgccgacggcacgccggacccgctcagcctccacgggagctgcccggtgatccggggcgagaagtggtcggcgcccaagtggatccacgtcaggtcgtacgaggacgaaccccaggcagtactcgtgctccccgaggaaaccgacggcgcgcggtattcagataactag

SEQ ID NO: 1404 - DNA, 438 bp, Zea mays
  Peptide Sequence Number=SeqID_43183
atgcacgacatcctcaagcgtcagcgaagctcctacgttaccgagctagccgagagcagtagcacatacgcgggtcaacgacagttgtgctgttcttcccttcctagtggcgatggcggtcctcggccgtcgttttcatacgaggcgcccaggagcaccatcaacgcgtaccggcgacatgctcaggcttctccccaagaccggagccgtgatgaaggcgaggacctactgcgtgaggctgatcgagtgggcccgcacgtcagcatttgtccgacgcgcgagcttcccaccctggacctggaggctggagccgtggaggccggcaaacgcagcgcagtgcaggcggcgagtggcaaggagccagttcaggccgcgcagcgtctctgcctgccacgtgccgatgggtgcaaaacgcacggccgggtctcggacgcatag

SEQ ID NO: 1405 - DNA, 444 bp, Zea mays
  Peptide Sequence Number=SeqID_43184
atggtctggtcctcgggaggaaactgtgcctcgcccgaggctggcctcagcctcgaaacaaactccgtctcgcctaagcctagcctcgtctacatgtcccccgtgaatcccgcaggaggccactcctttaactctaacctgcacaactaccagccccagatcgggcttggcaatggccttgggaagactttcgccttgcccgagcatggcttcggcctcgatgttgccaacaagagaatgcccgacgtcaccagaagccgcagagctgacctatgcattgggtccaccaacattcaactccgcgttgatcggaaggtggagtacttcaagatactgcttccctcctccatgtggtacggaaacgagtggttctacatcaagaacgtggccggctacgccccgcctttcactggccgggagccggtcttaacgaagaagtggtga

SEQ ID NO: 1406 - DNA, 2166 bp, Zea mays
  Peptide Sequence Number=SeqID_43185
atggcaaccgaagttggtgaggccgcagctgccgcttgccgtgctgttttctccccgcacgtcgcggcgcccgcgtccgatgctgctgtcgcttactcgcttcggcaagccaagtccaccggtaaacggggcggccgactaatcgttgcacaagctcgcggcgcggcgcggcgccgccatgtcgtctccagcgccaacgtcgccggctacgccgtctccaccaccaccggctccggtaccgcccacgccgtccccgcagccgccgactccggcgccggtaccgcccacgccagcgccggtaccaccaactcccgcgccggtgccgcccacgccagcgccgattccgcctacccccgcgccggtgccgcccacgcctacgccgtcccctcctcctccgtctccgtcgccaccaccgccggtgacgccgtccccaccgccgccagcgaccgtaccgacgccatccccacctccaccggcatctcctccaccaccgaccgtgccaacgccatcaccaacgccaccagcatctcctccaccaccggcgaccgcgccaacgccaacacctcctccacctgcgtcgccgtcggggcggttgttctgatcggcctcgccgtcggcctcatttactgcttcgcgggaaggaaacgacgccggcggtcgccgctgccgtctcaggggtttccaggcgagttctacgacccgcggcggggtccaatgaccccgctgcacatgtcgcacgtgcaatcgacgacgccatcctcgacgccgccactgatgcactcgtggcagcagagcagccacggtctgtccgagtccccgctgccgccactgaacccttcgccggccatcacgggcggcacattcgcgtacgacgacctggcggcggcgacggacgggttctcggacgccaacctgctcgggcagggcgggttcgggcatgtgtaccgcggcacggtggccgggcaagaggtggccatcaagaagctgcgggcgggcagcgggcagggcgaccgcgagttccgcgccgaggtggagatcatcagccgtgtgcaccacaagaacctcgtctccctcgtcggctactgcctccatggtgaacaacggctgctcgtctacgagtatgtgcccaacaagaccctcgagttccagcttcacgggagtggcaggccaacattggactggccgaggcggtggaagatcgcggtcggctcggccaagggcctcgcctatctgcacgaagactgtcatcctaagatcatccatcgtgacattaaggcggcgaacatccttctggattataactacgagccaaaggttgcagattttgggttggccaaataccaagcagctgaagtaacctctgtttctacgcgtgtaatggggactttcggatacttggcgccagagtacgctgccacaggcaaagttaacgaccggtccgacgtcttctccttcggcgtgatgcttctggaactgatcactggaaggaaaccaatcatgacatcttcagagtatcagcctgagacattagtttcttgggctaggccattgctgacaagagctgtcgaggaggaaaactatgacgaactgatcgatcccaggctggagaccaactacgacgcgtacgacatggcgcggctggttgcgtgcgccgcggccgccgtgcgccagactgcgcggtcccgcccgcggatgagccaggtaagactcctgctccagaacgtctcacacacactgggtgcagccgtggctgcaagcgtgacactcgtctccccgttcccaaatggtcaggtcgtccggtacctggagggcgagctgtcggtggaggacctaaacgccggcgtgatgccggggcagagtgcgatgcagcggtcgagcggcggcacgacggaccagatcaaccggctcaggcggatggcgttcgggccgggcgcaggagggagcaccgggaccggggcaatcacggagtacaccagcagcgagttcagcgatcccaccaccgagtacgggctgaacccatccagtgagtacacggccagcagcgcgggcgacacgggggaggtggccgcgggcgcgcaggggcagcagcagtggcacggcaggcgcgcgcccggcgacaccgagaggatgagccggcgcaccaccggcaggcgcacccagtcgtaa

SEQ ID NO: 1407 - DNA, 2787 bp, Zea mays
  Peptide Sequence Number=SeqID_43186
atggagtcggcggcggcccagtcctgcgcggcgtgcggggacgacgcgcgcgctgcctgccgcgcgtgcagctacgcgctctgcagggcgtgcctcgacgaggacgccgccgagggccgcaccacatgcgcgcgctgcggaggggactacgccgctatcaacccagaattgaatgatgaatctggtaagcccatctggaagaacagggtggagagttggaaggaaaagaagaatgagaagaaagcctcggccaaaaagactgcagctaaagcacagcctccgcctgtcgaagaacagatcatggatgaaaaagacttgacagatgcatatgagccactctcccgggtcatcccaatatcaaagaacaagctcacaccttacagagcagtgatcattatgcggttaattgttcttgggctcttctttcactaccgtatcaccaatcctgttaacagtgcctttggtctctggatgacatcagttatatgtgagatctggtttggtttctcctggatattggatcaattcccgaagtggtatcctatcaatcgtgagacttatgttgataggctgattgcacgatatggagatggtgaagaatctgggttagcacctgtagatttctttgtcagtacagtggatccattgaaagagcctccactaatcactgcaaacactgtgctgtctattcttgctgtggactatcccgttgagaagatctcatgctatgtatctgatgatggttctgctatgctcacatttgaatcgctcgcagagactgcagaatatgctagaaagtgggtgccgttttgcaagaagtacgccattgagccacgagctcctgagttctacttctcacagaaaattgactacttgaaggacaagatacacccatcttttgtcaaggagcgtagggctatgaagagagactatgaagagtacaaggtgaggataaatgctttggttgccaaggctcaaaagacacctgatgaaggctggatcatgcaagacggtacaccatggcctgggaacaatcctcgtgaccaccctggcatgatccaggttttcctgggtgagactggtgcacgggactttgatggaaatgaacttcctcggttagtgtatgtgtcaagagagaaaagaccaggctaccaacaccacaagaaggcaggggctatgaatgctctggtccgagtgtctgctgttctgacaaatgccccttacattcttaatcttgattgtgatcactatgttaacaacagcaaagctgttcgtgaagcaatgtgcttcatgatggaccctactgttggcagagatgtctgctatgtacaattcccccagaggttcgatggcattgatcgcagtgatcgatatgccaataggaacgttgtgttctttgatgttaatatgaaaggacttgatggcctccaaggcccagtttatgtgggaactggttgttgtttcaataggcaagcactttatggttatgggcctccatctctgcccgcacttccaaagtcttcgatttgttcctggtgttgctgctgctgtcccaagaaaaaggttgaaagaagtgagagggaaatcaacagagactctcggcgagaagacctcgagtctgccatttttaaccttcgcgaaattgacaactacgatgagtacgagaggtccatgctcatctctcagatgagcttcgagaagtcttttgggctgtcctcggtctttattgaatcgacccttatggagaatgggggcgtccctgaatctgcaaacccatctaccctaattaaagaagccattcatgtcattagctgtggatatgaagagaaaactgaatggggaaaagagattggctggatctatggttcagttacagaggatattctgactgggtttaagatgcactgccgtggctggagatccatctactgcatgccggtgagacctgcattcaagggatcagccccaatcaatctttccgatcgtcttcaccaagttctccggtgggctcttggttctgtcgagatcttcttcagtcggcactgcccgctgtggtacggttacggtggcggccgtctgaaatggctccagaggctctcctacatcaacaccatcgtgtacccgttcacttctcttcctctcgttgcctactgttgcctgcctgccatttgcctgctcacaggaaagttcattatacctacgctgtccaacgctgcaacgatatggtttcttggcctcttcatgtccatcatcgtgacgagcgtgttggagctgcggtggagtggcatcgggatcgaggactggtggcgcaacgagcagttctgggtcatcggaggcgtgtccgcgcacctgttcgccgtgttccagggtatcctcaagatgattgccgggctggacaccaacttcacggtcacggcaaaggccacggacgacactgagttcggggagctgtacctgttcaagtggacgacggtgctgatcccgcccacaagcatcctggtgctgaacctggtgggcgtggtggctgggttctcggccgcgctcaacagcggctacgagtcctggggcccgctcttcggtaaggtgttcttcgccatgtgggtgatcatgcacctgtacccgttcctcaagggtctcatgggccgccagaaccgcacgccgaccatcgtggtgctctggtccgtcctcctcgcctccgtcttctccctcctgtgggtcaagatcgacccattcgttggaggaaccgagaccgtcaacaccaacaactgcaacacgatcatctgctga

SEQ ID NO: 1408 - DNA, 984 bp, Zea mays
  Peptide Sequence Number=SeqID_43187
ccagtggagcaccagctgcgggtgcactggacactgtccggtgccctggttggctcagagataaactctctgctctcaggaatcgctaaggacgccgcggctaaaattcaccggactgtccggatcatctattcaccccctctaagtgctctcaagtggcactacggcacggaggcacaatttgagagcaaggggattgagcctatggtgccctgtctttcgccccttcccaagtatgtcatcatcagggtggagcggaactggaagagagaggatgaggcgaagacttcggcggcacgacggaagcgtcgtctgacgaggaaaaaggagaagaaggtcacgcgcctcgcccgcggagcttgggaggagcattaccccatccaccgacatggaggacatgacctctactgcgtccaggggatggacgtccttactttagagggtggcccgtcccaccttagggacgctgagtccgacgatgatgaggggggagcgacactggtggcgtcgcatcctcccgcgcccttggttacatcagggtgtcgtgcggggaaggagccagtgtcagttctcctccccccctacgcctctagcgacggatgtacgtcatgcgatgcctcaagcgtaatcgcaaacacagacggcctttgtgtcatcgaggtgtcgctatgggagaaatacggaggcggttccctatctcgtgccttttgcggccgcgctgaagaagacaaccacggggaagcgctcctccagggcatcttgcccctgagtgctgtggtggcggtcggtcaattcgggttggcgtcatcgtccatggaggttattgggtcccaggtgtgtcctccaccgaccgtcgtcgcttcaacttctgcgagggttgtgtcgtatgttgtgcacgaggggagtcgcgagggccttccactgcccctcgaaggcttggaggcaagggagactaaggtggaggagtggcagtgcattggatag

SEQ ID NO: 1409 - DNA, 456 bp, Zea mays
  Peptide Sequence Number=SeqID_43188
atgcaggtggtgtgcaaccgcaccacggggacgcaccccttcgacttcgacgcatccagcatggaggcccaggcccacacgtcatgtaaccggcgcgctggttactacgtgcgagaaactgcaccgccacttgcgccaatgtcgcgccttctcgactgtggaaccagtgccgcgactcgaggcaaccctgcgcatggcccaatagtgtcaatcgagcacatcggtcacggggaccgggaaaggggatatttcgaaagggatccttctccgcgaaggaagcggaccccgagccctcctactgatcaggggttcgaaggctggccccccggaagggttcgacagccgccccagagcactcgggcttcaggctcattgctgatcagaggttcgaaggctggcccctcggaagggttcgacagccgcctcagagcactcgggctccgcgcccactactga

SEQ ID NO: 1410 - DNA, 267 bp, Zea mays
  Peptide Sequence Number=SeqID_43189
atgctcattgaggccttgaaggagattaagatgagggtgacaatagtactcggtgatggagatgtccccgtggataaagttacagaaggctacgtcgaggtggagggcgtgggcctcacgactgccgatggagtgctcctcaatggcaacctaggcctaacgagcaatgtccgcgggcttgtggacgatgtcttgcaactcgacgatgatggtgccaaggatctaggaaaggatgatgttgtccatccagcaccaagacggttgtga

SEQ ID NO: 1411 - DNA, 396 bp, Zea mays
  Peptide Sequence Number=SeqID_43190
atgggcacagatgtcgtcgaggcgtgcgtcgccgctatcgaagacgacaccctagccagtcccgtcgcgaatgcgggcacagctggcctaggcgcaacttctttccccgtactcccgttgtatctcccttcttccgttcttctctggtgcgatggtgcccttcccagtgccgctgtgggccactatcccctcgacgatgttgttgctgctagtgtcgccgccaagtttgtcgttgccattgcttgggagcatgagcgggctacttctctcgctttggagcaagagtgtgccaccaccgatgttcttgctcaccagcttgcggaggccgatcaaaagcttgagggtgttgtggtctctgactccttccccgaatttaatgatattgaggttttctat

SEQ ID NO: 1412 - DNA, 1659 bp, Zea mays
  Peptide Sequence Number=SeqID_43191
atgctgcagctccagccccctgggttcctgcccatcccgcgccggcgcgtcaccgcccgcgggcgtcgcgcccgccctgtcatcgccttcaactcccagtggaagatccccgacgtcgacacagatgcggtgcgggagcgagtgcggtcttggatgtctctggcgcggggcgcgatcgccgacgcggggcgcgcggcgcgggagggagggaggcacaaagaggagcccgagggtgggaagaagaagcagcggaaggaggtgaccgtggaggagcaggcgttcgttgcggtgccagaggtcaccgtggagccgcgggtgccccagggttggctctcgctggacgccgtcgtctccatcgagcagttcgccaggttgaatgggttgacggggagacaggtgcagaggatatttgaatcacttgctccagagcatctgcacaatgacgctcgaagcctggttgagtatagctgcttccgctacttggcaaaagataattctgacttccatccaaacttgaagggaaggcttgttggagaagatgcctttgcccgaattgctcctgctgttgcaggtgttgctgatgtttcaacagctcattatctctttagggctcttgttggtgcagaaaagggactttcatttgatctgtggacaacatatctagcggaacttttgaataaaaaaagacctgttctaaaatgggaggaaaataccgcatggccaggaaaccttaccttgacggacaaggcgctgtattttgaggccattggactgtcaggtaccaagaaaccaatgaggcttgaccttacaaatcagaattcaagggctgaaaagacgaaagttggaccatttggatccaaactatttgactctgctgtctcagtttcttctggttcaatgtcagatgaatggacattggagtttgttgatttcagtggggagatgagacgagatgtgtggctcgccttcatcagtgaaattatttcagtttatagattcattcgtgaatatggtccaggtggtgatgatccagcaatacataatgtgtatggtgcgtacaaagggaagaaaagagctgttagtagtgcagcgaacagtattgcaaggctccagtctctgcagttcatacggagattatatgaagatccagctaagctagtgcagttctcttacctgtccaacgcaccatttggtgatgttgttcttcagaccctagcagtgaacttttggggtgggcctctgactacaaaagccagatctgcaaatcatagatcaactcagtggcatagatcttcagaggacccatctagcggtcgcacacatgtttacgacatagatggcagcgtgtacttgcgcaagtggatgacgtcccccagctggacatctagccactcagccaatttttggagaaattcttctgtcaagtatggtataatattgagtaaatctttagttgtagctgataaaaaccttgtagaaaaggcaatggttgactgtaaagagaagagcaaagtagttgaaaggacacaagcgacaatagttgctgctacaatcgaaggtattccaagtaacattgacctcttcaaggtaagctacttttctatgagttatttcttccttagtcaccctgagaagtcgaatattgatccactctattaa

SEQ ID NO: 1413 - DNA, 111 bp, Zea mays
  Peptide Sequence Number=SeqID_43192
atggccgtgattgattcaacatcgaaaaagatgtacctctaccaggtgaaacgctcttgggaaagggttgtccgaggtgcgttggacaaggacaactgtaggtgggcctaa

SEQ ID NO: 1414 - DNA, 405 bp, Zea mays
  Peptide Sequence Number=SeqID_43193
atgaatgctgtggtaacttcacacctacccgtctgtttatatagtgctgcagttgcagagtttggagccctctgccctctaccgcagattcaaccagttttctgcactgagttttggtggccactagcaaccgatcagttgtttcatgaaagctgcaaaaggaacttcgatagatcagcattacgaggcactgcaacaaggatccttgtcaaccggcagtcagctcagaggtcgcgggtgaggaagttgcagtacatctccgagctcgagcgcagcgtcacaacactgctgagttgctcaaaggatgcatatgacgtatgggagcccactcaaattaatactagcaaggaaaagttagagagaggaaagagggcaaacaaatcaagcgagaatcaaagcgagtag

SEQ ID NO: 1415 - DNA, 249 bp, Zea mays
  Peptide Sequence Number=SeqID_43194
atggataatgattatgtggaactcgatgtgcttaacttggagacaactaatggaactaaggacaaagacaagaggaacttcgagggactgagtgcacaggagaaggtcaagaagaccgaggaaagtcctccaaaaagttcaatacaaaaggagaaagattggagaagaaaaggacttaaaaagggttgtctaggcacactggactctctacagggtcggtccggtggtgcacgtgaccctttgcagtaa

SEQ ID NO: 1416 - DNA, 177 bp, Zea mays
  Peptide Sequence Number=SeqID_43195
atggtgaagagagtggtgttcctcaagcagctcaagtccggcctgctcctaagactaggagtgattgcaacacaaggtatactgaagcacgaggtagagtacgagataagagaggtggaggcatatgtgttcttgctgcctgcaggagtttttgtcgcaattatgccaaagttgtga

SEQ ID NO: 1417 - DNA, 402 bp, Zea mays
  Peptide Sequence Number=SeqID_43196
atgccgccaaagaaagcttcagcaacaggggctgctgctctgcagccgctggacccgaaccaggagaccctttctcttcgggaagcccgaagccagaagaagaaggccaccagtccaacgcctcaggaggacgatttggaccaagaaatcaggaatatggagatgctgcatcaacaagtgcaaaggaagaaagaaaagatggcccggctagctgacctacaaaggcagatagacgaagcctctgaagaagttcgtcaccttatgcaagatgagcagaaccagaggccccagtacaaagagcttcaccaagagggcttcgtcaacgaggatgactggtatgaggatttccatcatggaaattttgcttttgatgatgcttctcctctgtcagtagaactgtag

SEQ ID NO: 1418 - DNA, 312 bp, Zea mays
  Peptide Sequence Number=SeqID_43197
atgaagatcagagcgctggaaatatctaaagaacgaagaaaagatctgaggcactgtggatccggatgtgctcgagtgaattggaggaaagatcgaccgcgagatcatcgcgacaccattttcccctttttagacaccgtcgagcacgaattctccgcgctccgtggccaaccgtctccagccgacgccggtcatggccagtctgagcaacaaggtggccggcggcgagcgcgtcgttgccagggttcgtttttggagaagaaacataaaacagaggaccttagtgtaaatgtcagagagacacgtgaatag

SEQ ID NO: 1419 - DNA, 600 bp, Zea mays
  Peptide Sequence Number=SeqID_43198
atggtccagtgtggccgcgttgctcctgatgatggcatgtcgaccctcataggggtagaattacagaagaaaatccaaagccaaggggtcgttgcagaagccgcagtccaagacagagcctatagcatacaggggccctgcaaaacggtgttctatttcattgcatcattgctcgagtgcccaaatgtgctagccatttgtgaaggtatcgagaggattattgggatagagactatagaaggcgaagccagagcagaagtagggagcgatatgaacaggccgggtacagagatggtgatcatcgtcgccataggactcacagtattagtcctgattatgacaggaaacgtaacagacacagtggctctcctgtacttaaaagccccagtcatagcagaagtcgttctcctcgtagggcacctcatgaaggaatacctagcaagcccagagatggccgcgctgcatgttctggaagcccttgaccctgagctgtggctgaatatcacacagcttctcctggacagcttgaggcatctaagcagttctcatcatttgtattttcttactaagatggcctttgttttagtccaggttgagtag

SEQ ID NO: 1420 - DNA, 222 bp, Zea mays
  Peptide Sequence Number=SeqID_43199
atggaggaggtcctgaactttgccgcagtcaccatggacgccagcagaaccagctgtcgcagcttgccgacgagcagcgtgacacccgccgcgctcaaggcctacatgtgggaggttctggcctctggcacagtcaccatggctgccgtcaagaccagccgtcgcagctcaccgagaaacagtgacgccacacacctctggaggcagcaagattgcaagtga

SEQ ID NO: 1421 - DNA, 234 bp, Zea mays
  Peptide Sequence Number=SeqID_43200
atggggctcggtgtatgtggcttgctctaccgagggtggattgcccccttggggaggagtgcgatgatgatgaggataatgctggtttctattgtgattatgattatggttatggtttctggtattctttccgtttggaaatggttgcctttggtgcaatgctcaggtaaagaagaagaaggcgtcgaggcggatctacaggagttccaggacttcgatgagttcaaggattag

SEQ ID NO: 1422 - DNA, 480 bp, Zea mays
  Peptide Sequence Number=SeqID_43201
atgccaaacagggccaaagccttagccgtcgggatcgcctcaccccctcccttgcatttcaaccaatcctacgcgcctgagtacaagcgacgccaaggcagagagagggaggagggacgcggagctcagtttccgtcgtcgtcgcagtcctacgcccagggagaggtcatgcgggtgctatcgcgtgcaggagggaaattggagtccggttggtgcccgtgccagtggcaattgctcgccggaggtgtgaagctgcgccaagcaaccttccgtcgtggacccgctcggccatcgcttaaccctctggtgagacacccccttcgtaacccttgcttcgattcgatttcgcgcaccaccgtgggaatgttgtcgctggagcaggcgaatttggtagcgcgcggctgggggtctccgctgtggggcgggccgctgtgtccctggtgtttgggcgaggaagaaacagtgtgggccgtcggatag

SEQ ID NO: 1423 - DNA, 1665 bp, Zea mays
  Peptide Sequence Number=SeqID_43202
atggcgcctcctgttgacgtggtcggtccgcgccctaggttgggcgatgtggaggctcctccgaggtcgaggtcgagtctgtcttccgtggccgaggtcgagtccgagcccctgggtcgggcgaggcggagaccgtcggctgaagccagggctaagtcagagccctgggtcaggcggagcggagttcgccgtcttccggggctgagcccaagtccgagccctgggtcgggcggagcggacagtcggagcggcgcaggcggcgctgtccttctgtcaggccggtcagtggagtggcgaagtgattgcggtcacttcggctctgtcgactggaggacgcgcgtcaggataaagctttgtgctgatgggggttaccagctgagaattaggagccttgagggtgccaaggtcttcttcgggtccttcgccggcgaccagcagcaccagatattggggccatgtgtaagggcggaagctgttcctaccgcgtcaataaggggagtcctgctggttctaccaggaagatccattccacagcctctcaaggatctcataatacttgcacgagctaggatgcagctcaagcctcctgcaagacccaagctctattcagggctcatgccccaagaggatttggatccgtaccgtgatctaataccaggcttgcctgaagacttggcgaagatatgtcttgcccttgtccctcgtgctcattttcctgccatgggcgcagtttccaagaggtggatgtcgttcctcgaaagcaaggagctcgtagctgtgaggaaggaggttgggaaacttgaggagtgggtgtatgtcctggttccagatgctggggcgaaggggtcacactgggagattttagagtgttcggggcaaaagcagagccctcttccacgcatgcctggactaaccaaagcggggtttggtgtggttgttattggtggtaagctctttgttattgcgggctatgccgctgaccatgggaaagactgtgcttcagatgaggtttatcagtatgattcttgcctcaacaggtggactgtgcttgctaagatgaatgtagctcggtgcgacttcgcctgtgcagaggtcaatggggtgatatatgttgctggtggatttggtccaaacggcgagagtttatctagcgtcgaagtgtatgacccagaacagaataagtggacactgatcgagggcctgcgcagaccaaggtggggctgcttcgggtgcagcttcgaagggaagctgtatgtcatgggcggccgctcaagcttcacaatcggtaactcccgttctgttgacgtgtacaaccctaacagccacgcctggggccaggtcaagaacggctgcgtgatggtcacggctcatgcggtcctcggcaagaggctcttctgcatcgaatggaagaaccagaggtctctagcaatcttcaacccagctgacgactcctggcagaaggtccccgtgccgctcaccggcagctcaagcactcgtttctccctcgtggtgcacgaggacaagctgctgctcttccctctggaggaagagcccgggtaccaaacgctgatgtatgaccctgcagctccgatggggtccgagtggtgcacgtcgaagctgaagccgacgggttcttgcctgtgcagcgtgaccatcaaagcctga

SEQ ID NO: 1424 - DNA, 108 bp, Zea mays
  Peptide Sequence Number=SeqID_43203
tttgcaatagtgcctaatgagaaaggggtccaacagatacaattgaatcaccacccaaaggattacattctcaagcataatctcacaatctcttatacatttacacat

SEQ ID NO: 1425 - DNA, 1263 bp, Zea mays
  Peptide Sequence Number=SeqID_43204
atgcaggagctgtacaacagcctgaccgcttccaacgagctggtcagggtcctggccaacgtcctgggccccgcgggcgcgctcaacccgacggcggcgtccgtgctcgcggcgctgcgctccgagctggacgccgcgcgccagctcgtgaagcagcagcgcaggcgcggcgtggacggcgaggagcgcctgctgcggaggcagctcgcggaggaggtgcgcgcgtggaagtgcaggcacagggagaaggcggcggcggccgcgcgcctcgtcgcctcggagctcgacggcgagcggcgggcgcggaggcgggcggagagggtggggacgaagctggcggaggcgctggcgggcgcggaggcgtcgctgcgggcggccacgcgggagcttgggctggagcgggcggcgagggcgcgcctggagaaggtgtgcgacgagctcgcctccagagacgttggcggcggcacggaggcggaggcggaggacgacgacggcctcaggcgggaggccgccgccaccgcgctggaggagttggaacgggagagggagatgctgcaggtcgccgacgagctgcgcgaggagcgggtccggatgaagctggcggaggcgaggctacacttcgaggagaagaacgccgccgtcgaccgcctgcgccaggagctcgaggccttcttgggcaacgaacgtcgagaacaaacgcctgcccaccatgaaatggccaaggaggaggaggaggaggatcaccagctgcagatcgtccttgcctccgaattcggtgtccacggcatcgatcctctggtcacagagaagagcggacaggaagaaaatgccgaagctggtgacgacgacgacgactcggaaggcagcgacatcgagctgaacatggacggcaacagctggagctacaccaccacctccaggtccagggacacgacggccaagaacgcaacgtcggcgcacggctcactttcggacagagcaacggaatgtggcgccgacgccggcgccttcgatcgtagatctgaagcgacgagagatgcgccggagcaggactgggcggctgacggatgcagcgacggcgggaccaccggcagggacgaggacgaggacgccgagaggtacgaggcgatcaagaacctcagggagcagatgctgaccggccacgccttcctcttcctgtccaagggcgaggcagacgatgacagcgatcggcgtcgccgtggtttcgcttctcattttgaagaagatggggacctctggtga

SEQ ID NO: 1426 - DNA, 870 bp, Zea mays
  Peptide Sequence Number=SeqID_43205
atggccgctgccacagccgccgccgccgcgctcgcctccccggcgggcctctccacatcgctggcgcgccgcggcctcgtcagcttcgcacccgcgctccgccccggccctgaccgcagctctcgcgccgtcgccctcctcggtgtacgaactcatgtcacggctgttgatcaagccattgtaaaaggtgatacaaagttggaaggtcctgtggttgttgttactggtgcttccagggggattggaaaagccactgcattggctcttggaaaagcaggctgcaaggtcttggtgaattatgctcgatcttcaaaggaggctgaagaagtctccaaggagattgaagcatctggaggccaggccattacctttggaggagatgtttccaaagaggctgatgttgaatctatgataaaagtggctgttgatacatggggaacgattgatgtactagtaaataatgcaggaatcacacgggacacattgttgatgagaatgaagaaatcacagtggcaagatgtgattgatttgaatcttacaggcgttttcctttgcacgcagggaagaattatcaatatagcatcggttgttggtcttactggtaatgctggacaagctaattatgctgctgccaaggctggggttattgggttcacaaaaacagttgctagggagtatgccagcagaaatattaatgcaaacgttatcgctcctggatttattgcttcagatatgactgctgaacttggtgaagagttagagaagaaaattctgtcaactattcctttagcccttagaaaagctaggtttgaatctgagacttctgttgaagttggagacgggaaaaggcttgcccaacggtatctatga

SEQ ID NO: 1427 - DNA, 744 bp, Zea mays
  Peptide Sequence Number=SeqID_43206
atgggctcgtacctggcagtcgcagcggcctctgagacaaacccgccttactttatccacctgtgttacaaaccccgcggtggtgacgtcaggaggaagctggctcttgttgggaaaggcataacatttgacagcggcggctacaacatcaaggccgtaccggtcgccaccatcgagctcatgaaaaaggacatgggaggcgcggcggcggtgtttggtgcagcagaggttttgggacagatcaagccgcctggagtcgaggtccacttcatatctgccgcgtctgaaaatatgatcagtggctcaggcatgagacccggcgacatcgtgactgcttccaatggaaagaccatcgagattattgatctggcgacgttaacgggtgctattcgtgtcgcgcttgggcccagcatcgctgggattctaacgccaagcgacgagctagcggaggaattcgcggccgcctacgaggtctccggggagaagttctggaggctgccgatggaggagagctactgggagtccatggagtccagcatcgccgatatgctctgcgccggccctttgcagccccaggccggcgctatcactgccgcactgttcctcaaacactttgtcgatgacaaggttcagtggatgcacatcgacatcgccggcacggtctggagcaacaagaagcgggcgggtactggcttcggagtcaccaccctggtggagtgggttctcagcaactcgtcgtcctga

SEQ ID NO: 1428 - DNA, 225 bp, Zea mays
  Peptide Sequence Number=SeqID_43207
atgcccagcataccgagggatgtcgccgagcaatcactggacatccgagccggtgcccgacccgtgaagcagcccctgcgtcgtttcgacgaagaaaagcgtagagccataggcgaggagatccacaagctgatggctgcaggttcatcaaagaggtattccatcccgaatggtgcaacatatcaaaggtgcatgaaccacgtgttcggagagcacatcggctga

SEQ ID NO: 1429 - DNA, 617 bp, Zea mays
  Peptide Sequence Number=SeqID_43208
gtaatagcaccattgaatgtgctattaactggctttctgagcaccaagaggacgcagatattgatgagatgcctctggtaccagctaactcaaaaacggaggttaacaagccaagcctgactcctgaagaaatgaagattaaagcacaggagctaagggagcgtgctcgtaagaagaaagaggaagaagagagaagaatggaaagagaaagggagaaggaaagagtacgaatcggaaaagaacttcttgaagccaaaagaattgaggaacaaaatgaaaggaaacgcatgatagaattgcgaagacttgagaaagaggaggagaaaagagctagagaaaaaatccgccagaaattagaagaagataaggctgaaaggagaaggaaactaggattgccaccagaagacccagcagctgccaaaccaagtgcaccacctcctgttgaagagaagaagattagctgtcatatagactgcactgacgttgtcacaatagacaatgattgtcgaaggaatcgagacgtgaagctctttaagcaactgtcgcaaccaacaacactctgcaactgcatgtgcaacaacctgatactcgaccactacactagaatgggactttga

SEQ ID NO: 1430 - DNA, 339 bp, Zea mays
  Peptide Sequence Number=SeqID_43209
atgtcgacatctccgcttctaggcaactaccgtagtgcgctggctgaccccaactggtgtgctgctatggcaaatgagtatcaggcgctctcgacaacaacacttggtgactcatacctcgacactcatacctcgacccccggcgccaacattatggcaggcaagcggatattcaagcacaagattcactccaatggctctcttgtccatcacaaggctcgatgggtgcttcaaggcttcaatcagcagcacgacgtctactacgacgagactttcagcccagttgtcaagccagccaccatccgtgttgtactcagcattgcaccctcacaaaaatga

SEQ ID NO: 1431 - DNA, 605 bp, Zea mays
  Peptide Sequence Number=SeqID_43210
atggaggagctggtacaggagttggttgccgacagaagaagagggccaccggttgagcaaccgctgcgcaacagcccacactcccgcgcgcgccctctgattctttttcgccgacatgcggggcccccacgtcagcctctccaccgcgtttgctcctcactccctttctctggtccgtgggcccgccctgtcggactcgtccccttccccaagtccgcggcgacgaaatcgccgccgccatccgcgcaacagccgccgatgaacacgggttcggccttcctcgtgcctataaaaaccaagtgccgcgcatctccttttcaaccgcttcgtgccgccatcgcgattccactcacaagcactcgcgaacctcggacggaggcgaatccgcaccctgtcgaccacgccgccagcgactctcctttgtgctcgcgctcgggtttgcgcgtgtggtcggggagcttcgcctcgactcggcgggagtttccgcggcatcggcatcgggttggggggcggtctacaccggcaaattgctcaccggagccgctgcgccgccgtgactccgcgccgcaccgtgggcagagctccggacgccacgattctcggag

SEQ ID NO: 1432 - DNA, 525 bp, Zea mays
  Peptide Sequence Number=SeqID_43211
atgggcaagagcaagaaaggtagcggttcttcacaccattctggcgacaaacgcaagcgcgagccgactcctccctcggaggacttcggcgactcggagtactcggaggaggagttctcctccgggtccgagggatctccggctcccgtctctctcccgacgtcgtctgatgattcagacgactcccaggggattgccacggaggtctggacctacatccgggtcgtcgagcgcgccgggctcgaaggctcggatgagtcggagtactcctcggacgaggagaattcctcggactcgtccgaggagggcagcggcggcgatggtggtgatgacggcgatgacggcggcgacggcaatggcggcggcgacagcggcaggggtggtgacaacgacagcaagggcggcgacggcggcggcagcaagggcagcaataagcactttggtggttgcggccgagtcatccgaaatcccattgctgctttaggaatgacgaccgagttatggtgggccgtgttggtgttttag

SEQ ID NO: 1433 - DNA, 171 bp, Zea mays
  Peptide Sequence Number=SeqID_43212
atgacggagatccggcaacggcaatggcgacggttcggcgttgacggagaatggggagggagcggcgggcggacgagcggagcgaatcgcgtggggactggggagaggagcagcttgttggctcccccaatgcccgatttgatgagaaacggtcgcttctatggacgatag

SEQ ID NO: 1434 - DNA, 105 bp, Zea mays
  Peptide Sequence Number=SeqID_43213
atgggttgctgcctcgacaagacagggtttatcaaagagaactggttgtacgcagcagagttcgacatagtcagttggttgaatggaagcagctgttgcaagtag

SEQ ID NO: 1435 - DNA, 1088 bp, Zea mays
  Peptide Sequence Number=SeqID_43214
atgtcgcgcgcgttcgacgattactatatcgagaattgtggcgtcatcttggcgccggaggtgacgcagaggaggatcgacaacagtgaccagttcgtcatcatcgccaccgtcagggtagcttttgtgccggcagaggcagccggcctgccgccgttcggctaccggacgacaaagcaagagggcagcgatcccggcagccccagcgcagtctcctcgttccgggcttccaactgcgcgtccggcgtcgctctcgccggagctgcagcggcgacgcgggcctcggcgcagcgggatctcccaccctccgcccaccgtcgccgcctcgccggccgacccaggcagcgcagcgcaacgatcggtcacaaacaagaacgaccaaggcgcgcccctcaagcggcgtcgtcgtcctcgtcctcgtcccccccgagaccccgagcgcggaggaaaaagtcaacccggatccatccacgagaagagatggggtcgttcaaggggcacgtgctcccgggcacgctgttcctggcggtggggctgtggcgggtgtggtcgtcggcggcgcggcacgccgcggacccgtcgtcgttccgggtgcgcgcgtggagccccgcgccggcgcccgggccggcgcggctgctggagctctacgtcgtggcgggcggcgcgctggcggacatgtgcgtggaggtgctctactccacgcacctccggatattcgccggcggcgaggtcaacccggcgcacctcaacgacctcgagcacggcggcatgctgctcatgttcttcctcttcggcgcgctcgctctcgcgtcccagctctggcccaggcacttcccgctgacggacggagcgctgtgcctggtggcggcgacggcgttcacggcggagctggtgctcttctacttccactccacgacgcacatggggctggagggctactaccactacctgctggtgctgctggtgggcctgtgcgtggccgccgccgtcctcggcgcgctcctgccggacagcttcccggccgacctggcctcgggcgtcctcgtcgcgctgcaggggctctggttctaccagacggcgctggcgct

SEQ ID NO: 1436 - DNA, 318 bp, Zea mays
  Peptide Sequence Number=SeqID_43215
atgcctgttgagacggcgctttcaaggcggcgatgcgcctcgtcaggcacttcttccaccttgctcctagtggagcgtgagtcgcgtgcccatggtgacggtcatgtcgtgggtggcgaggcggagatcaccgatggtggtggtgaagaagacaagaagtcgagggtgtcgaacatgatatggctccccaacgcgaaggtttcgccattggcgaatgttgatgcgcatgctatcagagtgatgggtgtcttttggcacgctaaaagcccccctacctggcgcactaactgttgtggtttcggaaaccaggggcattaa

SEQ ID NO: 1437 - DNA, 3426 bp, Zea mays
  Peptide Sequence Number=SeqID_43216
atggacggggagcaggcggcgcggtgggcggcggcgcaggagggggttcccgtcggggcggaccttgtcgcggcggcgctgcggcagctgcgcttcctcgcggcggtggaccgccgccggtggctctacgacgagggcccgctgctcgaccgggccatacgcaggtacaaagcatgctggcttccgcttcttgacaagcacactaagggtgtggttgtagatggtccattggttgttcctcttgattgtgagtggatatggcactgccatcgccttaacccggtacacaccctactcaccatgatcatctgtaattcacgtacccttggagaaccgagggacctgattattcgagcacatatctttcaggttcagtacataagggactgcaagaaagtgtatggcagaatactgaacaataacaacgttgagtcgtccactcaaacaaagtcgacacttgagtcagaaaaagtttggaaagagctgtatcctgaggagcccttcgaattgttgttcacaagaacctttgacactgccgtggatgtcaaccctgcaggtgcagaggaggacattacctatgatctggtctcggctgttaagagacaatcctctttctattatcaggttggaacaccaacaatgcatgatccacggtttctccaagaagctctagctcgatacaaggcgtttctttacctgatcaagatgaatcaagaaaaaggattgcagcgcttccgtgtaccaacctatgatgtggatctgttgtggcacactcaccagctgcatcctattacctaccgcaacgacatggtgaagcttcttggaaaagttctggagcatgatgacaccgatgctgatcgatctgaagggaagaaactcgatgttggatttaccgagactactgaacagttcgagagtacctttggtgtaagatactggaaggctggatgtatgtaccgtggcaacgtgccatctcctgtgacatccactcctcagacattcagtgctgaggttggtactgggtcttacatctgcaaagcccagaaagatcttaatgcccttgatgtaacagttgtagagttatatttacaaattgtagacatcaagaatttaccatctgctgttcaaaaagaaaatgtgtatgtacggttcgccaagaatcaatcagatatgttcatcagtgacggcggcaggttggatatctcaacagttacagggaagaacaccggagtttgtttacagtgtgaacctaccggagaactcattcttgcagtaatggttgatcaattatcaaagaaaccagaaccgatagggaaggtttctttcccactgcacgatttgacagggcctgattctaagctctccttcgagaagtggtttgaactgaaagctcatggtgggcatgccgcttcacctcctgttagtcttcgtgttgcagcttctgctactgtcccaagcagcgctcagaaggtgttcaccatggtcaggatggagccattctctctcaagtcatgtcttttgccacattccatcaaggatcagaacacgggcagctggactcgtttcgtaaatgattgtggtaccgagcttatccgtctccagataagagagcacaaggcgaagaatagcatggccgtcgttcgagaattggttggagtattgaagtcaacaaaaaagcaaattcaacttgcagaattcaaggaaaacaagtggaccctaaaagactccaacttgccaataagtcatggcactgatggcagtctactcgatctcaaaggtgacaaccatctgatcaagctttatcggggaaggaaactggaatacgagcgcaaatgttgcagcgctcactctgaggacgtatcagctgttactgctgtaaagttctgtgctgaacatccatatggcaaagccgttgccttgctagacactgaagctcagcttatcatggtgaacgaggattggctcctacttccatggatctccatatcagtcctgtttatggacggcgatggcggtacgaaacttggcggcggtgccatggttcagaaaggtacagtgtttggatccgacactagcatggtgctagagacacagaccgtcggagcagggagcgtggcatccaatctagcacaatgtggcacttgcagcgccgtgttcggtggtgatgataaagaaatggcgaactgcaaggttgagcatgcgagctctggcgcttctcgcacggttgttgcaagtggtgagaatgggcacactgagactgctggctgtggaggcggctgtggtagcaattgtggacccatgatggctgaagaccccaaggccggcaatgccaagtccggaggctgtggttcggggtgtggtggtggctgcggtggcgcgggaggttgtgggaccatggccaacgaaggccaatccaggtccggaggtgttggcaccttgttgagctccaacgccatgggtggtgagggccagcaggcccattcagctggctgtggctccggctgtggtggtggctgcggcagcggcatggtcatcgaaggctccaaggttaacaacgttaacgccatgtccggcggctgtggctctggttgtggtggtggttgcggcagtggcatggtcatcgaaggctccaaggccaacaacgccatgtccggtggctgtggctctggttgcggtggtggatgcggcagcggcatgctcatcgaaggctccaaggccaacaaagccatgtccggcggctgtggctctggttgtggtggtggttgcggcagcggcatggtcatcgaatgctccaaggccaacaacaccatgtccggcggctgtggctctggttgcggtggtggttgcggcagtggcatggtcatcgaaggctccaaggccaacaacgccatgtccggcggctgtggctctggttgtggtggtggttgcggcagtggcatggtcaacgaaggctccaaggccgccaacaccatgtccggcggctgtggctccggttgcggtggtggttgcggtgccctgttcaacgctagcactgctgccggagagggcctgcacaataagtcggctgggtgcggcggcggcgggtgcggctccgggtgcggcggtggcggcggctgtggtagcggcatggctatcgaaggcttcaaggccaaccacgccaagtctggtggctgcggctctggctgcggtggtggtggctgcggcaccctgttcagctccagcgctgcggccagccaaggccagtccagatccggcggctgcggctctggctgcggtggtggaggctgtggcactggcagcatggtcgctgaaggctccaacggcgggaacgccaagtccggcggctgtggcggcggttgcggtggcggaggtggctgcggcggcggaggctgtggcgggggttgcggcgccgtgttcaacgcatga

SEQ ID NO: 1438 - DNA, 498 bp, Zea mays
  Peptide Sequence Number=SeqID_43217
atgtgggcattagccatgaagggagaagagaatttcaagttgttaccactaagtggttatgaccttatacttggtatggactatggactgaactgcccacatcagaaacgcgcggagcggtcattcgtgcctgcgcggcctgacaaaatcctgcacaatccctatgcacaacagggcatgcctcagacgtttgcattgaatgcgggcgatgggcttgcttctagccaaaggcctgtgccacatgattatgagccacgtggtggcaccagaccccagtccgagcggagagtgggaaccaagggtgcatgctggcctaaagacttgggacccacctgtcgggggttcgaataccagactgagaggtttggacacttctacgagggtctggacggtacacatgaaggtccaggtatgaaccaccacaggtggggctcggacgacatacgtgggggtccggatcccaatgtggtggtgcggatccatggtagtagtccctaa

SEQ ID NO: 1439 - DNA, 651 bp, Zea mays
  Peptide Sequence Number=SeqID_43218
atggacgagaaggcgacgatggagagcaagctgtcctcggcggcggccttcgtggaggggggcgtgcaggacgcctgcgacgacgcctgcagcatctgcctcgacgccttctgcgacagcaacccctccacgatgaccaagtgcaagcatgactaccatcttcagtgcattcttgaatggtgccagagaagctcccagtgccccatgtgttggcagcatatcagcatgaaagatcctatgagccaagagctactagaggctgttgaacaagagaggaacatccgagctaatccttcacgtaatactgctgttttccaccatcaaatgctgggtgattttgagatccctgtaggtgcagatgatgcagaacttgaagaacgcattattcagcacttggctgccgcagctgcagatttctgggatcgaatctacacctgtggatcaagacggaactggaccatccgctttacaatcaatggcagtaactctcgacaaacagaactcctgacaaatggagcacagacacgcgtcttacctgtgggcattcttgacaatggcaggtacagggatttcataatcaaagtgcaagtggatggagggagaggtggttttctcggagcaactctttactggatcttggttctgaggtga

SEQ ID NO: 1440 - DNA, 1671 bp, Zea mays
  Peptide Sequence Number=SeqID_43219
atgggtgggggccgaacgaatggcgaggaggatgcggacatggtgctcgtcaaccaggacaagctccccgcgcccagcgtgccggcctctgctggcgttgccgccaacctctttcgaaagaaggccacgctcccgcagccgtcgacctccgcccgcaagccgctccgcatcaaaataggtcaaccaaaactgccaaaaaacttcgaagaggatacatggtcgattttgaaggatgctatcacagctatttttctcaagcagaaactttcttgtgatgttgagaaactctatcaggctgctggtgatctttgtttacacaagctaggggcaaacctatacgaccgaatcaagaaagaatgtggaatacatatagctgaaaaaatatcagcattagtgggtcaaagcccagatctggttgtattcttgtctctggtccaaagaacatggcaagatttttgtgatcagatgttgattattcgtggtattgctttacttcttgatgtaaaatatgtcaagaatgtggcaaatatctgttcagtgtgggatatggggctgcaactgttccgcaagcatctatcactatccacggagattgaacacaaaactgtaactggccttctcagattgatcgagagtgagaggcttggtgaagcaatagataggacattacttagtcatcttctgaagatgcttactgctcttggaatgtattctgagagttttgaaaaaccctttcttgaatgtacttctgaattttatgctacggaaggtgttagatatatgcaacaatctgatattccagattacctgaagcatgtggagtcgaggttgcaagaagaacacgaaaggtgtattctatatttggaagctaacacgaggaagccactgattgcaactactgaaaagcaattgctagaacgtcatacatctgccattattgagaaggggttcactatgctcatggatgccaatcgtataaatgacctctcgaggatgtacaaccttttccagagggtgaatgctgttgagctgctaaaactagcgcttagttcatatatccgggctacaggccagggcattattatggatgaagaaaaggacagagaattggttccatttcttcttgattttaaggcatccctcgacaaaatattggaagaaagttttgccaagaacgaggctttctccaataccataaaagattcatttgagcaccttatcaatctacgacagaaccgacctgcggaattgattgcaaagtttcttgatgagaaacttcgagctggcaataaagggacatcggaagaagagctggagggtatacttgataaagttctggtcctgtttcggtttatacaaatatggggctcttttagctcaaatatgcactatgtacgagtaaagggtaaagatgtatttgaggcattctacaagaaggatctagctaagaggttgctgcttgggaagagtgcatcaatagatgctgaaaaatcgatgatcacaaaactcaaaactgagtgtggaagtcagtttaccaacaagctggagggaatgttcaaggacattgaattatccaaagaaataaatgattcattcagacaatcatctcaagctaggacaaagcttccctctggcattgaaatgagtgtccatgtgcttacaacagggtaa

SEQ ID NO: 1441 - DNA, 705 bp, Zea mays
  Peptide Sequence Number=SeqID_43220
atggacgtgaaactcccacacgaactgaatgtgtatcaggatatatttaaagagttctatttaagcaagtacagtggaaggcgtttaatgtggcagaattctttgggacactgtgtcttgaaagcagactttcccaaaggcaaaaaggaacttgcagtatcattgttccagagcgtggttttgatgttgttcaatgacgcacaaaagttaagcttcattgacatcaaagattccactggtatcgaggataaagaattgagacgaacattgcaatctcttgcatgtggtaaagttcgggttctccaaaagataccaaaagggagagatgtagaagataaggatgaatttgtattcaatgaagattttagtgctcctctctaccgcataaaggtaaatgcaattcaaatgaaagagacggtagaagaaaacacgagcaccactgagagagtgttccaggatcggcagtatcagttgatatttgatatgtgctggatgctttatgatagaaaagttgacgcggccatagttcgaataatgaagacgcggaaggtcctcagccacacccttctaataactgagctttaccagcagctcaagttccctgttaagccagctgatatcaagaaaagaatagagagcttgatcgaccgggagtacctggagcgcgacaggagtaacccccagatctacaactatctggcttga

SEQ ID NO: 1442 - DNA, 468 bp, Zea mays
  Peptide Sequence Number=SeqID_43221
atgccgctcctggccctgcgcgcaggctacttgcttgtggcctgccaagaggaaggtttggaatcttattgtgattttaagcgtgagccatctgcacgtgtggttgggtctgggagcaacgccacccttaggacgagaaagtgtgtcttcttccttgctcacgaggcgacgtcatccactggaaaaagggagatgaccgcgacggtggtgaccctggcctccacatgtctacccattcttccattttcggttcggcgtcttgaacagatagggaatcatacacttctcgctgcaccctggagagaaccagtcacgggtacagactattgttgcagaatggttggaagtcagaaagctatagcgggtcgtgctcgattgctaaactttaacatcatcactgatgccgagggcgtcgagaagggtgccatcaatgagaagatcgacaaggagatcatgagggagatttag

SEQ ID NO: 1443 - DNA, 546 bp, Zea mays
  Peptide Sequence Number=SeqID_43222
atgaacagcttgttctcgagctcgtggaagcgcggcgtcggagacggcggggagcaggggacatcgagtccggcggcgtggagatgtctgcgccgccgggtgcccgagcggggccgagcctcgacaggttcggacgtggatgtcacgaggactggcccaggtacgctgacagtggagtccatcaaggaagagctccgcgacctggagcgcatccagcggtcgctccacgacgccaacgtgggcggcaagtcgctgcacgacgcggcggccgtgcgcgggctccgcgcgcggatggacgcggacgtgggcacgacgatcaagaaggccaaggtggtgaagctccggctcgagtcgctggaccgcgccaacgctgccaaccggtccgtgcccgggtgcggtcatgggtcgtccacggaccgcacccggacgtccgtcgtggccgggctgcgcaagaagctccgggactcgatggagtccttctcgtcgctacggtcccggtcgtgtacgagtaccgggacacgctggcgcggcgctacttcacggtga

SEQ ID NO: 1444 - DNA, 384 bp, Zea mays
  Peptide Sequence Number=SeqID_43223
atgcaggacatcaagaagtcggcatggaatcaaaaagcactaacatttccaacccaatcaaagaggatagatgataactgtggcgccgccaaccatgtgtggcacttgttttcaccggagctgggcagcccatgcctgctccttgccctgcagctgtgcagcacatctggtgcgggcagtgccactgtggggcgagacagcagagtgagtacaactgcagcaatgaaggaccgatacatggaggcagacggggttacactgcaagggataggtgtgtcgatggtgaggaagaagcatgaccaagctgttcatgccatctacactagcagtgaagaagcagaaggtgaggggaaaggaaagggagggcagccagagcctagctaa

SEQ ID NO: 1445 - DNA, 399 bp, Zea mays
  Peptide Sequence Number=SeqID_43224
atgatccccgagtaccagaccgaggagtccatgtacaacgccgtgcgccgcttcggcaaggtgcgctacgacaccctgcgcctgccgcacaaggtcgtcgcgcgggaggccgacggctccgtcaagttcggccagggcgagggctccgcctacctcttcgacccggacatctacaccgacggcaggatctccgtgcagggcatcgacgccgtgctcttcgcgccggacgacgccaaggccacgcagaccgccgaccccaacaggaagcctcccgccatcgtcacccacaagaagaagatcaagctccggcgagtttccgtaggttttttaaacgatgtgtggcagatgctcaacctcagtattggccaacgtgaggccatcgtgaaaacatggaggtga

SEQ ID NO: 1446 - DNA, 555 bp, Zea mays
  Peptide Sequence Number=SeqID_43225
atgagctccggcgggacgccgcccgtggggctaacaccggcggacggcggcatgttcagcaccgaccgcatcggcggcttcggctacggcgtcggcgtgtccgtcggcatcctcctgctcgtcaccaccatcacgctcgcctcctacttctgcacccgagcgcccgccgacgccgcgggggaggccgctccgtcgtccgggcgccacggcggcgaaggggcgcacgacgatgtcgagctcggcatcgacgaggccacgctcaaagggtacccggaggtggtgtacggcgaggccaggaagctggccaaggccaccaagaagggcacctccacgtgcacgtgctgctccatctgcctcgacaactacggcaaaggcgacgtgctccggatgctgcccgactgcggccacctgttccaccgggagtgcgtcgacccctggctccgccaccacccgacgtgccccgtgtgccggacgtcgccggtgccgagccccatgccaacgccactcgccgaggtcacgccgctggcaatgtccaggatgtcgatgtcgtcatga

SEQ ID NO: 1447 - DNA, 141 bp, Zea mays
  Peptide Sequence Number=SeqID_43226
atgcatctgatccaacaaataagtataaagagaaagatgggcaagaggaagcacttggaagcgggcaccgtgatggtcgagttgcagaaacagtcgacgctcgctggtgtagttctcattcgcttggatgttaagaagtag

SEQ ID NO: 1448 - DNA, 303 bp, Zea mays
  Peptide Sequence Number=SeqID_43227
atggcggggaaaatgcagaagcaaaggatggctcatgaaatgaggatgtggaaatcatctcgcgtgatggacatgaggtctagacaacatgctgatgaaacacataacattactcggtttcatgaagatgaagcttatgtggaggataaaagctctgatgagggggaaaacttgcttggaagcaatcatgttagtgttacccctgcagtacatccatctcaaggcaaccctaccaatggtaccctagcaacacaaccctttagcaagccgaccaatgctaccccgtcagtgcagccatcttaa

SEQ ID NO: 1449 - DNA, 291 bp, Zea mays
  Peptide Sequence Number=SeqID_43228
atggatcaggacgccagcatcgcgtgctcgccgccggtgacccttccccgtgcaaggattcgcgtcgccgcgttaagattaacgctcaccggtaaccggataatgctgcggggtagaaagatcgtcgtcgccgtcgagctggaagccaccccggccttgatggattcaacatcgaaaaagatgtacctctgccaggtgaggaagcagcagagttctgttgcttctgtaccaaggtggttcctaatgaagataagcaagaatgaagtgcgggaggaaaggatcctccattaa

SEQ ID NO: 1450 - DNA, 264 bp, Zea mays
  Peptide Sequence Number=SeqID_43229
atggagctgggccggggaagtgaaatcagcccagtcctcggggtagtagcggcgtccacggggagggggtccgagggcttctatcagacgcctcaggcgatcaggcagttggaggttgcaacagccaagacgaggtggacggggaaagttctggtttacccggcggcggaatcggggggccacggtgtcagcggcatggacgcagtgcgcggacacgaagcaaagtgggtcgcgtgggtgacttcttcaggtgggccaaactga

SEQ ID NO: 1451 - DNA, 477 bp, Zea mays
  Peptide Sequence Number=SeqID_43230
atggaccggggcacggtgatggcggatggcctggtggacgcctctaccaccactagggatggcaatggggaattccccgtcgggattttagctcccatggacgtgtcccgagaagatccgcatcgagaagtggtgcccttgcccctgcccctgctcagcgaatcgttggcctcctctcctccacacacccacaccgccaacctcccattttcgtgtcaccccgctcacctcctccgccatcggcccaaactcaagaagctgccccgctcacctcctcctccactggcccgacctcaagaactggtggcgatgcagacgggggcacgccctaagaagatctgcatccagaagtggtacaacatctccaaggaccatatcaccctcaagggctacgagctccacgacgacatgggcctcgcgctctactacaactcagggtcgttcttgagttttgaggggctcaaggcgagattataa

SEQ ID NO: 1452 - DNA, 2802 bp, Zea mays
  Peptide Sequence Number=SeqID_43231
atgcgcgaggaggtgcggagctcggcggcggcggcccccgacccgccgcccgggaggtcggcctcgccaccgcccacacccgtcgccagttctgctggtgcctcgtcgccccctgcacaaactaatgtagctagcatagactggctagacagtgaccaagtgtccaaagcaggatcctctcatattgctccgccgacgtctcggcctgcgcttagtactaatgctaatggagctgccatggactgccttcaatcatcatgcagaccatgggaacgaggcgacctgcttcgtcggctggctacttttaagccttcgacttgggcttctaagccgaaggctgctagttcactggcttgtgctcgaagaggctgggtgaacattgacatggacaagattgagtgtgaatcatgtggtgcacatcttatatttattgcattgacatcctggtcccctgctgaagagctgaactatattgagttggttggacacttggacttgatattggctgaacttgtgcttattacgtctaattgtgtttatagtgcattctcaatccaggacatctgtgccactttatcattggatgttataagtgctggggaagcttttgctgagcagcttgatgcttcacaccagaataattgtccctggagaggaaatagctgtgctgatagcttggtccagttccacctgaccccgtcagctcttgttggtggttttaaagatcgctgtgatggattgttgcagttcacgtctcttcctgctattgccttatctgcaattgagagtatgaagctaactagaagcgttcaaattgatcgagtcttatcccagtcagtcacagttttgtctggggagctgggctacagaacagacagtacaactggaattgatatcgcccaacaagatgaaacctgctgttactctcaagcacagaagcttattagcgtttgtggatgggagcctagatggcttcctaatgttcaagattgggaagagaattcgacacgctctgccagaaatgcaggctcagctgaaccagatggccaattccattcccaatttcctgagcatcatcaaaattcaaactctgtgtcaattaagaaagacaaggggaaaggaaggaagcctgtgttggtccgcggtattagtgcgacaagtgggatcaatggactggtcactgaaggagcagagagagaaaatattgagggacgtgatgaggcaggtattgttgagggtaagtctctgtcaaatgctcaagtcgacttaaatctgacaatggcaggaggtttgccgtcaaacaattctgcattgcccccgatgcctggacatcttaactatggtggaatgggaagagatctaattattgggcaacccactggaagtgagcttggtggccgtgcagcctcaattgaatctcgggggcctagttcgagaaaacgtaacctggaggaaggtgggagcacagctgacaaaccaataagcaggcttcagcctgctgacagcattgagggaaccgtcattgaccgtgattgtgatgaagttgatgacgccgcacaagattctggtgctaggagcaaaaggtctcgttgttttaatctttttgatattaatcgcccatcttcttcaggagctggtcccagcagaaatttaagtttcgacctggatatagatgttaataggtttgatacatctaatgctgaggttccatccgcccttcgcaacccatttccaagggactctatgagggaatcttctgttattgcaatggatacagttcacggcatggaagaaaattcaatggagagtgtcgaataccatccatgtgatgttgatgatgttaataagccttctagtgcactcaggagtggtttaatgagtgacacgttggatccgaattatagcaaccaagcacagcaaagcagttttgtacagcctgctgctgaaactgaaagcaatgcaagagagataggagggagtagtatgaatggaggggaagaagtcctcaatgctgaaacaacccctgcatttgctagagatcaacttagcctgggagttagcggggggagtgtcgggatgggtgctagtcatgaagctgaaattcatgggattgatgtttctgggcataaaactggtagcgttgtcggagatgctgatccaattcctgagctcatcgagactatgggccacactggtgagtcagctcctggacctgcattgatggatgagtttgtccctgaagaagttggtcgagaaggtcctaatggtgatagccaagatatggcatctcggttagcggttcgagctgacagtggttctaaaatttgtggttcaactaaagctgattcagttgagagtggagagaagacgagccgtgagaatagcgcacatccttctctttcttgcaatgcaagagttttttctggcattgatgcatcaaaagacgaagtgactggtataatgctaactaacgatgactatgatccaggaagtggtctaggagcaacaaatggaggaaacgattatgaaacaggtcttccagacttcgatccaataaggcaccacaacgattactgtccttgggtgaatggaaatgttgctgctgcatgttgtattagtaccggttcgagcacagctctttcaggctggcagctcacggtagatgccatcgagactctgcagtctcttggccaggctcaaaatcagacgatgcagtcagactctgcggcttcattatataaggacgatcacgtcccgcctagccggaagctgctgaaaagtgcgaaccacagcaagagctga

SEQ ID NO: 1453 - DNA, 939 bp, Zea mays
  Peptide Sequence Number=SeqID_43232
acattccgcattcctcttggtgctgttggatattatatcgttgcaaagtttacacctgtggcacctgatggtgaagtcggtgaaccagcctatgctacatcagatggccttgtggaaacactaccacccagcctgaacttcttaacagtcactggtgaattctctgagggtcagatattaacagcatcatatgggtatatcggaggacatgaaggaaatagtttatacagctggcaccttcatgaggctgaagatgacgaaggcactccactttcagaggcaaccggtttgctacaatactgtgttacaaaggaagctgttggaaagtttgtttctttcaaatgcacccctgtcagagatgatgatattgttggtgaggcaagatcattcataggaaaggacagagttactccaggaaggcctaaaattgaaaagctggagattgaaggaagaggtttccacactgacctatatgccgttcagggtacctatagcggaggcaaagaaggcaagagtaaaatacaatggctcagatcgatggttggaagccctgatcttatctccatacctggcgaaactggaagaacgtatgaagctaatgttgatgatgtagggtataggcttgttgcaatttatacacctgtaagagaggatggagttgagggacaacctgtttctgtttcaacagaacagattgcagttgagcctgaactttacagggaagtgaaacagaagctcgatgatggttcagtcaaatttgaggtcgagctgtatcgcaatgaccagcaccgcttcaagattgttgtcgacggtgatactgaagttgacttaatggtgcaaacacggcacatgcgagaccgcatcatcctcacgatcagaggcctcgcccagaagttcaacagcacctccctcaacacacttctcaggatcgagtcatga

SEQ ID NO: 1454 - DNA, 1419 bp, Zea mays
  Peptide Sequence Number=SeqID_43233
atgcctctggatgatgccaaccttgatggggacgacctcaaggacgatgccttcgtcaccgatgcgtcacacatccgcgattcccttctttgtcatgaggctaggacaaatacttcattgtttgtgtttcctcgtggtcatggtattgcttacctcatgctctatgtggatgacatcgtgttgactgctttctccacgccaatctgtagtcacatctatggagcaattcaatattttcacagcctctttggtgctctaacagattcaacattttctttcctacttgagcaatggaataataagctgcctcaaggttacatggtgaataaagcttatgttgaccatccgtttgaagaggatccatgccattgccattttagattcacaaatcttggtggtgagggtgagctagtcctcaaataccaatggtttctgggtggcaaaacaccaacagattttgttgctatccctggtgcatcgagcgaggtgtactggccaaaacgtgaggatgttggaagatgtttgaaagttgaatgcactccaatagtaaatggtgcagaattttcgcccgtttttgctgtatctttacctgtttctccagttaaagtgctcagaaagttcatctgcagttgcgcaacattttttgttcttgttagggagttttttttacaaggtactggatgtccaaaggtcatcaatctggcagtcagtggtgaagtagtggaaggaaacatactcagtggagttcctgaaattgcctggtgtggtggaacacctgggaaaggcgttgcaagttggttaaggcggaggtggaacggcaatgctgtagtaattgatggagctgaggggatggaatatcagttgacagtcaatgatatcaattcaagtttggtatttatgtacacccctgttacagacgagggtgtcaagggagagccgcaatgtacaatgacagattttgtgaaggctgcaacaccatcagtcagcaatgtgcatgttctgggagatattgttgaagataacattatcgtagggaaaggaaaatacttcggtggcagagagggactaagtaaaatccggtggtttagagagaaggaaaatggtgaatttcttcttgtgctatcagacagcatggagtatacactaaccaaggaggacgtggggagacacctcaaatttgtatatatccctgttaaccttgaaggtcaggagggtgaatctgcttgtgcgataacagatgtagttaagaaaggtgtgattactttgttttaccttcttgtttggccagcccctccaaaagtattcaatctaaagattgttggggaatctatggaaggaagcaagatatctgccagtgctactgttacaggtggaactgaagggtccagcaggttcaatggtacaagcatcttcctctga

SEQ ID NO: 1455 - DNA, 979 bp, Zea mays
  Peptide Sequence Number=SeqID_43234
atacgggctccatcctcgccacgccgcacaagggccaagccgcacgcctcccggccccatcgctggcggctccgcctcccacgacgacgacatctcgccacacgcttcccaacccccctcactggcggccccggtgacacacggagagcgaaaaggatgggtctacggcgcaccgccggatcccccgggctccgcctaccttagtctccatcgtccccgttattatctcccattgaaccttgcagccggccagtcgctccgcctacttagaacatcggacgccccaccgcactatacaccgggtccatgcagccttcagatcgtccacctcctgctccgatcggggaggcggagcgtcgctgcggcgcctactgagagtctgagaccgacccccgacctagccgcggtaaataaatacccgacttcgccggcgtccgcgagcttcgagaatacatccttccccgcgttttaccctaacaacctaactagctgcggttctccactatcactcgctgctactgcacctacttcctttccgctctggtactgttgctggcttgctgctgctcttggtggtggtggtggtggcaccgaaaccctagcccttgccctcatgtcgcagcaggaggctgtggacccgccttcggcgacggacgagcggctgggaggtctaccgcggagcggctccaccagccgcctcaacgcgcaggcgccggagttcgtgccgcgcgctgccgcggttccccctccccctccgcagcagaaggtggtgcgtttgttcgcgccgcctccccacgcggcgttcttcgtcgcggcaccccggcccccaccgcccccgttcgagtactatgcggcggttgccaccggtgggggtggcaggttcggtccccccgccgccgctgcagagcaggaggccgaggctgagcagccgccgagggacgggagctttgatgaccccgtgcccaagatcagaaagcag

SEQ ID NO: 1456 - DNA, 213 bp, Zea mays
  Peptide Sequence Number=SeqID_43235
atgcagcagccctccatctccctcacacctgcgcccttcctcccctgcactgtgccgtcgctggagctctatcagcgcagttattctcgtctgtcgcgggtgctgttccgcgcagtggcgtgctgcttcgcgcgtcgttcacgtgttgtctgcgcgttgttcgtgcgtggtgggctcgtggtcgcgtgttggttcatgtcgttgctagtgtag

SEQ ID NO: 1457 - DNA, 1764 bp, Zea mays
  Peptide Sequence Number=SeqID_43236
atggctgttagatgctcctgtactgctcttttccctctattcttctgttttatgatctgtcagctttgctatggcactgtaactgatatccaatgtctgaagaagctgaaggcatcagttgatcccgacaataagttagaatggacattcaataacaatacagagggatccatatgcgggttcaatggtgtggagtgctggcatcctaatgagaacagggtcctttcgcttcatcttggtagctttggtcttaagggcgaattccctgatggacttgagaattgtagtagcatgacttcgctggatctctcaagcaacagcctctctggccctatcccggctgacatctcgaggagacttccatttgttacaaaccttgatctgtcatttaatagcttctcgggagagataccagaagcactagccaattgttcttatctcaacattgtcaatttacaacataacaaattgactggaacaatcccagttcagcttgctgcactcagtcgcctagcgcagtttaatgttgctgacaatcaattgtcagggcagattccttcatctttgagcaagtttccagcatctgattttgcaaatcaagacctttgtgggaggcctctaagcaatgattgcactgccaattcaagcagtcgaacggggataattgttggttctgctgttggtggtgcagttataactttaataatagctgctgttattttattcattgtcttgcggaaaatgcctaagaagaagaagttaaaggatgtatcattgtttgagaaatcagtttcaaagatgaacttgaatgatcttatgaaagcaacagacgattttacaaaggacaatattattggaactggtcgatcaggaactatgtacagagcaacacttccagatggttcattccttgctatcaagaggttgcaggacactcagcattcagaggaccaatttacatctgagatgtcaactctgggaagtgtaaggcaacgtaacttagtgccgcttttgggatactgcattgtcaagaatgagaggctcttggtgtataagtacatgccaaagggttcactttatgataatttacaccagcaaaacagtgacaaaaaggcattagaatggccattgaggctaaaaattgccattgggagtgctagaggtttggcgtggcttcatcacagttgcaaccctcgcattcttcataggaacattagttccaagtgcatattgcttgatgatgactatgagcctaagatttctgattttggcttggcaaggcttatgaatcccatcgacacccacctgagcacatttgtgaatggtgagtttggtgacttagggtatgtagctccggagtatacacgcactcttgtggccactccaaaaggggatgtgtatagctttggagttgtcttacttgaacttgttactcgtgaagagcccacacatgtgtcaaatgcgccagagaacttcaaagggagtttggtggattggataacgtacctgtcaaacaactctatacttcaggatgcagttgacaagtctttgattggaaaggacaacgatgctgagctgcttcagtgcatgaaggttgcatgctcttgtgtgctttcttctccaaaggaaaggcctacaatgtttgaagtttaccagcttctgagagctgttggagagaaatatcatttcagtgcagctgacgatgaattgacgatgctacctcaaaatgccaatcctgaagatgagcttattgtagcgaactag

SEQ ID NO: 1458 - DNA, 228 bp, Zea mays
  Peptide Sequence Number=SeqID_43237
atggtcactgggaaagtagcagtcgtcctcctagcctgctggacgctagttctctaccaaccagtgcttggccgtttaccgtgtaacaatgatcagaagagagagatcctgcgcgagtgtgatccactgaactcaacacctgactatactccatcccggcacggtcatggcctaaaagagtgtagctgccagcctgccatcgcttatggaatcatcgtccaaacatga

SEQ ID NO: 1459 - DNA, 772 bp, Zea mays
  Peptide Sequence Number=SeqID_43238
gcgtccactatcgcgcggtgcacgttctgccgctccgctcacgcccgcggcctcccgcagccgcgattccggccgcgcttaccttccatccccgccacgctcatcctccgcgcagccacagccgcgattcccgccaccccgccgcgctcaccttccagcccgcggcagagtgctcccccgcaccttccatcctccacgcctgactcctctgttcccagcgctggatcgctgcccgcggcctattccatcccgcaattaccgctcgcgcaagggtttccatcccgcggccgcatccagcgctgccggcggccgattccatcgcaccccgccccgactcctacccagatgccggccatggccagcggcggcgcgcggccggaggaggtgttgcccgcaccaacggtgtcggcgtctacgtcgagctgcatggggacgagggcggaggagctgacggcgaggctggcggccgcagggccctccccgggcgccggtgccggcggagaggaggtggagcacgagcgcgtccgcgcgctgcgcgagatcaagaaccagatcatcggaaaccggaccaagaagctgctctacctccgcctgggcgctgtgcccgcagtcgtgtcggcgttggcggatcccggagcctcgccggctgcgctcgtgcaggcggcggccgcggcggggatctttgcgtgcggcgtcgaagactgcgcgcgccgtgctggccgccggcgctgtggggcacctcactcggctcctcgctcaccccgacgagaag

SEQ ID NO: 1460 - DNA, 984 bp, Zea mays
  Peptide Sequence Number=SeqID_43239
atgttctgcctccgacaccctcccgtccgcgctccgtcaatcacgcagtctctgcccccgcaccactgttcgccgccaaatccggatctcctccccatcatcgacgcctcctcccccgcccgagacccgccaagctccctctacgcgtcggcctccgatgaaaccctagccgccgtattggaccacctcaagccccacaccgtcggcaccttcctccccccgcgtgagacgacgacgagcgaaatcctccggccacaccttgagcgacggcaactccccctctccgtcccaccttccagctccccctcccctcacgcacacgtccccaccacgctcgaattcttcggctcgcgcgaccgcgactgcgaccccttcacctccctcctcgaggccatcgttgcttggaatgccaccatcggttgcccccgcatccgcaccaagcttgccgccgcggggctggagccaggcctgccgctgccggcagcgagcaccaacggtaacggctctgcggaggaccctccgggagcgtctatcaccggcggcgccgtgtggcgcggggccacgaagtgcgaggacctggcggtgtgccacgtcagggtgctaatcaagggctggatctggatccctaacgcggtcgtcgatgtctacacctgccactgcggagtcagctgcgtcgggagcaagtttcctgccgtgagaggcagtttcctgcgtcgggagcaagtttcctgcgtcgggagcaacggtggatccgaggcaacttcctctgccgtgaaggatctccagtcgaagctagatgtggttactgcagaatgcttgactgaaaaggagatgttaaaggagatggtgctggctctactggacgaatcagatttggatattgcgagcgatgctgtcgagatgattgttgacagggacattactatggtattcccaagctttgtgatgcactcagaaatcagtgaaacagacatggttgtctaa

SEQ ID NO: 1461 - DNA, 384 bp, Zea mays
  Peptide Sequence Number=SeqID_43240
atgggcctgtattgttgcctggcccattctcgtgactgcttcctcgactcgaaaatcctccgaacagaacgcaggcaggcggcggcggagacaggatcagcctcaaaacacgattctcatgtctactgcagtgctctaggaacttggttcttctcagttgcgggtgctcttgttgctattcctgtgggcataaagaagaaatccttagccccactcgtcttcttcggcactactggaaccatgctggacattatcatgggcattacccagtgtgagcgagagcatgctgagcgggaaatgaagattttggaagcccagaaattttcggtcgatgcttcagctcagaacgaaagctctgattcctttggcagtgctgacaagtga

SEQ ID NO: 1462 - DNA, 1332 bp, Zea mays
  Peptide Sequence Number=SeqID_43241
atgctcggcgcggcgctccgcctccgcgtccgcgtgctccgccgccgccgctcccaccgcgggcgccgtcgaggcaggcggtctctcggtcgggtcggggatgacgacgacgacgagggaggccgggagccggtgctgctagtgtccgggatgggcggctccgtgctgcacgcgcgccgccggtccaactccaagttcgacctccgggtctgggtgcgcatcctcttcgccaacctcgacttcaagaagtacctctggtcgctctacaacgccgataccgggtatgtggagccgctggacgacgatgtggagattgtcgtgccggaggacgaccacggcctgtttgccatcgacattcttgatccttcctggtttgtagaacttctccatctgtctatggtgtatcacttccatggtatgattgatatgctcataaactgtggatatgagaaagggaccacactatttggatatggttatgattttcgccaaagcaacaggatagacaaagcgatggctggtttgagagcaaaacttgagacagcttataagacctctggagggaaaaaagttaatttaatctcacattctatgggtggattgctagtacgctgcttcatgtctatgaatcatgatgtattcactaagtatgtcaacaaatggatttgcattgcttgtccattccaaggtgcccccggatgcatcaatgattctctacttactggattgcaatttgtttatggttttgagagcttctttttcgtatctagatgggcaatgcaccaattgcttgtcgaatgcccatcaatctatgaaatgttaccgaatccagaattcaagtggaaggaaaaaccaattattcaggtttggcgtaagaaccctgaaaaggatggaactgtggagcttgttcaatatgaagcaactgattgtgtgtccttgttcgaagaagctttaaggaataatgagctcacgtataacggaaagaaagtagcactaccattcaatatgtcagtcttcaaatgggccaccaagactcgccaaatcctagacaatgctgaattaccagatactgtgagcttttacaatatatacgggacatcttatgaaactccatacgatgtatggcttataggttgtcaatgtataaagttcaaggctgatgggttctctgcgaaagaaagagttggcgtcaaggccgaccaccgtggcctgctgtccgatgagaacgtattcaagcttctcaagaaatggctcggtgtgagcgagaagaagtcagagtggcgttgcgtgtctaaatcctactccaaagtgggtaattgggttgccctgtag

SEQ ID NO: 1463 - DNA, 1374 bp, Zea mays
  Peptide Sequence Number=SeqID_43242
atggtggtgaccgctccctatgatgcccatgacagggtgctcgtcggagtcgtggtggcagtatccatgcctcgaggagaggtcgacatggagggagaagggatagaggaactcgaagtcgtggcgacaatatccagcagctccgggagagaactcggtagggaagggacaaactggcaacgagaggacatggcctcgttggttatcagagatcaaagatgcttccttgtccggcggaagcggatgacctcgatgtctcccccaagcgctgcgggcgacgactctgaccaggtcctttttctatacattttggtagaagtgaatggctttacaaggacactgattttgaataggccaaagcagttaaatgcactctcctcgaccatgattatgggactcttgaggtgtttcactgcttatgagaaagacgatggagttaaattgttgattatgaagggtaaaggaagagcattttgtgctggaggtgatgttgctgcagttgttcgatctatacataaagacagctggaaatatggtgctgatttcttccgaaatgaatttttgttgaattacataattgcaacttataccaaacctcaggtttctcttcttagtggaatcgtcatgggtggaggtgctggcgtttctttacatggaaggtttagagttgccactgataacacggtttttgcaatgccagaaacagctctgggtctctttccagatataggggcctcatattttctgtctcggcttcctggattctatggagagtatgttggtcttgctggtgccagattggatggtggggaaatgcttgcatgtggtctggcaactcattttgtccagtcaaatgtaggttgtgtatgtgctagtctaataactcctagtaaatactctgttcctcagagtctgctatcgctggaagaatcacttaaaaaggtggatacttccaatgcttttgcagtgtgtggtatcatcgatcaatttgctcaacaaccatcactgaaagaaagcagctctttgaataggttggaaatcatcaacaaatgcttttccaaaaggacagtcgaagaaattatatccgctcttataagagaagggaggacacaaactgttggggagtgcttgcagcgggaatatagaatggtctgccatgtcatgcgtggtgacttcagcagagacttctttgagggatgcagggctatattgctggataaagaccgaaacccaaagtggatgcctccaaggttggaacaagtgcatgacgaggctgttgaacagtatttctccagaattgatgatccacagtgggaagacttgaacctacctgctagacgctcccacggaagaaatatcgagtccaagctttga

SEQ ID NO: 1464 - DNA, 909 bp, Zea mays
  Peptide Sequence Number=SeqID_43243
atggctgagcaaattgcaagtgaccctgtgttcaaccagatggctgaacagcttcagaaaagtgctcagggtgctggagaacagggtattcctgcattggatcctcaacagtatatggaaacaatgcaacaagtcatgcaaaaccctcagtttgtgtcaatggcagagcgtcttgggaatgcccttatgcaggatcctgctatgtccagtatgcttgagaacttgaccagtccagctcataaggagcagcttgaggagaggatggcccgtatcaaggaagatccatccttgaagccaattcttgatgagatagagaatgggggtccatctgcaatggtgaagtattggaatgaccctgaggttcttcaaaagattggccaggcaatgggtgttaaccttcccggagattctagtgtgtccactgtgctctctggacctgaagagactgaggaggaaggaggggatgacgatgagtccattgttcatcacactgcaagtgttggtgatgaagagatgccctttaaatgcttgtactccttttttaaggctgcatttacaattccggtaacacaacagggtttgaagaaagctttagaaggtggagcagacaaggatgaagaagatgccgagggaagacgggctttacattttgcatgtggctatggtgagttgaagtgtgcagaaattctccttgaggcgggggccgcagttgatgccctagataagaacaagaacactccgttgcactatgctgctgggtatggtcggaaggaatgtgtggatcttctgttgaagtatggtgctgctgtcacgctccagaatctggacgggaaaacccccatcgaggttgccaaactcaacagtcaagatgaggttctcaagttgctagagaaggacgctttcctatag

SEQ ID NO: 1465 - DNA, 339 bp, Zea mays
  Peptide Sequence Number=SeqID_43244
atggcgggggcagggggagcgcgaaagctgttgcatgccaggggagcgcgaaagctagttgagcggcgttggcggcgtgggcgtgggctgcagggagaggggaacgtcaggcggggggcgctcggccgggggcacgacctcgcaggcgggggcgcgggcgagaagaaactggcagaggttgcggatgggagggtgagggtgggcggaggtgtggtgaagacggagataattattcatgggcacgcatggctcgtgctacaacgtcaaataagttggactgtattagatcaggctttgttcaccccaagacgggcctccatgagcctcagatttacataa

SEQ ID NO: 1466 - DNA, 678 bp, Zea mays
  Peptide Sequence Number=SeqID_43245
atggagatgtggctgtgggatagtgattggggaatggaggaatgggatggacttggggccagcaggtggctcttcaaagagtttcatctgagcctgagtgagcctgcaagacaatgcggcagctctgcaaacgttgagactggatttgaactcagtgaatacagaactaggaagccaactgatgaagatgtctgcaaaactgcgacattgtgggaacatgcagaaccttggtgtcaccttcagcacagttgtccattccccacattcctggaagtccgaaacgacctgctgctggaggaactgaaccagacgaatcagtcaatcacaccctcccaccacctggtggtggctgccagtgccagcacaccacgtgctccctcctacacccccgtcagaagcagtcgcctccaccatcctcgagaccaactggttctggaggtgttcctcccaataatcggcaaggcaaatgtggcggcaaacagagtgggcaacccactactgcacccactggtgacaccccgacaggcggtgcaccctggccctcctacctccacccatgggctggctccatataaatgcatgggccctgtcctcttgcgtccatccccaccggtccgccccaacaggcttctgcacaggcacacttccagtagtcaacttctccgcacacccttctag

SEQ ID NO: 1467 - DNA, 1872 bp, Zea mays
  Peptide Sequence Number=SeqID_43246
atgccgccctggtcattaagtcagccttccagtttggaagctggtcagcgattttttcaacaaagggctgaaaatgatgcttgctcagcttgtgtaaggacagtgggagacccagatatctacaaggaaaataagcgacttcgcatggcagcaaggattgaacctccaggcaaaaacatctcgatcattaccccgagcctattttctgtaatcccaaagaagatagctaaaagtagaacggtctatgaggccttgtcaaacaacagatggatttatgatattcgaggtggtctaactgtgggagttctggcagattattttaagctctgggactgtctctctggtttggaactgcaccccctcattgaagacagacacatctttagcatagccccagatggacaatattcagcgaaggcagcttacaagggtctcttcctgggatcatgtgcatttggacactacaagagggtttggaaatcttgggctccatcaaaatgccgtttcttcctctggctggtggcccaaaacaggtgctggactgctgacagattagcaaaaagggggctcaatcatcctagcagttgcccattgtgtgatcaggaacctgaaactattaatcacctgctggtctcatgtgtgtttgcaaggcttttctgggttcatagtatgatcgagaagttagcccaattcactgatatcagatgttgtctcatcgttggtggtctttcaactaaggttttcttgcttgcattgagttctattaagtttttgatgttttcatatggttttagccctatagcctttgatattcttgtgcagaacacaacgttttatgttcaagaagttgctctaagatcaatgcctgacatcgttgtagcaacccctgggcgtataatagaccatttacgcaactctctttctgttgggcttgaagatctagctgttgtgatccttgatgaggctgatcgcttgctagaattgggtttcagtgctgaaattcaagaactgattcgtatgtgtcctaaaaggaggcagactatgcttttctctgctacaatgacagaagaaattgatgaacttataaaactttcactaaacaaacctgtacgtcttgaagctgatccttctctgaagcggcctgcaacgttgactgaagaggttgttaggatacgacgagcacgtgagtcaaatcaagaagcggttcttcttgcgctctgtttgaagactttcaagcgaagtgttatcatttttagtggcacaaagcaatccgcacacaggttaaaaataatatttggtctctctggcatgaaagcagctgaacttcatggcaaccttacacaggcccagcggcttgaggctctggaacttttcaggaaacaagaagtagattttctgattgcaactgatgtcgctgctcgtgggattgatattgttggtgttcagactgtaataaattttgcatgcccaagagatgtgaaaacttatcttcatcgtgttggccgcacagcacgggcaggaagagaaggctatgccgtaacatttgtaaccgatgatgatagatccctcttgaaagcaattgcaaagaaggctggttcacaactgaaaagccgcattgttgcagagaaacctgtggctgagtgtgcacaactgattgagcaactagaagatcagatttccatcatcattcgagaagaaaaggtggaaagagaagcgagaaaagctgaaatggaaattgcaaaggcagaaaatatgatagctcataaggatgagatatactcacggccaaagagaacctggtttgctactgaaagggaaaagaagcttttggtagcagctgctaaattgcaaaatcacctatcttgtgcttga

SEQ ID NO: 1468 - DNA, 387 bp, Zea mays
  Peptide Sequence Number=SeqID_43247
atggcacatttccctttcaccagctcagagggaccctgcaacggcagatcttttcagtaccaggattcaggaatccttctaccgagcacagttgtcagcgcagatcgccctggcaccctcgaggcctcacgcctccagtatggatcatatcatccagcccctgcagacccagtcccagtgccagacattcaggctgaggatgaggcattcagacagttcgagacccagggcacagctgtcgctgatgatgatgatgatgatgatgactttgggatcccgccactgcctcctatgactcctcgctcacatgatcacgaggcagggagttccagtgctgcccctgctgctcctcctgccattgatcctgctctggctacaatactctag

SEQ ID NO: 1469 - DNA, 270 bp, Zea mays
  Peptide Sequence Number=SeqID_43248
atgggcggggcagctcggggtcaggaggaggaagggtgctccggccgccgtggctctctaggaatcatcatccgccacgcgagcccgggcggcaggatagtggcgggaagggaaacagctacctatagctggctagcgcgtgccgagtcgtcgcggcacgggccgcggccggcggagcccgcgcggggttccagatgcagagggcaggctgattgttcacaccgcccgcgcgcaccaaatatcccgcctgcttcgtcgctagaggcctaa

SEQ ID NO: 1470 - DNA, 1326 bp, Zea mays
  Peptide Sequence Number=SeqID_43249
atggagactccgcaagtcgagatgggcggtttcaaggtcaacagcccgcaagtgcccaacggtggcttgcggcccaccgtgtcttcgtcctggaactcgcaagggacggtcgagagggcgctcaggagcatcaggatcgtcatttttacttccaagctcaacttgctcatgccgttcggacctgcctccatcattctccacttcacgactaggagacatggattggtttttcttttcagcatgctaggaattatgcctttagctgagcgattgggatatgcaactgagcagcttgcagtatacactggtccaacagttggtggccttctgaatgctacatttggaaatgcaactgaaatgatcattgcaatatatgctttgaaaaatggaatgatccgagtagtgcagcagtcactattgggttccattttgtcaaatatgctgttggttatgggctgtgctttctttgctggtggtattgttcatcgcaacaaagaccaagtcttcagtaaggcaactgcagctgtcaactcaggtttactgttgatggctgtcatgggattgatgtttcctgccgttctccatttcactcattcagaagtgcggcaaggagcatcagaggttgctctttcaagattcagtagctgtattatgcttgtggcgtatgcaagctacctctatttccaattaagtggacggagcaacatttacagtccaataggcagtgaagaggcgcctagcgaggataacccggaagaagatgaagaagctgagattggcatgtgggaggcagtaacatggcttgcggtgttaacattctgggtgtcttttctttctgagtacctagttaacgccattgagggagcatctgattcattgaacctaccggtggcttttatcagtgttattttgcttcctattgtgggcaatgcagctgaacatgcaagcgcaataatgtttgccatgaaagataagcttgacataacacttggtgttgcaattggttcatcaacacagatatcaatgtttgtgattccattttgtgttgttattggttggacgatgggacaaaagatggacttgaattttcagctatttgagacagcaactctcttcataacagtacttgtggtggcatttatgttacagagatctgttttgtatggatctgagctgcatttgatatctgaccccatttgcaatgcacttgtttcatcacaggatggcactgcgaactacttgaaaggacttatgctgatcctatgttatctaatagttgctgccagtttctttgttcacgttgatccacaatcaagtgaaggctga

SEQ ID NO: 1471 - DNA, 510 bp, Zea mays
  Peptide Sequence Number=SeqID_43250
atgagcagcggcggcgcgagcttcgagcagcacgcgaataagcggcggcggccgcccgctgggccgcagcgcctgacgctgtcggtgcaggacgccgacgacgcggccgcggccgtggtcccgcccgtcaccgtggtcctggacgggcgctgcatctgccaccgcgtccacctcaaccgccacacggggtaccgcagcctggcgggcacgctccgccgcatgttcgtcgactccgacgacgacgactccgacgtccacaaccaccaccaccagcagcagcagcagcagcgcggcgaggacgacctcgacctcgacctcgccaatgccgtcccgggccacgtcgtcgcgtacgaggacatggaggacgacctcctcctcgccggcgatctcaagtggaacgattttgttcgcgtcgccaaaaggatccggatcatccctgccaagaagacgacgtcgtcgtcaagccgcgccaagaaatgcggaggaggagatgtcaaccacagcaactag

SEQ ID NO: 1472 - DNA, 1449 bp, Zea mays
  Peptide Sequence Number=SeqID_43251
atggaagcctattgcgatgaggttcggcgcctggaagacaagttctacgggctcgagctcaaccacatcgcccgacgctacaacgagactgcggacgagctggctaaaatagcctcggggcgaacaacgcccgaggtaccctcggcccccgagggtgaggcactgcgcgtcgaggaggagcgaagcggggtcacgcctaatcgaaactggcagaccccgtacctgcaatatctccaccgaggagagctacccctcgaccgagccgaagctcggcggttggcgcggcgcgccaagtcgtttgtcctggtgggggacgggaaggagctctaccaccgcagcccctcaggcatcctccagcgatgcatttccatcgccgaaggccaggagctcctacgagagatacactcgggggcttgcggccatcacgcagcacctcgagccctcgtcggaaacgccttccgacaaggtttctactggccgacggcggtggccgacgccactagaattgtccgcacctgcgaagggtgtcagttctacgcgaggcagacccacctgcccgctcaggctctgcagacgatacccatcacctggcctttcgctgtgtggggtctggacctcgtcggccccttgcagaaggcacccgggggctacacgcacctgttggtcgccatcgacaaattctccaagtggatcgaggtccggcccctaaacagcatcaggtccgaacaggcggtggcgttcttcaccaacatcatccatcgctttggggtcccgaactccatcatcaccgacaacggcacccagttcaccgacagaaagttcctggacttctgcgaggatcaccacatccgggtggactgggcagccgtggctcaccccatgacgaatgggcaagtagagcgtgccaacgacatgattctacaagggctcaagcctcggatctacaacgacctcaacaagttcggcaagcgatggatgaaggaactcccctcggtggtctggagcctgaggacaacgccgagccgagccacgggcttcacgccgttctttctagtctatggggccgaggccatcttgcccacagacttagaatacggttccccgaggacgagggcctacgccgaccaaagcaaccaagctagtcgagaagactcgctggaccagctggaagaggctcgggacatggccttactacactcggcgcggtaccagcagtccctgcgacgctaccacgcccgaggggtccggtcccgagacctccaggtgggcgacctggtgcttcggctgcgacaggacgcccgagggcggcacaagctcacgcctccctgggaagggccgttcgtcatcaccaaagttctgaagcccggaacgtacaaactggccaacagtcaaggcgaggtctacaacaacgcctggaacatccaacagctacgtcgcttctacccttaa

SEQ ID NO: 1473 - DNA, 569 bp, Zea mays
  Peptide Sequence Number=SeqID_43252
aatccataccaaatgacgcagctcccccaacccagagcaaaatgaatgggtcgaccaagaaatcattagtcaacggtgttttggatcaaccaaatgccaactcagggctagaatcttcgggaaatgattatcctagctacactaactcgagcagtgctatgccacccgcgagtaccgagttaattgggtctgcagctgctgttatagatgttgattctgctgagaatggcccagaagagggtgttgcgaagcgcaacaagaggaagagcgacgtaggggcattgctgcgctacattgttttggaaggagacagtttgttggttgtattgtattgcagcgcacagctagcaagtgttgttgtagccatcaggatgaaccggaagtctcgcagatttgcgatggaacggaaagaggctaacgctgggataccaaaggaggtaaacgacaaggcccagaacatcatgcaccaaatcaagagcccttatcccgaaagatcctttggtccccttccagctctgtacacgcccaatccgaatcccaccccaggaacaggaaatgtgcctgcttag

SEQ ID NO: 1474 - DNA, 1854 bp, Zea mays
  Peptide Sequence Number=SeqID_43253
atggaattgaaaaatgactgctctactctacaaaatggcaatactttccgtggatatctgaacgagttacaaaagtactacagaggaagatccagatcttaccgtttgtatgaacgacaaatcactgttgtacaggagttcaaggaaccatacccgacacctgctagcactgagacgcttagtatagcatatatggagctcatgaatatgcatgcctatccgcaaatccagggtggggccaagttcacccttcaacttagattaaaaacagacgacgatatagctaatattaccataaccacagccattaggcttacatatgcggacggcgctgttatgctcgaagcaaaagctatctattatgatttgtatcaggtcgacatacttaatcgattaacaatatcttcactggccctctccatctttaggcgtaaatacataaacgatagtgaaaagaataggatctacatcctaaacgacaatgaagaacaattcattaggagtggatactacggcggtcatacagatgtatatctacctacgggggaacatttgaagtattacgatgtgaattctctatacccctattctatgttatcagagatgccagcgggcaagcctagatggaaaaataatcttgggttaaagaaaaccaagattgagctgaaggatatgtttggtttcattaaagcgttcataatatgccctgctgacatgcacaagccatttctaccttataaacagagtgacggtacgctcatatttccaactggtaggtttataggtgtctatttttctgaggagctaaagtatgctgtaagtatcggttacaaggtctacccaatctgcggctatctgtttgacagaatggaatcaccattcaaggattttgtgaatgatatctaccgaagaaggcttgaagcaaaggctagaggggagaaagctttagattttattcacaagaccactatgaatagtctctacggcaggtttggtattaaccctgaaagcactaccaccttaattcttaataaagaagaagcactcaaattccctatggagcatgaaggatttatgcatagtgaagaactatgtgctgataggttcctcataacctacaaaaataaaagaagtgctgaattacagcgaaaacgcgaaaaacccccggctaatgcagcagtgcaaatctcagcagccgtcacagcctatgcgaggatacatatgtatccatatatagcaagggaggattgctactatactgatacggattctattgttgttaagcaccctcttcccgctgatgaagtatctgcgaccaaattaggtgctttcaagctagaacacgatgttactaaaggggtcttcctagctcccaagtcctacatgttacagacggtaagagatgagcagatcgtgaagcataaaggtgctggaaaaataatggctaatgagaagtggttcataaaccagctagatgaccctcatctcaagcatactttcgaatacgaactaaagttcagtaggaactggcataagctgctggtggaaaagaaaacagcgcgtatcactatgggtatagaaagtaagaagcgagacttcgtttttgaccggtatggtaaatgggttggaactaaacctattcatgtaggagatggggatgttaatagtttgaatcccacatcctataagctaattaagagcttgctggagcagaatgaggatctccgagtagaactcgctaaatctgaacagatgaaatctggtacacagaatatcaaagattctagtaagaagaaagcttctaagaagaagtctgacaaccctgataagaaagctgaaaaaatagatagataa

SEQ ID NO: 1475 - DNA, 204 bp, Zea mays
  Peptide Sequence Number=SeqID_43254
atgacagatagggtttttggaaagcgggtaaggaggcagcaaggaaagatagcagttaaggaatatcggatcgggttgctcggggaacaggatcttaatgatcaaagaagtgattcaaagaaaagtgtcggtaatgtaatggtactccgcgccatggctctggtacttaggaatgattgggttgtcccttcactcagaagatag

SEQ ID NO: 1476 - DNA, 363 bp, Zea mays
  Peptide Sequence Number=SeqID_43255
atggcatataataaggtatgttgtgtgaatgacatcgttgacaagtacagtacacattctaagaatctggggaaatcacatcagcagccttctattgatttgaatgtagagcagagcaaatacagcggcttgaacgagcaacttgctgaagaaactaatggacttagacagatgagaggtgaagaccttgagggattgagtgtagaggaattgcaccgaatggaaaggaaacttgaagcaggactgcatagagtgattagtacaaaggaccagctattcatgcaacaaatcggcgaattactgcaaaagattatcccatatgttccaagcgtgacctcagttggacgagctgatcatttctag

SEQ ID NO: 1477 - DNA, 1845 bp, Zea mays
  Peptide Sequence Number=SeqID_43256
atggcaaccactacccctgctgtcacggaaccggacaatgctgacgcatctcctccatctccgacgtctccaccgtccaagaaggtcatgtacgagctcgccgcccggaacatctactacgccaagcctactgcagcgccgaggtcgctcgcgcagcttttgaagccgtgcggcgcggccccgacgccgccggactacatcctccgcgatgtgtccctcacggctcgggccggggagatcctggccgtcgtcggcccgagcggcgcagggaagtccacgctgctcgacatcctcgccgcgcgcacagcgccgacgcacgggaggctcctgctcaactccgcgccgctgcggccgtcgtcattccgcaggctctcgtcgcacgtgccccaggcagatgtcgcgctcaccctactcaccgtctccgagaccttcgcgttcgcagcgtcgctgctgcacccggagtcggagtccgctgtctcggccgcggtcaccgcgctcctcgtggacctcaggcttgcccacgtcgcgcacacgcgggtctcccccgcgcggctgtccggcggcgagcggcggcgcgtgtccatcggcctcgccctcctgcgcaacccggcggtgctcctcctcgacgagccgacgtccggcctagactcctcctcggcgcacgtggtcgtcagttgcctccgcgccgtcgcggccgcccggggcacaacggtggtgttttccatccaccagccaagcgcgcgcctcctctccgctgtggactgcctgctcctcctctcccgtggcaccgtcctccaccacggctccctcgcatccctcgacgctgccctcctctcacacggcctggtcgtccccgcgcagctcaacccactcgagttcgcccttgaggtcctcgaccagctccctcatcccaccccctctacccctgaacccaaggcgacgacgcaagaactgaactcgtcgtcgagccaccacaagatggtggccacggcgacgccgtctactggtccgccgtcatcgtggctgcacgagttaatggtactgtacaagagggcgtggaaggtggtgtacaggagcaagcagctgcttctgaccaacttcctagaggccgtggtcgttggcacgctgctgggcacgatctacatccacgctggctacggcgaggccggcgcgcacaagcggctgggtctgttcgccttcacgctgaccttcctgctgacttcgacgaccgagacgctgcccgaccggcccatcgttctggcggagacggcggccggactgtaccggctgtcgtctcacgcggcggcgggcacgctggtgttcctgccgtaccttcttgctgtggcgctgctctactccgtgtgcgtctacttccttgtggggctctgctcgtcagccggcgccttcgcgtcgttcgtgctggtggtgtgggcggtggtgctgacggcgaactcgttcgtgctgttcgtgagctcgttcgcgccggactacatcgcgggcatgtccctcgtatccgtgtcgctggccgggttcttcctcttctccggctacttcctgtcgcgggggagcatgccgtcgtactgggtgttcatgcactacgtgtcgccctacaagtacgcgctggacgcgctgctggcgaacgagtacacgtgcgcggggaaccggtgcttcggtgtgggcggcggcagcgagtgctcgcagacggggctcgacgtgctggtggagaaggggctgacggcggaggagcggtggaccggcgtccaggttctgttcggcttcttccttctctaccgggtgctctactgggtggtgctcagccggcgagcgtccagggcgaagagatga

SEQ ID NO: 1478 - DNA, 189 bp, Zea mays
  Peptide Sequence Number=SeqID_43257
atggagaggccgagagcggagaccggagatggacgagaggcgaaacggcggtcacagtcgcagcggagaggagaggagcggctaagcggcgggtcggtttcgaagcccaccaaatatcagaccgtgctcgggctagcccaacgggtcgagatggctgtcgagcccagcacgctcgtcgggccaggctga

SEQ ID NO: 1479 - DNA, 243 bp, Zea mays
  Peptide Sequence Number=SeqID_43258
ccagagttcatcccatcgccttcgaaagtggaggaatactggaatgtcgacaacgttgatgtcataccgaggtaccgcaccatcaacaacatcctcagagcgacatcatcgcctggcttcgcttcaggacaacaggcgttgcagcccttccgtaagaagatttcatgggtttcagaatgcaataagctttgggaaggagcacaacaggcaagccctattcgcttcaggcagaggttctcctag

SEQ ID NO: 1480 - DNA, 294 bp, Zea mays
  Peptide Sequence Number=SeqID_43259
atgacattgtatgaggactggcatgggcacaagccgggtgtccacttcctgcgcacttccgagtgtgtggtatgtgtcaagatgacaaagtcgcacctgaagaagctcgatgaccacgtcttagagctggaaggacgaggacagagacatgagtccgacacacacctcgtcgtggagtaccactcaatggagatagacatcaagcgtgtcgacgccgacaccattgcacgcttattagagctcccgatgacgccaacctctgcaacgagtctgacgtttctgaaagtcgcctag

SEQ ID NO: 1481 - DNA, 396 bp, Zea mays
  Peptide Sequence Number=SeqID_43260
atggatggccagccaggtgctgctgcgttgtcgagtcctggtccgagagtaaaagcaagcctggttctgggatccgaatcgttcgctatcaactccgagttcggtaccctgtcggagcagctggccgcggtgaaggagaagagcatggcggtcctcaaggaacacatcgccaggcacaatgctccgaacgaggtccccgacgaggccgccgagggcgagtctgacataactcagccggcaggaaactactgttctgtggctctcaggctgaatggtgatggtgaggtgatcaagttcccaggacaatctcaggcgatgagcaagttcaatgcagctccggagctgctcgtctctgacggagacctgacaagccttggggcagtggtagaccggtag

SEQ ID NO: 1482 - DNA, 989 bp, Zea mays
  Peptide Sequence Number=SeqID_43261
cgctgctccctccaccacacacctgttccggcgccgcggaaacgagggacccgggccgcgcgtggtgcaccgcacaggaagtgacggccagccgtctgcggtcgccgtcgccgtcgccgctgggccgaggagggagttggcaagccgcaaccgcaatgatggcagctgccgggtccaatggcgaaagcaacaggtgccgaagcaggcagtcatcaggcacactggtggagatgagtcagcagagtgagagaatctccgtctccatctccatcctcccgcggataagatcagttcagaggtggacgcgtaagcaccaccacagcccacaggcccctcgtcgccaccgccctataaatcccacggcgcacatcggagtccggcaccgtagcccccgaagacacactccaagaaaccaagaacaccggccacacgcacgcgcacgcacggcaggcgaggccgaggacgaacagacgataaaggaagcaatggctccgtcgctcgcgtcgacggcggggctcccgagctgcggggcgcggcgcggcggccggtgcgtggcccgccgcgcgtccgcggttgcgactccggcgacggcgacggcgaggacgcactacgaggtgctcggggtcggggccggcgcgagccggtgcgagatcaaggcggcgtaccggcgcctggcgagggaggtgcacccggactgcggcggccgcggcgacgaggggttcatccgcctgcacgccgcgtacgccacgctcgcggaccccgacgagcgcgcgcgctacgaccgcgccgcggcggtccggagccggatcagggcggcgccgtcggggtccggggcggggttccggccgcgaaggtgggagacggaccagtgctgggccagttgcgaccatggggcccatattgaagacagcccacatgaaaaacggaccgcgatcctggcagcccacatgagttgggatcgtggactttatgggctgcaggcttcgtag

SEQ ID NO: 1483 - DNA, 810 bp, Zea mays
  Peptide Sequence Number=SeqID_43262
atgggagcacctctccttctcctccctcttctctgctgctgctgcttcgcattactcctccaagtccaaggagcagacgccgcgacattgactatcaccaacagctgcggctacacggtgtggccgggcctcctctccaacgccggcgcgccggcgccgtcgaccacgggcttcgcgctggccccggggcggtcggccgcggtgaccgtagcggcggcgtggtcgggccgcgtctgggcgcgcacgctctgcgccacgtcgcctgccgcctcgggcgccaccttcgcgtgcgccaccgccgactgcggctcgggcgccgtcgagtgcgccggccgcggggccacgccgccggccacgctggccgagctcacgctagccggcgccggcgacgacgacgacgacttctacgacgtcagcctcgtggacggcttcaacgtgccgatgctcgtcgcgccgcgggcgggcgccgccaacgggagcgggtgccgccccgcggcgtgcgccgccgacctcaacgcggcgtgccccgcggagctgcgcgtcgccgcgggggcgggggcgggggccggggcgccgggcgtggtggcgtgcaggagcgcgtgcgaggcgttcgcggcggcccagtactgctgcagcggcgcgtacgggtccccggcgacgtgcgcgcccacgccatactcccgcttcttcaaggccgcgtgcccgtccgcctacagctacgcgtacgacgacgccacgtccaccttcacctgcgccgccgcaggccgcggcggctacgacgtcgtcttctgccccagggcgtccaggtaa

SEQ ID NO: 1484 - DNA, 330 bp, Zea mays
  Peptide Sequence Number=SeqID_43263
atggcacccgaggtcggacttggcggctgtcagcctcaccctggcgggtggcacagcagtcggagcagtgcaggcggtgatgttttcctgtcaggatcacctattcacccccctctaggtgctctcattaatccgcaagttaccaaggcaaagaccgttgactcactgctcaacacatgggtaattttcatcatgaaccttgttgtttccactgtaacactaggtgaagagatgggcgaaagagacatgacaacattgttcgcctactcccctgtgcaagacgaggggttagcctacaccgctgccttcgatcgcacgctgacaagataa

SEQ ID NO: 1485 - DNA, 987 bp, Zea mays
  Peptide Sequence Number=SeqID_43264
atggagcccaaccttcaatccgcactggaggaacaaacgaagattcttcgcgcgctcagtgcccgcctcgctgtccaagaagcgtggtggcgcagttgggagtcgaaagtggcgcaccattcggtgtcgatccacgaccttgaggtagcagtggccactgtgccatccgcgacgttgaggtcggagcgagacgctcaggtcgccgcgacccgcgagtgtctggccgtggtcgctgacgactggggtggcctcttcggcacaggcgacggctgtatcgtcgccgataactggggtgggctgttcgagtatcctgctcacttccaggaggaacaggacatcgacaactgcatccccatcaatgatggcacccgcttcaccgaggaagacgacgacaaccaccccgccacgctcgaaccactgctcaccgacaccaccaccgccgccgaggtcgattccatcgccaacaccgacgatgtcgaggctgactctctcgcctccgcctccacggtgggggtcgccacatcccaggccgccgagatgcagctccacgtcgggtgggcgcgctggctggagggacaggccgactacctaagacacgatcggatgctccactccaatctagattccctcacttcgagcaaccacccgctgctccaggatgcctcagccaccaacaactcgcccacccagtactcgacagaatgcttcagccatgacatcgtcttgttgaggactatcagtgctgcgcccacaagcgaggaccgcgcgctgcagcagaggcgcctcgagtgcctcgtcgcgtggcccgagtggcggaggattggcggacggaactacatcatgctcgagcatcaccccaacaggatgttcgacgcgtgcgataggttctggcactgcgtcttcgcgctctgtgacttcggctctgtgcagggcctgcagaggaagctggagcggctctgcctggcggggagcgcacctgacctggaa

SEQ ID NO: 1486 - DNA, 927 bp, Zea mays
  Peptide Sequence Number=SeqID_43265
atggatgaacagatcgcagctgcagtttttatgccagcttgtatagaagcttcgcttaatgatgggatgaatgcaggaaaaaccagggaggcctttgctgatcatcagtattctgagtatgacagtagattgaaagataaggatcagaaaatattatttgaagatgagattgatttatcattgttcaactacaagttcgattcctacacaacagatagtcctgccattgatgctgaagtagagcttcgttctacggatctttggccatactggaaggttgattgcttgtgcaagataattccaagacagctactagcagagaacgcaatgatgcttataaggaacaccgttgacaagctgattatgaagcataaagaaatacaagttgaaactgaacagattgcgggtgaggatgatgtaaatgaaggggatcctagcattctacgcttcctacttgctagccgagacaagtcagcagacatggaacgatcgcaggagcttctggagactctagttattcttatcgtgaaatctgtgaaggatccaagaagtgttgtatgcaaaactgcactaatgacttgtgcagacatctttaaggcatatggtgccttaatggttcactcaatcgatccatcgctagtacaacagctgcttctgacggcttcacaagataagcgttttgtctgggaaactgctacaacaacttttatatcattgacaagctggatcttccctttactactgaagccaacaatgttgccttacctaaagaacaagaatacagggacctggccaaaagcgtcaaggtgtgtctcagtactattgctcgtgagccacgacaatttctttgtcatgatttgggatcccggtggtgatacacacaacagcttgagggcaagctgcatctcaaggagaggggaatgttag

SEQ ID NO: 1487 - DNA, 1968 bp, Zea mays
  Peptide Sequence Number=SeqID_43266
atggggtgcgtgtgctcgagggggttgccggaggacgcgccgccggcgccgggcccgctggcggccgcctacgacgcgcgccgcttgaggtacgggcccggcgacttggactccagcgagctcgccatcccgcggcccaagccgccccactcccacaaggtatcagacacaggtacatttttgggaagagctagcattgctggtctggagaaggctgttgaagtgttagatacgctcgggagtagcatgacaaatttgaatcctggcagtggctttctctctgggggaaccaaccgggggaataaagcctgtattttagcatttgaagttgcaaatacaatagctaaagcttctagtttgtggaggtcatgctctgacgaaagtatagaagagctcaagaaagagattctgcattcagatggagtgcgagcattggtgtcctcaaatactattgagctgttacatattgctgccgttgataaaagggaagaactcgccatcttttcaaaagaagtaatacgatttggcaacctctgcaaagatcctatatggcataacttggggcgatattttgacaagtatgcctctgaaaagttagtgacagataatacacctcaggatcattcaaaggagagtatggaagctactgtccaacaattgattaatttggcacaaaacacttctgagctctaccatgaattgcacgctctggacaggtttgagcaggattttaaaaggaaatttcgtgacgaggagtctgtgccagcagctagacgaggtacaaacggggagtcaaactcaggacttgaggaggtctactcagaccacgtaaccaactcagctaaagaccctttcacaacaaaggaaatgaagcttgagaacgtgctcgtagcatggtgttatgccctccagagtataatgatattacatagtgaattaaagcgccagaggaagctcgtgaaaaatctgaagaagaaatccttgtggtctaggaccttggaagagattgtggagaaacttgtggacatcgtaatatttttgcacaaacaaatccgagattcatttaacgaaactggaactgacttctgcgcttccgagcaaactcagaacaaaaggctaggttcctgtggtctggcgctacattacgctaacattatcaaccaaattgaaaatatagtttcccggcccctctctcttcctcctagtgcaagggacaatctgtaccatggtctcccaataacagtgaagtcagctctgcgatcacgattgcaaacatataaccccgaagaagagcgcacggtagctcaaataaaagccgaaatgcagaaaactcttcgctggcttctgccgatagcagagaatacaataagttgtttccttctgattcattcaccagggcacaccaaggttttggatgggtcggcgagtgggcaaatcttggttgcagcaccacctaacatgcatccaccttgctcgcaggagcgacatgagcaagaaatcaggctcccagcacagcgtcacccgcatccagacgctccatcacgccgacaaggcgaaaaccgagcactacatgctggagctggtggcgctcctccaccacctggtgatccaggtgaagaacagaggctacgggaccagcaaatcgtcgaggcacgacgcgtcgtcccggtcccgcaaggcggcggcaacggacctccgaccggagacggagactcggcacaacacgtcgccggtgaacagccgcacggcctcgagcccgctgtcggactgcgagcgcgcggcgctggaccacctgagcttcaggaggacggcctacggcaggagccagagctgcgagcctccgcctggccaccgacggagcaaggcccacaggagctgggacccgtgccggagccacggcagctccccggcgacggagttcggcaggacccccgccgtgcagcagcgcggccggggcagggatcttga

SEQ ID NO: 1488 - DNA, 492 bp, Zea mays
  Peptide Sequence Number=SeqID_43267
atggcgattggcgacagagtgacgaggccggacgtgggacgaaaaaacggacggaacgagtcaaaggttgcccacggcgacgacgacccgtcgaccatggatgccggatggaaatggacaggcgagagagagaggagacgggacgggggtgcgggatacaccacacgccacgccaggcggccaggccacggaacaaaaagcgacccatccctcccgcccccgacggccagaccccgacccaaagcccccgacgtcgtttcgtttcgtctcggctcgggcgctcgaccgctcgtcaatctcatcgccctcgcccctccctcgccctcgcctccgcctccgttccgttccactccactccagtccacccgcgacttcaaagttcattcaaacccgcgacccccgggcaccaccaactccaactccgccgctgggaagaggaggagcgacgacgagctgcccggctccaccacgagcagcaagttgcaggcctaa

SEQ ID NO: 1489 - DNA, 546 bp, Zea mays
  Peptide Sequence Number=SeqID_43268
atggttctgacacgacgagtccgtcagtttctagaaatggttgccactgcttttagccggtggcctgggtggtcggtccgcggtggcgacttcttcttcttcacgtgcgaggacggtggttcctccggcgcttgtcaggatgttccgacgctcccttttctctctactgggctcgccagcatcgcacgagtccttcccctttcgaaaaatagcccccactacgtcctctccgttagtgaacttggtcgctatgttgagcaggtccacaattgtcattggtctcctgtgcccaagctcgtggacgagcaccttgttcgtggtgccataggtgaaggcgctcagtatgtcggtgtcagtggcgtcggtgacgtcggggagttcgtttcttttttgataaaacctctggatgtagtcctggaggctctctccattcttctaggtgcacctcttcaggtcctaggagcttcccgaccacttgtaggtgccctagaaatttctgacaaaggccttctggaggttggtccggtcgtggatggttccggctag

SEQ ID NO: 1490 - DNA, 216 bp, Zea mays
  Peptide Sequence Number=SeqID_43269
atgtcggggagacggatgaagcgccgtcgtgcacgctgtagcttcttcatggcggcttggtgctgctttatccggctatccccgcgattcgtggacaccgtcgccacctgcacggccagaggtctttctctctcatactctctccctcttagaagtgagcgtgtacctaacttgcaaaggttcttgatcacttggaatgaggaaagactgaactga

SEQ ID NO: 1491 - DNA, 356 bp, Zea mays
  Peptide Sequence Number=SeqID_43270
gcggacggaatgacggcgaatcttcagatgtaccggaggttgaacaacgccttgatctcatggtggccgtgtcactcggctggatcacatttgaggtccacttcaagtcgatggatgagtacaacgagcggtggcgcgcgacgtgggtcataccgacggtgtggcagctcatcttctcgctgctctgcgccttctgcctcatgtggacgccctcgcagagcgcgacgaggcccggcccgctgtcgtacgtggacaacttggcgatctctgtgtacaaggatgccaccatcatcatcctaagaaccgactccgacgtgtacgcgaaagccgccggcgatggaggcaagcgggtgtag

SEQ ID NO: 1492 - DNA, 435 bp, Zea mays
  Peptide Sequence Number=SeqID_43271
atgggcaagggcaccaaacgcaagcgcgagccgactcctccgtcggatgatttcggtgactcggaatactcggaggaggagttctcctccgagtccgagggatctccggctcccgtctctcccccgacgtcgtctgatgattcagacgattcccaggggattgccgcggaggtctggtcgtacatccgggccatcgagcgctccgggctcgaaggctcggatgagtcggagtactcctcggatgaggaggactcggacggcggcgacgagggtgaaggcgacgacgacgatgatgacgacgacgacgacggcgacggcgacggcagcggcagtggcaggggcggcggcgacggcagcagggacagcaccaagggtggcagcagcaagggcagcaccaagggcggcggcggcggcaggggcagggccagtggctag

SEQ ID NO: 1493 - DNA, 840 bp, Zea mays
  Peptide Sequence Number=SeqID_43272
atggatggcgcgttatacatgccgcgttggctgaaaagcataaacgaagtgtttgaataccttgataagaaacaactcttgcgcaagccatctgaacaacaacgtttacttgaagaggtgcctcaagttattccagagacagaagataataaagatactgaatttcaagttacaggacaagacaaacctattcaaaagagtactgtcgctttacaaggtacatatgtgacaagggcttcttttttgaagagccacacagggaaaaaatccaaagctgctattgctgcgctaccaaagtatttgcatcgccatgctgccactgaagccaataatgctggtgatatttcatctgttcaggagctggatggtgaaggtgttaaagctagcacggatgttgatacaactggaacagatgtccagcacgggagcattgaagctactaaagccaacgctgctggtgatgcacctggagcattttttcaaaagcagtgtgctaaagctgctgatgttattaccattgacgacgatgacgaggacaacagtcatcgttgttataaagaagaacaaacagcagtagttgatcttgaagctgattatgctggggataaccatcccgtgcagcttgaggcaaatagtcgaggccataaacacgtgaaggtgaaggagcgcatttggtattacattgatcctcagggtgatgagcaagggccatttacaatgcagcatctgagcatctggtggagcaatggcttcttccccggcgacttcagggtctggagaacaggccaaactagtaatgacgccatcttgctcgtggacgcactgcagatgactaggtag

SEQ ID NO: 1494 - DNA, 312 bp, Zea mays
  Peptide Sequence Number=SeqID_43273
atgcgtgagcttaggacaacatatgccagacgcggtgttagccagacgacggtcgcatcgcatgaggacccagtgtggcacgcaagctccgcagcgtctcgcgagcggcctggctctcatgtgaacgacaaaggggatctagaggagaaagcaagaagtttacgtagggagatagtgaatcattggatcagtaaagaactccagaggctagaaagattaattgacagggcgagtgagaaaggttggcgcaaggaatatccttgctatacgagctcttttaatcatgtactgatgtttcttaatgtggaatga

SEQ ID NO: 1495 - DNA, 357 bp, Zea mays
  Peptide Sequence Number=SeqID_43274
atgggcatagatgtggaggatcctggtgtggactctactgcggcaatccgagacgacatggaagacatctgggtggcgaagtctccgagctggcgctggacgtcagccaggatcgtggtgatcgtttccagcgtcggtgacggggtggcggatgccacgctatcaccgttactggaacctggaatgactgataccaaattggcacgatcatcccgactacagaggttgtatgtgtggctgctcggaggagggttggaggaggaccgtgcgggagccgtgatgaacttcagaaaggctccacacccggtgaagaacagattttttgggggcatcacttcccagctgtggaaggcctaa

SEQ ID NO: 1496 - DNA, 453 bp, Zea mays
  Peptide Sequence Number=SeqID_43275
atgcccttcccctcccgccaccagcgcctggcgtcgctgacgaagctgctgaccacccacgtgaacgccggccgccaccgcgacgcgctcggcctcttctcccgcatgctctcggcccccgacctcccgccgctcaccgacccctccttcgcccacgccttcccgctcgcgctcaagtccgccaccgcgctccgcgtgcccggcgccgccgcctccttccacgcgctcgccgccaagtgtggcctgctctccagcccctttctcgcctccgcgctcgtcgcgtcctacggagcgcgcgtcgtcggcggtgcctgcggtgcctcctacgaactcactcgccgcctgttcgacgaattgcccgcccgcaacgccgtcgtctggagcgccatgatctccgtccacgtccgggcgggagacctcgccgccgcggcgtgggcgcttgaccacatggac

SEQ ID NO: 1497 - DNA, 468 bp, Zea mays
  Peptide Sequence Number=SeqID_43276
atgcacgcgtgcccccagcgtggtccgccgagtccgcggcatggcgcggccgtggcgctcgggccccgccccggcacggtggccctccccacgcggcggccccctgctgccccggcgcggcccccgatgcctgcgcgtggcgtgcccgacgcagcctgcccgcggcgggcgcgcgacgtgctcgacgcagcctgcccgcgacgggcgcgcgactcgttcgtggcgcgaacgactcgttcgctgcgcgcgcagcgtggccagctcgcggtgtccctggccccggtggcgatgagaatggtggttttggtattgactatggtaatggtaggtgttcatacagtgggcattaaatgcgcacgtcctgaggttctgagaatttggctgagggcgggctggccctggacttcgcccgagatgccctcgggtgaggcagaaatgcgttttttgtccaagggtgtcctcgggtga

SEQ ID NO: 1498 - DNA, 2406 bp, Zea mays
  Peptide Sequence Number=SeqID_43277
atgaataaggatgaaatttccatttcaccgtccaatccaatctgtgtttcgagttgcagttcaggaaaaaaattcaaaattttgcgacgttaccaccagcagtccaccaccagaacgaatccaatccaattgggagagggcgtaactccgcgcccgtcggcgacatcctcctccctcccaatgcttcgccggcgccggcgtgtcatccctctcctcgtccggtgctcgcagctccgccgccaaagcaccgtctccaggtaccgtccgcttccgcggcgacgagcccgtggagacacccgctacaccagcaacgacgacaccctcaccctcggcctcgcgcggcggaggcgcgacgccaccggcaacgctgctctccgctgccacggtaccgtcgcggagccctctaccccgccgtggcagcgcgacgcccaagacgacgtgtgctcgacgaccggccacgaccccaggccgcagcacggcgccgcggccgctcgtgccgtgctcgatgacgacgagacgcctggcgctgacgcctacgccgccatggtcgccagccgactcagggagcgcgacctgacgcgcgcggaggcgctcttcggcgcggcgcccgcggctgcccgggggctgtatctggataccgccatgctcgacgggtacgccaaggccggccgcgtcgatcgcgcgcgcgagctgttcgacgcgatgccggtgaagaacgtcgtcacttggacctctatggtttccgggtacttccgcgccggccgcgttcaggaggcgcgggagctgtttgacgtcatgcctgaacggaatgactattcgtggacgacggtggtgcaggggtacgcgcgcaatgggatgctcagggaggcgagggagatgtttgatcggatgcctcagaggaatgtggtcgcttggacggccatggttaaggcctacgttgactgtgggcagattcagcaggcgtgggaattgtttgatatgatgcctgagaggaactcgtattcctggaatgccatgatttctggttttctcagcattgggaaagtggctgaagcagttcagttgtttgagaggatgccacacagacacaagaatgtggtttcttggactacaatggtcgctggcttggcaaataatggacttgcttgcagggcaagagagttctttgatcggatgccagcgaaggacactgcggcatggaatgccattatcaccgtttatgccaacaatggccagctgaatgaggcgcagagattatttgattcaatgcttgcaaaagacctggtgacctggagtaccatcattgaggcatattcgaagaatgagcgtaagcatgaagccttaaacatgtttctacttatgcgccattcagcagtgtctcctaacattagaacattaattagtatcctggttatatctgagagcacagtcgaagttaagcaaattcacgggttggtcattgcacttggattcctgtcagaaacttccttaggaaatgctctgctcacaatgtattcaagaagtggagatctgatgtctgcctggtttgccttcaaaaggttggaacagaaggatgccataacatggacgtcgatagtgcaagcttttgcagaccatggctgtggttaccatgccttactggggtttgctcagatgctgagacatgggtataaaccaagttcgactaccttcactgctgtgctgtctgcttgtaggcatgtggggttggttgggaaaggtcgcaagatgtttaaatccatctaccatgtttatggattggaaccaaccattgagcactattcttgtcttgtggaccttctaggtcgagcagggtatgtaagggaagccaaggaacttgtcgatggtatgcagcagggtatgcgcgatgaggccattcttgcgacgctcctgggagcctgtgtggtgcataatgaggtagaggtagcaagagaagtgggtgaggatcttgtcagatttgacccctctggtaccggaggctacaggctcctggccaatgtatttgcatcgcatggaatgtgggatgaaacagcaaatgtgtggaaggtcatgaggggcagtaaggcaaagaggactcctggttttagtcagattgaggtgaacatgaggaatcatgtgttctactcaagggatcaagagcatccacaatgtgctgaaatatatgagatgctgattgacacaattgctcctcagatgaaggatgaagtgagcattgttctctccttggcctaccacaactggatgcagatacagcgagatattgaaggggcggtggccctgctcctattcagattaagccacacgagattgattgctgctgaagggaggcctccccagttgaatccacatccatatgcagagtacacagccgcatccggaggtagctag

SEQ ID NO: 1499 - DNA, 855 bp, Zea mays
  Peptide Sequence Number=SeqID_43278
atgtcgcttttccaacacatggaggaccaggatgatgttcggcctgacagcatcatgttccttagcttgatggcggcctgtgcccattctggtcatgcagatgacgcattgcagtatttcgatgtgttgaccaggagatatggagtggaagcttgtggagaccattattcgtgcttggtggacgtcttgggccgggcaggacggctgcaccaagcttatgaacttctacgaacaatgccagtaaaggttacagcaaaagcctggggagctcttcttgctgcatgcaggaaacatggggatgtgcggttggcagaggttgccgggagagcattgtttgagatcgaaccagagaatgcagggaattttgtttcgctcgcaaacatctattcaggtcgtggcatgcatgaggatgcagagcgggtgagaagggagatggagcagcgagtgaccttttatgaaaagtcaggcatacaattcagaagtgtcatcgttggtgcacagaaaattttgttcagatgcagcgaccatttatccatggaaagaatcatgaagttctcttctggcaatggagtgaatcagctgcaacagtcaaaacaaccagctttaatccgaagcgaacagaaaagagaaattcgaaataaaaaggaaaaacgaaaccctaacggacggcgtggatgggatggtgcaatacaacggacggctgtgccaaaggttcacaataagccaataaaaagaccaagaaaaagggttcaaacaaaagagcaaagggacaaccgaaggcaccctggtctggcgcaccggactgtccggtgtgccaccggacagtgtccggtgcaccagaggacttcaagctga

SEQ ID NO: 1500 - DNA, 297 bp, Zea mays
  Peptide Sequence Number=SeqID_43279
atggcggggacgcgcgcgctgcgccgggccggggcgccaagaccgctccacgcaccgcgccgggccgcgcccttcgccggggccacgccatggcctgggaggggggtcgggcacgccacggggaggtggccgccgagccgagggaagaaagggcaaggatgggaggaagaagaggagttggggctcaccgtgggaggagcgaaggcggtgcaggcggatggcgtcgagggtggctccgatcgacgtgggcgaggtggaggagggaggggaaaggaacgtgcgtcaggggtagaatga

SEQ ID NO: 1501 - DNA, 1389 bp, Zea mays
  Peptide Sequence Number=SeqID_43280
atgggtcgacacccagctcccaacagctctgatccaaccggaactccggaccatgtttttcgatgggtcgctaatgaagacaggagcaggcacgggcctgctcttcatctcgcccctcgggaagcacctacgctacgtgctacgcctccatttcccggcgtccaacaatgtggccgactcatcatctaccaagtcatgaagaactcccactgccgcgacccgaagacgaaagcctactgcgatgaggttcggcgcgaggaagataagttgaatgggctcgagctcaaccacatcgcccgacgctacaacgagactgcggacgagctggctaaaatagcctcggggcgaacaacggttccccggacgtcttctcccgagacctgcatcaaccctccatcaagaccgacgacacgcccaagcccgagaaggcctcggcccagcccgaggcaccctcggctcagcccgaggtaccctcggctcagcccatggtaccctcggcccccgaggccgaccgcggtggccgacgccactagaattgtccgcacctgcgaagggtgtcagttctatgcaaggcagacccgcctgcccgctcaggctctgcagaccatacccatcacctggccgtttgctgtgtggggtctggacctcgtcggccccttgcagaaggcacccgggggctacacgcacctgctggtcgccatcgacaaattctccaagtggatcgaggtccgacccctaaacaacatcaggtccgaacaggcggtggcgttcttcaccaacatcatccatcgctttggggtcccaaactccatcatcaccgacaatggcacccagttcaccagcagaaagttcctggacttctgcgaggatcaccacatccgggtggactgggccgccgtggctcaccccatgacgaatgggcaagtagagcatgccaacgacatgatcctgcaaggactcaagccgcggatctacaacgacctcaacaagttcggcaagcgatggatgaaggagctcccctcggtggtctggagtctgaggacaacgccgagacgagccacgggcttcacaccgttctttctagtctatggggccgaggccatcttgtccacagacttagaatacggttcccgaggacgagggcctacgacggccaaagcaatcgagctaaccgagaagactcgctggaccaggtggaagaggctcaggacatggccttactacactcggcgtggtaccagcagtccctgcgacgctaccacgcccgaggggtccggtcccgagacctccaggtgggtgacctggtgcttcggctgcgacaagacgcccgagggcggcacaagctcacgcctccctgggaagggccattcgtcatcgccaaggttctga

SEQ ID NO: 1502 - DNA, 1077 bp, Zea mays
  Peptide Sequence Number=SeqID_43281
atgagggcaaggctatatagatctttgcgttatgttatttacctgaatgccaccgctctaatagttctgttaagttttgattatgttattttggtagcttttctttttgactttttgcagagtagacgattgaaattggtttattctagcaatggcggcaccactgaaaaaatcccatccccagaagaacagcgagaaaaaataaatgaattacgcaaggagcttggtgaacactcatcagcagccattaaagacttcctttcagatgcctcgttagcgagatttcttcgagcaaggaactggaatgtgcagaaagctagtaaaatgatgaaagcagctgtgaagtggcggcttgcattcaaacctgaaaacatctgttgggatgatattgcagaggaagcagagactggaaagatatatagagcggattataaggacaaacatggcagaactgttcttgtattgaggcctggcttagagaacactacctcagcaataggacagatcaaatatctagtctactctctggagaaagcaattatgaacctgacggaagatcaagagaagatggtatggctgacagatttccagtgctggacattgggaagcacaccactgaaggtgacccgtgagactgtcaatgtcttgcaagactgctatcctgagaggttggggcttgcaatcctttacaaccctcctaggatatttgaatcattctggaagatagtgaagccgttcctagaccatgagacccgcaagaaggtgaagtttgtgtactccaacgacaaggagagccagaagataatggcagaagtctttgacatggaggagctcgactcggcattcgggggaaagaacccagcgacatttgagtacaacagctacgcagagcagatgcaggacgacgacaagaagatgggatcttcgcacggctcagccaatagcttgcttggatcagctgggaaggaggctaatggcgcagactcggacgcctcaagcgaggcctccttctacagtggaactgactctccgacacatgagaacggtgaacacagcatcgcgaagaagaatggttga

SEQ ID NO: 1503 - DNA, 198 bp, Zea mays
  Peptide Sequence Number=SeqID_43282
atggcgcttggactcgctgcgcagggcagcgtcgcgcgcggcgtcgtgcttgcgcgcgcggggcagtgcgcaggggccggcgtggctcgcgcggcatgggaggccggcgtcgcgcgactcgggctgctcggcgcggctggcacgcgggtcggcgcgcgtgtaggcgagagagagcggattttttttaaaataaattga

SEQ ID NO: 1504 - DNA, 194 bp, Zea mays
  Peptide Sequence Number=SeqID_43283
atggcccccgtcctccccgctgccccctcctccaaggcagatctgtcgcatggccccctgtcctccccgcgacgccgtgatatcacatcgaatttgttacggtttggggtttttgcggttgactccgaatcccgccgtcgccgctcgtgcaggaggcctcgagcttccagtgctctcctcctcaaccaccccgg

SEQ ID NO: 1505 - DNA, 456 bp, Zea mays
  Peptide Sequence Number=SeqID_43284
atgagagggcatacgaggcaagaactggtggtactctcgagggggtacctcccagacgcaggggcgagggtcaggataatatgggaaagtggcaggataactttgtcttgtcacaggggcggtagggtggtggcaacaggtttggatactctggtagaggtgcaatatctggtcaaagtggtggtagataccagagggacaggggcaatcagggttaccgcaggggctatgatagcatttcaaggtttcaggatgcaaggggtcgcaaccagtctattccatcaggcagaggtggatctagatgctgtggagcggtctgaggggtggcgtttcacggaccgccatgacgctgcgctccagctaaacctactccagctccacgacgccgaccagttgtgcagccagctcccactttatggcattcattcaatgactggagctgatcctttctactag

SEQ ID NO: 1506 - DNA, 1911 bp, Zea mays
  Peptide Sequence Number=SeqID_43285
atggcatcgctgtcagaaagtgagctgacaaaccggggaagcatgtgggagctagatcagaaccttgatcaacccatggatgaggaggcaggcaggctgaagaatatgtacagagaaaagaagttctcatcagctttgttactacggttggcatttcagagccttggggtggtctttggtgacttgggcacgtcacctttatatgtgttctataatatatttcctcgtggaataggtgagggtgaggatgaggatgttattggagctctttccttgattatttacaccctcactttcataccgcttctgaagtacgtttttgttgtcttgagggcaaatgacaacggtcaagttctttctgcatcaggtggcattagggtccagaatcagaatatgagcaccggaaccgaagcgttatttgctgatctctgtcactttcctgtattggcaattcaggtaaaatgccttcagaatcgagtagccatatgtgtacgcagttacatgcttgctaaagtgaaggcgcacactggcagcatagtgcacaacacgtttgatagtgtgtatagccactatgccatatactggcccgcctttgtcatagcaactgctgcagcaattgttgcaagtcaagctaccatatctgcaacctactcaatcataaagcaagctcttgcacttggttgcttcccccgcgtgaagatagtccacacctcgaagaaattccttgggcagatttacatgcctgacatcaattggatccttctggttctctgcattgccgtgactgcaggattcaagaaccagagccagataggaaatgcatatggtactgctgtggttatagtgatgctagttaccacattcctgatggtgccaataatgctgctggtatggaagagccactggatcctcgtggtgaccttcatcgtgctgtcgctcatggtggaggttccctacttcgtggcctgcatactgaagatcgaccagggtggctgggtcccactcgtcgtggcgacggccttcttcctcatcatgtacgtgtggcacttctgcacggtgaagcggtacgagttcgagatgcacagcaaggtgtccatggcgtggatcctggggctgggcccgagcctgggcctggtgagggtcccagggatcggcttcgtgtacacggagctggcgagcggcgtgccgcacatcttctcccacttcatcaccaacctccccgcgatccactcggtggtggtgttcgtctgcgtcaagtacctccccgtgtacaccgtgccgacggaggagcggttcctggtgcggaggatcgggcccaggagcttccacatgttccggtgcgtggcgaggtacgggtacaaggacctgcacaagagggacgaggacttcgagaaggtgctgttcgactgcgtcctcttcttcgtccggctggagagcatgatggagggctactccgactcggatgagttcagcgtgccggagcaggcgcccggcatcggccgcgcggcgttcttgagcgtgggcgagcggacctgcgcgactgtgtgctccagcggtgatctgagcttctcgtcacaggactcggtcgtgcccgccgccgcgcagtcgtcccgagcgccgacggggctgcgggtgctgcactactcggcgtcggcgtcggcggcggggcagggcagcagcggcggaacggtgggcgacgagctggagttcctgaaccggtgcaaggacgccggcgtggtgcacatcctcgggaacaccatcgtgcgcgcgcggcgggattcgggcgtcgtgaagaagctcgccgttgactacatgtacgctttcatgaggagggtgtgcagggagaacagcgtcatcttcaacgtgccccatgagagcctgctcaatgtcgggcagatattctacatctga

SEQ ID NO: 1507 - DNA, 717 bp, Zea mays
  Peptide Sequence Number=SeqID_43286
gctgttggtttcgatggagatgtccgcaaccaggaggacgcggccagagtgcttgctgcaacagttgcacattttggcaagctcgacattcttgtgaacggtgcagctggcaacttccttgcttccccggaggatttgacgcccaagggattcagaactgttcttgagatcgacactttgggtacatacacaatgtgctatgaagccctcaagtatctgaaaaagggtgggccaggaaaaggcccgtccactggtggactaatcattaacataagtgcaacactgcattacagtgcttcttggtaccaaatccatgtctctgctgctaaggctggggttgatagcatcacaagatcactggctctggagtggggaacagattatgacattagagtcaacgggattgcacctggaccaattcaagacaccccggggctgaggaagcttgcacctgaagaaatgagcaaggggcttcgagaaatgatgccattgttcaaatttggggagaagcgggacatagcaatggctgcgctctaccttgcttctgatgcagtaattaccgaacaaggccttagccgactctatattgtgatttttgctcggggaacggcggcggtggctagggtggagggggcggtggcggggagaggtggaggtgccgcgaccactgacacccagcctcgagggagaggggagaggagaggagaggaggggtag

SEQ ID NO: 1508 - DNA, 213 bp, Zea mays
  Peptide Sequence Number=SeqID_43287
atggagaagtttatagcacttaactttctactgtctgttcatttatcgattaaagatggcaccagcaaccggatgactgaaaacggcaatgctggaaagaggcacaaagaaccatgctgtggactggtaactgacctgatgagctttgcattgcatctaggctccatctacaagatggcaagtcttgaattgaccaagacatgggataagtag

SEQ ID NO: 1509 - DNA, 552 bp, Zea mays
  Peptide Sequence Number=SeqID_43288
atgggtgtcatgttacgtgaaacggcgtcaaccgcctggcgtgtcttcagacggtttgaattgcatattgaatttttgcgactgttcggtggccgtggtaggagagcaagaaaggtggtggttcttcgcatcattctgacgacaagcgcaagcgcgagccgactcccccctcggaggacttcggcgactcggagtactcggaggaggagtttctcctccgagtccgagggctctccggctcctgcctctcccccggcgtcgtctgatgattcagacgactcccatgggatcgccgcggaggtatggacttacatccgggccgtcgagcgcgccgggctcgagggctcagatgagtcggagtactccttggtcgaggagaattcctccgacccgtccgaggagggcagcggcggcgacaacggtgatggtgacgacgacggaggcgacggtgacgtcggaggcgacagcggcaagggaggtgacggcagcggcaagggtggcagcggcgacggcggcggcggcagcaagggcagcaataaggccagtggctag

SEQ ID NO: 1510 - DNA, 276 bp, Zea mays
  Peptide Sequence Number=SeqID_43289
atggagcctggcggaaggacagctgtcggagcggttgagtccttgctgacgtcctcttgcctcctcggagtggcgcaggcggcgctgtccttctgtcaggccggtcagtggagcagcgaagtgacggcggtcacttcggctctgccggggggcgagcgtcaggataaaggtgtcaggccacctttgcatttaaggctcctacgatttggtcggtcggtgcggcgatctagtcagggttgcttcttagcgaagacagggcctcgggcgagccggtga

SEQ ID NO: 1511 - DNA, 273 bp, Zea mays
  Peptide Sequence Number=SeqID_43290
atgggtgtgaatgatggtgaagaagctggaggcctccgtgctggtgctcagccagtgcaggccatctccctgctggttaagctgcagaatattcgactagtatcagatttagcttatcctctcagcttcctgcggagcagcggcgaggagtttgtggagcagtgcatcaaccaggcggagtgcctgacgctggcggtgaggaagcagagcaagggcgtcggtgggtacctcatcagcacccggtggcagaagaacttctggctcctggcctga

SEQ ID NO: 1512 - DNA, 522 bp, Zea mays
  Peptide Sequence Number=SeqID_43291
atggaagccgtccagagttgggcacgatcacgtgtgcgcgaaccaggacccgtccccgtcgacgcgtcaggtatactcaggtcttgtgcgtttcctgtgggagctgacgggccgacgtgggcaatatgggggtggtgcttttggatcatctctcttgtactagggcgactcctgcgtgtgcagccaaagggtcgaagggacacactgtgtggcgtgtacatgtgcgtacaagtacggtgcttttctgcggataacgctagattcagagttgggctagatacagtgtgtgcggccgcggccgcggccgcggcgctgcggatattacagctttgccgaacactgcagggcagtctgcgtccactgttggtctggttacgtcgggcgcgtgattgtgcgagctggcaagctaagctgtaccgttctacgtctaccgcggggttttcgttttcaaaatgccggaggagtccggacagcggcggggcaagcagagagtccctgttaacaattcaacgatacgagtaa

SEQ ID NO: 1513 - DNA, 3879 bp, Zea mays
  Peptide Sequence Number=SeqID_43292
atgacgtcgagattccctgttgcgcttatcgaggttggagctccgctcgggcgaggcggaagttttcacgaggcgtcagacgagccctcccgtgacatgtgccacagccagcggagtggcctcccgcgggattcacagcggagtgggtggtcgaggccgagctcgggcgaggcggagaattcatccgagggccgaactcgccgtcgggcgaggcagagaaaccgcccgagggctagactcggcgtcaggcgaggggtggttttgtatcctaacatggagggcaagcacatattttctattgctcctgatggtcattactctgcaaggattgcctacatgggtctttttattggatcatgctcctttggccactacagacagatctggaaggtttgggtccctcctaaatacaggttctttttatggttggtggccatgaacaggtgctggactgcagatagacttgcaaggtttattggtactctactcttagaaggtttggcctccacactccacagtctagcccctcaacatggagacttgtttctgcaatggtggaaaggagcttcagctattgtctctggtggtctggagccaacaaatgaaaaaagagagaaatggcaagctacaggagccaagggattatcctttttggctgcttctagccgtactgagtgcatgcaagaaatcgtaaaaggccccgagcgattcttggtcgtgtgtttgagcgcgtccatccccacaccgcacatacacgcgattcgtccggcgcccatgcgaatactgctgaaaggagcaacaagggaagaacttaagaagattaagcgtgtgcttcatttcactgtctttgcagcttaccatttgatccttgaaacttcattctttgccgatcaaaaattgtttacgacagacaaaactaccacagggaaagagaagtgctttaaaactaatcaacagctgcttggttcctgttatgataattcaaaaaacagtgacaccatgaataacacaccaacttgtgatgatcagtatcctaatcaggaaaagcttattcatactgaaaaatctgtaccattgcatcttcatgattccaaaactatggcatctgaagattctgctggtgaagagcatattgacagcaaaggcattcagtcatattcatccctgcctgtttcagatccctcgacaaattttatgcaggacatgccatcaccagattgtgctgagtcaaaaatatctggtggttttgatggctcaacattcactgatacttccaaagaggtgcagaagaaggaattgtctagtgacaattttcagggaacttttgatgtaatttgtgctgagagtggagctgctttgaacactcaggatatcttggtatcaatgtctagccaacatatcaggaaccaagctgtttgtgagcagagtcacctgtcgcggataacttattatgggtattttgatacatcccttggacgatatttgcaagatactttacttaatgagaaacacagctgcctatcatgtggtgaatctccagaatctcacatgtactcttatacccaccataatggtactctaactgttcttgtgaaaagacttcccttggagttgacactttctggtgagactcaaggaagaatttggatgtggaccagatgtttgagatgcaatgctaagccgacccatagggttataatatcttcctctgcacgtaatctgtcgtttggaaagttcttggaactcagcttctcaacccactctgctaccaagaagctaccaacatgtgggcatttgcttcatagagactgcctacgtttctttggatttggatccagagttgctatgttcatatactcatctgtagaaatatattctgcttgtaagcctccattgagtttggagttcaataaccgaaacaaaaatgattggcttgacattgaagtgaagaatccaattgcatacttgcatgctaacatcattctattctttaaggtccttcttaaatggaagcagttatttacaacaattgaaaatgtaatacaagacttgagatcaagatactctagtcaagccatgggggaagacaccaacgtttcagtagatgaggatgaggggttacttttggaggtgtccaggatgcttacacaagagaaaaataaagttgaggtttctctgagggagtttagccgaattgccatacctgagagttttgcacatgggatccttggtttgaactggttgtaccagcaacttcttcttgggttctacatttgggatcttcggttgcttcatattctgcagtacactaaagttaatactgcatcttcagacaattccattcatgaaagcacagcaaagaatgaaccgaagagttcagcaagtattgcaatccaggacacaccatcactaaaggaaattggaacagaaagaaaggaagcaactataaattcttctggcaactttgatgatccatttggtgatacaatgttggataaggttcaccttactgctaaattaataaccaaagagaaagagcacgatttgctcaattatcaagaccatgatgtaaaatcagctctttcctctctaggcgaagctgctgatcagtttgaaacgattgctaatgttaattgttcagagaaattaaacactataccatttatgaatgatgaacaacctgcagcatccaatgtattgcatcatgttgtcattccaagtgacgatgaaggaaaatggttctggaatcaatttaatcaattggaaatggaatacaagaaagaacttgaaggtggttctttgtataaattttacctcatcaacaaatacaccccatgctcttcaccattggcacaattaaaacatcaaatggacttggggcattttatagctggccatggtggtaatatcttttcaatttctgaggaagaggcttctagcattattgcttatgctctaattatatctgaacaacaagggttctattatgaagctgcatctagtaacttggataaaaatgcttctatgctgccatccatgtcgtctccaaatgagtctttcgaaaacaaccataaattttcaaggtttgcaccaactgaggaattaacatcagggttttatgattcatttctgtcagctttaaaagatctgcaccacgaaatcgatctgaacaatgaaaagatagctctgagaagcaaatatactgtcatttgtatatatgcaaaacaattccatgatcttcggaagatgtgctgcccatcagaacttgcatatatttcgtcaataagccgctgcaaaaactggaatgcacagggtggaaagagtaaggttttctttgcgaaatcaatggatgacagatttatcataaaacaaatcaagaagactgaatttgactcgttcttaaagtttggtcttgagtactttaagcattttggtgcatctcaggtttcaagcaaccctacttgtcttgcgaaaattctaggaatatatcaggttaaggaaactaggaatggcaaggagacaagggttaacttcatggttatggaaaatcttctgtttggacataatatactacgcagatatgatctgaagggtgctcttttctcacgatatattcctgattcagaaaattctgaaaagaacatgaatgtcatggattactccttgcttgttggagttgacaaagagaagaaagagcttgtatttggaattatagattatttgagacaatatacctgggacaaacagctggaatcttgggtgaagacatctcttgttgttccaaagaatctatccccaactgtaattttacctagggagtacaaaatgagattcagggcctttatgtcacaatactttctatcagttccagatgcttga

SEQ ID NO: 1514 - DNA, 462 bp, Zea mays
  Peptide Sequence Number=SeqID_43293
atgggcaaccctccactcccatcagcccgctctcgctccgtcttcctcaagggaaatgatggcccggcatgggtccgtggaccgaccgaccacaccgacgggtgcgaggacgaggacgaggacgagcgacacaggcggcaaagggccaggggtccttttcttgaatgcgcagcagaaagccgcgctgctccccgggtcagtcccgctgccgttccagaggacgctttaatcattgcgatcggccgtccgcagctttccctgcccggggacaccgccggtccaaccccgacaaagcgccacgggagcgggacggaaggccgccacagcgttttcgctccgatcgcgtgttgcgctgccttcccatccgcccatccaatccatccatctccggatacgcaggcggccgccggttgccgtcctcggccagggacggggagacagtcaggggtacaaggaatctga

SEQ ID NO: 1515 - DNA, 324 bp, Zea mays
  Peptide Sequence Number=SeqID_43294
atggccttgtgcgcccggagctccagctcacacgccctcgacagcagacgcatggacgccgggtccaagagcgccgccatcctctgtccagcgctgggaggaaacaaaaaatcacgcggcggtctgcacccagcggcgctgcctgcgcacggccaccagacagccgaacggcggccagcagacagccgaacggcaaagaaaggagccttcgcccctgcacctgcacggaacagaacagtagttagattgttaccgtcattgggaagtgcaggcgtgttggaggatgtagatccgtccgccatcaggttcgttgatgaaggttga

SEQ ID NO: 1516 - DNA, 375 bp, Zea mays
  Peptide Sequence Number=SeqID_43295
atggaggcggccggcggcgcaagggcgcggcccgcggcggctgagtggggagggagccggcggcgcagggaaggcagccggcggcgcgacggcttggggcgaagggtggcgcggccggcggccggcggcggcggcaagaagaagggctctgtcaccttcacgatcgactgctgcggctcagggaagggaggagggaggagaaggcaggggcggcggcggctgttgccagggagcagatgggggggcgccggcggcgcaggggagggaagcaccggcggctgggcaggggaggtggcggctgggagagaaaaaaattggctctataccatattggaaaccctaaccctaacaggggttgggcaatctattaaatag

SEQ ID NO: 1517 - DNA, 195 bp, Zea mays
  Peptide Sequence Number=SeqID_43296
atgggaaattggagttcggtcgtcgtgagggcctccaagctttgccgagaagcttcgccatggcacagggaacgtttctgtggccccttctggcggattgggctgttcgtggctctggaatcgctcaccggagcaaccccaacaccgcagatccgccatgaccgtggatgggtccctgcgcctcgacgttcaccg

SEQ ID NO: 1518 - DNA, 375 bp, Zea mays
  Peptide Sequence Number=SeqID_43297
atgggaaattggagttcggtcgtcgtgagggcctccaagctttgccgagaagcttcgccatggcacagggaacgtttctgtggccccttctggcggattgggctgttcgtggctctggaatcgctcaccggagcaaccccaacaccgcagatccgccatgaccgtggatgggtccctgcgcctcgacgttcaccgagcccatttttcggaagtattgtgcgtaggaatcaggttctggcgtggtccggccatggcgccgccgtggatccctggccgctgttctttttggtcgggggcaagaagaagcctggtggaccgttgagagtgagatgggcgatccagattcggttaggcatgagagatgaggggagttga

SEQ ID NO: 1519 - DNA, 1014 bp, Zea mays
  Peptide Sequence Number=SeqID_43298
gtgctattcttgatgtaccattacttcaatgctaaagaaatctacaatgcaatccgtgtgttcatcgctgcatatgtctggatgactggatttggcaatttctcttattattatgtgaggaaggatttcagtcttggaagatttgctcagatgatgtggcgcctcaatttctttgttatattctgctgcattgtcctgaacaatgattatacactctattatatttgtcctatgcacacccttttcaccctcatggtttatggtgctcttggaattctaaacaaatacaacgagattagatcagtgatggcaatgaaatttgttgcttgcttcttggtagttgtcctggtttgggaagttccaggctataccgatccttctaaaccagatcttccccggttgcatgaatggcaatttcgatctggactggatcgctacatttggatcgtggggatgatatatgcatattaccatccaactattcatagaccccttggaggcaaccacatgattgtttcaaagagcgttgagaagtggttggagaagctggaagaaactgaaatgagaaccaaactctatattaagacctcaatagttacagtgtcaatgatggctggttatttgtggtatgaatacatttataagctggataagattacttacaacaagttgcatccatatacatcctggatccccataacctggcttggaaagattacactagaaacatacatatctcagttccatatctggctcagatcaagtgtgcccaatggccaaccaaaatggctattgtcaataatcccaaattatccactgctcaatttcatgctgactactgctatatatgttgcggtttcccataggctcttcgaattgactaataccttgaagatggtatttgtaccaaatcgtgacaacaagcgcctctcatacaattttgtggcaggaacagccatttctgctgccctgtactttgtatcgtttgttctaattggcattgcaggatactag

SEQ ID NO: 1520 - DNA, 255 bp, Zea mays
  Peptide Sequence Number=SeqID_43299
atgggaaacgccagcggccgcgacgaggacgccgcggctgttgacggcgacggcgccgacgtggaggacggcggaggggactcgtcggagcgcgacttcccatcgtacggtagcggaggagccaaccacgtgcggcgcgcgtgctcagtgggcgtcgtagggggcggcgccgccgccggatcgccacccgggagccccggtcactcgctctcgccgcggatgttcgtgccccaggttgctcacttcgtagcttaa

SEQ ID NO: 1521 - DNA, 615 bp, Zea mays
  Peptide Sequence Number=SeqID_43300
atgcagtcggcatgcaaccgtgccaagagggcgcacccttttgactccaacacgcccagcatgaagacccaggcccacacgtcatgcaaccggcgcgccggttgctacgtgcgagcaactgcaccgccactcgcgccactaccgcgcctcctcgactgcggaaccagtacagcgactcaaggcaaccctgcgtatgacccaacagtgccagccaggcgcgtcggtcacgggtcagccagctacgggagaaggcgcgacggtcaatacggccaaaaatgggccgacagtaatggcggtggcaggcgggcggaagcagcggacaggcggcacctttggcaggggaagcgggcgacgcttcgccttcgccataatgaccgcatcaaaaaaagggaccgggaaaggggataccccgaaagggatccttctccgcgaaggaaacgggccccgagcctccctactgatcagaggtttgaaggctggcccctcggaggggttcaacagccgcctcagagcgctcgggctccgcgcccactactggtcagaggttcgagggccggcccctcggaagggttcaacggccgcctcaggccactcgggctccgcgcccactactga

SEQ ID NO: 1522 - DNA, 750 bp, Zea mays
  Peptide Sequence Number=SeqID_43301
atggcggaggctgtcgcgtctgcgggcaggctcgccatggactcttcgacctccgtctcgcccggccaggtttctgctattctgggctttctgtgggttttcgcagcatgggcgtatgctgaggttctcttccataggaagaatactgcttctattaaaacgattctaagtgctataatggtactccctcctgccagcattacttgtttcttacaaccaaacgcaacagactacaagttaatttggctccctgaaacattaagtaatactgacaggagtagacattcagatgtcaatctagcagtgatggatgacagttcagtcaaagcagaagaccagacaatgttattggaggagggtggtcaagcaatggctgcaaagccagcttatacttccctcacatcacaaatactcagacttatattcatggaccagttgcttcttctggagaatcgtttaacactgagggcattatctgaatttggaggttatctactttatttttacatatgtgatcgtacaaacttgcttggagagtctgccaagaattacagccgagatctgttccttttcctctactttcttcttatcattgtagcagctatgacttcctttaaggtccatcaagacaagtcatcattcacaggaaaatctgtactgtacttgaataggcatcaaactgaagaatggaagggttggatgcagtgtttcctgggtctcagaaacgatttttttaataattgcccataa

SEQ ID NO: 1523 - DNA, 108 bp, Zea mays
  Peptide Sequence Number=SeqID_43302
atggccgtgcttactggttatcccagagaccggttacggacggcggggcaaactgacaaactgatttacctcgtcactgcgctgccagtttggcactcaccagggtaa

SEQ ID NO: 1524 - DNA, 1956 bp, Zea mays
  Peptide Sequence Number=SeqID_43303
atgctcacggtgtccattctggacgctcaactctcccgctgctgctccgcgcgccatctccttcaaatccacgcgcagttcctcgcgtcgggcctccttgctgacgcctacgccgccagccgtctcctcctcttcaccacctccgcgaccgccgcgcgtctcctgccgcatccgctccaccactccctccaactcttcgggctcgtgcgcagccccaatgccttcacctgcaacactctcctcaaggcggctctgcgccagggctttccccacctctgcttcccgctctacgcctccatgcccgcggcgcccgacacctacacgcacccgctcctcgccgccgcctgtgccgccagaggggacgtgagggaaggcctgcaggtccactcccactccgtcaagcacggattcagcgacaacctgtacctcaggaatgcgctgatgcacatgtactctgcgtgcggctgcgtcgcgagcgcgcgcagggtgttcgacgcgggacccgtgtgggacgccgtttcttggaacacgatcctcgccacgtacgtgcgggacggggacgtcgagcaggctgtcaaggtgtttacgaggatgccagagaggagcgccgcggcagtgagcgcgatggtggcgttgttcgcgaggagagggatggtagaggaggcgaggggggtgtttgacggagcggagcatagggatgcgttcacgtggacagctatggtctcttgcttcgagcggaatgatctgttcatggaagcactagctgtattttcagatatgcgtgaagaggggtggcctgtggacgaggcagtgatggtcagtgtggtcgctgcttgcgctaagtcaggggtgattcagaacggtgaggtgtgccatgggctggttgtcagagcaggccttggttctcgggtgaatgtccagaatgtgctgatccacatgtactcaagttgtcaggatgttgttgcagcacggagattgtttgataatggtgagagtctggaccacttctcctggaactcgatgatttctggctatctaaagaatggccgtgtcgaagatgcaaaagcgttatttgatgtgatgcctgacaaggacaacgtttcctggagtgcaatgatagctggttgtgtgcacaataaccagtcatctgaggcacttaatgtttttgacagcatgagagcccatgaaatcaaaccagatgatgttacgctcgtgagtgtcatctctgcatgtagtaatttgtctgctctggagcaaggaaagttagtgcatgagtacattaggaaataccaatataacatcactatcgtacttgggactagcctcattgacatgtacatgaagtgtggatgcatggaggctgcactagaagtctttgacatgttggaagaaaaaggaacaccttgctggaatgctgtcattgtgggactggccatgaatggtcttgttacaagatcccttgacatgttctccgagatggaagccactggcactgctgtccccaatgagataactttcactggagttctgagtgcttgcagacatggtggcctagttgaggagggccgtcaattcttcaagttgatgcagaataagtaccagattgtaccaaatatcagacactatggatgtatggttgatctccttggacgtgctgggtatgtcagagaggctgaagacatgattcagagcatgccgatgtcacctgatgtcccagcatggggtgcgttgcttggtgcctgttggaagcatggcgatagtgaggttggggaaagggttggtaagaaacttgtcaagctggatcctgaccatgatgggttccaaactatgttatctaacatatatgcttcagaggggatgtggcagtgtgtaaaggacctaaggggttccatgaagcaacaacatgtagcaaaagttgcaggctgtagtatggttgaaccatcacattcttcatga

SEQ ID NO: 1525 - DNA, 852 bp, Zea mays
  Peptide Sequence Number=SeqID_43304
atggcggaccagctcactgacgaccaaatcgccgagttcaaggaggccttcagcctcttcgataaggacggcgacggggagagccagagagagaaagcgacaggccacggggagcacactggggcggagcggatgcatcggcgtgttgccatgaacccaacggaggctgaactccaggacatgatcaatgaggtggatgccgacggcaatggcacgatcgacttccccgagttcctcaacctcatggcccgcaagatgaaggacaccgactccgaggaggagctcaaggaggcgttcagggtgttcgacaaggaccagaacggcttcatctctgccgcggagctccgccacgtgatgaccaacctaggcgagaagctgaccgacgaggaggtcgacgagatgatccgcgaggccgacgttgatggcgatggccagatcaactacgaggagttcgtcaaggtcatgatggccaaggctgcaaaagaatccaactctctcttttcgcttgacaaagatgatggcatcatccgcatacaaagagcgctcaaaaaagctgacttccagtatctacttgataagtctgttcacacacttacgaccattaatgtaccaaaggaggtgcttgaagaaattgacaaatttaggaggcgattcctctgggcaaggaatgagaacctcatcgagggcaagtgcaaggttaactggccgacggtggtgaggccgttggatcttggggggcttggcatcctcgacatccatcgatttgtgaggactctacgggcttcgctggctgtggcgggaatgggaggatccaaatgccccttgggcaggcctagaaactccttgcaatga

SEQ ID NO: 1526 - DNA, 286 bp, Zea mays
  Peptide Sequence Number=SeqID_43305
atgaggccgattggtgcaaacccgaacggcccacatcgtcgagcgaataatcgcaacagagacccgatcttcccgcgcgggagcccccatgcagcggagccgtgcgaggataagtcggcgaggatcacgcaggataaactcgagagcacgaaccattttgctacagtcgttgacaccgtcctactcctagaaaacaccttgaggggcagccccggccatcgttcggcttcaaggattttcatcaggcagcccggctgcatcccctcgccggtggtcacccaagatg

SEQ ID NO: 1527 - DNA, 273 bp, Zea mays
  Peptide Sequence Number=SeqID_43306
atggataagaaagagcaccctgaaacctcccaagatccaccgccagagatgtttgagcccctcacgatgaagaagattctagcaccctcccttgaggtcaaggaagaagctgtaagcaccccaccaccaccgccgccctctaagatcaccttggagctacaagagcaagtcctgcttggagaagagttcgactccatcctgccatctcagtcgccgctagaagtcatcaagatcatctccctcctgacttatccaggagatgtcttagaatga

SEQ ID NO: 1528 - DNA, 168 bp, Zea mays
  Peptide Sequence Number=SeqID_43307
atgatgggtccttgggcttcgtcgggagctcagggtcatactcgtcgcggcgctagggacggaaaccggctgataatcgaggaatttctcaccgtcgttcgtggccgccatggatccgcccctcacccgtggacggggtacctcgatgtcctaaccacaggtgcttaa

SEQ ID NO: 1529 - DNA, 207 bp, Zea mays
  Peptide Sequence Number=SeqID_43308
atggaatatctggtgcagccagctcatgatcaacacgcacggtcccagacgaaggaatcggcagcagcactgaaccccgcgcatcacaagagttcacgggaacaggcgatgaagcagccgcaggtgatggtgcacgcgacccaggtatgctttgtgcgccggagcgcagagggtcagcagcaaatgtgtctgcaggcacagggttag

SEQ ID NO: 1530 - DNA, 396 bp, Zea mays
  Peptide Sequence Number=SeqID_43309
atggtggtcctcgccaagggtgagctcgagcagatcgcgctgcctgcggcggcgccgccacgggccgacgtgcggtcggtggacctgtcggccccggcgggcccggcgcgcgaggccgcggcgcgcgcgctggtggcggcgtgcgaggagcacgggttcttccgggtgacgggccacggcgtgccggccgagctcgtgcgcgccgcggaggccgcggcggccgggttcttcgcgcggccgcagggcgagaaggacggggaggcccccacgctcgggtacggcagcaagcgcatcggcggcaacggcgacctcggctgggtcgagtacctcctgctcggcgtcaaccccgccgtgcccgccgcctccgcgtcctcctcgacattgccgttgcggtga

SEQ ID NO: 1531 - DNA, 435 bp, Zea mays
  Peptide Sequence Number=SeqID_43310
gcgactttcacaaatgatgacgagaataaaaacaacaaaaacttcaagagaagagatagcaagaaaaggcaatttcataagaagaagggtggcaacacctatattgttggtgattggctcaccgacattgactttacaagcagatcatcttcatgcggtagtgatgatgaagaagaaaaggtgggcacccttgctattaggttttcttctctaccaccattatcgccatcatcctatatagacctatgccttatgaccaaagtgctagaggagggggttagtgggagcagtaacagtaggtgcatatatagaatcattgagaatatcacatgtaacacctatgttaggtacttcaataggtttcttcttatcttgggcaagaagagaagaatgagcttccttgagcatatcatgagcgtaaatgacctttcatga

SEQ ID NO: 1532 - DNA, 255 bp, Zea mays
  Peptide Sequence Number=SeqID_43311
atgggagaggagggcaaagaaaagggataccgcgccggcaaagatcagatggcggcgacgactagctacatcaacctctatggcaagtatccaccaggtctgttttccagcgagtgcaaagaaggcaagatggggctttcttgcgcagatgtcccccggaaggacagttccactgcaaacagtggttatcgcgcccaaagcagcttgcttgcgttgattactgtcttgagcgtggtagcagcgttgttctactga

SEQ ID NO: 1533 - DNA, 231 bp, Zea mays
  Peptide Sequence Number=SeqID_43312
atggggcgagggatagaggggcaggggcggtccaaaagggggtacctggatctggatcgctgcggctcggctcggatggcggtggcgcgcctaagaaggtcgcctccgacttcttgctccgggcccggcgtcagcggcttttcgcgcggtgtcgtgtacgccagagcccagaaggtcgtgcgcgcgtcgcgattgactggctccaccgctgggcgcgcccgcgttgcgtga

SEQ ID NO: 1534 - DNA, 231 bp, Zea mays
  Peptide Sequence Number=SeqID_43313
atggagttgtcaagcgcacggtcatctccatggtccaagggaatcagatgcattagtcgtcgtttggagttgaaagaactgttggtcccatacaccgaggggtcgttcgaccatgaacctgcagtgttttgctattgtggatctaaggcagcaaagctgacatcatggatcgatgacaacctcggccaaaggtacttccgttgcaggggagctcgggtgcagttagtctag

SEQ ID NO: 1535 - DNA, 792 bp, Zea mays
  Peptide Sequence Number=SeqID_43314
atggcgaagattggcgagagggagtggtacttcttcgtgccgcgcgaccgcaaggccggcagcggcgggcggccgaaccgcacgacggagcgcgggttctggaaggccacggggtcggacagggccatccggagctccgccgacgccaagcgggtgatcgggctcaagaagacgctcgtcttctaccaggggcgcgccccgcgcggcaccaagacggactgggtcatgaacgagtaccgcctccccgaccactccgccgccggccgcgccgctccgccgctgcctcccaaggaggacatggtgatctgcaagatctacaggaaggccacgccactgaaggagctcgagcagagggcctctgccatggaggagatgcagaggcgcatcggcggggccacagcaacatccctggtccaggccgccggctccaccggcgacgactacctgtcgtcggacgacacctacgacacaagtttcctgcagttcccgtcctcgtcatctcccgcgccgtcgggcgacagctacggcgcgcccgcggccgcgcccagggaggccaagacggaggccgcggacgccacgacggtcacggtggcgtcgacgtcgtcgtcgtcctccctgctgcatgccgcgagcgtggccggcccggcggtgaggcacggtgacctgcccaccctgcaggtgccaacgcacctcggagtcgccgactggacgcagatgcaggacccgtttcagctgcgcagcccgtggcaggaccagctcttcttctctcccttagcccacctgctatactga

SEQ ID NO: 1536 - DNA, 258 bp, Zea mays
  Peptide Sequence Number=SeqID_43315
atgggcgatgtgcgcggagatcgtcagcagggcggttcacacggctcgcgcggcgtgcggccagcagggccaccagcccagcacgtaggtgtgagctttgccaatagggcgtgggttctccgcagccgaacgaacgagcgcatagagaatttggtctccttccgatgtagattcgtgcggggtaccctcaagactcctaattctcagctggtaacccccatcagcataaagctgcaaaggcctgatgggtgcgattaa

SEQ ID NO: 1537 - DNA, 330 bp, Zea mays
  Peptide Sequence Number=SeqID_43316
atgccgtcccctcttgcgacggtctcgcccgcgaaggtggccgccgcgcccgtgtggtgggtcgccgacctcctcaggtggcgccggcgcacggtggccgtcgtcgctggcagtggcagcggcagcgagcccgggcccggcgcgagagaggcgaatttcgaggcggagcgctgcagcgatgaggaggagggggagagacaggcggccatggaacggctgcggaggctggaggactgcgtcgtggcggcggagaacggctgcgagcgggtgtaccgggcgctcgttaacgcgagggtgtcgctgctcaacgtgctcacgccgtgcttttga

SEQ ID NO: 1538 - DNA, 732 bp, Zea mays
  Peptide Sequence Number=SeqID_43317
atgaagtattatttggctgtgtatgatgcattgatgcatattgatactctgaatttcgtctcccgcacgattgttcatcgacggcttctatcgttcaaccgctttccatctctggatgcttctacatggttcacgttcccttctccgctgcagtttgtcgactgctccgccattcagccaggcggcgcctggtaccagcagaacaacctgtcggcgctcgcgtcctacgcctaccgactactaccagaggatggccagcaccgccgccacctgctccttcaacggcaccgccaccacgaccaccaacgacccaacgcgcgttgcggttgcttgcagctccaactcagcgtgccggtgggagcgagcccgccgaccaacctctccccttcgacgggcttcacgcctccagtcggctccagccctccgtcgtcgtcggagttcgccccaccagtggccggcaccaccccgccgtctggaagcgaccttggaccgggattcggcaccccgtcgggctccttcaatggcaccgggtcgttcaggcccagcggcacgctcaacccttacaacggcgtgtcccgtgggttgccgcgcgtgggcttgttcacggctttgtccgccgctgcggtcgccgttcttctcgtgtccatggatgccatcctcccccgtcgccaccgttgtcgtgcaaacgcaaccactactatgtttcgtccgagctgcgcttgcggaagctag

SEQ ID NO: 1539 - DNA, 125 bp, Zea mays
  Peptide Sequence Number=SeqID_43318
atgaagccacgggagcaggaagctcagtggtggttgagtttttggttactgatggaagcctctctggccattaagtcatcctactgctcggaagtggaaagggttcccacgcctcttgcgaagct

SEQ ID NO: 1540 - DNA, 852 bp, Zea mays
  Peptide Sequence Number=SeqID_43319
atggcggcggcagcaggcggaggcgcggtgcgcgctctgtcccagaaggagcaggacatacagatgatgctcgccgccgacgtccaccttggcaccaagaactgcgatttccagacggagcgctatgtctttaaacgccgcaccgacggcatctacatcatcaatcttggcaagacatgggataaactccagcttgcagcgagggttatcgttgccatcgagaacccgcaggacatcatcgtccagtctgcccgcccatatggccagcgtgctgtcctcaagttcgctcagtacactggcgcccatgccatcgctgggaggcacacccctggtacattcactaatcagctccagacctccttcagcgagcctcgactgctcatccttactgacccaaggactgaccatcagccaatcaaggagtctgctctggggaacatcccaaccattgccttctgtgacactgactctcccatgcggatggttctgcaaatgaggggcactatccttcctgggcacaagtgggaagtcatggtcgatctgttcttctatagagacccagaggaagcaaaggagcaggaggaggaagttgccgcggcccctgagtttgccgcaatcactgattaccaaggagctgatcagtggggtggtgaccagtggacctctgatgtggctgcaccacctgttgctcctactggtgctgattggggtgctgctccggctccagttcctaccggtgaaggctgggatcaagccggggcccctgtacctgcggacggcactgtacctccagtggttgctcctactggttgggaccaagcagccccgccgacagcccaaggctgggagtag

SEQ ID NO: 1541 - DNA, 780 bp, Zea mays
  Peptide Sequence Number=SeqID_43320
atggtgcatgggcacggcgacggcaaccaccaccaacaccagcagctgccgaggtacagcgccgccgcggccgccaccggcgtggcgcgggcgtcgaagaagagcaagcccaagaagatcccgcagcgcggcctcggcgtggcgcagctcgagaagctccggatcgaggagcagaagatggagggatccatgccggtgtcggggcccacgcacctcggcgtcggcgtcggcgggttcggccacctactcccgatgcaccctccgccacacgcgccgctcccgcttctgccgaggcccggcgcggacggcggcgtgcactgcggctacccttcggtgctctgggacccagcgtcggcgtcggcggtggcggaccccatgaagcacccgttctacaagaggagcctgtgcccgctccctccgcttccaacggcggccatgcgtgcagagtgcacatgctgctggctaccgtcaccagagctgacggtgaagcagtggcatgggcaggtgagcgtgggcctgtcgctgacggcggcgtcgtcgagccacccaacggagcccccttcaaaccaaatgtacagcagcggcggcggcggcgcggagactgcggcggcggaggacgacgaggacaggcacgggagcgcttcggcgtcgtcgtccgcgtcggcgtcgcggccgttctacagcttcatgccggctggtccggttcgcatcgacagaccccggatcgggatcaaggccgacgacgcctctgacggcgtcgacctggaactgaagctgtga

SEQ ID NO: 1542 - DNA, 584 bp, Zea mays
  Peptide Sequence Number=SeqID_43321
ctgagcttctctcccctgacttcacatctgccaacgagccacgcctccgccgctgcctgctcgaaccggcgggatccagctcccccacgcggtctcatcccatccatcagcccggatctcgcgtcccgctccctctgaggaccctatcgtcctcctccttcgccgccgctgggacctccttcgagaagctggagctcgctactgccggcgccgcggacggcaagaggagcatcgacctcgtggaccacggttggtatggggctgcgcatgcacgagcagctgtctcgctgagatggaggatgactccgccgtggtcccatggttcgtcgacgttccagtgcgcttgcacaccagccgttgtgaccttgacggcctgggcctcaacgctgactactgtcgggagaggttacaagacaagcaagcatatctgtggcggccatgagctgtggtcggtggccgccgagaatgtgggctcaactgcggttgtcaccagtgttctcatcccatgttgtggtcgccaactgcggagattcagatatcgttctccaccatggaaaggatgtagggtcgagatggcggactag

SEQ ID NO: 1543 - DNA, 297 bp, Zea mays
  Peptide Sequence Number=SeqID_43322
atgccccagatgctacttgactacaaggtttctgtttctcaggttgaaggtgaacacccattgtgcaaaatcgatagctacatgaaatgtagtgaactaaagtgggttcagcttgaagggccaacttacaatgtttgttatacttttttgcagattgatgtcatgtccaagttcttcaagctgatgatggcttactgtgtgcttgaggttcttcgacctctctatgaatcccctaagataccggcacaaaagataactgttgcgatatgtgtcattgatcaatttcgttgttactag

SEQ ID NO: 1544 - DNA, 1032 bp, Zea mays
  Peptide Sequence Number=SeqID_43323
atgcagctggtgcaccgggcggaggagcacgtatacggcctaggcggcatgcatatggaactctgcgccgatacacagcgacgacagccgcagtgcggtcatgatgagtgcgatggcccggcctgctgctgcatcgtcgtctgccgctcgccaccaccaccaaagcctggaaaggaggcgacgacgctgttccaacgccaactgaaaagtgtgtttgcaatggaggagccaaacaacagtggtgcggggaggaggcgtgagcgggaggagatggatgggagcgcgagccccaagagggtgctgctgcgaggaggcccaggcccaggaacatgtgagggcgacgggtcaccatcaccacccagcgccagcggcggcctgtgctgggcgctcgcaacagcagcagcaggtggctacaacagctacatgcgcatgatgcaagcggccatggggatggctgccggcgctcgtgctccgcctccgcgcacgcttcgtcatccacctcgtcacgcggagacgacggtggagcccagccgggggccgggaataaagcggcaggcgcagatgcagtcggcgtcggcgcggcccggcgcacaaggcggcgaacacgccgcgccagctcttcgtcctcgcagcaccagcagcagcgagcagctcatcacattctcgggcttcgtggtggcgcagaagcagccgcctcctcctcctcctccctgctgcagccgtgaccaccctttcgagatggtcggcacggctctcatcgctcatggcgcctctgccgaagcgcgctgcggcctggagacgccgccgaggctgcccgcagtggccgaacaagcaggcggcgatccctgctggacgtcgtcggcgggttcagaagacgaccacgacgaggaggaggacggctgctcgctctcgctgtccctagctacgagaagcagccgcagcagcggcgacgagggcggccggctctcgcctacggcggccacgtcgtgggggagccagatcagcctcgacctgtccttgtccacgctatag

SEQ ID NO: 1545 - DNA, 1074 bp, Zea mays
  Peptide Sequence Number=SeqID_43324
atgcccgccccgcacatccccgtgatgcccatggacgagaggagggagatggattcggtgacggacgcccaccgcgtcgcgtggctccagcacggcctcctcgacctcctcgtgctccgccaactccaccccatccgccgaagcatctgcctccacctccacggggacgctaccgtccgtcatcctatcatggatggcgcgcgtggccacgggggacagctactactacccgaggcggcctccgcacgcaggttctttgcaggcgccagggaccggaggctcttcttctatgaccacgccatgggggaggggaggggtccgacgctaccgagcgctgcagcctggccgttcttaggaggagggccaccagcggcttcccgcaagcccccgcgggtgcatcgccatctcaccccccaccccaccgctccctcaacccgcatcccgctggtttgctcgatctccgcccagatctgcaatccatggagtggtcctcgccccagcctctccaaccgcgttctccatggattccgcttcctcggcaaagatcgacgcaatccatggagtctccccacctgcgcccgaccccttcatgaccacatcatcgcggagaggaagcggcggcagaagatcaaccagcgcttcatcgagctctccaccgtcatccccggcctcaagaaggcaaggaagaagctcgtggcaatgctgcggcagatgatcgctgaccggaggtcctctggctgcacccgagacgacatgctggacgcgctgctcagcggcaacgagggtaccagggcgaagctcagcgacgaccaaatcatcgaccttctcatcaccctcatatactctgggtacgagactgtgtcgaccacctcgatgatggcggtgaagtacctgtccgacaaccccaaagctctcggacagataaggaaagagcaccttgacatcaggaaggctaagtcgccagaggatccccttgactggaacgattacaagtccatgaccttcaccaaagctattgagctccccttacattctacagatgccagtggaagctccacgatgtatatggtgtga

SEQ ID NO: 1546 - DNA, 1104 bp, Zea mays
  Peptide Sequence Number=SeqID_43325
atgaatgatttgggtgctcttcaccactttctagggattgatgttgagcatcatctggatatcctaaaccggcagtacaccctagatatcctaaatcttgttgacgctcttcagtatctcaccttcaccaggctcgacaacgcttatgttgtccgctgcgagacacagacacaagcaagcgggcaagcagcgaaagcaaagcaaccacccccgcccccgacctcgccgcccatggcgctcagcttccacacgacaaccgccccgctgttcggacaccgcatccccgccccggacatgagcttcctccatgacgactttcactccgaggtcaccgacgcgctgctcggcttcgtgtacgacccgctggacgcctccaacgccgcgctcgacgacctcctcggcctccctcccagcgacgacgcggccttcctcgccccgatcgacggcgccaccgaggccaagtggcaatgcggcaagaggcagcgcattggcggtggcaaccagcaggtgccggcgctggcggcggctccgatgatcgacgagttcgtcctgccactgccagtgccactgccactgccacagccgcccccgcccgcggcgcccctgctccctgtcccggtcccggtcccgacgcaggttccggagcccgtcgtgttcgtgcgaggcgcggacggcaacaaggccggcggagcgtgccagtccgtgcagaactcggcggcgaggcagcgccgcaagcggatcagcgagaagacggccgagctggcgcggctcatccccggagcaaacaagctcaacaccgccgagatgctggaggaggccagtcgccacgtgaagctcctgcaggcgcaggtcggcatgctcgccctcatgcgcgccgccggctcaagcgaggacgataagatgccgtcggccatcacggcgcaggagcggatgcacgcgctgctggcgtgcggcagcgtgcaggagcggctggccgccgagggcaggtgcctggtgccgacgagtctggtggacgccgtggccaaggactacgccgtcgtcaagggcaacccggtggtgcgcagggacctcggccggttcgtggcgtcgctgcagggccagtga

SEQ ID NO: 1547 - DNA, 978 bp, Zea mays
  Peptide Sequence Number=SeqID_43326
atgcaccagcccagccgtgccaaccctgccctccacctagcactgaccggtgggacccgcacttcggctgtctgcccacgcgtggagacctacttgggcaccgtcgtgtggggcctggtagtcaatctcactggctcgcccacgcttgctggcgtttctgctattgacaggtgggcctgcctcgtcagctggttctcccacgccgtgagcttcgcaacaaatccgagctccacggcaaccacccgcgtggagtccgccacagccccactgccgcgcagccgccttgcttccgagccgacgggcgggacccatccgccaggcgcccttcgccttaggtcactacgccgttgggcccgcgtgtctgccgctgtgcgccactgtagatcttcccaggcaactgctcaccgagttcgccgccaggttaagcgcagctgcacccaactaacatcgccggactataaagggggtaggtcacgggttcttccttctctctttgttcttcccttaatcccaaccgccactgttaccgtggggaagaagggcgtaatcgcggccacctccattggaccacctccgcgccgccgtgagtttatcccgggctacagcactgggtggtcgaggaatcagcggggatggcatcaccgccgcgtggagaatccgggtggagcccgattgaatcggattccaaccgtatcaaggaagaatcgctcgccggtgcgggcgctctgccttcagcgtcgctcttgccgtggtccgaggttacggcgccattattgtaggtacggattctcagtagagtttcaccttgattctaggatgggtaattgctcctcgtatggccggttggaccatgggagtgccgcatcggctgtgcgccggtggaaccccgccgtgggtgaccctgacgccgccgcacggtcggttatgggaggaagaacggtaggggaccgtttgatcttgacggacggtcaggattag

SEQ ID NO: 1548 - DNA, 2283 bp, Zea mays
  Peptide Sequence Number=SeqID_43327
cggagcggctgccgcgcgaacccgaggctggcgagttccggaggccgatcttccttggagcaccggacatgtccggtgcacaccggacagtccgcgacaacgggtccgaattcaagaaccttcaagtggaggagtttcttgaggaggaagggatcaagcacgagttctccgctccctacacaccacagcaaaatggtgtggtagagaggaagaacaggacgctaatcgatatggcgaggacaatgcttggagaattcaagacccccgagtgtttctggtcggaagccgtgaacacggcttgccacgccatcaacagggtctaccttcatcgcctcctcaagaagacttcgtatgagctgctaaccggtaacaaacccaatgtatcttactttcgtgtatttgggagcaagtgctacattctagtaaagaagggtagaaattctaagtttgctcccaaagctgtagaagggtttttgttaggttatgactcaaatacaaaggcgtatagagtcttcaacaaatcatcgggtttggttgaagtctctagcgacattttatttgatgagactaatggctctccaagagagcaagttattgattgtgatgatgtagatgaagaagatgttccgacggccgctatacgaaccatggcgattggagaagtgcggccacaggaacaagatgaacgtgatcaaccttcttcctcaacaacggtgcatcccccaactcaagacgatgaacaggttcatcaaaaggagacgtgtgatcaagggggagcacaagatgatcaagtaatggaggaagaaacacaaccagcacctccaacccaagttcgagcagtgattcaaagggatcatcccgtcgaccaaattttgggtgacattagcaagggagtaactactcgatctcgattagttaatttttgtgagcattactcctttgtctcttctattgagcctttcagggtagaggaggccttgctagatccggattgggtattggccatgcaggaagaactcaacaacttcaagcgcaatgaagtttggacactggtgcctcgtcccaagcaaaatgttgtgggaaccaagtgggtgttccgcaacaaacaggacgagcacggggtggtgacgaggaacaaggctcgacttgtggcaaaaggttatgcccaagtcgcaggtttggactttgaggagacatttgctcctgtggctaggctagaatcaattcgtatcttgctagcatatgccgctcaccattctttcaggttgttccaaatggatgtgaagagcgctttcctcaacgggccaatcaaggaggaggtgtacgtggagcaaccccctggcttcgaggatgaacggtaccccgaccatgtgtgtaagctctctaaggcgctctatggacttaagcaagccccaagagcatggtatgaatgccttagagactttttacttgctaatgctttcaaggttgggaaagccgatccaactctgttcactaagacatgtgatggtgatttgtttgtgtgccaaatttatgtcgatgacataatatttggttctactaaccaaaagtcttgtgaagagtttagcagggtgatgacgcagaaattcgagatgtcgatgatgggcgagttgaactacttccttgggttccaagtgaagcaactcaaggacggcaccttcatctcccaaacaaagtacacgcaagacttgctgaagcggtttgggatgaaggacgccaagcccgcaaagactccaatggggaccgacagacacaccgacctcaacaaaggagttgctacgccttgcttcgggctctggtatccaaaggggtctacctttgacttggttggatactcagactctgactatgctggatgtaaggtcgataggaagagtacatcagggacgtgccaattcttaggaaggtccctggtgtcgtggaactctaagaaacaaacctccgttgccctatccaccgctgaggccgagtacgttgccgcaggacagtgttgcgcgcaactgctttggatgaggcaaaccctccgggactttggctacaatctgagcaaagtcccactcctatgtgataatgagagtgctatccgcatggcggaaaatcctgttgagcacagccgcacaaagcacatagacatccggcatcacttcttgagagaccaccagcaaaagggagatatcgaagtgtttcatgttagcaccgagaaccagctagccgatatctttaccaagcctctagatgagaagaccttttgcaggttgcgta

SEQ ID NO: 1549 - DNA, 303 bp, Zea mays
  Peptide Sequence Number=SeqID_43328
atgagctacagtacgcggcatccgccctggggtcgcaagccgcctgctaggacatcccgggagtctcgtttgccgacgccacctgtcggcatgaatcagcgaagaaatatgaaaggtcatcttgccttgcaaaaaaatgtaatcatcaaggatacaatggagaacgatgagcagaaggtgggagctcaaatagtaaggagggccctgagctacccacttaaattgattgctaaaaatgtttgtgcaatggcagcgttgtcactaaaaaggtgtgagttctttattattttacatttgacttag

SEQ ID NO: 1550 - DNA, 792 bp, Zea mays
  Peptide Sequence Number=SeqID_43329
atggatctctgttcgattgttcaattggcccatattccatctttggatcttagttttgcactaatggcgcaagccttttcgaaaaccaatgctctgaactgcactctgtctggcttattttggagctgtctgaatctggttcgaaattggatatgggcggcaattttgcacttgtgcaatcaaaattcgcaacagtcgtttttcggcttggcgagtcgaattcgcaacaatgtttgggcgccagagtggctcgtgaaagggggtgcagcgtggcgttccacgggcttagaatatcctgttccctggacgcggtcctttccatgtcacttctcgcctggcggccgctgcggcggtagcgatcccgacgattttgttgttagcgatgggactagaggccaggcgggccactgcgccagtggtcgcaaccctcgccgctggtatggctgtgcccccgccttcgatcggctgccttcgcgttggcggcagccggcagctggtcccccaacctccaccccccaactgatttgcttgctctccacaaggcccaccttccgctgcggcgtgatcagctccagcatccgcgtacgcagttacgcacagtcttactgggctgttctacctgtaaccttctccaatcttctgcatatcgctggacaaaagcagccgaactttaggaccagacagattcatctatgtgccaaaatcttattaacagttggcttgcctggatactatgatcccggccggtatcatgatgttgcttctgtcaagagaaatcaaccatttaaatag

SEQ ID NO: 1551 - DNA, 375 bp, Zea mays
  Peptide Sequence Number=SeqID_43330
atgccgagtcagctcccgttggaaagggtgagggccccaagaaatggctgcatccatgacggcaaaagcgcgctcgatcagctcacctgtcgaaacaatgtcatcaagacacaggggttcaggacaggtatttctgctgctaataatgacacggattcagagtaccggaactacctaccgcctcaagaaactaaacacctgaagcacccactaataataaatccgaaaggggattcatttcacatcacatcttgtttaacagaagcccattcccagtatccaatgaacgagccagccaatgatggcgacatccctcagcctgcaaccagcagcaaaacaaaacaacaaaaaagggaaaggtggggtccaacctag

SEQ ID NO: 1552 - DNA, 1830 bp, Zea mays
  Peptide Sequence Number=SeqID_43331
atggcgccggtcagtttgcctcctggtttcaggttccaccccactgacgaggaactcatcatctactaccttaagaggaagatcaacgggagacagattgagctcgaaatcattccggaggttgatctttacaagtgcgagccatgggatttgccagaaaaatcatttcttccaagcaaagaccttgaatggtacttcttcagcccccgggaccgcaagtacccgaatgggtcaaggacaaaccgtgcaacaaaatctgggtactggaaggcaaccggcaaggaccgaaaagtgaactcgcataggcgtgcagttggtatgaagaagaccctggtgtactatcggggccgagctccacatggttctcgcaccgattgggtcatgcacgagtaccgcctcgacgagagggaatgcgagactgacacgggcttacaggatgcatacgctttatgccgagtgttcaagaagacagcgcctgggccaaaaatcatagagcattatggcgcagtgcaccatcccatcgaacaccctcagtggatggcagaggcaggcagtgttgaccgccactccccaacgctggacttgtccagtgacgctagaggtgacgacttcgagagcagcagcttctcgttcccgacggaggcgcccagcatggactccatgcacgggatgcagatgagcgcaccccacgaggatggcaaatggatgcagttcctgagcgaagacgccttcaacgccaccaataaccctttcttcatgaacccaccttcttcttcaagcttcccatgcctcccgtccaaggtggatgtcgcactggagtgtgcaaggattcagcacaggctctcgttgcctcccctggaggtggaggacttcccacaggacgtcagcctcgacaccaaggcgagcgtgctccgcagcaaccccaacgaggtcgacatcctccaagagttcctctccgtggcgtcggcctcacaggagctcatcaatggcgccaccagcagctgctacgctgcagagttgtggccatcaggcgcgggcacaagcagcaccagcacccactacgtcaacgaactgtcttccctcgttgagctcggggtgaaggccaaagaggaggcagacaacttctactatatggactgcattgttggaacatctgtagggttctcatccaagtcgtcggtccaagtcgatgaacaggccgttaggttggttgagatcgctgacatcgaggggttgaagcaggaagagaagaggcaggtagagaaccttagaggtgtgcggcttcacaacaatgacctaggagagattgttgtacaaggagatgaaagcaatccaacggactgcatcacacaataccccatatcagattattctgctgacaatttaggagaagccggtcacctggccgatcccactgacgttggcggcggcctagccactgcacccatcttctcgcaatctcagcctgacgacttcgctattgggttcggtgacgtcgacgtcaaccctaatgcatctttcgacctgtacgagagggtcgacgtcaagcatgggctcttcgtctcaacggccggtgcgccgaagacattcttccaccacgttgagccatcgaagaaggtcagcgtctacctgagtcccgtagcgagcgacgtcgtcggcaaggcgaccgagaagttccattcccccattactgtgacagcaaccaaagcttccgtttttagcaagttgaaggcgctcgtcactcgtcagggacaaattcctggtggggaagacgcctccatcatgccgccggaggtccttaggcagcaaagaaatagcggcagtgagtga

SEQ ID NO: 1553 - DNA, 1215 bp, Zea mays
  Peptide Sequence Number=SeqID_43332
atgtactcgtggccgggaaaaatcatgtgcaacacacaacagataacactagatcaggaagggggtgaggaaaaccatccaacaagagttcaagaactggagaacaaggttggcaaaggtagggatgttggacttaatcagattgcactatttgaaggaaaagttgctggtggaaatggtgaacaagttcttagccgagacatatatagactcggacaactttttgactttttcaggatgttatccttctacgtgacaactgttggattctacttctgtactatgctaaccgtgctgaccgtgtacatatttctctatgggaaaatgtatctggccttatctggtgttggagaatcaattcaaaatagagcggatatactgcagaacgcagccttgaatgctgctctgaacactcaatttcttttccagattggtgtatttactgctgttcccatgattcttggtttcatccttgaatcaggtgttttaacggcttttgttcagtttattacaatgcagttccaaatgtgctctgtattttttactttctcacttggaacaagaacccactactttggccgtgcaatattacatggaggtgcaaagtatagagcaaccggtagaggttttgtggtacgacatatcaagtttgctgagaactaccgtatttattctcgaagccattttgtgaaagggatggaggttgcacttttgttggtgatcttcctagcgtatgggtttaacaatggtggagcagttggctatattttactctctataagcagttggattatggcattgtcttggctttttgctccctatttatttaacccatctggatttgaatggcagaagattgttgaggatttcagagactggacaaattggctgttttatcgaggtggtattggtgttaaaggagaagaaagctgggaagcttggtgggaagaagaactgggcctgtttgggtctatacttaagttgccaaaaattgccacatattctatgtcacacttgcctaaggttaggcgctcaaattctgcgccacagtttaccatgtctaagggaatcttgccacacttttacaagtcattgacgagtgtgacctacgcagcaggaaaaacttgccacagctgtggctacaaaccaaacacatgcctaaccctgtcaaacttgcctaaccttaggtatggcaagttgttgcaagttaggtag

SEQ ID NO: 1554 - DNA, 697 bp, Zea mays
  Peptide Sequence Number=SeqID_43333
atgcagattcttgatcagatgttctcggaaaacctgacgccgaggatcaccatacactctgcattcatcaaggggtacttctacgctgggagaatagaagatgcctgcaagtatgtcagtgacatgagcaccagggacagacattctgtgaaccggaactacagcctgctcgctaagctgctgtggaagtcggggaggaccattgatgcaggcagagtcctatatgagctgatggagaagggcctcagacctgaccattctgcttatgttaaagtggccaaggatctgcacaagatgggcaagggtaatctggcttgtgaactgaagatgatgtttcaaaggttcagcgtcaatagcagatcagaaacacatcatcaacccatatctggctcaaacgtcgtcgatgataaacggtcgatggttttgtcaactgctaccataggtcgctggcgagccatttcggtgccgccccagcctactcgaactaggttgcggcctggtactcgttcctatcaacgagaacacccatatcgactggtggtgattctggtgcatcccttcccatggctttcgctgaagatcgtgtgggggcatatggaggcatcgaacgtgcaactggcggttgttgtgaaggacatccagtccaccatagtagagctcgccaaggttatcatcgactcagtgcagccgatgggag

SEQ ID NO: 1555 - DNA, 156 bp, Zea mays
  Peptide Sequence Number=SeqID_43334
atgggaacgatgatatttcaaaaggtaggcataggatcagcatcatggaaagatctagacattaggaaggtacaagataagcatcaaggtaaagatcgagggatgacaagggttaaggtgatgagggacaaacgcacaataaaagatgtattttag

SEQ ID NO: 1556 - DNA, 192 bp, Zea mays
  Peptide Sequence Number=SeqID_43335
atggatgccacgacaagattagcggagggaggggagggcgagggcggagccgtggtgaagcaagtggtggacgcccacgctgaaggtcagaggacaagcaagcctgcactgcaaagtgcaatccttcctttgaagggtatgtttacgttcattgttgcaatagtatgggggctttacaaaattcctagatga

SEQ ID NO: 1557 - DNA, 1011 bp, Zea mays
  Peptide Sequence Number=SeqID_43336
atgacgacggtggcggtaatggaacagtgggcagacaagcagcagcaggcggccagcaccaacgccgcagcggcggcggcgcagatgcccttcctggcgctgctccagggcgcgggcgttgtggtggaggcggagcagcaggaggagcagcaccacgacgggcgcaagcggcaggccttcgcgcgcgccgtctccgaccttgatctgctcgagagctgcgtcacgcaggcggtagctcccgcagcggcggcgtctgcgcccgtggccggcaggaccgagaggcggaggaagcggcagaggccccgcgcgcgcgccgcgccgccgccggagaagcgcaagaagcccgaggaggccgagagccagcgtatgacgcacattgctgtggagcgcaaccggcggcgcctcatgaacgaccacctcgcctcgctccgctccctcatcccttccagctacaccccgcgcgtaagctgccagcccatgcaacgcccatgcatgcagacatcatctacgactaggagtactgttcgtatacactgcacagcactccacacgaggcagacagtgctgtgctgtgcctgtgttccgtttctgacgacgcgtgccgcgcgatgcaacgatcgcatgcagggcgaccaggccacggtggtgggtggcgcgatcgactacgtgaagcagctggagcagcagctggtggcgctgcaggcggccgcggccgcgcggcgtggcgtggccggcaccggcgccgccgcggtggcaacggtcgcgtcggacggcgtgttcgtgtccccgcagtacgcgagctactcggactcgcgcggcgccggcgccggcgtggacgtggaggcgacggccgcggtgggcgggcacgtgcgcgtgcgcgtcgcggggaggcggtggcccgggcggctcgtgcgcgtcgtcgccgcgctcgaggacctccgcctcgcggtcttgcacctcgccgtcacctccgtcggacacgacgccgtcgtgtactgcttcaacctcaag

SEQ ID NO: 1558 - DNA, 1036 bp, Zea mays
  Peptide Sequence Number=SeqID_43337
atgggaaagggttttttaatgggcatagatatttttcacgggtacgagtttgggacgacaaaacccagcgggtttatacccattgccatctctactatgaaggttgagagtgagacggtaccatcgcagccactaccacaaccacaaccacaatcacagacagggctgccatggcatctgtacgaacaggccaccctcaaaaaattccgtacgaacagtccaaacgcgcagggacagggccagggcctcagtgtcagggagtcaggggccacagccgcagcgggcacggtcctcggcgaaactggtacggcttcgttgtctcgtgtcgtctccatcttgcagcagcgcctcgtcacggcctctctgggcggcgcggtgcctgccagcgccacgcgcggcaggttacagctattagctacaggctgcaccgcacacgcaaaggcggccgcggctacgccacgacagcttcttttggtgcgggcggggcagcacgccgagaatgattctgcgattcggagcgcgcggaccggcacggtcatccacgacgctcggcgccgcgcggggcaggaagcagaggaggatggatggatggatcggggcaaaaccttttcgcaccaggtaccgtaccagttggctggcaatgatggcatgggcgctttgaccggccgccatggccgatcgagcagcggcgcgcggccccttgctcgctcgtcgcagagtcgcagtcgcagccgcatacgctactgtaggcctgtgccagtgcggcgtggtctgcgccgcgccgctcagcctggcacgcccaggacaggagagtgcatctgtacacggcagcaacggcacacccgatggggcaaagcctgtccgtcctctcctcctcctcctcccagagagacgcatgcgcatgcgctgcagacggacgggtccggcggcaacgacgacagcagagaggacatgcacggcgagacgcagacgcacgcagagatggggtgggcttgcagcctgccactgccagagagacagcagctcaggccagaag

SEQ ID NO: 1559 - DNA, 360 bp, Zea mays
  Peptide Sequence Number=SeqID_43338
atgaattcgtttcatcgcggacgaccggacgtgtccgtcaagtcttcctgcgccgtcctccgcgccggtagtcacccatacccgatcgtaaaccccgcgtggaggccgccggggacgggaagcaggagccgtcggcgtgccaggcgtcgacgtttcgctgagctggcggaggcgtgcgacgccatcccccacgtgctccaaggtactgctatcccactcggcatcgtccggtgcacgcggctgcggactctcaattcggcgccggccttggttttcgcagggaaggacctgatcgcgctggcgcagacgggtccgggaacacgggcgcgttcgtgctgcccatcgtgcagaagctgctaa

SEQ ID NO: 1560 - DNA, 285 bp, Zea mays
  Peptide Sequence Number=SeqID_43339
atggcaacggccgtgcccgccgcctgcctccgcgcgccgtgctcctctccagcggccgtcgcacgccgacttggggccggtggcccgtcgctgcgcaagcggcattgcgccgtcgcgcccgtcgctgccgcctgcggccccgcgccgccgcggctgcttgacaacgaggaggcgcgttgctggcgctttgatgtgcactggccgctcagtgtcagtgggagacgagcttgcagtgtgaatggtttatttggtcaaaactgcgcctctgagtgcgcttctgatctg

SEQ ID NO: 1561 - DNA, 1045 bp, Zea mays
  Peptide Sequence Number=SeqID_43340
gctgccggacagctacgtccggccggagacgcagcggccgcgcctgcgcgaggtcgtccccgacgcggagatccccgtggtggacctcgccgaccccgaccgcgaagccgtcgtcgccagggtcgccgaggcgtgccgcacccacggcttcttccagctgacggcggcgatgatgtcggtggcgtacgaattcttccggctccccgcggaggagaaggccaagctgtactccgacgacccggccaagaagatgcggctgtccaccagcttcaacgtgcgcaaggagacggtgcacaactggcgggactacctccgcctgcactgccacccgctggagcagtacgtccccgactggccggacaacccaccatccttcaggaggaccgtgagcgcgtactgcagtgcggtccgggagctggggttcaggctgtacgtcgccatctccgagggcctgggcctggacggagcgtacatcaaggaggcgctgggcgagcaggagcagcacatggcggtgaacttctacccgaggtgcccggcgccggagctcacgtacgggctgcccgcgcacacggaccccaacgcgctcaccatcctgctcatggaccagcaggtggccggcctgcaggtgctcaaggacggccgctggatcgccgtgaacccgcggcccggcgcgctcgtcgtcaacatcggggaccagctgcaggtgacgtgctcttgtctcgctctcccattattcccaccctctcacctcctctctgcccctggcctccactactgcactgcacctgcacaggcgctgagcaacggcaggtacaggagcgtgtggcaccgcgccgtcgtcaacgccgacaggccgaggatgtcggtggcgtcgttcctctgcccctgcaacgacgcgcgcatcggccccgccgccaggctcctcaccgacggcacgcccgccgtctacagggactacacctacgccgagtactacgccaagttctggagcaggaacctggaccaggagcactgcctcgagctcttcaggaccccgacctcctag

SEQ ID NO: 1562 - DNA, 297 bp, Zea mays
  Peptide Sequence Number=SeqID_43341
atgtggagccttcctccctccctcgtcggttatcctgtcgggctgtcaccatcccatcgccgcatgggcgaagcgcatggcacgtcgccgatcgagacgccaaggccggcggtggacggacgtctggacgagcaggataggactaggaggcccaaacttgccgtcgttttcgccagcctactcctgctggcggttgcaacgacggcgacgggggccgcgccgcagttctaccggcgcgttttcactccacgcggagatataggagagggtccattctatcaaactttctctttttaa

SEQ ID NO: 1563 - DNA, 477 bp, Zea mays
  Peptide Sequence Number=SeqID_43342
atggcgaccaccaccgcgcccaccgccgccgtcgtcgcgccgccggcctcccacgcccgtgagtttggttgccgcagttattcaaataaacgtgttgttgtggtatgccgtgcccacgagccccttgcctggcgacggtggcttggtgcagttgtagaagatgaggttctggttgtcggagctgaccgagagcggaggggcaagccgggacgaggtgttggccgtcgggatgcggcaccctttggtgctagtagtcgtattgaaatatgtaaaccatggtctatccgcgaggagcaaggagcggttgtggtagaagatgctgaggatcttcaaggtgatctcgctttgagaaaatccgaggcgcgggatggcgtcatagcaacgaacctggaacccaaccccgacgccgcagctggtctgcgcggcgccctccgggataagcccaaacgggaaggcgatcttcacgttaccgcatag

SEQ ID NO: 1564 - DNA, 132 bp, Zea mays
  Peptide Sequence Number=SeqID_43343
atgacgaaggtgatgcttgccgaagatattcaaagctcaagaaatggaaaaacaaattataaatgtacctttgaattgatgaaaggtaaaggtacaggcgtgatgcaaaaagcgaatgccaagtcagcgtga

SEQ ID NO: 1565 - DNA, 429 bp, Zea mays
  Peptide Sequence Number=SeqID_43344
atggacagggagggagctcctagagcgctggcgtgggagaggaggagcacctccatggaagaaaaaaagggggcgctggggatgggatggagcagcggcatagtagatctcgggcgtgtcatggggcttgtggtcgcgcgcagggaatcctcggcgccgtggctgctggccagagctggagaagacgactccctgctgcagccgctcgccatgaggaggagcagggagggcgccgcgccctggcagagagggcgcagggagcttggacgccatgggagaggaggagccgagctccctgctggaggaaggatttcgccgcaggggaaggctggcggccatggagcttctgcgcgctggctgctgttgccgtggagcagggaggaggaagggcgcctgctgctgcgcatgggaggaagaaaaggttgctga

SEQ ID NO: 1566 - DNA, 420 bp, Zea mays
  Peptide Sequence Number=SeqID_43345
atgacgaagccactaggttgtgtcttgccccagtacgatagggaggtgtgtggggtagatcatttgccatctttgccagcacacctccaacctggctcagggtttgcatggcctgtgcgatctcaggttgcaagtcatggaaaagaatttgatgcttgtgagaagtctcggagttgtgccaggctacttcacgttatgctcatggatgaggggctcctccccctgcacggttggctcatcatcgaagacggggtcaacctccaccactgcgttgatgtagagtacgtcgagagtgccccttcagtcggcaacacgggagagggatccaaagtggaagacctctctagtggcaaagttgaagacgatgttaaagacaacggccatagagctatcgggaatcgaagccgcacccatacctag

SEQ ID NO: 1567 - DNA, 363 bp, Zea mays
  Peptide Sequence Number=SeqID_43346
atgtgcatatcggatgccgatgaatcgaggattgttcggaatataacccgaagcatcgggtttctagatattgaagagaagctatgccaggccttatggatgcaacaagagaaagaggaaaaggagatttccactcttcaagacaaagtcgcaggacttcagaaattcttagaggaaaaagaagccgagataacatctttgaaagaaaaggttgacaaagttgaaaagaagaatgatgaagcaacgaaaatgcacaatgccgacactttgaagatgaagaagcaagatgaatcgatcaaggagcttcagaccaacctcgaagctgcaaaaaaacattgccaacagagatgtggagaatcataa

SEQ ID NO: 1568 - DNA, 456 bp, Zea mays
  Peptide Sequence Number=SeqID_43347
atggaagaaaaaaagagggcgctggggaggggatggagcaacggcgtagtggatctcgggcgtgtcatggggcttgtgctcgcgcgcaaggaatcctcggcgccgtggctgctggccggggctggagaagacgactccctgctgcagccactcgccatgaggaggagcagggagggcgtcgcgccctggcagagagggcgcagggagcttggacgccacgggagaggaggagtcgagctccctgctggaggaaggagctcgccgcaggggaaggctggcggccatggagctcctgcgcgctggctgctgttgccgtggagcagggaggaagaagggcgcctgctgctgcgcgtgggaggaagaaaaggctgctggcggctgaaaatttttgagggttgggagtgcaaaatagccaagtgcaaggggagaggactcctatttataggcatgtggtag

SEQ ID NO: 1569 - DNA, 1740 bp, Zea mays
  Peptide Sequence Number=SeqID_43348
atgcacgccgatcggaacaagactggcttcctcggccgcccggaattcttcaacgcgctgcgcctggtcaccgtggcgcagagcgggcgtcagctcacgcccgacatagttcagtcggcgctgtatggtcccgccgctgctcgaattccagctcccaagatagccgcaggggcggttcctccacaaatgggtgctgcgggggcgcctaggcctcaggggagtgctgcgatgacgcccacaccagggcaggttggggcggctcagatgaatccggctgccacaccaaggccccagggaagcggtatggtgccgacatctacccaagtaagcgtgccgcaggtgaaccctggtgctgctccaaggccccaagggatcaattctacgatgccagctgcgagtcagggtggtgctctacaagcaactcagtttgctggaccaagggttatgcagccacagccttctaacttgggaattacgcaacagcagccttctagtaccggtttcatgcatccgccacaggttggagctccagcagcttcattacaagctcaagcacctggaatcaatcaaggtttggtcagtggaggcagcatgggaggatctgtcggttggcaaggttggcaaggcggtaatgctgcctcagtgggaggcattccacaagctataccaggagctgctccttcacaggcagcacaaggtggatttggcccaggtttacctagaacaataggtgtggcgctggtacaacaggtacaagcaatgtctccatcgccattgcctccgcagagcaacagtgccggtttgcctcaggattcaaaagctttggtaatgtctggaaatggccctgccatcagttctggatcaagcacagacatcttctctgcacttacacagcagaagccaagcatatctgcacctgcacctcagacaagctcgattccgagctcatccagttttatgcccacgccaactggctcccagaacctgactaatctcacacagtttggttctttgcaaggtagcagccaacgtcaacagactcagcctgttgtaaagcccagtcctgctccagctgcacctgttgtctctgctgggatttctaatccatctccccaatggccaaaaattactcagtctgacatccagaagtacatgaaagtctttggcgatgttgacagggatagagatggcaaaataactggcgcagaagctcgcactctgttcctcagttggaggcttccaagagaggtcctgaagcaagtatgggatttgtctgaccaagacaatgatggcatgctttctttgagagagttttgcgttgctctttatttaatggagaggcaccgagctggaactcctctgcccccagcacttcctgactctcttaggcatgatgagacactgttacgagctacaggcttgccttcaacagcatacaatgggccatcatggcaacagaatcaaggaggattatcacaaagaggccctggagcacctggggtgcctgctggtggtgtgcggccacccttgccaccacatttgcattcacaaactgatggggctagcagaccagggcagccaagatcttacatgtctgggatggataatcatgtggtagttcaaggaaacaaagatgacaaaagtggagtgaaccagtctgtgcaggaggtggcggatcctaagaaggttggctctgtggtggtcaaaaactcaaaatgcacccagtttatgcacctttaa

SEQ ID NO: 1570 - DNA, 189 bp, Zea mays
  Peptide Sequence Number=SeqID_43349
atggttgaggtggagaagcaggtcctggattccagagagaagctggagtattaccgcacaaagatgcaagatcttgttctgtataaaagtcggtgcgacaataggctgaatgagattacagaaagggcgtcctctgataaacgcgagacacactgttatgactggaaaagtatatgggcgccggcctaa

SEQ ID NO: 1571 - DNA, 1193 bp, Zea mays
  Peptide Sequence Number=SeqID_43350
gtgtggagacagaccatacaatccacatggtacgtggtgctgtgctatcaccaacatctactgcacctgcagccaaccaagaacctaccactgctgctcctgccagttccccggcaacaggattgggtggcttgttgcaaagtctgggtactacaggcgctgctgctaacagtgaggggttgtttggatctgccccccctggattagaccaaatgcagcaacagctagctgaaaatccgaacttgatgagggaaatgatgaatatgccactcatgcagaatttgatgaacaatcctgaactcatacgcagtataataatgaacaatcctcaaatgcgcgagctcattgaccgcaatccggatcttgctcatgtcctcaatgatccaagcattatgcgccagacttttgaagcagttcggaatcctgaactcatgagggagatgatgcggaacacagacagagccatgagcaacatcgagtcttctccagaaggattcaacatgctccgtcgcatgtatgaaactgtccaagagccttttctgaatgcaacaacaatgggtagcgagggtgatcgaaattcgaatccattctctgctcttctaggaaatcaggggtctaaccaagcaagagactcagctgcaaatggaacaactagagcttcagaccccacatcagggtctccagctccaaatactaatccacttccgaatccttggggctcaaatgcagatttgggaagtacgcatggtgccagtggtggtggctctgatgctaccttgttgactcaagttttgcaaaacccaactatgatgcagatgatgcagaacattatgtctaatcctcagtccatgaatcagctgcttaatatgaatccaaatgtacgtaacatgatggaatccaatactcaaatgagagaaatgattgagaatccagaatttcttcgccagttaacatctcctgaaacattgcagggagcggacacaatcaggctctggtgcagcgggcttggtgctggtggtggcctaggtgttccaaatgctcctaatgcaccgccagaagaactgtacgccacacaattagctcagctccaagaaatgggtttctttgacacacaagagaacatccgagccttggccgctaccgctggaaatgttcatgctgcagtggagcgacttcttggaaatatgggctaa

SEQ ID NO: 1572 - DNA, 288 bp, Zea mays
  Peptide Sequence Number=SeqID_43351
atgggcggaggggacgccgacgccggcggcgagcccgcggacgcgcaggccacgctccacatccggtgcaccaacggctccaagttcaccgtgcggaccgacctgggcgccaccgtcggggcgtttaaggcgatcgtcgcccacagctgcgacgtgccggcgccgcagcagcggctgatctacaagggccggatcttgaaggacgagcaaaccctagccagctacgatgcaatgtctgttaatatatttgctgccggaaagacaaggaggtttgctccttggcgatga

SEQ ID NO: 1573 - DNA, 360 bp, Zea mays
  Peptide Sequence Number=SeqID_43352
atggcgaagacccgcatgcctgcgtccccaccccccgcagaaacgccgactccgcagcggcggcgcaagaagaagggccgcccgtccctcctcgacctccagcgccgcagcctccgcctccaggcccaaaaccctagccccgacccctcgcccacccgccgggagcccaaccccttcgacgacgatgaggacgggaccgggagcgggcggcggcgccagaagcgcttcaagagcgtcctatccggcgttgttaaggttgggggcctccctatctcgcgccaaattttcgaaaattgtggggtctggggacctcccccgagggtttttggccgcgggacacgcggcgatgccgaactgtag

SEQ ID NO: 1574 - DNA, 690 bp, Zea mays
  Peptide Sequence Number=SeqID_43353
ccgctggtgctcccgaagaagcggccgctgccgtcccaggcggcggcggcggcgctcgtgcggcgacgctcctccggggccgggttccggcggcgcttccccggcgtccggctccgaccgtggggcaagtacgccgcggagatccgcgacccgcaccagcggaagcgcctgtggctcggcaccttcgacacagcggaggaggccgccgcggcctacgacgacgccgcgctccgcctcaagggctcgcgccacgtcgtcaccggcttccccgctgaggcgcctcccccctggccgcgcctggggctccgtcctcgccgggaggtccccaaggaagcggcggagggcgccgcggaagaggacggagaggccctcgcatcggccccggtcccggcggcagcgcccgcgtcactggattcgcaggcggtggacggcaccgccctggtctgcccgttctcgtctccaatctctgttctccgtcacgccgctgacgaggcgccggccgcacccgccctgccggcgttcgagttcctctattcggggcttggggagctcggcgacctcggctcagcgacggcgccatcgaaggcggtggcggcggagttcgactgcctgccgtggtgggagggcgaggacttcgtgacagtgacaggcctcacggcgtcagccggtgccgccgtcagcgtcatataa

SEQ ID NO: 1575 - DNA, 474 bp, Zea mays
  Peptide Sequence Number=SeqID_43354
atgcccgtcctccactgcccctatggctgccatgggcgagcgctgcccgagcagccgaccgccctttccctaccgttttcagctgccgcgcgctgcctctcctccccgccaggcctccactgcccacttctccggcggctacagcggaaggcaaggagaaggacagcgggcagcggggcagggacggaggggaggccggcgcagcggcgcggcaccggaaccagccccggccgcaccaaggtgtgggtcgagccaccgggcaagagccgcgaccaccaccagccacctcgtgccgccgcccgtcctccactgcccctatggctgccacgggcgagcgctgcccgagcagccgaccaccctttccccaccgtcttcagctgccgcgcgctgccccgcctccccgccaggcctccactgcccacttctccggcggctacagcggaagtcaaggagaaggacagcgggcagcggtag

SEQ ID NO: 1576 - DNA, 186 bp, Zea mays
  Peptide Sequence Number=SeqID_43355
atgtcatattgcataaacacatatccaaatggcgaggcaggttcatccagacaagaagaaaccatgatggaatctggatttcccctctatccgatggaatccagattcagtgccagtccgttttcctgtgattttgggataccagcccaattccccttcatggaggctgtgaaggcctgtgactga

SEQ ID NO: 1577 - DNA, 384 bp, Zea mays
  Peptide Sequence Number=SeqID_43356
atgtcagctcctcgcgcgtggcccggagtggcgcccgctggcgtcccccctcccgcgacgatgctggccttccctaggcgccaatctctcagatttcgtgcattatgtctctgttgtacctatgtgcccgcttgcgagactcccctcctacctggtttttctcttgagagacatgccgagcgtttcagttgccagtgcaggatggtgcggacaaataatgtcaccccatcaggaggaggagatgaccatgaccctcttcgccccttcagacatgacaagggcaaggatgtgtaccttgagcagcatggaggcaagaagaagcagaagttggatagagctactcaagtagtagtagcagcagcagcagctgatccggcagagtaa

SEQ ID NO: 1578 - DNA, 546 bp, Zea mays
  Peptide Sequence Number=SeqID_43357
atggcgaagccgaccgttggcggccagagagccgttggcgcaccggacatgtccggtctatactctttgttgacttttggtggtcggtacgttgaggagtgggtcagggtgttctatgccacaatttgggttggccgtgaccatcagtggatgaggttccagttcgagcgaaatgatgtcactctgcgcactgctcagatccgggagctttttggattccctgagtcgatgacgaggctccacaatgcagctctcgacaccaccagactttcgtttggtttctaccgctcggctcctgaggatatagctctagcttgtgctcccatggatcctttggcctctgagcttagagatgaggatgaggcgatacgccagtttgaggatcagggtgtagttgtagatacttcttcagattcagatgatgaggaccttgggatcccacaaccgccccaccacttcctgtgccaccttgttcccatgatcacaaggccgatagttctagttctgctcctccgtctgctcctccagctatcgatccagccatga

SEQ ID NO: 1579 - DNA, 183 bp, Zea mays
  Peptide Sequence Number=SeqID_43358
atgacccatatccttcagcatactggtgttcccgtgcctctagtgcagtctgctccactgccagctcttcaggcttcagtggtcatcaaagctatcagtgctcaaccactagtgccccctatttcagcagtcgcttctcttgccgtggctgacactatttctgctccagcaccagtagcttag

SEQ ID NO: 1580 - DNA, 426 bp, Zea mays
  Peptide Sequence Number=SeqID_43359
atggcggccgcatgcctcgcgcccgccccgcctcctctctgcgcgtgcccccttcccccgcaaaccccgacctcaagccggcaatggcggccacatgccccgtgcccgccccgcataccccacgcccgccccgatcaattcgccgtcagcaacggcggccacgcatgccccgatcaattcaccatcgcaaccgcaactgcacccgcctaccacacgattctagtgctccaaaccactgctcaatccttcgcccccttcatttccccgccccttcattcccacgccagtgtgacgctggagaggaaggacgaaggagaaggagcttgccccgccaccggagaggaaggatatctgatattgctcaaccgtgcaggcctcgatcaaggccatggcaaacgtctggaggaaattttcttaaaatggtaa

SEQ ID NO: 1581 - DNA, 372 bp, Zea mays
  Peptide Sequence Number=SeqID_43360
atgggctgggcgcgacgcagccatggggtaaggcgaggagcagggaaccgagcagagggtctcctcgcgcggccctgtgcgtgcgactggtggagctcacccacgacgctgctgtggccagaggagaagagcagattttcagagatttacagatattttaaattggtatttttagcaatgtacattggatcaatacgctatttaactacgcattttattcccccgaatctcgaaacggaaatccgaggactaacgattttggctaaattttgtttagataacttgtgtgactattctgggcatggtgtaaacggactgaaccagagtacatcgaattcgaccttttaccctgcgactgatcccgatttttag

SEQ ID NO: 1582 - DNA, 243 bp, Zea mays
  Peptide Sequence Number=SeqID_43361
atgggattttcagagatttacagatattttaaattggtatttttagcaatgtacattggatcaatacgctattcaactacacattttattcccccgaatctcgaaacagaaatccgaggactaacgattttggctaaattttgtttagataacttgtgtgactattctgggcatggtataaacggactgaccaagagtacatcgaattcgaccttttaccctgcgactgatcccgatttttag

SEQ ID NO: 1583 - DNA, 706 bp, Zea mays
  Peptide Sequence Number=SeqID_43362
gaacaccatctgccatggggactgcaggggggctagctcggcctgggcaccgccctgggagagcaagggctcggcactaccgcacgcagggctccctgcactggctggccgcgccgacgcgcaggcaggccacgccgccgcgcgcaggggcccttgttgccagtcgagcacagggggaggggaaaccgcgcatgaggacatcgcacgctatggccatggcctgctcaaccaagccaagggagtcatgcgaaggtggggctacgcacgctggggaagctcatcggcgagcgagatctgcaggggctcgccacgggagggcagagggtcggacgcgcggtcgtggctggcgggccgcagcgctgaccaactgtcgcagtgcaccaggggaggagcgcggggatggggctgcagggacgaggacgagctaggcacgctgcgcgggtggccggggctgggtgccgcgcggagctgcgggggcgggcaaaggagaaacgcgcacacgcgctacgctaccgcggcactacgctgggcgggcgagcatccaccggagcacaagggatggacgacatcgaggatggcgaccgccacgacggctctatcgatctgggcgccggtggggtgtggcgaggcagctgcgcgcgcaacacgctgggcgctgcacgacgaggcgaggcaaaacgaggtggccgcaattgattctgaatag

SEQ ID NO: 1584 - DNA, 1470 bp, Zea mays
  Peptide Sequence Number=SeqID_43363
atggtgaaggcggtgctcggcgacgaggagcacctcaaggcctttgaggaaacgctcgcctcgccctcctctcctccatgtcaagcccaggtgggcctcgtcgtcggcaagctcagctcttcctccgaccgtgccctcgtctacgcgttgctccccacgccgctcaccgacgccgccgcccccgcatgctctctccgcgccgcccccaagtccaagccttccaagggcggcggcaaagctccttcctcctcggacgcctctctcgacttcgatgtcgaatggatctccgagcacgcgcggcaggtgtctaggatgctgctcggtggtatgagtgtcatgggtgcttacgtatgggcttccgaggcatcattcaaggccacatcccctgctgtcctgtcgcaggtcattcgagcgatttgccaagcttgctatggcagtgcatccggaagtatcccccctcgtaaatctagtttcttcagtcccatttcattcttgtgtggagttatcagatgggcctgccgtatatgcgaggttgcatcaggaagtctgcgtccgtgcgattttaagtacagcaaactattagcttctcttcaaactttcagatgcacatataattttgagataaggttgacatctgttcaagctgagccgtttaagaaaattattttgaaggcaatcagtcatctcacagaggaagtgcagaatgccagagctttggtagatgggcaactgttttcagaagagatgaacataagtacagaggacccacaccaagttgattttcttgtgccattcaagaatgctgtgcctgttgaagaatgcagtttagagggagttgctgggctcattcgctttattggatctgtcagcgccttggcatatttaggccctaaagaatctatttcagaagctatatctgatctaaaggcggacatcgttacaagtctaaaaagccggttggatatcatccttgatgaggcagatgatggccctgccactgctgaagtggagaaatcaccatctcagaaggccactcaagttatatttcatgagttgagagaaccttacagtttttcattcccgagaagggtcctgataccttggctgagcggcacctatgtttgtgattacttgcaacaaccagagacagcagaggatgcagtggatcgcttcaaggaagtgataggcgcactggaaacagccgtggagaggtcttcaatcctggaaccagaaagcgcagcagcagcttgtagcgtactagaatccttttgggatatggtgcctggatctggcagcggaggacaaggtggatccagcaagctgaaggacagtcattctatacagaaggatgattcaagcaaaggacaaggcggtttgcatttcagtatcgtagccgctctgattgtgctactggttgctctgatagctggactgttcttcactggttccgccggatacccagtaacgtaa

SEQ ID NO: 1585 - DNA, 234 bp, Zea mays
  Peptide Sequence Number=SeqID_43364
atgaccaagtcgaagggtggttcggtggacgcgcgcacgctggtggcgcacgtcctggcagcgggcaccgtcgtgctggtgctcctgtggtgcatccacttccgcggcggtgctctctgtggaggcgctgacggccttcatctgtataagaaggaaggtctgaacccgttacaagtcgaatctcaagttagtcccgcagatttagctaacaaattccgaaatccggagccctaa

SEQ ID NO: 1586 - DNA, 258 bp, Zea mays
  Peptide Sequence Number=SeqID_43365
atgtcctccgcctcgtgcctcgtccatcccgctccaaggttccgggtttggctcctgcctctcccctcctccatcgccgtgaggccgttgcttggcttcaggcctcggtgtggggctccagcgaagagctctggtggtgcagaggtgaaaaaggaagaggtgagtagcttaaacggggagcaggagcagaatttgaaggacgacgattggttcctgcaactgcagaaggcaagtctgatttgcttgaattgtttgtaa

SEQ ID NO: 1587 - DNA, 207 bp, Zea mays
  Peptide Sequence Number=SeqID_43366
atggagcagcttgacgctcccaacagatgcgagtcattctcctcctccctacgtcctttccccctccacgactccataaccgtgccggctccggccgaatctaaaggaatcccatccccgcccccaatgccgctgttctgctcgcattggccgaatctgggaatgaggaacccacggttccacgacctcctctccgtggaagcctaa

SEQ ID NO: 1588 - DNA, 1962 bp, Zea mays
  Peptide Sequence Number=SeqID_43367
atggtattggggggaggccctctaggcgccatcattggccgctacccctcctcctccgccgccgccggtgacgatgaacaaggggacccgggacccggaggaggcgtcattcgccatgaccgcaagtgccgggactggcccttcctcgtcctcttcgccgccttctgggttgccatgattgtcaactccagcttcggattcaaccagggcaacccactcaggctgacatacggactggactacaaagggaacatatgtggcagcaggcatgccgatcctgatttgtatcagttagatgttcgctattgggtgaaccccaaccaggtctaccaaagtggcctcaaaaccagtcacatcgagctacctgatgctaaaaccatctgcctgatggaatgcccacttcctgccgaagatggcttgaattttgtttgtgattatccagaaggtgacatacgcctctctgtcgacgactggattgacagggactacgattacttcgagtacctcacaccagacatgaggaatagttctcttcagctgcagggtccatgttaccctgtcatatttccaagtgtaaatgtctactggagctgccagtttattgcacgggcatccaatgcctctttaaagcattggaaggacatgggtggtgtcaccatcgacgaaaacatgctaatagacagaacaattcatgatgcaattaatagcaaatctgccgtcatgaagagatatgttgcagatattgggaagtcctggcctgtgttaatcctttgtgggggattactccctttgttcctatctatgatctggttactcatgattcgcttttttgttgctgggatgtcttggataacagtggtggtcttcaatgctcttgtggtatctgttacaatgttcttctatataaaagctggttggattggccatgatcctttgactgttgtaattggtgaaagtgatccttacgttagcataggtggacgagagataaatcaccttcatgctgcttccgtcttgatgacagtgataatgatacttgctttcctgacttcaatagctatcgctcggcgcattatgaaagcaacatcagtcctaaaggttgctgcaaaggtcgttggcgaagtgcaggcacttattatttttccagtcgtgccatacttgatcctcgctatcttttacactttctggttttcagcagcacttcatcttttcagcgccggtcaagttatacaaaatgattgcaatacagattgctgttcctacgatctgaaacttggcaaacacgatatccctttccataccgtggtatcttccctgaagcgcttgttgcgctatagcctgggatctgtggctctgggctcactgatagtgtccatcgtagagtgggtgcgattcatactagaatcactacgccgcaggctgaaatttgttgactctgcccgcggaagccggttcgggaagacggtatcatcctcatcccagtgctgcttaggctgcatcgattggaccctgaaatcggtgaatcgaaatgcctatgtcatgattgccatcacagggaaaggattctgcaaggcttccgtgctagcgactgggctgatcatgaacaacgtgttgcgcgtcgggaaggtgaatgtcattggggatgtgatcctcctgttgggcaaactttgtgttagcctgttgtgtgcgctgtttgccttccttatgctggacgagcacaagtacagatctgggcataacaagatctcatcaccgctggtccccgtgctgctgtcgtgggcgctgggctatatagttgcgaagcttttcttcgcagtggtggaggtgtcgatcgacacaatggtcctgtcattctgccaggactcggaagagcatcaggggaacgcgcggtatgctcccccgctgctgatggagacattggacgaggagagcgagttgcgaaggctgacacaggggccatga

SEQ ID NO: 1589 - DNA, 1617 bp, Zea mays
  Peptide Sequence Number=SeqID_43368
atggccaactttatcccttcgaatccgtttatggctaggctccacggagacgggaaccaaagagctggagctgagcatcttgctcgagttcaagaacttgaaaatggcaacacggaattggagagggaaaacaaaatgctcttgtccaagatcgctgagaaggaagttgagaaggacgcccttgtaaaccgtttgaatgatctcgagcggaatgtagtgccctctttgaaaaaaagcttgaatgacatttatttggagaaagatgctgctgtagttgctaaggaggatgctctagctcaactcaggagcatgaagaaacgactcaaggaagcagaggaagaacagtatagggcagaagaagactcggcctccttgagagcacagctaaataccctgcagcagcaaatgggccacacttacagtggatatacaatgggaacatcaagtgaggaatctgttgccatggaaaaggagatacaagatttacaggcacagctaaagcaagagtcactgctaaggcaacaggagcaacaacaattagctgaacaatcccagctgaggcaacaagagcaagaaaaactagccaaagagcaaacccgtattgcttctctggaggctgaaaagcaacagttggaagaccaaattactatgttgacaaagaaagctacaggtatggaggatacatatacttacattattctgtcttttatttatgtgaggaatgttagaacttgccggagatacaatgatgaagatgaacagttgaacacatcgccggtgaggtcacaaccaaagcaaaaaactcatgcgaatagtggaggtggtcttggttttgtgctatcaaactcgggattttttcctgatagtattgctatgcttaatgtcttcgattacttcactatccatactatagtagcactactgccacatgctagtatctcgatggtgctgcaaagtcacaattcacaaatgaacacaccctttggtgtgctgctggagcaaaaggcctccaggagttacttgccagggtgttctattaggctagtgctcttgacttatggtcatctacccatcttggaggacgcttctgagtttgctgcacgcaaggcattttcaatgcaagatagggaaaaacttgaacagcagttgcatgacatggctttgatgattgagaggctagaggggagtcgtcaaaaactgctaatggagtctcaaatgttgattattttttaccgcggtagacagattgattctcaatcgtcagaaatagagaaactgtttgaggagaactcagccttatctgcttcttatcaagaagccattgatgttactgtacaatgggaaaaccaggttagagactgtctgaagcaaaatgaagagctccgttctcacttggagaaactaagacttgaacaagttagcctgttgaaagatcagcttataaaagaacagagcagatctgaggggttgtcggcagagataatgaaactttcagctgagcttaggaaagcagtccatgcacagaataaccttgcacgcttatacagacctgtattaagagacattgagagcaatctgatgaaaatgaaacaagaaacttatgcgacgatccagtga

SEQ ID NO: 1590 - DNA, 1674 bp, Zea mays
  Peptide Sequence Number=SeqID_43369
atgggggacggcgccagcggccgcggcggtcgaagcggcgccgggcgccgggtgggggagtacgagctgctgcgaccgattgggtcgggagcctactcgcaggtgtggctgggacggcaccgggtgcggggcacggaggtggcggtgaaggagatcgccatggaacgtctcagcaaaaagctccgcgagagcctcctctccgaggtcgacatccttcgtcgcatccgacacgataacgtcatcgcactccacgactccgtcaaggatcatgggagtatatatctcatactggagtattgtcgaggtggtgacttacatgcataccttcaacgtcataaaagagtttctgaaaaggttgctaagcacttcatcccatctggtctgaaaatgcttcgcgataataacgtggttcaccgagacctaaaacctcagaacattcttcttgttgaaaataatgaaaatactctgttgaagattgccgactttggatttgcaaaatttttgcaaccctttgccctagccgaaacactttgtggttcaccactttacatggctccagaagtcatgcaaggtcagaagtatgatgcaaagttgcttaaaaatatactcaggacgcatgaaatacgattaccatctgattgtgaattgagccatgactgcatcgacttgtgcagaaagttgctgcggctcaattcagtggagcggcttacagttgaagaatttgtgcaccacccatttctttctgaacatgctccagagaggaccttgagccggacattatctgaaataagagatggctttccaataaataatatcagtccaacaaggccttcaagccaaagttcacaagaagattgtatgccttttcctttggatgatgagtcaagtggacaggatgagggtccaattcctgacagtaagagtccgatgaaatcttatgggtttcccacagattcccctatcattgattcattagagtttgtagatcaggaatatgtatttgtgtctggaccacacccagagggatcatcgtcttcaacaaatgcttctcagcagcttaacttaccggcaaaatatgataatttatctgtttcaccaccgaagttaactttcttgagtgcaccaatgccgataaacggtttgccgattaatagacaacaatctgctgggactggtagcttcgacagccactattctcctgcatctgtcatttcacagggatctgcggatataagtgatgccatggatcagcccccatctgattatctgacgaggattagattgttagagcaatatgcatcagccatagcagggttggtcagggatgagatagagaaacagtttctctccgaagttgaatatgcggaagaactagccagcactgtgggacagatagctgatggtacagagatgccagatgcaatcgaaatgatatttcagtctgctttacttacaggaaggcgaggcggtgttgatgagatgtttgggaaagcagcggatgccatgactgggtatacgagggcggtatccatgctgcggtttctcctgatcgaggcaccatcacttgccctcaaccctcctttgactctgacaagatccgatcggcatcgacttcgcacatacattgaagctctcaacaccaggctctgtcagatgcagagccagaggcattga

SEQ ID NO: 1591 - DNA, 354 bp, Zea mays
  Peptide Sequence Number=SeqID_43370
atgaactcacctgtgcggttggcgccttggcgggcacggccgtggttgggtcgggaggttgaggaaacagttggaggggaggagaagggaaggagggcggacgacagggcagcaggtgcggtcggcgttgggaagcaggtggccccgcgacaccgctgtctgtccccgtcgtccggccctgaacgtacaaggaaccgaggaaatctgcgtttagtggccccggatacgtcggcccagcgaggccgctatgggggaattgggccgatagcaagtgcggtgaatccgtctagtgggcggtcgcttgggtacttttcatgtatgggctgggatgaaagggccggcatgtttgactag

SEQ ID NO: 1592 - DNA, 858 bp, Zea mays
  Peptide Sequence Number=SeqID_43371
atggcgctgagtcaggggaagtgtgaggcgggctgtggcaagacaggggaggggagggagggagggggagggtatctaagtgcaatctccactgtcatttggtatccaggtgacatccatggtcaatacagtgatcttctaaggctttttgaatatggaggctttcctcctgaagccaattatctattcttaggtgattatgttgatcgaggcaaacaaagtttggagactatatgccttcttcttgcttacaaaatcaagtaccctgagaacttttttcttctgaggggcaatcatgaatgcgcctcaataaacagaatatatggattctatgatgaatgcaagcgtcgatttaatgtgcggctatggaaggtcttcacagaatgttttaacactctacctgtggctgctcttatcgatgataaaatattatgtatgcacggtggactctctcctgatctagcacacttggatgagataaagaacttgcagcgtccaactgatgtaccagatcaaggtctactgtgtgacttgctttggtcagatccaggaaaagatgctcaagggtggggcatgaatgatagaggggtctcatatacctttggtgctgacaaggtttcagaattcttgcaaaagcatgatcttgatcttatctgtcgtgctcaccaggttgtcgaggatgggtatgaattttttgctgacagacagcttgtcaccatattctcggcccccaattattgtggtgaatttgataatgctggtgcaatgatgagtgtcgatgaaactttgatgtgctcattccaaattctgaaacctgctgagagaaaaaacaaatttatggggtccaacaaaatgtga

SEQ ID NO: 1593 - DNA, 303 bp, Zea mays
  Peptide Sequence Number=SeqID_43372
atgcaaacacagggaccgaatgtcctcctcctggttcaagtcaacagaaaggccattccgttggccataccggctacggatggcaatgaggtgttctttcgcataaagaggtccacccagctgaagaagctgatgaacgcctattgcgaccgccagtctgtggacatgaatgccattgcattcctgtttgatggccgcaggcttcgcggcgagcagacccctgatgagctggagatggaggacggcgacgagatcgacgccatgcttcaccagaccggaggcagcgttcctagcaccacctaa

SEQ ID NO: 1594 - DNA, 267 bp, Zea mays
  Peptide Sequence Number=SeqID_43373
atggcgatgaaggcgaagacgccgaagacgaaggagtcggcgccgggctggggcggctggcgtccgctcggctgctgctggaagcgcggcatcgacggcgacggcgacggcgggggcggcgagcggcggctctgcgccgagtcagagcacctcggcaccgtggatctcggcgccgacctcgacgccatggatctcggcgccgaccacaaatttatagtacctactcgcgagaacacaaattcagctggactagtcctgcaaggatga

SEQ ID NO: 1595 - DNA, 900 bp, Zea mays
  Peptide Sequence Number=SeqID_43374
atgatttcactctcagtcccatcaagtgttctacatcaagttcctgaaggacatgttggggtatactggagaggaggtgctcttctgaagacaatcacccctccagggtttcatctgaagctccctttaatcacacagtatgagccaatacaggttacacttcaaacagaccaggtcagagatattccttgcggaacaaaaggtggtgttatgatcagctttgacaagatagaggtcgtaaaccgcctccgcaaagagtttgtgcatgaaaccctactcaactatggtgtgcactatgacaagacatggatatatgacaaaattcatcatgagattaaccagttctgcagtgctcacagtttgcagcaagtttacattgacatgtttgatcagattgatgaaacaatgaaagaagctattcaaagagactgtacacgctatgctcctggaattgaaatcatcagtgttcgtgttacaaagccaaatatacctggtagtatcagaagaaactttgaacttatggaggaggagcgtacaaaggcactgatcgccatcgagaagcaaaaggtagcagagaaggaggcagaaacacagaagaagattgcgctatctgaagcagagaagaacgcgcaggtgagcaagatcctgatggagcaaaagctgatggagaaggacagttccaagagacaggagaagattgataatgaaatgattttgaaggaagcagaggcaaataggctcaaactgacacctgagtatctggagctgaggttcattgaatcaattgccaacaactcaaagattttctttggtgaaaagattcctaacatgatcatggatcaaaggttgctcaagaattaccttgatgctgttcctaggaaggaccattatgaaatgtag

SEQ ID NO: 1596 - DNA, 120 bp, Zea mays
  Peptide Sequence Number=SeqID_43375
atgcagaggcacgagggccgcggcgatggctgcctggttggcactgatacgcgttacgagaggaaagatgcgacgcgaggggataggataggtagttcgggagactacatcaaagattag

SEQ ID NO: 1597 - DNA, 867 bp, Zea mays
  Peptide Sequence Number=SeqID_43376
atggcgtccagggacttcctccgcgtcttcggcgccggtgagggggcgggcccgccgggggacgccggcgccggccagcccgacgacgacgagctcagcctcggcctctccctgggcggccgcttcggcaccgacgccaagcgcccgcgcctggcgcgctcctcctccatcgcctccgtctgctccgtctcctctctccacgccgacccgtcccccgccgcgccgctgccgctgctgcgcaccacctcgctgcccaccgagaccgaggaggagcgctggcgccgacgcgagatgcagagccgccgccgcctcgaggcgcgccggaagcgcgtcgagcgacgcaactccatgggctccgtctccgtggcacccgccgacgccgtcagcgggaggaggtccaacgcctcgcaggggagcaactctgcaagcaccacggagcaaggtattggtggaagcatgtttaaccaatccgcagacgcgaagagtccatctacctctgataatagaaatcaaaacgacatgcttcctccgaccaaagcggccgagaagccactaaacggtactgcgacagagcagcagcctcgcctacggacgcttgggtccctcacgacacggacgggcagcaccagtgacatcagaaagctcatgatggaggacatgccaatggtctcatccaaggtagaagggcccaacgccaggaggatcgacggcttcctgtacaggtacaagaaaggcgaggatgtgaggatagtgtgcgtctgccatggtagcttcctcactcccgcggagtttgttaagcacgcggggggcggtgatgtgccgaatccgcttcggcatattgtcgtcaaccctgcgcccttctcgtga

SEQ ID NO: 1598 - DNA, 525 bp, Zea mays
  Peptide Sequence Number=SeqID_43377
atggcaggtgctgctgcactctggtccttggccacaattctcactccttgggctgcctcccgctccaccctcatgttgcttgttgtacgtgcactctttggccttgcagaaggtgttgcgtttccgacaatgagcactttcctaccaaagtggttccaaacacatgagcgtgccactgctgttgacatttccatgggtggattccatcttggaaatgtcataagcttcctagcaacaacgatcatcatgtcacacataggcctctcgggaacattcaccttcttcgtgtcacttggttatttgtggctctctgtatggatggtgaacgtagaaagtgagcctattgacagccgtactataagcaagtgtgagttgcaattaattctagatgggagaattggatctaaagtccaaggcagtaaattcccatacgtaagggaattgttctcaaagactcaattcttggctgtcactttggccaatgtggtcaacaactgggtaaggatgggtctatgggcaaaatga

SEQ ID NO: 1599 - DNA, 318 bp, Zea mays
  Peptide Sequence Number=SeqID_43378
atgacggctaagctcctgaacattaagttgattaagataatcaggttgtggatcaagcaacatgttcctctgagtgatcttggtgaggtgggcaacagcacccgagctgacgaagtggttggtgagagagttggcgaggcgagcgacaacctagcccccgagtcagtgaaacagggggtcggagaggcgagcggcggtgcggcccctgagccggtgaagcaacgagtcggtgagataggcgatggcctatctcctgagccagcgaagcagcgagtcagcgaggcgcatggcggtgtaacccttgaggtgatgaagtag

SEQ ID NO: 1600 - DNA, 107 bp, Zea mays
  Peptide Sequence Number=SeqID_43379
atggcgtgccaaatactgccgatgtgggttcatatttatacacccagcgcgttgcaacttgaagggccccgtctgtcattgactgttgctattctagcaaagggaag

SEQ ID NO: 1601 - DNA, 306 bp, Zea mays
  Peptide Sequence Number=SeqID_43380
atgcccccttctaagtcgcataagtcaccactggtgctggcctgtggctggcccttccaaactccagtgccgctgtccgcggtgtggacgtttcacgacatcgacttctgcaatctcctctccttcaaccagttcttcgcctaccgcaccgagcccgtcatcatcagccaggtggtgcaggtggcgacgctgccggtcgggcacttcatggcgcgggtgctgctggagcgtgaaagagcatgtgctgaactgctgatatgtatcttcgtcaatgtcggcaccgtgtccggcaaaggcggcgcttag

SEQ ID NO: 1602 - DNA, 3438 bp, Zea mays
  Peptide Sequence Number=SeqID_43381
atgaatgtgggacatgctgcccacctgtccgggcagacagcgcacatgaatcaagttcctggctccggtgttggcattggtgttggcggctcagacgggctaccgcagcaccagccaatgcaggagatggcggcgctctcaggaatggaccagcagtttgtcatgcttcggaccgctatgcgcgacaagatatctgactatataggaagaaaacagtcaccgggtgattggcggaaacggttgcctgaactggcaaaacggcttgaggagatcttgtacagaaaattcccaaacaagcatgagtactacaatatgatgaagggaccagttgagccacaattgcaatttgctatcaagaccttgagtgctcagaaccaacacaatcaacaaaacccacaaatgacaaggcaaatatcatcgtcctctagctatggtgctatgattcctacccctggtatgacgcaaggcaccagtgcaggttctaggactccttatgtcacggagaccaatgctctttcatcgtctggtgcatgcatggttcctcagaatgctaacatgggtacctcaatgcaaggtccaatgtctaacgggtaccagcatttaaataccaacatttcacaaaattctaccacaaataatgtcgaatctacaatgggttcagttggcgttcagcgacaactatctcatatgatcccaactccaggattcagtaatcaacagaatgtaccttcaaatcctgactattcaaatggaactggatacttcaacggtgagtcagctgtggcgccacatatgcagcaccagaaacaatttcctagcaaccacaatagcaatcaaattcaacatattgggggacacaataattctgggatacattcaagcttgctggacaactcatctgcctatggtttatcagatggccacatgaatggtggcataggagtgcatgggtcaaatatgcagctaacaaacaggactactgccccagaagcatatatgaacatatcctcttatggcaattcgcccaaacctatgcagcagcaattcaatcagcaccctcagcagagaataccgacatcagttgatatggctggttccggcagcttttatgctattggctctacccctttaaccacagcaaatagtcagagcatgaatgttgcaaatttacaatctagatcaagcatgaatcagatgttggtttccaatcagctaaacattcagtccgtccagcaacagtcccagataaaaaatgggcctttggatcaaacagagaaggtgaattttcagtcaacacagctgactcatgatcaactactacaccagcacccaatgtcgcagcatcaggtgcaacctaattcccagtttattcaaaatcagtatcatataaatcagcagcagccaaattcacagcatcagcaggctatgttaaggaacaattcccttaaacagtctcaaatggcttccaaccattcaatgcaactgccagaacaggggactctgccacacactgaactagtttcttcacaagctagtgatcctgctgaccttccaaacttccagggtcaataccagcaaagaaatgctcttgacaatgttaaaggagggcagatgcttggtcatctatctagctctcaaaattttcttccttctgcctcacatggttctcagcaattgttgccctctaatccgcagcttgataacggttcaaatgctgtaagttatgtgctgaaaggatcacagacagagcaaatgctgctttctcaatggcagccacaaacaatggaaaaggctcctgtcgctactaattcatcactcgaaaaacaagtacaagaagattgttgtcaaagaataatgtcacaagatggagtacagcaaccattttcatcagattggtgtctttctaatggcactctcgcttctgttgatcctgcagtgccaaaacccacagctggagggtttgggcaggtcaagagaaatattcattacctccgtcagataaagtggttgctgttgctgtttcatgcaaaaacatgcacataccctgttggaagttgtaagttcaatggttgtgttcaggtgcaggagcttttgaaccattttcagaattgtcaaaggaaagattgttcgtacaggagttgcactaagtcaaaagcaatgtctcaccattataaaacttgtgtcgatgagcaatgtcctgtgtgcagcgttgtaaggaagtttttgcgccaatcaactgaacaggcatctaagcaaaaaactcttgagtctagaaaacttgctcaacaaaatgtgcctcagagaatcatgaacgggatagaaggtgatagaatggatgttgatccaatgtcagctgaagcgttcgaggatcaaccatctgttccaaaacgtttaaagatgcatcttccatcactcagtggcccagaaaatgatatctctgtagtctccaatcatcatgtaaacccaggctttctattgcaggaagcacagcctgagcagcttgagcacaataataggacaacatatctgaaacgagaggtagatgcaaaggctgacattcgggctcctcaaaagcccataaaaataagttatgacattgatgaaaatgtgactacatcaaggcataatgtgattcctggtgttcccagtgagatggactctcatatcaagcaagaaaacttgtcagttaacaaagagacaagtgaaactgcccttgaggttaaaaatgaaacaaatgatctaactgatgcgactgtgactaaatcaggaaaaccaaaaataaaaggtgtttctatgattgaattgttctatccagatgaagtagatgtacatattgacagtctaaagctgtgggttggtcagagtaaggctaaagctgaaaagaatcaagctattggtcattctgagaatgagaactcttgccagctctgtagagtagagaaacttacttttgaacctccaccaatgtattgttctccttgtggagctcggataaagcgaaacgcaccatactacgctgtaggtactggtgatacacgccactatttatgtatcccttgctacaacgagtctcgtggtgagactattgaggttgaaggtcaaacatttccgaaggcaaagttagagaaaaaaagaaatgaggaggaaacggaagaatggtgggttcaatgtgacaaatgtcaatgctggcaacatcaaatttgtgctctatttaatggaagaaggaacggtggaggacaagctgaatatacttgcccccattgctacgttgaggaggtcaaatgtgggctgcgcaaacctttaccacagagtgctgttcttggggcaaaagatttgccaagaactgttcttagtgatcatatagaagatcggttatttaaacgacttaagcaggagaaacaggaccgtgcagctgctgctggcaaaagtattgatgag

SEQ ID NO: 1603 - DNA, 537 bp, Zea mays
  Peptide Sequence Number=SeqID_43382
atggcggaggaagctgcatccctggaggcgccgccgccgctccacaatccctcactgcgaaaatcctcccttgacgatgagacccgcgccctcgtcgtccccgacgccgccgccctcccggcgtctcccccctccgccgtcgaggctaacttcgcgcgctacttcgtcgcagctccagcccatgttgtgtttaaagaggaaggagtcatatccactgttgacttcaatgtcggcaagtcagatcgcagtgagatgaaagtcacaggaaaacggaaaaggaatgcacaacacttgcaagaaaattcggcattgtgcaaagtttgtgtaaatgataaatcttttattgtgagatgctgtgtgaaaggttcccttttggagatcaatgaaagattgatcaaacaaccagatcttcttaataccgctgctgacagggaaggatatatagcagtcttccagccgaaaccagctgactggctcaaaattaaggataaattccttagttatgaggactacaagaacttgagaggagtatgctga

SEQ ID NO: 1604 - DNA, 366 bp, Zea mays
  Peptide Sequence Number=SeqID_43383
atgacatataaagtgatacatggttgggaagtagagatactgggagctcaagctaaagactctgaagatgaaacagaagatgctggtacaggctcattaagtagcagacgtattgacagaaggacccctattagagagatcagaacaaaatctcatgttgactctgctgtccatgcacctagtggaggtcctactgtctctggtagcaatgtagtgggtgctactggaaaacacttgagcactccagagcagtttatgaaagcacacaatgcgagcaaaaaatcatctgacatcagaactgactcaggaactgcccctgacacaaagtgtgctgcaatgtctattgataatgatacttttaattaa

SEQ ID NO: 1605 - DNA, 441 bp, Zea mays
  Peptide Sequence Number=SeqID_43384
atgaaaggtgcctccgtgcaacatgagggtctgccccttatgggcaagatctttactcgtgctttgagccctctcagcccctacacgaggatccgccctaataggtatgcaatgaccggtcaactaacccagaaaagtgatgtatatagcttcggagtagttcttttggagcttttgacaggtagaaagccagtagaccatacaatgcctagagggcagcagagcctagtaacttgggctaccccaaggttaactgaagacaaggtgaagcagtgtgtagatccacggttgatgggggaatatccggcgaaaggactcgctaaggtcccccatactatccatacatgtgctgtatgcgtgagcttggggcaactaattgctattttctctatccagaattttttaattactgtttttgtctacgccagcttgctgctgtag

SEQ ID NO: 1606 - DNA, 1899 bp, Zea mays
  Peptide Sequence Number=SeqID_43385
atgccactctcggagccgtcggcgccggccgtgctcgcggcgctgccgcgggcgctctccctcgcggccgcggccgtcgcggccgcaaccgcgaccctcctcctcatctccgccgtcttctccaccccccaccacgcggcgtcctcctcgtcccctcagctttccccgtccgccagcgcctccaccgcggcgcctgtggccccggcgcccgcacacgcgcccgactccggcccaggccacccccaccccccgcctcccgttcccccgtgccctcccaacgccacccacgacgtcccctgccacgagcctccctcgcgcgagcgccactgccccccgcgcccgccgccgccgccgcctcttcttcctcacccgccaaaggacccgccgccgcaccctccgccgcactgccgcgtcccgccgccgcccaggtaccgcccgcccccgccgtggcccgcgcgccgcgaccgcgcgaggtacgccaacgtggacctcccgccgctgcccccggttaaggcggcggatggacagcagcaggaccccgttcacggtcgcggggagtggctgctgttcaccgacggggtgcagggttatgtcgagcggctggagcgcgtcgtgccgctccgcgacggcgtggtgcacacggcgctcgacatcggatgcggggtcgcgagctttggggactatctgctcaactatggcgtactgaccatgtccattgctccgagggatagatttgaaccgcaggtgcagctcgccttggagcgtggactgcctgcaatgatcggagcgcttgttgcccacaggctaccgtatccatcgaggtccttcgacatggtgcactgtgcggactgccgtgtcccatggactgctcatgatgggctctacatgctggaaatcgaccgtcttctccaacctggtggctattgggttttctctaagccacccgtcaactggaaatctacatacaacatttcgaatcaagggaccatagacaagcaggacaatcaagtagctatggatgacatgtcgaaaaggcttcgttggacgaaggtgtctgaagagggcacaatttctgtttggagaaagccttcttgtaatctccattgcgaccaagaagcaaatgcaaagcttgctggattgccaccactctgcacaggagaagacccagatagtgcctggcaagtttattactgtccccttgtcactttgcatctccggtatgcaaatatttcaatgtgtatgacatgtattccaagagctgaaacttttaatggctgtgctggtggtgccatgaaaaaatggcctaaaagacttggtgcagtgccaccaaggatagccagtggggaaatcgagtggctgtccattcagagatatagatacgacactctggtttgggagaaaagggttaacttctatctcacgtatctaaattttttgtctaatggaacctacagaaatgtcatggacatgagtgccggttctggtggctttgccgctgctatgtccaagcatcctgtctgggtcatgaatgtggttcctgcaaatacgacagagaacgcccttggtgtcatctatgagcgtggtttgattggaacatacactgactggtgcgaggccttctctacttatccacgaacatacgatctgatacatggtaatggaatcttcagctcccatattcacaagtgtgggattatcgacatcctggttgagatggatcgtattctccggccagggggtgccgtcatagttcgggacagagccgacgtcgttctcagagtcaagaaggacgccgaccgtctacgatggcatagccgagttgtcgacactgaaaatgggcctctggatccagagaagctcctcattgtggacaattccctgccactcccagggagctga

SEQ ID NO: 1607 - DNA, 462 bp, Zea mays
  Peptide Sequence Number=SeqID_43386
atgaaaagggagcatatattgagatcagtagtaaatgcgcaggtgccacatttgattcagtggggtgagattgaggggtgccatggaagctgtcttagaggagcaacaacagcgctgtctaacacctcgctaaggctaccaatcattgggagtgtaaatgtaaactgtggggaagttacagaagtcctaaagtcagcagcacaactgcttgaaccgctttcacctggcatcgagaattttctgccaaaggttgaacaagccggcgatgtggcctctaatctggcccaggttatcgctactgagaaaaccttgatagaggagtgcggtaatctcctataccaagcacaaaacctgcagtacatatgttgtgcaatttgctgtggaaacattttcgttgtctacctattggaaaagcagatacaggcagacttttacaaatggaaattggttgattcattgtag

SEQ ID NO: 1608 - DNA, 234 bp, Zea mays
  Peptide Sequence Number=SeqID_43387
atggtccaccggcggatgcctgtgcgccgccgctctggtgaccgggtgtggaaggagcgctctgcgacgttggatctagatgtagggccaggattagatccagaggatggtgaccaaccggccgttagatcggtatcgtggggactagatcacgcgcagactaaagctaacttaggggatcgtgggccgtcgatctcggatcgtgcggcccgggttgaatatcctttcacctaa

SEQ ID NO: 1609 - DNA, 528 bp, Zea mays
  Peptide Sequence Number=SeqID_43388
atgctatggcctgagttgtctctgtcggggtctcctctaggacctcatccagcattcggggcaccctatgatggtgcagtgggtgcctccagctggggcacctcacagactccaactcctatagaggcggggagatcacctatttacccccctctaggtgctctcagtactcaagagcaggatgagtaccttcagacgaaaccccctcattctctggagaagctattgcagaagctggatgagtacataaaggcatataacagtttttcaccaaagaagataagaagcataaaggctggcaccttcgagtgcagtaaaggtaccaaagagatcccgaagaccttcacatcaaggatggatcaagactccgaagttgttcctaagggaatgcagtcaaaattttcgagtaccaaagtaaaggtgtcaaaaaggctccgaagtcattcctatgggaatgtagagtcaaaaagtttgaacactaaagtaaaagtgtcaaaaggctctagagttgttcctaagggaatgtag

SEQ ID NO: 1610 - DNA, 441 bp, Zea mays
  Peptide Sequence Number=SeqID_43389
atgtctggaggatggcctcctgggtgcagatgcactcttggaacactactctatcttcaagagggacactacctaggtggaccatgtaggatgctgcacaacgatggtcttaacctcagatactacccccaccgtcccactggcagcactgggagtgtggttgtgtcgcccattggagagaacaaccctaggttgaggagcacagtcaacctagtcgatgtgctcaacaccgagctggaccactctttggaagagctgagtaggtctcgtgctgagatcgcagagttgcgtgctgagcgggcggagcgtcgccaccaggaggatgggttccccgctcctgtggggactcaacacctttatcgcccgtcgccccgtagtcaccatgcctatggttccccccgtctgcaagaccaagatagctctagatccttagatcgttag

SEQ ID NO: 1611 - DNA, 1629 bp, Zea mays
  Peptide Sequence Number=SeqID_43390
atggggtctgcggcggaggtgcctgttgtgatcagttccgacgaggacggcgcgcagacgcccgccgctggcaagcgccagtcaccggaagacgccgcccttgcgtgggcggagggaatactggcccaagacgactacgacgacaacgcggtttgtgagggagtgggttatccagcgatgatgctggagctgttggattccctgaaggatgaaacagggactgttgtgggtgacaaggaggttgcggttggtgccaagaacacgaacaccatgcctgatgctcgttgcgacgatgatggcgatgattgcgtcattcttgacggtgaccctgataagccggttgccgttgcaaaggaggaggggggaccgccacgagatgcccctgaggatgaactgcagatagttgcggagaaaggagagttagcatgcagagatttccctcatccacgacatctatgcgctgccttgccattcagcagcagttctcatgcaagtcattgtagcatgtgccattgttatgtctgtgattgtcctgctccctgtgccctatgggacaagcattgtcatgctacggacaaggatagaaagtggaagagacttagggaaatatccaaaaataaaagccagccaaatcctaaacgaagaataccccagcatttcaaacgctcagtcacgacaggaccatcatcctcacagtattccgcaaatatgactggttttactggaagatttcctgcttcgggtactgcgaaccaaattcaacaggtggatatctctgttatggttgcacaggatatggtgaggggtatcagtctgccgagtgcaccatctcctacgccaagaactaaaaatcggagctatggatccaaaggtgcccagattgctcctccaatttatacattctcaaatgataatcatttccagccttctgttcctagctatggtctggtgcggcctcatgcatctaaaactgcacatgtttcatcaggaggtcatgttagcgctaagacttttcagagtaacccatctcagttttgtgttcgtgcaccaatgggatctcatggacacaggtaccgaccaccatcatatcctcagcctcctcctaacacagttgttggcactggtgtgcccctctcacggtgcgcctcgctgaacgctgaggctcagggaacacaacgcccacaagttccgccggcaggtacaatatcgaaggaatcacttgcaaatttggcacgtcggctgggattaccttattacaatactaatcagccattaggtcagcagtcaacgagcacatctcaatttctgcatatgcatcctcacgagatgctacctgctcaaggtgctcaaaacacgacctggcaagcttacgttaagaaaagtgtggcaacaacttcacaaatcgtgccttctagtgaacataattcgtcaattcatgcacctgggagcactgttcttccatctggttcagttcagatccagcagcctttgcgccaattcaaatcgggcactgttctatcatctggtgcagcccagatccaccagcagcctctgcgccaactcgattctcagagcagtgttactccgagtgaaaccgttccaagtactctctaccttccgcagccatga

SEQ ID NO: 1612 - DNA, 171 bp, Zea mays
  Peptide Sequence Number=SeqID_43391
atggcggggatggcggcaggcggatcgcggctgtcgcggcgggcggggccccttttagcagacactgtccaagcagagggtataaaggagctatgcaagcttttagtggtggtatcaagagaagctgcaaaagcatatgctggtactgctattgtctttacgctgatttaa

SEQ ID NO: 1613 - DNA, 738 bp, Zea mays
  Peptide Sequence Number=SeqID_43392
atggaggacgccgagcgccccgcacgcagctactaccatagctacatcatctccaatgccgcctatgcacatgactggcggctaccggaacaggacgatggcattcgcctctgcattggcctccctgcaccggcagcagcacaccatgtagtcgacgtcgacaccaaccactactcatcaaacactatcgtcggcgctgcattccagacatcctccgatcctgctgccacatacgaccttggggaaagtacgcagcggagatcagggactccacgcgcaacggcgagcgcatgtggatcggcaccttcgacagccccaggaccgcctcgctcgcctacgaccaagccacctactccatgcgcggccccaccgcggtgctcaacttccccgtcgagcgcgtggaggagtcgctgcgcacgctgggactggggctcggcggcgctgggactggggctcggcggcggcgccgtggaggactcgccggtgctagccctgaagcggcgccactgcatccgcaagcgcttgcggaccaacaagagcaaggcggccactgccgacaaagaaggctgccatgtagaagcagaagcaagggaacaggtggcggtgacggctcgtcatgggcagggcaagcgaaaggacaaggtcaccgctggcgtgctcgagctcaaggacctcgggcctgaatacttggaggagctgctcgcccagtctgatcaatgcaatgaagaattccattga

SEQ ID NO: 1614 - DNA, 438 bp, Zea mays
  Peptide Sequence Number=SeqID_43393
atgccggtggcgacatctcatacttccataccggtggtgacatctcctatttccacgccggtggcgacatcaaccaccggcggtgacaagtccatctgtaacctgttgtacctagaaaccatgggaaaacctttcatctctgcaggcgacgtcgcccagcgcaagggaaaacgccgccacgacgacgcggctcgcacggctatgccggacgacaagggcgaagagaaaaaggctaagatcgataaggcggtccgcggctcgagcctctggacgcgccgccgtgctaacaccgcaacgacgtcagacctcgtgattcgtgtgcctgagcgcgagtctcgcttctgcatgcttcaagactgttgtgcctcctcctgctgcggcagtattcatggcagtaagtggcggcttcagaagagaagcaagattgaggctaaataa

SEQ ID NO: 1615 - DNA, 294 bp, Zea mays
  Peptide Sequence Number=SeqID_43394
atgggtaaagccaacagcctggtgtacctgcacgctgccctatgcgagtccctgaggctgtacccacctgttccgttcgagcgcaagaccgcggtcgacgccgacgtgctgccgagcgggaaggagttgatgcccggcgacagtgtgctcatctccaactactgcatgggcaggatggagggcgtgtggggcaaggactgcatggagttccgcccggagagatggttcaacgacgaagggggcctacgctacgagccgtcctacaagttcatctccaacgccggggccgcggac

SEQ ID NO: 1616 - DNA, 615 bp, Zea mays
  Peptide Sequence Number=SeqID_43395
atgtggtctggatcgtccctgggtggtacaccaccttgcccgccactgcctcagtcggctctcctgacgatgcccatttcaaagtatccccttggtccacctcccatgacacctccgacattagacatcactccagccatcgctcctgcctctgccaccatatttggtccgttttggaccttatggactggtggatgggatcatcagtcacaatgtggtggaggcgatgtccgcgctgggcacgtggatggggccgacgtcggggaagagagttgttcaggcgaccgtagcagaggtgggggagtttgcccaatggcggcgccacatgtggtggaggaggtgccggtgttgcgtcagtcgctggtggttccgagcgaggagagctggccaagaccctggagtcgcagagccgtgctggcgcgcctaggcggaggaagccgctcgggctgccgctgctcgcgagctgctggtgcttggggcagcatgctgggaagcagagctgttgttccagggatggttggcgtcgggggaggagcgaatcgagagaggagggtgcgcagatgggcagcactatggccgcatgcaacacagggcgcgtggggtggctcgtggtga

SEQ ID NO: 1617 - DNA, 1152 bp, Zea mays
  Peptide Sequence Number=SeqID_43396
atgacgctccgactgcggggcgatatcaacccgtcggctcctaccttcggcttctactctagtctcatcgattcttcatatactgttcgcaagtcatttatttgcaaactttatggcctcttgaagaaacgtgcaatcccgtttagatatgcatgtgcttttgcactaacggcaacagattgctccagagatattcgtactgaaaacagaacaagcaaagaatctattgtggacaacccagcatatgctgtgatttttttgatccatactctagcatatgatggggcgctcccttccgattactatgtagacgagagtagctttcctgaattttgcagcccactttgtgtgatgttgagagaactagttgaaatagatagttctagcaaaactgagcatggtcccacagccagttttgtatcagttctgtctgggattctccgtggtattcagaaggctgaggatccgattaattctgagatcactcctgaatgttgccaagaaaatttcattagtgataagcttgtaaagagaattcttaaagctcatgaaccttataaccataatgacaatactaaatgttctgttgtttctgagagggtatcatatgaatttgttcctgaaaggaaagcttgctcctcattaaacaaatcagtggtacagaatgcaagtggttgtgatagcaataggaacaaatgtttggcatctgggaaagctgtgtccaagaaaaaagatcagagtaccaataatagcttggataaagaaaatatgtcatcttgtggttctggtggcacaaaggtgtcatctccaggctccttgggtttagctagggaggttgattctggaaattgtctctccctcttggataaccggaattgtcctatgactaggacctcaaaggcaaatcacaacaattgtaggcaaactgcggacatcttggattttaatctcagagaatgcgtcctccaactacactccttggcgtcactggtcgtcctcaccttgcaacactacaccctcgacgaccatgacatcgtccacgagcgtggtggcactgttcgtctggcctgggttgccatcaagaaccaatttctcggcaacagcgaggcccatgtcgtccacctcgacgtcgcttttcagatctttgtatag

SEQ ID NO: 1618 - DNA, 510 bp, Zea mays
  Peptide Sequence Number=SeqID_43397
atggagggctcgaggcgcaaagacggtcggtccgctaggaccaaggctgtagagagcttgtgcggttgtaggggaaggcgaggccccctcaatgagctcctcaagaatgaggtcattccaagccttctggaaggaggggaacacaacatatcacacaatcctagtccgatgaggcccgtagcactcattgaggccatgaagaaggttgagaacaagggtgcgattggagaccggctcaccgagtggcgaggatccaagataggaccacactgtccatacgacgctaggaaggcaaccgtcagtgaagacatggtcgtcgagggtgtagtgttgcaaggttgtccgcctacgggacaacagatgcgcaagagggagcctggcgggcagaggcaggacgggctcgatcaggacaccgacgaccaggacaaagacctagccaggctcccagtgccgacggtggccgaccatggagcgccgtgccaagaggtggggagggatgacaacgagtga

SEQ ID NO: 1619 - DNA, 1482 bp, Zea mays
  Peptide Sequence Number=SeqID_43398
atgtccatttatgtaatcgctgtgtacgtttatgcatctgggggctcaagttggatcattgatagcgggtgcacaaaccacatgacaggggagaaaaggatgttctcctcctacgagaaaaaccaagatccccaacgagctatcacatttggggatggaaatcaaggtgtcactgtctttagaagaagtgatgattcaatagcatttaagggggtgttagagggtcagctatacttggtggattttgatagagctgaactcgacacttgcttaattgctaagactaacatgggttggctctggcaccgccaactagcccatgttgggatgaagaatcttcataagcgtctaaagggagatcacattttaggactaacaaatgttcattttgagaaagacaggatttgtagcgcatgccaagcaggaaagcaagttggtgcccatcatccacacaagaacatcatgacgaccgacaggccgcttgagctacttcacatggatctattcggcccgattgcttacataagcatcggcgggagtaagtattgtcttgaaaaatctcaaacccaagaaaccttaaagggattcttaagacgagctcaaaacgagtttggcttaaggatcaagaaaattagaagcgacaacgggacggagttcaagaactctcaaattgaaggtttccttgaggaggaggggatcaagcatgagttctcttctccctacacaccacagcaaaatggtgtagtggagaggaagaatcgaactctattagacatggcaaggaccatgcttgatgaatacaagacttcggatcagttttgggtcgaggcggtcaatactgcctgctacgccatcaaccggttatatctacaccgaatcctcaagaagacatcctatgaactcctaatcggtaaaaagcccaacatttcatattttagagtctttggtagcaaatgctttattcttgttaaaagaggtagaaagtctaaatttgctcctaagactgtagaaggctttttactaggatatgattcaaacacaagggcatatagagtctttaacaagtccactggacaagttgaagtttcttgtgacgttgtgtttgatgagactaacggctctcaagtagagcaggttgatcttgatgagataggtattgaagaggctccgtgcatcgcgctaaggaacatgtccattggggatgtgtgtcctaaggaatccgaagagtctccaaatgcacaagatcaaccgtcctcctccacgcaagcatctccaccaactcaaaatgaggatgaagctcaagttgatgaagtagaagatcaaacaaaagagccacctcaaaatgatggcaatgatcaagggggagatacagatgatcaagacaaggaggatgaagagcaaagaccgccacacccaagagtccaccaagcaatccaacgagatcaccccgtcgacaccatcctaggcgacattcataagggg

SEQ ID NO: 1620 - DNA, 732 bp, Zea mays
  Peptide Sequence Number=SeqID_43399
atggattgctacaattgtggagaacttgaccatcttgctcatcaatgcatcaagcccaagaaaaacaaattcaagggcaagaataacgatgaaagtgatgatgaaaagaaggaaaagaaaaagaagaatgggaaagcatatattgttggtgattggctcaccgacattgaatcatcaagcggcttttcttcaagtgaagaagaaaatgatgaaaagttcgccaccatagctgaggatttgtcttcaccaccatcatcaccttcatacactacacacctatatctcatggctaaaagtgaacggaagttacaagatgaaactgtcattgttgaagattgtgatagtgatagtgatgatgaatattgtcggggtgaggctgacaacagccaagttcagcctcgggcgcaacaggaagctccgcctcgcccgaccttaggcctcggcctcggaaggaggtctccgcctctcccgaccccagggctcggcctcaacctcggcctcggaaggaggtctccgcctcgcccgaccccagggctcagcctcaacctcggcctcgggaggaatcgcgtcctcgcccgatcccggcctcggccccaggagaagtctcctcacccgaccttgggctcggaccgaccacgccacgggggatacatcattaccctacccctagctagctcaggctacgagggaacaagaccggcgtcccatctggctcgccccggtaacaagtaa

SEQ ID NO: 1621 - DNA, 432 bp, Zea mays
  Peptide Sequence Number=SeqID_43400
atggccatgcagcagcacgcggcgtcggcgtcgagctccagcttggggctgcaccttctcgcctcgccctcgtccatcagggaggccacccacaccaaggttttcgtgggcgggctcgcctgggagaccagcagcgacaggctccggcgcttctacgagcgcttcggggacattctcgaggccgtcgtcatcaccgaccgccactctggccgctccaagggatacggattcgtcggtgcctctcgatttcactcctttttcgctgctaattttgcttctgtgtatgtggcgttcccgtgcgtgacattccgtgaagccgagtccgcgagcaaggcctgcgaggaccccacgccggtgatcgatggcaggcgcgccaattgtaacctggcatctttgggtcgagcccagcatcccgtgccccctgttacttaa

SEQ ID NO: 1622 - DNA, 162 bp, Zea mays
  Peptide Sequence Number=SeqID_43401
atggacaatattgatgaagtgaccgacaagagattgacagctttaggagaaatagatcaggacaagatcatagttgccaaagcttacaacaagaaggtcaatgctaaatcgttccacctaggggacctgcttatgcaactatgcaagaagggtagaaagtga

SEQ ID NO: 1623 - DNA, 99 bp, Zea mays
  Peptide Sequence Number=SeqID_43402
atggagcagcaaccgatactgcgatccgaaagggttgatctctgcctcgacatcacatctgcgtcttcgtctaccaggcttaggtcccgtttggtttga

SEQ ID NO: 1624 - DNA, 327 bp, Zea mays
  Peptide Sequence Number=SeqID_43403
atggagaaggtggtggtcaggcagaagggggaggagtggcaattctccaagcttagaacattgtcgttccagatcgtgaccacccctccacgcttgccacaggtgtcaatggagcgaaaacaatttagattacgggggaggaagtgttttgctttcattgcggagaggatttgtgtgagggagaggaagagggggcatttttgcatggactacatggcctacatggcgagtaggtgcagcatggtgagagggcagcctctctctagaggtggtgcaggagaagcaagaggtcagattgcttggtgtgggagtgttggagggggatag

SEQ ID NO: 1625 - DNA, 537 bp, Zea mays
  Peptide Sequence Number=SeqID_43404
atgccagcattagagcgcaatgaaggtggggatgccacttgggagaaggccgcgaggtcgaggaagatggtgcaggttgaagtagctgaggtcctcgctgaactggatccccattgtgtgccagaaatcacgagcaatgggccagcgtgggaggatccaaagaaagaatttgacccagggagcactgctatttcagacgaagccatggatgaggtagtcttcatgatgccccggagacagcaaggagttgagatctttggtgtgcaggcggctggtggagtcagtagcgaagcagtgtcgcatgtcgggggacgtgttgagctgaaccgcactgatagaggtcgaggcccgatcttccgtgagccagttgaagagtgtgacgatgaacttgcagtgctcaatggaagtttggaggtttttatgagcacgcactcatgccttagctctccggtggacctgcttaaggttagcagcgagacccctagtcgcatcacatttggtagcaatgggacgccgagccgagaggatgaaaggtag

SEQ ID NO: 1626 - DNA, 558 bp, Zea mays
  Peptide Sequence Number=SeqID_43405
atggcgaccctctccatggtctccgtccccatcgcaccctcctccttgtccctttccacccggggccgcagctcctccgcatccttccccgctaagaagggaggaatcggtcacggtggcttgcggatcgagtgcatccgtattggtggtgttgagattccaaaccacaagagggtggagtactcgctgcagtacatacatggcattggacgctcacgctcacgccagatcctcctggacctcaatttcgataacaagatcaccaaggacctctccgaggaggaggtcatcaccctccgtaaggagttttatatcgatgttggactccaagggagtgaaaacgctgagagctggcacactgctgtttggtatgctttacagaaacgtttcaaccgtgtggcgattgagaggctgaaggagattaggtgctacaagggcatccggcacaagcttggactcccagttcgtggccagaggacaaagaacaactgccggacacttaagggaaagagggcttcagttgccaagaagaagtcacccgcctcccaggatgaataa

SEQ ID NO: 1627 - DNA, 516 bp, Zea mays
  Peptide Sequence Number=SeqID_43406
atggcgcccgccttctcggtctcgtgcgcgcccggatcctcgcgcccgctggccgccagccccggccccagcgtcgtcgtcgtcgcctcctcccaacttcccgcgtcgtcgcggagcagcgaacgcaggagagcaccaggcctcgcgctcgccgcggccccgggtgtcggcggtagggatggcggtggcaggtggagagcaggcatctcgtccttccccttcctgccgccgttcttcacagggaacaagggggagaaggacgctgagaaggcgatgaggctcaaggaggagctcctcgacgccattgcaccgctggaccgtggcgccgaggccacgcccgaggacaaggagcgcgtcgagcagattgttcagcaactggaggcggtgaaccaggtgaaggagccgctcaagtccgatctcctaaacggcaaatgggagcttctctataccacctccacaagtatactgcagccacaggttcatttcctttttgcctcaccaatgtacaggttctga

SEQ ID NO: 1628 - DNA, 345 bp, Zea mays
  Peptide Sequence Number=SeqID_43407
atgacaaattctactcactttctactgcagaggccaaagtatctgaggccgtttgggaagatttaccaatcaatcaacgccgacaatttgagagcccaaaacatggaaacttggccctactttaatcaggttactgccaacttggtacctctgaattctagaagagtggcagttaaatttgactacttcaagatatttggtttgataccgatcaaagcacccggaagtggtaaaggtgaacttgagattacttatcttgatgaagagctcagggtttcgagaggcgacaagggaaacttgttcgtactgaagatggtcgacccagcatacagggttccattataa

SEQ ID NO: 1629 - DNA, 105 bp, Zea mays
  Peptide Sequence Number=SeqID_43408
atggcgccatcacgccgtccatgtcatcgtccacctgaagtccaaccttccacgggtaccccttactacagtgtgaaggcacggtgcccatgcggctatctctag

SEQ ID NO: 1630 - DNA, 960 bp, Zea mays
  Peptide Sequence Number=SeqID_43409
atgctcaaggagtcgtgcccctatcatcaggggcccgtcaagcacacccttgaggagtgcgccatgcttcggcgccactttcacaaggccgggccacctgcgaaaggtggcagggcccacaacgacgatgaagatcacaaggcaggggagttccccgaggtccacgactgcttcatgatctacagtgggcaagtggcgaatgccttggctcggcaccgcaagcaagagcgtcgggaggtctgctcggtaaaggtggcggcgccagtctacctagactggtccaacaagcccatcaccttcgaccagggcaaccatcccgaccgcgtgccgagcccggggaaatatccgctcgttgtcgaccccgtcattggcaacgtcaggctcaccaaggtcctcatggacggaggcaacagcctcaacatcatctacgccgagaccctcgggctcctgcggatcgatctatcctcggtccaggcgggcgcggcgccttttcacgggatcatccccgggaaacgcgtccagcccctcagacaacttgatctacctgtctgctttgggactccctccaacttccgacgggagaccctcacgttcgaggtggtcgggttccgaggaacctaccacgcagtgctagggaggccatgctacgccaagttcatggccgtccccaactacacctacctcaagctcaagatgtcgggccccaacggggtcatcaccgttggccccacgtaccgacacgcgtacgaatgcgacgtggagtgcgtggagtacgtcgaggccctcgctgaatccgaggccctcatcgccgacctggagagcctctccaaggaggcgccaaacgtgaagcgccatgccggcaacttcgagccagcagagacggttaagtccgtccctctcgatcccagcaacgacgcctccaagcagatccggatcggctctgagctcgaccccaaatag

SEQ ID NO: 1631 - DNA, 1056 bp, Zea mays
  Peptide Sequence Number=SeqID_43410
atgttcttcgatgggtcgctgatgaagacaggagcaggcgcgggcctgctcttcatctcgcccctcggaaagcacctgcgctacgtgctacacctccatttcccggcgtccaacaatgtggctgagtgcgaggctctggtcaacgggttgcgcatcgccatcgagctaggggtccgatgcctcaacgctcacggtgactcgcaactcgtcatcgaccaagtcatgaagaactcccactgccacgacccgaagacggaagcctacggcgttgaggttcggcacctagaggacaagttctacgggctcgagctcaaccacatcgcccgacgctacaacgagactgtggacgagctggctaaaatagcctcggggctaacgacggtccccccggacgtcttctcccgagacctgcatcaaccctctgtcaagaccgacgacacgcctgagctcgagaaggcctcggtcgagcctgaggcaccctcggctcagtccgaggtaccctcggcccagcccaaggaaccctcggttcggcccgaggcaccctcggttcggcccgagaaggcacccgggggctacacgcacctgttggtcgccatcgacaaattctccaagtggatcgaggtccgatccctaaacagcatcaggtccgaacaggcggtggcgttcttcaccaacgtcatccatcgctttggggtcccgaactccatcgtcaccgacaacgacacccagttcaccgacagaaagttcctggacttctgcgaggatcaccacatccaggtggactgggccgccgtggctcaccccatgacgaatgggcagcagtccctgcgacgctaccacgcccgaggggtccggtcccgagacctccaggtgggcgacctggtgcttcggctgcgacaagacgcccgagggcggcacaagctcgcgcctcccagggaagggccgttcgtcatcgccaaagttctgaagcccggaacgtacaagctggccaacagtcaaggcgaggtctacagcaacgcttggaacatccaacagctacgtcgcttctacccttaa

SEQ ID NO: 1632 - DNA, 219 bp, Zea mays
  Peptide Sequence Number=SeqID_43411
atgtggcgcctctattgctgcaattgccaagtggatggaacaaatcagtgtgagagtggtcatgtcaaggccacaaccaacaaaatcgacggggtgacgaagggtttgagggattctgctactgcaaaagtcaagccacacgatgatgctacaaaaggactcgatattttcatgggaaagttcatcattccattgtccatatgggtaatagatcaataa

SEQ ID NO: 1633 - DNA, 621 bp, Zea mays
  Peptide Sequence Number=SeqID_43412
atggcgccgcccaccctcacggcggcgaccatggccgacgatggccaggccgcgattccgggacgcctgggaggagggagaggtattcgccacgctccgcgccgtgcggcggcaatcccgcgcggttctgttgcgctggggaagaaacggctgacagggaggggtccatgcgtctgtgaccgacagctcgagcgagtccgcgcggagccaacgaccgaaatgcgggccccaccagacagtcagaggatcggccataccgcgcgcggaaccgaggacagccgctttcgagtgggcccgctgcaccagagacaccaccgtgcgggtgagaaggcatgctccttttatgatgaagttatggcacacaatataagaatatcaactatatactcattgtattccttttttgggtattacaactcccccttgataggaaggagctccaaaaatccaaaatctctccccaacaatccagacaagaatttctccctaaaatggtccagattttctccccctaaacatcccccttcgacaaaagatcccccgctgagaaacaatagagatgcaaaaaagagtgaagaactagggagaatgcaggagcttcaggagtatatcagagcctga

SEQ ID NO: 1634 - DNA, 834 bp, Zea mays
  Peptide Sequence Number=SeqID_43413
atgacgggggagaagaagatgttcacctcctacgtcaagaacaaggattcccaggatacgattatctttggagatgggaatcaaggcaaggtcaagggtttgggaaagatagccatcaccaacgagcactcaatatcaaatgtatttctagtagagtcgcttggttacaaccttctgtctgataaattagaaacccaagggaccctaaagcgctttctaaggagggctcaaaacgaatttgagctcaaggtgaaaaagataagaagcgacaacgggtccgagttcaagaatctgcaagtggaggagtatcttgaggaagaaggcatcaagcacgagttctccgctccctacacaccacagcaaaacggtgtggtagagaggaagaacaggacgcttatcgacatggcgagaacgatgcttggagaattcaagacgcccgagcggttttggtcgaaagctgtgaacatagattgccatgccataaaccggctctacctatatcggcttctcaagaagacctcatatgaactccttaccggtaacaaacccaacatttcttactttcgtgtatttgggagcaaatgttacattctggtgaagaaaggtagacattataaatttgctcccaaggtagtagaagggtttttactagggtttgactcaaatacaagggcgtatagagtcttcaacaaatcatcgggtttggttgaagtctctagcgacgttgtatttgatgagactaatggctctccaagagagcaagctgttgatcttgatgacgtagatgaagatgatgtttcgacggccgcaatgcgcatcatggcgattggtgat

SEQ ID NO: 1635 - DNA, 462 bp, Zea mays
  Peptide Sequence Number=SeqID_43414
atggccgccttcctccccaccggcgctgctccctcgccctcctcgctggatcaggcaccggcggcccctcgcctgcctgcgcgccctccactagagcagcggcggccgagctcgcctgcctgcacaccctccagtggtgcagcggcggcagcggccgggctcgcctgcctgcgcgccctccagtggtgcggcggcagcggccgggctcgcctgcctacacaccctccagcggtgcagcggcggccgggctcgcctgcctgcgcgccctccagtggagcagcggcggcggcggcgaccgggctaacctgcctgcggccctcgtcctgcgccgcgccgcaactcctcgtgcgcagtgtcccgcggccttccagtgtgccctgcgcgtcgccgctcccacgcgcagcgccccccggccctcctcatcgcgatggccacctatctgcccgcgtcgtcaccaagtag

SEQ ID NO: 1636 - DNA, 714 bp, Zea mays
  Peptide Sequence Number=SeqID_43415
atgaggagggccggggggcgctgcgcgtgggagcggcgacgcgcagggcacactggaaggccgcgggacactgcgcacgaggagttgcggcgcggcgcaggacgagggccgcaggcaggcgagcccggccgctgccgccgcaccactggagggcgcgcaggcaggcgagcccggccgctgccgccgctgcaccactggaggcgaggagggcgagggagcagcgccggtggggaggaaggcggccatcgcggggaggggcagaggcccagcgcggcggcgggtggatcccacgcctgtggtggccgcgccctgggcgccgacggggaggggcagaggccctgcgcggcggaagcagccgagccgcgcgagggctgcacgttcggcggcctcgtcctccgttcgtgcggctctgagggagagagagttgcagggaggttgagcggcggggctcgattttacatggaaccagagacctctggcagtggttcggtggcaagtggttctgcaggccgtggatctcagtcagcagcagcattccatagcactcgggtccctggtggtgcagctgttaggccacttccagctctgaaggggataacaccagcggctgcagcgaaggcctcgagcgaagggtggcgtctttgccttcgccccaacatttgccctccgagggaccagttcgacaaagtcacctggtgccgaagacgtcgctag

SEQ ID NO: 1637 - DNA, 369 bp, Zea mays
  Peptide Sequence Number=SeqID_43416
atggctccaattgtcctctcgggggagaagatagacatggcattagccttgacagagatagacgattccaatgacaatccgaagcatgttagccttgtacagaaggaacggctgaggtcggtttcatctttcaccatcgtcctcgtgctaagccgaagcttcttcagccacaactttggagctaatttatccttcctccagactgcaccttcataccatgcacaccttattctcaaagctgaagcctcctgtgacagggatgccactgatcaggacacaagcttctcaaataagcaaaccaagctgctcaagacgcagaagttcgcgttcgagcttgaccatctggccagttcgttttttcaatcataa

SEQ ID NO: 1638 - DNA, 1013 bp, Zea mays
  Peptide Sequence Number=SeqID_43417
gtgacaccgtcaccgcaaccctggacccgtcactcccgcccgccaccgtctccatcgcctccgtcacatccccgtcccgccccaacctcgccgagcgcctctctagggacccgctccgcaactgcgcgggcgtcgccgccatcgccgcgctccgcgccctcggcgtccgctcccacgccgtgtccatccacctcaccaagggcctgccgctcggctcggggctcggctcctccgcggcctccgccgccgccgccgccaaggccgtcgacgccctcttcggctcgcgcctcggccgcgacgacctcgtcctcgcgggactcgagtcggagaaggccgtcagcggcttccacgccgacaacatcgcccccgccatcctcggcggcttcgtcctcgtccgcagctacgacccctttcacctcgtcccgctttccttcccgccagcgctccgcctccacttcgtcctggtcacccccgacttcgaggcgcccacgagcaagatgcgcgccgcgctgcccaggcaggtcgacgtccagcagcacgtgcgcaactccagccaggcagcggcgctcgtggcggcggtgctgcagggggacgcgggcctcatcggctccgcgatgtcgtccgacggcatcgtggagcccaccagggcacccctcatacctggcatggcggccgtaaaggcggcggccctgcaagctggagcgctgggctgcacaattagcggcgcgggccccacagtggtggccgtcatccaaggggaggaaaggggggaggaggttgcccgcaagatggtggacgcgttctggagcgcaggcaagctcaaggcgacagcaaccgtcgcgcagctcgatacccttggtgccagggtcatcgccacattcggaaagtggtactgcaattgtatcaccaaacaaggaagaatgaaggggaaccccatggatttgtggttaattggctttggaataaatgagatggaggacatcgctagaacaattctgttccgtgggctgtaa

SEQ ID NO: 1639 - DNA, 1208 bp, Zea mays
  Peptide Sequence Number=SeqID_43418
actccgagatcgcgctccacgccgagaccgaccgcctccgcctccttgccggcgcgcctgagctcttccccgacctcgtccccatcggcctcgcctcttccctcgcctcccttctcacccacgacaatgtcgatctcgcagctgccgccgcatcactcctcgccgacctcaccgactccgaggacccctccgacctcgccgctgtccaggccctcgccgacgcgctcgtcgacgccaacgcgctcgacctcctcgtccacaatctctcccgcttttccgagaccgaccccgatgaggccgaggccgtgcacaacaccctcgccgtcctcgagaacctcctcgacctccgccccaacctcgccgacaaagtctgcggcggaaccaagcttctacgatggctcctctcgcgcgtcaaggcacgcgagttcgacgccaacaagcagtacgcctccgaaatcctcgcgatactcctgcagaacagccccgccaatcagaagcgcctcggccagatcaacggagtcgacgccctgcttcaggcggttgccatgtacaaatcaagggacccaaagacgtctgacgaggaggagatgctcgagaacctcttcgactgtctctgctgcgtgctcatgcccctggagaacaaggagaggtttgtcaaggctgaaggtgttgagctcatgatcatcattatgaaacagaagaagctggcatacagctctgcgacccgcaccctcgattttgccatgaccaagttcccgcctgcgtgcgaacgatttgttgatgtgcttggccttaagactgcttttgcggccttcatgggcaaggcaagtggtattaccaaaggctcacgaaggatgaggctactaggaaaatttgttgagaatgaatgtgaaaagatagaccgccttatggagttatacacaaggtattcagacagagtgaaagaagagactgaaagacttgatagtcttgatttggaagatttagagatggacgatgatgagcggtataaccgaaaactcgaagctgggctttacacactgcagatgagagcaagagtagaattacttcttaagcagaacaaacttacaaagcaagatgtgaagagcatacttgaggagtaccatgacaacattggagatttggatggacctgaagagaaggaaagagcacaagtgcggaccaaggaaattattgacgcgttgtga

SEQ ID NO: 1640 - DNA, 843 bp, Zea mays
  Peptide Sequence Number=SeqID_43419
atgaagaactatggcttggttacataccatgaaacagcattgctatttgatgagatgcactctgcagctgccaataagcagcgggttgcagttgttgtagctcatgaattagctcatcaatggtttggaaattttgtcacaatggaatggtgggcacatctgtggcttaatgagggctttgcgacttgggtgtcttacttagctgctgatcagttctttcctgaatggaatgtttggactcagtttctagaggaatctacaataggtttcaagttggatgctcttgcaggttcacatccaattgagatggaggatccggtggccgccatatccgcactcttcccccttccactccttccctggccattgaaggatcacattttattgtatctgaagcatctaccacctgagcttctcaaagaaaggcttccttgtatttctgaaaatgctgttattccaagactgcttgatgatgtcaagaaacctgaaaagactataactgaaactgagattcccaagaggccgatgtggcacacctatctgggttgccgaccacctgaaaccaacccaagcgtgctagagccgcagccgatgatcagcaactttggacgtgggagagggagagccatcgctaccgagacgatgctgggcggcggcggccgtggctacgggagaagtttccatggggctgagtcgtcgcaaagtcgaggcagcaggaatgacagaagctcttatgcaggaagagggacgtatggtggcgggttccagaggcagcagaccacttggcgcccagctggggatgcaggcagacgtggtgggagcgagcagcggcgtggttggtag

SEQ ID NO: 1641 - DNA, 846 bp, Zea mays
  Peptide Sequence Number=SeqID_43420
atgaagaactcccactaccgcgacccaaagatggaagcctactgcgatgaggttcggcgcctggaggacaagttctacgggctcgagctcaaccacatcgcccgacgatacaacgagactgcgaatgagctggctaagatagcctcggggtttctactggggaccgcggtggccgacgccactagaattgtccgcacctgccaaggatgtcagttctatgcgaggcagacacacttgcccgctcaggccctgcagacgatacccatcacctggtcgtttgctgtgtggggtctggacctcgtcggccccttgcaaaaggcacccgggggctacacgcacctactggtcgccatcgacaaattctccaagtggattgaggtccgacccctaaacaacatcaggtccgaacaggcggtggcgttcttcaccaacatcatccatcgctttggggtcccgaactccatcatcaccgacaacggcacccagttcaccggcagaaagttcctggacttctgcgaggatcaccacatccgggtggactgggccgccgtggctcaccccatgacgaatgggcaagtagagcgtgccaacggcatgattctgcaaggcctcaagccacggatctacaacgacctcaacaagttcggcaagcgatggatgaaggagctcccctcggtggtttggagtctgaggacaacgccgagccgagccacgggcttcacaccgttctttctagtctatggggccgaggccatcttgcccacagacttagaatacggttccccgaggacgagggcctacaacgaccaaagcaatcgagctaaccgagaagactcactggactag

SEQ ID NO: 1642 - DNA, 417 bp, Zea mays
  Peptide Sequence Number=SeqID_43421
atggaaatgaacttggagtttgttaccctctcatcggagtgcagtggaagtctttcatggtccaagtccatctttccctttcaatccacctttgagactaaatcaagcaagctcaaacacatgggctcggactcggcctcggccccggaagacgacgaactccgcctcgcccgaccccagggctcggactcggcctcggccccggaagacgacgaactccgcctcgcccgaccccagggctcggactcagccctggcctcagccgacggtctccgcctcgcccgacccaaaggctcggactcgacctcgacctcggaagacagactcgacctcgacctcggaggagcctccgcctcgccctacccagggctcggactaaccacatcacaggaggggccatcattaccctacccctag

SEQ ID NO: 1643 - DNA, 915 bp, Zea mays
  Peptide Sequence Number=SeqID_43422
atgggacccacgccgccgcacacggacgacactagggttgcgcagctcccgctccccggcggcgccgaagattacgtgcgcgactccatccacgcctccctgggcctccccgtctccgatcgctccctccgcctcaagctcctcgcctccgaggagcagcgccaccgcctccaggaccacgtcttctcgctcgaggaagacctccgcgcagcccagcgccgcatcgacctcctcaaggccgaggccgccatgaacgccgccggcctccgccgctgcgtcgaggaaaaggaagccgtggccgccgcatacgccgacctctccgacaagagcagcaaggagtgtcggctctacgagcgggacctcgagcgcgccatggagtcctgtgacgacctcgccagggagaacgacgacctccgcgcacgcctaaaccagaacacagatgtcagttgcctccttttttttcaaacggattccctaactactgatcctctgcttaagaaccgtgctttccattgtctggtggtattcaaaatagatatagatggaaccacgagttttgcctcgtgtgcgttggcagcattgatggtgcaagtgcaagaactacataaggaaaaggagattctgaagatgaatcttgatacggcggaggcagaggtcgtgacactgagtgaggacaacagggctcttgatgaagagatcaaaaggctgctgagtttgttggagaaggagcgacagcgccggtctgaaagaaagaaatctgccagtacatccaccaagaacaagcgcaagtcgtctagcttgagggatggcaacacaactggcagggctcttgatttcggctgtgcagattcttcaaggcatccattgtccccattgccccacaactccccagactacagggcgcacaagaagtga

SEQ ID NO: 1644 - DNA, 243 bp, Zea mays
  Peptide Sequence Number=SeqID_43423
atggcgctcagcggtgcatatcagcagcaagcactgcgcgacgacgagcgcagtagtgctctgcccttgatgtggcgcgacggcaaggaaggaaagtcatcggtgcagcgctttgcgaaggggaacgggcgtggcacggatcggcaagcttcatggagacagggaagacgaacggcggcggctacacccggtggttcatcgaacgggagaagatgcagtggaaaaggagatgaacagttctag

SEQ ID NO: 1645 - DNA, 450 bp, Zea mays
  Peptide Sequence Number=SeqID_43424
atggagcccagaagacgagagcgcagggtcatcgccatcgccggtgcggcagcgctcgttgccgtgggcctcaatatcgccttctccgccgtcgtcgcccaccgtcggaggaagcgacgagagcttccagggtttactgctcaagtcaacctatcagcagctgcgattaaaagaacgaccgaccgtatcatctctaagtcaagggaaacttatgattcagtggctgcagtgcccctagataaagtcagttttgctaatgtcattgcaccattggcagaattagatgcgctgcaattccctctggttcaagcttgtgttcttcctaggatggtatcaccatctgaggatgttcgcaaggcaagtgctgaagcagagaagctattggattcccactttgtgctttgcaggtgcaattttgccacttatttcttacaattcacttggatatag

SEQ ID NO: 1646 - DNA, 108 bp, Zea mays
  Peptide Sequence Number=SeqID_43425
atggcgtcgatgccggtcaaccattgctcggtcacggacgccgccctcgaccccatcacgggcgttgctccacccgccacggatcacaagaactatgtgttcgtataa

SEQ ID NO: 1647 - DNA, 600 bp, Zea mays
  Peptide Sequence Number=SeqID_43426
atggcggcgagcggaggagcgatggggagctacacgcaggcgggcagcgacgccgcgctgggccccggccacggccacggccacgcgcagctcagctcgcagtggagcttctccaggcaggacctgccgcagatctcggagatggggatgataccggccgacatcggggagagcatcgtgggcgccggcgggtgcaacagctccagcgacgccgcgcagtcctcctcctacctctccaggaccttctccgtcggctcctgggacgacaccaactccatcatgttctcgtctgccccctgcaagaagcccaaggtggaccccgccgccggcgccgacgacatggtcaccaacttcagcaccattgacccgcagttcggcctgtccaactcgtccctggagctgcccggcatggacgactacctgcagctgcagcaggactccgtcgcctgcagagaaagaaggacgaggatcagcaagaggctgaagaagctgcaagacctcgtgcccaacatggacaagcaaacgaatacgtcggacatgttggaccttgctgtggagtacatcaaagagctcaaggaccaagttgagcattcttgttga

SEQ ID NO: 1648 - DNA, 336 bp, Zea mays
  Peptide Sequence Number=SeqID_43427
atggaggtgttcatcatcgagaggtccgtcgcctacggcgcctgcctgaggagaggaaagcatgcgcccagcgacagcgcccagaaggaactggccgacgagctccgagccaaagtagctgatgagttcgtcaagcgaagaggagacaccgaatggatgcccatcaccgtctacatgtatacgggcagctccgacggcccaaggatcatagcggaatacggccaggaatacggaaaggacgatccagtccgcgttctctacgacggctacgggcactacgacgcactccagccatctctcgtaagaacacaatcatcgagactgcgaggtgtgtag

SEQ ID NO: 1649 - DNA, 2055 bp, Zea mays
  Peptide Sequence Number=SeqID_43428
attgtggagattgttggtgagctggaggaaattgtttttacattagatagatcagagaaggaagctggtgatgagctgatcaaattgctccagagaaataataaaacaaatggttccagtgacagtggggagcttgaggtattccatatgtctgctcttaaattgggaattacatcttctagggcagcactcaccgagagaagagcccttaagaagctaattgagaaggcccgttctgatgaagacaagcggaaggagcttgttgtgtcatacttgtacaatctcatgaggaagtactcaaagttcttcagaagtgagactggtgatgatacagattctcagggatcgtctccatgctcgccaacagtattaggcatggatgatatgtatgggccgtacaacaatggtcgggcatttagtagacagctttcgagcattcagtctttcaattcaaggtttggatctttcaattctaggcttggatcattcaattgcagacgtggtggtggtccaaggtctgagaatatgtcaatccctcctgaagaacttaggtgccctatttccttacaactcatgtatgatccagtcatcatttcatccgggcagacttatgagcgtatttgcattgagaaatggttcaacgatggtcacagcacatgtcctaaaactcagcagcaacttgcccacctgtcattgactccaaactactgtgttaaggccctcattgcgagctggtgtgagcagaacgattttccagttcctgatggtccaccagggacttttgatgtaaactggagacttgctttgtctgacactgaggccgcaggctgtgtgtcagttgaaagttttgattgtgctaatgcaaagagtgtcaaggttgtcccaatggagaacgttagaaaggaggagccagcaaacagtgaatcgggaactctggatgacggctcctgtaacgatttcgatttgaacgaaggctatgggaacttgctgctcctgctccatgaaagaagtaacatgaacaagcagtgcaggttggtggagcagataaggtatcttttgaaagacgacgaggaagcaaggatccagctgggctcaaatggctttgccgaggcactggttgagttcttgaggaatgctgtgaatgatggaaatgagaaggcacaagaagttggtgcaatggctcttttcaatcttgcagtcaacaacaacagaaacaaggggctcctgttatctgctggagtcaccgatctacttgagcagatgatatcgaatccacggctatctggtcctgccacagcactctacctgaatatttcctgccttcctgacgcgaaggccgtcatcggttcgagccaggccgtgccgttcctagtcgaccgtctgtacagccaagacggcagcgacacgagaggaagctcctgcaagcacgacgccctgtacacgctgtacaacctctcgagccaccaggccagcgtgccggcgcttctagccgcgggcatcgtggacgctctccactgcctcgtcacggagtctccagggtcggaggaggggcttggctggacagagaaggctctggcggtgctcatcagcctcgcggccacccaagctggccgaaaggagatcatgtccacccctggcttggtcagcacgctggcgatgctgctggacacgggcgagtcgacggagcaggagcaggcagtgtcgtgcctcctggtgatgtgcggcgccgacgacaagtgcatcgcgccggtgctccaggaaggggtggtcccgtccctcgtctccatctcggcggccgggactgggaggggcagggagaaggcccagaagctcctgaagctgttcagggagcagaggcagcgggacacgccgccgccacagcagcagcagcagcagctgctgcagagccagctggcggagggcgggaacggtggtggtggagctatcgtgtgccaccgggaatcgaagccgctgtgcaagtccaagtccaggaagctgggcaggacgctgagctcgctgtggaagaacaggggcttctcgctgtaccagtgctag

SEQ ID NO: 1650 - DNA, 402 bp, Zea mays
  Peptide Sequence Number=SeqID_43429
atggcgtccgcacatcctgccgacaggaacggacgtacagagttgacactccgagagccacacggaatcgacgacatgttcgatgacgcctcgtccccgacatctcacaggggccccggaccccgagtggctaggactgggcggacggccgcggaccccgttccgttccttcaatcatcaccgttcagcacccaggtgtttgtgatagaaagatcctcctccctcttcgccacctcctgtgtttacagtagaaaagtgttagaccttgttcggttatttccaatacacatggattggatgagattggaaaaaattcttaagaagtttgacttgtttgggattcaaactcatccaatctcactcaatcctcatggattgagagctaaccgaacaagtccttaa

SEQ ID NO: 1651 - DNA, 324 bp, Zea mays
  Peptide Sequence Number=SeqID_43430
atggcccacgctaagtccatccctgaacctgccgacatcatgtttttcttcttcttttttatttctgggcacaagactagtcaaatgctgctcactgggtgcattggcgccttagtcagatgttggagcttaggtagtagccaacgatggaagcaatggaggccgaagaaggtccttttctggctaatgatgccaagttgcacgcaggaatttgtagagcatttcatccttctgtatctaagctttccgccattttcccctttatcgaagcatcaagacccagaagcaagcctggtatacaagcattgtgttcactacatgtag

SEQ ID NO: 1652 - DNA, 231 bp, Zea mays
  Peptide Sequence Number=SeqID_43431
atgcagcggcacagtggtggcaggctggcagctgagctgaggcccgcctggacacgcggcacccgcctcgtgctttggagccggcctacgtggcccgtgccgtcaggcaattcctgtgaagcacaagtccaacctatcatcacaccgaacccagccacccagcgtctacaattcctcaacgtcgcgccccaactcatccaccgcaacatctgcctagctcctgttgagtaa

SEQ ID NO: 1653 - DNA, 726 bp, Zea mays
  Peptide Sequence Number=SeqID_43432
atgaaggagaaaggttgtgataggcttggcgagccaacgttaaacctagccattataatggagatgaaacccgaaagaaatccattcaagcgtaaccctcttagtgacaggccatatcaggcacaaagtcaagtgagcaaggatcaggtcgctacttccttagtggcgcactacattggcgtccagcatgtatgcccccaagtaggccacaatgggagtcctaagagacttatctggaaagacttagatggcatggtaatcatggttagagatacacctattagtgagaagtttttcataggagatctcaatgggcatgtagatacaacaagtgtaagttttgaggcggttcatgaaggttttgagtatggtagtaggaatcaggaggaagaggaatcttggactttgcggtgcgggcccatagagataaacaagccaaaattgcgagaacaaagtagtggaaagtggaggggagaaagcagaggtcttcaaggaaaagaccatcaaagagggcatttggaaggaagaatacataaacaacatgtgaaagaagatggcaacctacacatggaaggtggcctcagaggcattcggcacgacaaccccagtcgatgtctagggatcctcgccacaacgccttgctctccaggcacccgccgtgttggcttcaggcaaggcgacacaccatggcgagtccgggcacctggacacctagtcagcgcctag

SEQ ID NO: 1654 - DNA, 1296 bp, Zea mays
  Peptide Sequence Number=SeqID_43433
atgacgcgccgcagcgacgcgcgcctgaggagggtcgtcatggagccggcttcgcctccaaccgctgcaagtcgcgcggatgagggcggaggcgagagttttgcagtttctactgctgtcttcgctccgaaatccaaccgaaatctcagaggtcagaggaaagtaggaaacctcgttcgggaacctgctttgagtgagactccaatccttgggcgccattgccgcctgttttttgtgctcggaaaggcgctgtctgattcctgtatatttattttggcaatgctttcagctgcaacaaaactaaccatggatggcactagctttgacctgacagagcacgaaggttcaaatttgtctccttttctactcaaactttttaatgaggtgctacctggagtacataattttgtggcaacattaattgaaggacgtgaccaaaagaagcggccaactgagttcacaatgaaccaagttctccagccatttgttagtgagaagttcaatttcacaaaagtcagcccgttggaggtgatctttagattcaatgacactgagaaagattctgcacaatattttgatggtgttcctgatactgtttcagcttcttctagtgccatcttgattaatgtgagcccaattggctactgccatgtgctattgactcccaagatccaggactgtttgccgcaaaggattgatcaagagagcttcttaatagccatgtatgttgcaagagaagcaaggactcccttcttcagagttggttataacagcctgggcggctttgcaactatcaaccaccttcacttccaggcatactacctgaaagtacagtatccagttgaaaaggcaatcacggagaagctcaagaccctagggaatagcgtgagcatttttcacctggtggattacccagtcaatggctttgtgttcgaaggtggtgcgagcctggaagatttgtcagatgtggtctccaaagtctgcatcttcctgcaagagaacaacagacctttcaatgtcctcatctctgaatctggcaagagaattttccttctaccacagtgctatgcggagaagcagctcctcggaaaggcgagccaagagttcctggacatgagaatcaatccagcaatctgggagctcagtggccatctggtactgaagcggaggaaggactacgaggaggcctctgaagcaaacatatgcaggtttttggttgaagcagctctttctgaaacagaatttcaggagctgaacctatgcgtgctcgacttcctgaccagctctcttggttga

SEQ ID NO: 1655 - DNA, 804 bp, Zea mays
  Peptide Sequence Number=SeqID_43434
atggcttcccagctaccctccctcgccgcgccggcaggactgtgcctgctgtcagctcttgccgcagcgctgctggtgctcaccctctacgtcctgggcgccgtcgcgtcattcgctgtcttctgcgccggagagttcgcccggagagacccgggccggccgccgctcacggggacgatgctccggcagctcaagaacttcgacaggctgttcgacgagcatgtcaggctacaacaatatgagcttatggacatgattttgaactcatttgagaatgatacacagggagcctacaatattggagtaatgaaggatctcttcggggatggaatttttgcaatagatggggatagctggaggcaccagaggaagctggcaagccatgaattctcaaccaaagtgctacgtgaattcagcagcgttgtcttcagagcaaatgctacaagactggtagataagatatcatctgcagcagctaacagaactattctaaacatgcaggatcttttgatgaaaacaactatggattcaatctttaaagtgggatttggtttcgagctgaacacgctatctggatcagataaatccagtgttcagttcagcaacgcctttgatgaggcaaactgtattgtctaccaccgctatgtcgatctgttctggcagctgaaacgttatttcaatattggatcagaagcgaagctcagaaagaacattcagatcattgatgactttgtgatgaatttgatacaccaaaagagagagcaaatgaacgggcaagataatgtaagggctgcaaaactctag

SEQ ID NO: 1656 - DNA, 831 bp, Zea mays
  Peptide Sequence Number=SeqID_43435
aaagccagagaggacatactatcaagattcataatagcaagcaaagaggaccctgaaatgatcaatgattgttacctgcgtgacatagtcctcaattttctgattgctgggaaagacacaactgggaacacactctcctggttcttatacatgctttgtaagaatcctatagtgcaggataaagttgccctcgaaattaaggagtccgttgagtgggcggaggaagataacaacagagaagacttcactgcaagattgaatgacagagcaattgacaaaatgcactacctccacgctgcgatctctgagacactacggctgtatccagctgttccagtgggacaaattagtaacaaaggacaacaacaacaacaacaagatcttttagtcccaagcaagttggggcaggctagacttaaaatccaatggaagccacaaatcaaggatggtaagatggcagaagacgatgatgtactacctaatggctataaagtgataaaaggagatggcatcaactacatgatttatgcaatggggaggatgacatacctctggggtgaagatgctgaagatttcaggccagaaagatggattgcaaatggagtcttccagcaagagagtccttacaagtttgtgtccttcaatgcgggacctcgcacatgcttggggaaggattttgcatataggcagatgaagatcatggcagccaccctgatacacttcttcaggttcaaactgacagatgaatccaaggatgctacatacaaaacaatgtttacccttcacatggataaagggctcaagctgtatgcgtacccacgttcaatttga

SEQ ID NO: 1657 - DNA, 138 bp, Zea mays
  Peptide Sequence Number=SeqID_43436
atgaacttcagacgtctgaatgagaagaaaaggaagtgcaagggcaataagacagaaaccgttccagacttccctgggtgtgagaaagtgaaatttggtgaagttgttgatgctccaccaaagttgtcattcccgaag

SEQ ID NO: 1658 - DNA, 357 bp, Zea mays
  Peptide Sequence Number=SeqID_43437
atggctgtgggtagcagctgtaacagtcttgctgttggacgggtagttctcatcaaatctccaccagcaatcaagagcagaggcaacctaacacatgacttctggagtcatggtcatcatgaggaagccaaggacctgctgctcaagcgcggtccactggaaaaattccggattgatccctcccgtggtcctgccatcaaacttgttgggaatcttctcctcaagcgcggaaagggaaccatcaagagacctacagccagattacaagctattcaatctaacaaaggtgactatggctttcttagcattgtcgatggcagctgtctttgccacctcatcctagggagaggagtttga

SEQ ID NO: 1659 - DNA, 258 bp, Zea mays
  Peptide Sequence Number=SeqID_43438
atggcgcggccggcgagcatgcagcggcggaaggagcgggtcgacccaactaaccgaggagatgaccgatctgaccagtgggaggtaaaacatgtatgtaaatcaactgtatcttcaattttacattttgagtattacatcgttgatgttctcctcgtcatcttcttcgtcgtcgtcatcttcatcatcatccccagagtcgtccgggtcgtcgcctctgggagcaggggcttgaattgctggtgtaggcggtgctaa

SEQ ID NO: 1660 - DNA, 576 bp, Zea mays
  Peptide Sequence Number=SeqID_43439
atggccggccgatgccaccaagctgtggcctggaaacggacgtcgtacaggccgggaagcgagaattcatctgtcggccggccacggtcactcggactgttccatgtcgtcgttttccctgggacatttctacgccagactcatatatggagctctcgatcgctattccggccgcgcgcccgatcgagtcgcgatcggcttcgagtgcacctgcaggagcccggggacacgcatctatccaatcccttacttgagcaagcaggagtaggcgacgggccgttgagctgccccgagtacaggaggcgctacccccacggtggcccaaacgggaatatcagagaagaggagaaggggtggggagcaagcgacattaccgcagcagatctcggggaggaggaggcgacggcgcggcgctcggggaggaggaggcgacggtgcggcgctcggggaggagacgaatcaggaggcgctcccaggcaatgtcgccttaaggtcgagaagctctgtggacgcctccggtccatcgaccaccgcccatgcccgctcctcgacgccattgacttcttcaatggctaa

SEQ ID NO: 1661 - DNA, 540 bp, Zea mays
  Peptide Sequence Number=SeqID_43440
atgcccgtggtgacggggcgcgcaggccgtggggacggggacggaacggtggttgttgatgtggggcctggggcgcgcggcggcctgcggtgcggagtggcaatggcaaggaccagaccacgccatgccctggaaaagtcgctgagctaccgcgtagggacacgggttttctggcggccacccttgggaggcgtggcggtggtgggaaaaggcgggtgccgagcgggcggaggaggggagatcgagagaagaccgtcgcggactcgcgaagaggaggagggggaggaggtcattgagtcctacaccgagccaacagaggcgaccctagaggtcggtgatggcgaaagtggaggactagggaaagagaacatcgacatcatcatcgagcgtcgagggggggagaagggtggtcaaaggaggacaagtcgaggtcatttcccttgttggtggcggcacaaaagcgacagtgagaggagaacgaaggttaaagggttaaggaagagctcggtggattatgtaggctcggcgatgaatgaatag

SEQ ID NO: 1662 - DNA, 516 bp, Zea mays
  Peptide Sequence Number=SeqID_43441
atgccgctgtggacggcggcacatcatcgacgcctcctcggctgcggctctccttctccggccgctccgcccattgacgccgacgtgagctccttatgtcacctcgtttatgttctctttatacgtctagtcggcgtgacttcatgtaataccgcaagttgcgtccgcaacgagatcctctgcagttacttccgcgaggtaactgtagatgagtcactgacgtgtgggcctgatttggaactggactcacgtgtcattgatgggaagttgcagattgcagggtacaaagcaagcaaagctctcttctcaaccgtcgcctgcagaaagaacattctaaagcctggtgttgggatagggcctaataacttcaagtactatgcaagtgaagatgaggctgctgaagccttgccagcagaagacaattccatggatgcggtgattggcgcactgctgacggatgccacctcaccaggaaaacaggacacagcatcagagatgttgggttctcgagcctga

SEQ ID NO: 1663 - DNA, 522 bp, Zea mays
  Peptide Sequence Number=SeqID_43442
atggcctcgccgctgctcaagtcgcactctcagctcgccgccgccgccgccctgcactccgtgaggagagccgaccgctgccctgcgacaatacacctgggcaagttccatgaccacgggctcaggtccggccgttctaagagatccggttcagcgaaggtgggcgccttcccgtcgctggacgtggtgccgctgatggtgacgatggtggagcacgtggacatgtcgcgggactacgtcgtgaccaagtccatctggcatctcagcgacgcagccctcaagagcgtctcttgcttgcgtgcatgggtcaaatcgaaacaggatcccttctacgacagcgagacgtacaggagccagggtggcgacgggaccgtgcactggtactacgacaggcaagaggacctggaggcgtctgcgagggaggagctgctgcgggaggagctgctcgaggagattgagcagagggttgggggcctcagggagctggaggaagcgagcaaggaggagcagctcacaaagtga

SEQ ID NO: 1664 - DNA, 609 bp, Zea mays
  Peptide Sequence Number=SeqID_43443
atggaggacagcaaagccccggtgtcggagcacggcggggagacctccaaggccgcggtgctcgtgggggtggccgccggcagcgggggacgcaggggcagggcggctacccgcgttctggccgtggtcgacctcatcctccgctccgtcgcggtggtcgccaccgtcggcagcgccatcgccatgggcaccaccaaccagacgctgcccttcttcacgcagttcctccggttcaaggcgcagtacagcgatctcccgacccttacgttcttcgtggtggtgaactcgatcgtcgccgcgtacctggtgctgtccatacccctgtccatcgtgcacatcatggcgagcagcgcgaagtacagtaggctggtcttggttttctttgatgcggcaatgctgctggcgctggtgacggcggcggcgtcggcggccgcggcgatcgtgtacctggcgcacaagggcaacgccagggccaactggctcgccatctgccagcagttcgactccttctgcgagcgcatctccggctccctcatcggctcattcgcggccatggctctgctccttttgctcatactcctctccgccgccgcattggcgcggcgttag

SEQ ID NO: 1665 - DNA, 915 bp, Zea mays
  Peptide Sequence Number=SeqID_43444
atgtcgtccgggacgcggcgacggtactacatgcttgggggcaagggtggggtcgggaagacgagctgcgcggcgtcgttggccgatttgagtggcgggacgctcgtgcaggtcgagggccctgattcacctctgtttgcgcttgagataaatcctgaaaaggcccgggaggagtttcggacagtaagtcaaaaaaatggaggaacaggagtaaaagatttcatggatagcatgggccttggggtgcttgttgagcagcttggagagttaaaattgggggaattgttggacacaccaccacctggcttggatgaagcaattgcaatttctaaggttatgcaattccttgaagcacaagaatacagcatgtttagtcgcattgtatttgacactgcccctacgggccatacactccggttattatccttgccagatttcttggatgcgtccattgggaaaatcttgaagctgaggagtaagattgcttctgcaacatcagctattaaatcagtatttggacaagaggtccaacagcaggatgcagcgaacaaattagagcaactcagagaaaggatggtcaaagtaagagagcttttccgcgacacggaatcaacagagtttataatcgtgacaatcccaacggtgatggcaatcagtgagtcatcaagactgcattcttcgttgcaaaaggaaagtgttcctgtaaggagactcattgtgaaccaagttctgccaccttcaacatcggactgtaaattctgttctataaaaagaaaggatcaaacgcgtgcattggatatgatacggactgacccagagttaaaaggtttgaacattatccaagcacctcttgtggacatggagattagaggtgttccggctctcaattttttgggtgatatactgtggaagtaa

SEQ ID NO: 1666 - DNA, 465 bp, Zea mays
  Peptide Sequence Number=SeqID_43445
atggctttccggcagagtgacagaagcagaaacaggggcagcgccatcttcgaattcgccgagtcgccggtgaagaagcgggtgcgggcgaagagctcctcctgcaatggaaaccgacgatggtcagggggaggatctcggacgggggtgggggcacggtggctcggtgtaggtctgatccgcctccccgtgggcatgatgcgatctaggaacagagccacacgtgggcggggacgcgcgtccgggcgcagggaggggtcaagcgcaggtggggagactccatggattgcgtcgatctatgacaaggaagcggaatccatggagagcgcggcgcggacgcggttggagaggcaggggcgagagtttttggagcaaccaaaaagatactctaaaaatcatggagtttgcaactctaaagttagggtgtttgactcttgcgagcttcttcttaaagttatactctag

SEQ ID NO: 1667 - DNA, 771 bp, Zea mays
  Peptide Sequence Number=SeqID_43446
atggaggaagcggaggcggaggaggagaacaagagtaccaaggctgcgggaatgggatgcaagaagaatgtgacgaggctccagaggtcattcctccacctgtccagagcgctcgggaagctccacggccgccggggccacgggaacgcgaacggcgaggcgtcgctgtcctcgtcgtcctccgctgccacttcgtcgttcctctccgggtgcatgcatccccggacgcactccttcgccttgggccgccgccaccgccacaagcgcgacggcggcgggtcggggtcgggggacgctctcgccgtcaacttcaggtcgctccaggtcgacgacgagggcggctcgtcgtcagcgcagcactgttatcacggcgaccgcgggagcgaggcggacgagcccaaggcggtggtccgtggcgccggcgtcgcggtggccacgctctccgcggcgccgtacgaagacttccggcggtccatgcgggagatggtggaagccgccgcggggacggggagcggcggcgccgccgcggcggccgtggactgggacttcatggaggagcttctgttctgctacctccgcctcaacgaccgcgccgtgcacaaggacatcctccgcgcgttcaccgacacggtcgccgcgatccggcgccggcgcagggcggcgaagagcagccgcacgcgtcgtaggcggcgcaggcagccgaggcccggaggagacggccccggccgtggcgacgactgtgacggcgcggaggcggtgacctcgtcgtga

SEQ ID NO: 1668 - DNA, 171 bp, Zea mays
  Peptide Sequence Number=SeqID_43447
atggaagggaagatgcacttggacgtcgctggtgaagagatcgccggagaggaggggaggtcgctggcgaggggggcagatcgccagagacagagagtggagacagagcagagaagaggaccctggttaaaggacttaaccctaaatagtggaaaaaggggtaaagcttaa

SEQ ID NO: 1669 - DNA, 135 bp, Zea mays
  Peptide Sequence Number=SeqID_43448
atggcatacgagcagtttagaaaagctagggtttctattgcgcaaatacgaaggctggacccacagaacccgccaggacaggccgaggacgccaaccgtacggaggcccgctcgaccgccttcgctctcgtgtga

SEQ ID NO: 1670 - DNA, 198 bp, Zea mays
  Peptide Sequence Number=SeqID_43449
atggcgaaggggtacggtggattgcaagtcgtgagatccaaatccgatggcagggatcaaagacttatctcacctgaaccgtgctgtttctccccgtacgatcctgttcacgccggaacggggctgcggcatcctacctgcggtggcaggcccaccggcggtggctgctgcgaggctatggatgaactgagtctttga

SEQ ID NO: 1671 - DNA, 189 bp, Zea mays
  Peptide Sequence Number=SeqID_43450
atgtggttgccaatggagaatagcgatgtcagcactgggaggtggagcctgggtagggagaggcaggggagaaggagtggagccgttccggtaaacgataaggtcgccaccaccgacgcaagccccttcgtcatcaacgacctcacagtcaatgcgcgtcaccatcgggcatcgctccgcgaggtgtaa

SEQ ID NO: 1672 - DNA, 2088 bp, Zea mays
  Peptide Sequence Number=SeqID_43451
atgtcggcaaccatcgaccggctcgcgacaccgagtcatgagggtcgtgcacacagtgacgaaaagcgagagtgcaattctgatgaagagaactcagaaggagaaagaaagcccaaaaaggattccttcaagaagagagcagttactacagggtatagatttaggcattccttaaggagaaagagtaaaacaaagaatgataaccatatagcctcaatagaagacataagagatgttcaagagctggagattgttgaaaggtttcgccagtgtttacttgatgatggtctgttgccagaacatcacgatgattatcacacgatgttgaggttcctgaaagcaagaaaatttaatattgacaaagcaaaacatatgtggtcagagatgcttagatggaggaaggaatttggtgctgacaatatagaggaatttgactacactgaattagatgaagttgtgaagtactatccgcagttttaccatggtgtggacaaagatggaagacccgtttacatagaactaattgggaaagttgataccaacaaactagtgcagatcacaactattgaccgctatttaaaatatcatgtcaaggagttcgagagatgtctccagatgaggtttccagcttgttctattgctgcgaaaaggcacatagactcgtctactacgatattggatgtgaaaggcgtgagcctaaagaacttcacaaaagatgcaagagagctaattatgcggttgcagaagatcaacaatgacaactatccagagaccttatatcaactgtacatcataaatgctggccaaggattcaagatattatggggtacaataaaatcatttcttgatccagaaaccgcttcaaaaattcatgtccttggaaacaagtaccaaactaaattacttgaaataatcgatggcagtgaactcccagaatttcttggtggcaagtgcaggtgtgaagaatatggaggttgtccaaaatcagacaaaggcccttggaaggaccctgaaattttcaagagggttatcaatggtgaggcaaactatggtcgacaagttcttgctgtatcaagcataaatcagaaggaagttggttgtactgaacacacaactttaaaatttcaaggacatgcttcctcatctgatgctcctcccattataggggatagcatccctgctgctggcaaggtcatggatgcatgctccaatccaagaaacagctcgacaccttccagctcaggttctttctctttgagaaatataccggcaacattgggaggacttaaaactcgaattgttgcatggtcaacattcgtaatcctgaccttgtcagcattcctctgttctgtgctgagcatagtgaccaaaaggctctcaaaccaggccatcacatgtgaccactatagtgctgacttccatcaaggatatatgggaaatggcacccttacatccgtattgacacggcttggtgagctggaggagaaggtacaagcacttgaagcaaagccaccccaagtgccatttgaaaaggaggaattgttacatactgctgtttaccgcgtggatgtgttggaagctgaactaatttctatgaagaaggccttgtatgagacattgattcggcaggatgagctgcttgcatatattgaccaacaacagacagccaaattttgtaatattaataaaccactagctggagtgttaaagacctacatccgaacaagggacagagcattcagtgcacctaatagcctaggccctaggcaagcaatctcaagacatgtcattgatagggcactcactgcacctaatagcgtaggcaagcgatatcaggttagttcagaatgcaggggagtttgtggttactttcccgggagcgtaccacagcgggttcagtcatggccgttttgttgcgctgttgtgcacgcggttgtagggagggcgtattgtggcggctacgagggaccgatgttcctgtgtggcggtgacaacgacaccgtggagccaaggcaatgtcagcaagctgatttttcagattggaatctatggttctttttaaagattgaatatgttctagcatcttaa

SEQ ID NO: 1673 - DNA, 609 bp, Zea mays
  Peptide Sequence Number=SeqID_43452
atgacgaggatctcctacccacctcgctcaatagatctgcgcgatagtcggcacccgccacccagcttcggcacgatgatcggcacctggcacccccacgcgcaacagatccctccccccggcgatgcccatggaaccctaaaccgtcatcgtcaacgacaaggtgtgatcgtacctccactgcctcccagctacgcgagcctaggcctcagcctcggccttgatggcggcatgactgatcttcgactccatgatggtgcatcactgttgaggaaactatggtctgattggcagcttgtgcctgggatgccactggaggctgctccagatttgaattcttgtttactacatcaggaaatccaatttgtaaattgttgcattcttaggaaaaagcaaagaaaagcggctaaatcagacaatattggtgattatgtccttcaacttgttgttggtcagccatctaagaacttaacattgctagaaactggtgagcctatctattccctgacactgcagcttgttggtccatatctgaaaacaaagtctgatagtgacaagaatatgtctgtcatatttgatctcctaaggaagaagaaaattgcaggctag

SEQ ID NO: 1674 - DNA, 393 bp, Zea mays
  Peptide Sequence Number=SeqID_43453
atgcaaagtggcgtcgtgctgtccggggcgacatctcagtggagtgtcttcaccaggaacataataaaacacattatggatctcgacaaaagatctgacagggatggaaagaattatggcaacctttcgttaatggatcctgagcatatagtatattcggccatccgcggcaccggcataaataggactgctagagatatgccagtgcgacatttctggaaggttactgcaaaccatggcaagaagtcggtatctgccgctgcttgtgatgattctgaagagtccaacacccccatagccatgcccgttagatgttgtcggaaggtactggcaaacaggggcaagaggcccactctaattactaagcaatccagcagtgacggatcaagatag

SEQ ID NO: 1675 - DNA, 243 bp, Zea mays
  Peptide Sequence Number=SeqID_43454
atggcgcgccgtcgcaaggcccgcctactatggggcgccgtcgcgtccgccctcttccccaatatcccgcgcagtcgatggatggtccgcctcttcaccgttcatggaaatgtcacaaaggcatctctctgtgtctacatgcacatgatagagcatgtcatttgctccaactaccctgtgatcagccttttccccattaatgaagctaactggtttattctggccaaatcacagatggaatga

SEQ ID NO: 1676 - DNA, 492 bp, Zea mays
  Peptide Sequence Number=SeqID_43455
atgggcaagaacaacaaacgcaagcgtgagccaactcctccatcgaaggagtttggtgactcggagtactcagaggaggagttctcctctgagtctgaggggtctccggctcccatccccctgcatgagtcgtttgacgactcagacgactcccaggggctcgcgacggaggtctggacgtacatccgggccgttgagcgctccgggctcgagggcttggatgagtcggagtactcctcggatgaggaggactcggacggcggcggcgaggacaaggacgacgacgacgacgacggtggcggcggtgacgatgacggtagcgacaggggcggcggcagcagcagcaaggacggtgacggtggcggcagcaggggcggtagcggcggtggcggcagcagcagaagcagcaccaggggcggcagcggcggcggcagcagcagaggcagcaccaggggcggcagcggcggcggcagcaacagggccagtggctag

SEQ ID NO: 1677 - DNA, 696 bp, Zea mays
  Peptide Sequence Number=SeqID_43456
atggtttgctacatgtaccacaagtactatgagtgcaaggtgaagaatggaggagcatctgcatcctgctgtcagcagccggacgcctcacggctcacgcggcttctttcctgcgtccgctgcggcaccgccggaggccagatccccaacgcgcggacgcgccgtcaaacaggcaggggcgcagggcagttatctttcctgcgtccgccggaggccggatcccctacgcgccgtcagcccgcaagccctgctctgaggtccgccctgcgtagacggctagacgcagctctgagctccgcgcctccgccctgctgtgagcgactaagcttcgccctgcccctgcgcagctgcgctgagcgccttcaggttcagtttggttccctgcgtatgatgtttccagtttggttcagttttgacatgcgatgtattagcaggatgacgtctagaattggctctggctcgcaatctccttgcccaccagcctcctcacaagatggtttgaggaggcagatctcaaacagaggtagtgctactactccaacaagtgcaggtggtgcgactgatactccgacaccgtcctcaagtgctgctgctgctggtactccaacacctatagatggaggtacagataatgtggttgtagatggggaagatggtaatgtaactgttggaagcaaaagaaagctcaaatctgat

SEQ ID NO: 1678 - DNA, 345 bp, Zea mays
  Peptide Sequence Number=SeqID_43457
atgcgggagacgccggagccggacgggacacagcgggggatgtcggggccgcacgaggcgacagaggccgaggccacacatggctgtgcggaggagggtggcgccgggggggtcgcacgaggcgacgtgggggacgccaaggtcgcacgaggcggtgcgggggagaggggcgccggtggggtcgcgctaggtgacgcaggggatgccgaggccgcacgaggctgtgcagaggggggcgtcgcaggcggggccgcgcgggttggcgcggtggatggacctgcagggaagggtggtacgacaataggggacacagggtcgacatcgaggactcgtcgagctcggtga

SEQ ID NO: 1679 - DNA, 2631 bp, Zea mays
  Peptide Sequence Number=SeqID_43458
atggagtcacggatggatcagtacgaggttttggagcagattggtcgcggcgcctttggtgctgccatcctcgtcaaccacaagacagagaaaaagaagtatgtgttgaagaaaatacgtcttgcaaggcagacagagcgatgccgcaagtctgctcaccaggagagcaaatggaaattgcagatggctcttattgctcgcttgcaacatccttacatcgttgagttcaaggaggcatgggttgagaagaaactactgagatggtttgcgcaattggcattagctgttgactacttgcattcaaactttgttttgcatcgagatctcaaggttgtgggaacaccaaattatatgtgcccagagttgcttacagacattccctatggattcaagtcagatatatggtctcttggatgttgtatgtatgagatggctgctcatcgacctgctttcaaggcttttgatatggctggactgataagtaagataaatcgctcctccattggccctttgcctactttctattcttcatctatgaaaacacttatcaaaagcatgttgaggaagagtcctgaacatcgacctactgcatccgagattataaaaaatccatacctccaaccttatgtgaatcaataccgtccatttgctaatatattacatcctggtcgatcaccagagaaacctggcaccgattcacggagcagtcagaaaagtatgtctgggagtcagtgtagtagcatttctggaactggcagtgatatggatagcatacaatcaaatgaaagaaacacgtcaggactagcttcaagttccagcaacaccattgataccgagggtgctgaaactactgaacttcagagacataaagatactgcttgtcctggactcaagagacaagattcatcaaaatccgtacaagataatcaacatcctggacatgagaataagcaaccaaagataattaagaagatactaacaactctaagagaggagagcaaatttagggaaagcaattctcctgttagagctagccgtgtaaagctaaattcacctagcaatagagaacgctcatctgacgactcaaagcaaagtgatatttcctccagttcaaggtctagtgaagttatgtcacatgaatcagcaaatgcaagctgtgaacctgtcaaacgaggacatgcatctcctcccttgaagcatttgtcaccaattgttgagcattctccgaaggttaaaattaaagtagatgagctattacatccacaccttgccaagcaggttggagaagttgttgatgcagctgcagggaaggttaagaacagaacaccgcccatttttattaaatgcaccagtattcctactcggaggcaaggagtagcaagtccaagccgtcaacacactggggtaaagcgagctcacaataaggtcatggcagagcatgcaaggaatccttgtcagcatctccatagtccaagcaacgctcttgtgaaacttccaagtgttccaatggttcctccaagtcatctagaagatcttaagagaaaaccagacaatacacgagcaaaatctgctcctcctagggctttagcaaccaaggaagacaacagtgcttgctccagttctacgattggtaatgctgaaaacaccaaccagtctgaaccgtctgaacctgactcaccaacttatttggtctcatcctgcaaatgtttgatacctgacactatcatacaaaagcacggcataacaagtaaaaaaagttcagaaatcatcacaaccaattgtgagaagaaaatgactagtaatggtgatcttagtctaagcgcagccatggtgcaatcttctgatattcctgaacaagagtttatttgcaaggatggaatgctctccagtcaggtgggtcagtgcagtgaaacagttactgtaccaagcgatgaagacaagttcacagtgcgggaactgctttcatcagtaccagatctttgttccttggtcccaacaacaatgatgaacactgagccaggaagaggacccactctcacccagtcatcagagaaaccatcgggtcctcatttaaatcctcctccagttgaggacattatacatgtcataagccacagcagtttccatgtgaatggtgagcaggcagtaaaagaaactggatcagagagcattgatgttgacaaacgtcttaacatggtaagagaagagataggtgtaagaagcaccgagccaaacctcataccttctggacctatagattctgatacggtgaagccaaatgtagtagaagctaatattacctttcagaaaccatccagtacagatgccataaaactgccaaccataccggaaggaaattttagtactctggagaccaacaatgggtttaagcaggaagcagctccggctaaggaaatactagatgtgacatctttcaggcagcgagctgaggctctggaaggtctcttagaactttctgcagaattactggaacacagtaggctggaggagcttgcgattgttctaaagccatttgggaaggccaaggtgtcccctcgagaaacagcaatatggttggctaaaagtttcaaaggcttgatgaatgacgaagcaagccgcagttcaacgtga

SEQ ID NO: 1680 - DNA, 816 bp, Zea mays
  Peptide Sequence Number=SeqID_43459
atggccgatacgttctcgaacaaagaattttttcccgaaagaaagcagagagcaatgctcaactgcctaacggatggcttctacgggagatccgaagataccctggaactcatgaaccaccatccacaggagggggttgtctatggctacaccgaggtcacctacttggccagcaccggtcctcccccgccgtaccatcctcctcctcctcttcctcctccgccgccgccaccaccacgccgcccgagcccgttccgcatcatcgtaagagtcttcatcggcgtgtgcgtcttcatcggggtcctcgctctcctcatctggctcatctaccggccccggacgatccaggtggccgtggccaccgcgacgctcgcccgcttcgacctcaacaccacgtcgatcttcaccccgccggtgctgtcctacaacctcaccgtgatgttgtccgtctcgaaccccaacaggcgcgtgtccgtctattacgaccagctccaggcggcggggctctaccaggaggagcgcttcgggcgcgccgcgctgcccgtgtcgttccagggcacgaggcgcgccgacgcggtgccggccctgctcgtgggcgacacgcccatggggttcggggactccggcgtcgccgcgttcggtgaggacagacgcgccggggtgttccccgtggacctttgggtggaaggggtcgtgcggtacaagttcggtgagctgatgaccaccacggcgagcacgctgacgatcaagtgccatctggcgctgaagctcatgcaggcgtcgggttgggtcgaatgtactgtgagcgactcatga

SEQ ID NO: 1681 - DNA, 717 bp, Zea mays
  Peptide Sequence Number=SeqID_43460
atggcagcctacgagaagcagcagcggccggagacgccgctgaacgccgcgtactacggccagccgatccctccgccgcagccgcccgcgtactacccgccaccgccgccgccgccacccgtcccacgccgcggcggccgctcacgctgcctgctcggctccgtcgtggccctcgtcgtcgcgctcggcgtcgccaccctggtgctctggctcatcttccgcccggacaacctcagggcctacgccgactccgccgcgctctcccgcttcgacctcggcagcggcggggacctcctccagtacaacctcaccgtggacatccgcgtgcgcaaccccaaccgcttcgggatccgctacgactacgccgaggcgcaggcgttctacgacggcgaccgcttcgggttcgacccgctgcagcccttctacctgggccgcaggagcgacgcccgggtcacggccacgttcagcggctcggcggcgatggacgacggcggcgacgcgctgcgcacgtaccggagggagagcggggagggcttctactacgtcacggtgaaggtgtactcggaccttagcttcagggttagggtcgtccgccgccatgacttcaagagcaagatcacctgcgtgctgcggctgcccgtgcccgctgccggcggcaacgccaactccaccacggcgatgacgacgctcgggacgaggtgcgacgtggacttctga

SEQ ID NO: 1682 - DNA, 270 bp, Zea mays
  Peptide Sequence Number=SeqID_43461
atggccgaagcgtcgaaaaaggcatggctgggcggggcggggcgggcgagagcctgcgaggctcacggcctgccgcagtccgctcggcaaagggtcgacgactcggcggggggaagcggagcctggagccaagccaagggcaccgtcatcatgagccgtgccgtccctactctagactgcgcgctcggctcatcagccgctgaggtctcaggcggcgggtgcagcgccggagcggcacagcgcgcaggaaaacatgacaaacaacaataa

SEQ ID NO: 1683 - DNA, 612 bp, Zea mays
  Peptide Sequence Number=SeqID_43462
atgtggctgtgcctttgtattaaaggaaaccagctcctcctccctcctatcatcctcttcctcaacgctccctcgtcattatataacacgaggatcagttcagagctgcttgacaaacactcacacctagcgaacagctatacacccaaccaggtgggagagctccaagccaccaagaccaaggtaatgcctagtgcatgtgatcggaacctgtgcggcggcggcggcggcggcgacgatgagcaggaacaacggcaaggcgtcgaagctggagctcctaaggatgggcctgtcgagggcgaggggcgggccctcggcgacggcgcggcccggcggggacagcggcagcaacggccgcgcgacgacgtcgccgcgccgggtgtcctcctcgtcctcgtccaccgcgtcgccgccgagctcgtgcgtgtcgtccgagggcagccccgacgcggccgccgccgcgccggcgcccatggtcctggccgggtgcccccggtgcatgattctgaaaggaatggggaacttagatatgttcagagaggccccgtccagtatgatcaccgatgcagaaatgtctcctggggccagacccaaataacggaaaatccatga

SEQ ID NO: 1684 - DNA, 603 bp, Zea mays
  Peptide Sequence Number=SeqID_43463
atggcggcggcggcgaacggcggagacggggaggagctcctcctgctctcggccgtggaggctggccgcggcggcggcgtacccaccgaggtggaggattcgtggcggctcaacttcgaggggttccgcccgccggaggcgcaccaggagaggccgccgaacggtccgcttcaccactgcctcggcgtgctagctcaaggtcctgaggatgttgttgctgaatactatcaacagcaagtggagatgcttgagggttttagtgagatggacacacttacagatcgtggtttccttcctggaatgtccaaggaagaacgagaaaaggttgccaggagtgaaacattagccatacggttgtctaactttgcaaatatggttctctttgctgcaaaagtgtatgcttcagtaaggagtggctcacttgctatcatcgcatcaactttggattctcttctagacttgttgtcaggatttatcttgtggtttactgccttttcaatgcaaacaccaaatccatacagatacccaattgggaaaaagcggatgcagccactggtgggcatggcaagtgatgagcaacaaccaatgagctcaggtggatga

SEQ ID NO: 1685 - DNA, 1296 bp, Zea mays
  Peptide Sequence Number=SeqID_43464
atggaggcgcagtggctcgcggagtatccgcaccagggggccgacaagcggccgcgcaaacgggcccggctcgcctgggatgtcgcgcccacgctgttccagccccccaaggtatggttctggccccgctcgccgcatcgattggctaccagtcgtggggtttggctagatctgggcgcggttttcgctagatttggagtcggttggttcgatcaggggttggagctcggggaattgggggcaattccgatgctatattgtgggcaggaactaattaatgataggatacttaacaagatgggtgaagggacatttggtcaagttttggagtgctgggacttggaaaaccaagaagcagtggctatcaagattgtacgctcccttcagaaataccgagaggctgctatgatagaaattgatgtgctccagagacttgggaagcatgactttactggcagccgttgtgtgcaaatacggaactggtttgactatcgtaatcatatttgtatagtatttgagaagcttgggccaagcctatatgactttctgcgaaagaatagctaccgttcatttcctattgaccttgtccgagaatttgccagacaaatattagagtctgttgcatttatgcatgacttgcgacttattcacacggatctgaagccagaaaacattctccttgtttcatcagagtctatcagggtgcctgattataaggtttctatacgaccaccaaaggatggttctttctttaagaaccttccaaaatctagtgctatcaagctgattgattttgggagtacaactttcgagagccaagaccacaattatgtggtgtcgacaagacattatcgtgcaccagaagttatccttggtcttgggtggaactatccatgcgacttgtggagtgtgggttgcattttagttgagctttgttcgggggaagctctctttcaaacacatgaaaacttggagcatttggctatgatggagaaggtcttagggcctctcccaaagcatatgattgtcagagctgatcggcgtgctgaaaagtacttcaagcgcggagtaaggttggactggccagagggagcggcctcacgagagagcatgaaggcagtctggaaattgcctcgtctgcagaaccttgtgatgcaacatgttgatcattctgctggagatctaattgatcttcttcaaggacttcttcggtatgatcctaatgagcgcctgaaagcacatgaagctctacaacaccctttctttaccagatgcatcagaagatgtggtttctga

SEQ ID NO: 1686 - DNA, 854 bp, Zea mays
  Peptide Sequence Number=SeqID_43465
atggaggagtcaccagcaggacaccaaccggcggccatcctaaattggggacggagggcgcgcagaggcggtctgaaacggaccccaaccgagctggaacccagttcccccgacgccgccatccgctgcctgtgcgctgtcctgtacgttcgcgcaggcgcagctatatatatacacgagcccccggcggcccccatgccttacacaactgcctgcctgcctgccgcacgtcgctctcgcgtggtcttgggggttaaccagctagatcgagctatgcagccgccgacgacggccaagagggacagggcggcgtgggaggcggacgcgggcgccgcggacacggcccgcctgctcatgctcctcgcgcaggcgcaggcgcagcagcagcagcgcctcctgcagcacgcctaccaccacggggtggcgccgttgttccccgcggggcgcgtgttcgagtgcaagacgtgcagccggcagttccccacgttccaggcgctcgggggccaccgcgccagccacaagcgcccgagggcgctccagcagcagcagccagtcgtcgtcgccgacgaccacgacgcggggctgtgcctggggcgccagccgcccaagccgaggcgggtgcacgagtgccccgtgtgcggcctcgagttcgccatcggccaggcgctcggcggccacatgcgccggcaccgtgccgacgccgaggtgcggccgccgcccgacaaggcccgcgacgtcgccggcgggatctgcctcgacctcaacctcacgccgtccgagaactgcgccaagtgccggagcgtcgtcgtgctaggcgccgccgccggccagggtgtgcataaggcgctcgccat

SEQ ID NO: 1687 - DNA, 264 bp, Zea mays
  Peptide Sequence Number=SeqID_43466
atgagaaattgtacatacccctacactacactgccatgtgcgacgtacgagaagagtgatgatgaggacggcgatacgatgatccgagccgtgctgatgggctctgaatatgcgttggctggcagggtgataaagctggaggtggcgaaggaggccggggacctgcacgaccgctgcatcccgcggaagcccaagggcaagaaagacggctggctacctggtcatctcctgcagctgcagcgcgcaggcgcagcaggggaatag

SEQ ID NO: 1688 - DNA, 710 bp, Zea mays
  Peptide Sequence Number=SeqID_43467
atggcggttgcggcggcgggcagcagggcgagagcggagcaggccaggctgcagtggcgggagcaggagccccggagccccgagatggccgcgccgccaaggccgcccaggccgcgcccggcgagggcggcggtcgtgtactacctggcgaggaacggccacctcgagcacccgcacttcatggaggtcgcgctctcctgccccgacggcctctacctccgagatgtgatcgaccggctcgacgcgctgagaggcaaagggatggcgcgcgtgtactcatgggcgtccaagaggagctaccggaacggcttcgtgtggcacgacctggcggacgacgactacatccacccggtggtcggccgggagtacgtgctcaagggcaccgagcgcctgcacccggtgccgccgccggcgctgctggacgcggcggccgcgtcctcctcgtcgtccggctcgcaggagacgcccacctcgtcgtcctctgccgggtgggaggcgcgcggcaggacggctcaccggatgaagagcgccagcgcgtgtggcgcggccgacgccgagctcggggagtacgtggcgtacaagggcgaggagcgcgccgcggacgctgcgacgcagaccgaggacggcggccgcggccacggccacagccacagccagaggcgcgttctggctctcgccgcgcaggaggagctgagcagggcggagacgac

SEQ ID NO: 1689 - DNA, 150 bp, Zea mays
  Peptide Sequence Number=SeqID_43468
atggccgggctcgcgttcattcctgtccggaagctcttcgtgctggacgccggcgcatgtttcttctttaatttgggtagcagatctggcggagccaacgatgtttggtcggtaggggcaaggaaaaaaacacacagatgtaaacgataa

SEQ ID NO: 1690 - DNA, 538 bp, Zea mays
  Peptide Sequence Number=SeqID_43469
atgagcacgcaacccatttcccatcaacaaggcgccagacctcccgacctgagagctaaaggcatcccgaaaggctccctggtctggcgcaccggactgtccggtgtgccaccggacagtgtccggtgcaccaggggacttcgcactgaactcctcagcctcgggaattttcagagccggcgcgctataattcaccggacaagtccggtgtacaccggacagtgtccggtgctccaagaggacgcggctctggaacttggcagcctcgggaattcgcggcagctgctccgctataattcaccggacatgtccggtgtaacaacggggcaacgactacttcggcaccaacggctacctgcggacgcattaaatgcgcgccagcgcgcgcagaagtcaggcacgcccatactggcgcaccggacactctacagtacatgtccggtgcgccaccggacatccaggcgggcccagaagtcagagctccaacggccgaaacccaacagttttggtgacgtggctggcgcaccggacatgtccg

SEQ ID NO: 1691 - DNA, 1122 bp, Zea mays
  Peptide Sequence Number=SeqID_43470
atgaagcagctccacaagtcttcccctacccacgcgccatcgccggcgcacgcaccggctcccaaggccgccaagacggcgcgcccaggtccgcgctcctggatcggctacgtcctccgcgagcagcgcctcctcttcgtcctgctcggtgcgctcatcgcctccaccttcttcctcctccggccctacctctcgctctccccgtcttcccacctccccgacgcccgcccgctcttctccttcgccacccgctccggtgttcccgccggcttccgcccgccgcagcgccgcgtcgtcgtaacaggcggggcagggttcgtcggcagccacctcgtcgaccggcttctggagcagggggacagcgtgatcgtggtcgacaacttcttcaccggcaggaaggagaacgtcgcgcaccacctccggaaccccaggttcgagctgctccgccacgatgtagtcgagccaatcctcctcgaggtggaccggatctaccacctcgcgtgccccgcgtcgcctgtgcactacaacacaagtgaagtttatggtgatccgcttgagcatccacagaaggagtcatactgggggcacgttaatcctataggtgttaggagctgttacgatgaggggaagagaacagcagagactttaactatggactatcatcgtggtggtggtgttgaggtgcgtattgcccgtattttcaatacatatggtcctcgtatgtgcctcgacgatggtcgtgtggtcagcaattttgttgcacaggcactgcgaaggcaaccgatgacagtctatggtgacggaaaacaaactcgaagtttccaatatgttgctgatctggttgctggactgatggctctaatggagagtgatcatattggtcctttcaacttgggaaacccaggagagtttaccatgttggagctagcacaggttgtgaaggaaacaattgacccaatggcaaccattgaattcaaacccaacacagctgatgatccccatatgagaaagccagatatcaccaaggctaagcaactgctacattgggagccaaaggtctctctcaaagaaggccttccgctaatggttcaagatttccgtcaaaggatctcggatgagtaa

SEQ ID NO: 1692 - DNA, 468 bp, Zea mays
  Peptide Sequence Number=SeqID_43471
atggacaccggtgccacagcacctgcacgagctagaaagcggaagggcagtgaaaatgatgcattcatcgaagaagtcaaaaaaatgagagagtctagattagaaatagaaagagatcgaaaggcacgtgttgacaagttctttgagctggagaagagtaaacttgaccttgagcgcgacaaacatgacacaaaatgttattgtggattgctgattgtgcactggtattcaatgaatatatatgcagaaggagtacttatattagtctgcatggtacatttgctggatttgcatcgcaaagcacccaccattggtggtactaagttcactgcttttacagagaatgttcacaacctagctggaagtccatcatcatggaattctcattcacttgatgaaataacagatgctgatgtatctcgaatgcggaaaaagtggagcagtgcacagatgtatctcggatgctga

SEQ ID NO: 1693 - DNA, 249 bp, Zea mays
  Peptide Sequence Number=SeqID_43472
atggtggtcgcagaggagtgcccgctgttgggacctgatacgccggggtggggctgctgcattcttggacgcagacggtctaccgaccctggccagacggtccgtacaactacacatggcacctggccaggaccacggatggtccgatgccaaggcctggacggtccacactgcaatctcttcgaaccacaccaaagtcaccacacttcggaccactctgagtggatcgccgacgatctggccacctag

SEQ ID NO: 1694 - DNA, 564 bp, Zea mays
  Peptide Sequence Number=SeqID_43473
atggctgagcaaaatagtaaaattgggaataatcaagaagggggtcgtaagtcaaggcgcgctcatggaatcctcagtaacgtaaggacgcggttaggaatcctcggtagagtgaggatgcaggtggtggacctggttagaagggccgtgccactcgcgctcgcgccagagaacgacccaagaaaagaggagttcgaactgctccgagagaagaaggaagcgatcgacaggctagcgcacaagcaagtccggcgcatcctgtggtccggcctagggttcttcatgtgccaggtcgggctcttcttccgcctcacgttctgggagttctcgtgggacgtgatggagccgatcgccttcttcaccaccgcgtccggcctgctcgtcggctacgcctacttcctcatcacctcgagggacccgacgtaccaggacttcatggagaggctgttcctgtcgaggcagaggaagctttgtgcggcgcacaagttcgatatggagaggttcatggagcttcagaagcactgtagatgtcccctggaaggccatggccctcgtggtccctga

SEQ ID NO: 1695 - DNA, 1449 bp, Zea mays
  Peptide Sequence Number=SeqID_43474
atggcaacccgctactggatcgtctctctccccgtgcagtctcccggcgccaccgcgacctcgctttggtcgcgcctgcaggatggcatctcccgccactccttcgacaccccgctgtaccggttcaacgtcccggacctccgcgtcggcaccctcgactccctcctcgcgctcagcgatgacctcgtcaagtcaaacgtgttcgtcgagggcgtttcgcacaagatccggaggcagatcgaagacctcgagcgcgccggaggcgtcgacagcggggccctcaccgtcgatggcgttcccgtcgacacctacctcaccaggttcgtgtgggatgagggcaagtaccccacaatgtcgtcgctcaaggagatcgtcggcagcatccagtcgcaggtcgccaagatcgaggatgacatgaaggtcttccttggtgcactcaccatttggatggctgtggagaacttgttgtcgaagattttgcggttgcgttccttccacaaattccatatggtcttttggctggcagactgtcggtcagttgaccaagcagtgactgccattcgccttgtcgtctcctttccagagaaaggaatgctggttttgatcaatttgctttcttgcccagactgcgatggggatgatggtcaaatgcgctcatgtgtggagctgcagtccaaggtagcgacaggggaagcctttgctggtgcctgggaagggttccagaacattttggaggtccgagcagcggaatataacaatgtaaggagccagcttactgcaatcaacagaaagcaaagtgggagcttagcagttcgtgatctttccaatctggtaaaaccagaggatatggtctgctcagagcatctagtaacacttcttgctattgttccaaagtactcccaaaaagactggttgtcaagctatgaatcactcgacacatttgtggtacccaggtcatctaaacagctctatgaagacaatgagtacgcactctacaccataacactttttgctaaggttgttgacaactttaaggtccgtgctcgcgagaagggtttccaggttcgtgattttgagtatagtcctgaagcacaagaaagtagaaagcaggagatggagaagttactgctagagcaggaagttatgaggacctcgcttctgcaatggtgctatgccagctacagtgaggttttcagttcctggatgcacttctgcgccgtgcgcatatttgtagagagcattcttagatacggtctgccaccatcgttcctgtctgccgttcttgctccgtctacaaagggcgagaagaaagtgaggagcatcttagaggacctttgcggcaatgtccatagtatttattggaaaggcgaagatgacgtggcagttgctggtctgggaggtgaatcagaggtccatccttacgtctcattcaccataaactttgtttga

SEQ ID NO: 1696 - DNA, 693 bp, Zea mays
  Peptide Sequence Number=SeqID_43475
atggctgccacgtcctccctactccttgcctccggctccaggaggtggccagcaaccttgcctccttccccctcgccccagcagcagcgtctggttattttctgcctcgctgcaagaacgaggccgctggacagcaagaggggtagctggaggcgctcttccagtgccactggcggccggtcgaccgccgtctcgtcgtcgtcggaaagatgggttctcgaccctgcaggagacggtgactggcgccacatcggctacaaagtcgcgcgccctggggcgatcgagatagtctcggaggacacggcggtgaccgtgggccgggtcgccgacaaggcggacatcgtgctccccgtcgccacaggtcagctagctgctgttgctattatgctatcctccacgcacggtcgccgacaaggtggtcatgcagtttcaggcgctcacgcccggctggagaagaagggcggcagcctgctggtgacggacctggacagcaccaacggcacctacatcaacgagcgccggctcaacccgggcttccccgcgtccgtcgaccccggcagcctactcatcttcggtgacatccacttggccatgttccgtgtaaggaagacggtggtggttgaggcgcccagtactagtaccgaggaggccgagggagctcagcaagaggccaccgcagctgaagatatttga

SEQ ID NO: 1697 - DNA, 402 bp, Zea mays
  Peptide Sequence Number=SeqID_43476
atgggaagaggggagactccggtcgtcggggcaatttcttgttcgagcctggcccgcagcgggcctaaacgggccggcccggcccgtttagcacgaaaaaagcgggctatgcgggccggcctaccaatccttcactaccggaatcgcgttctttgccgagtgtctaagacactcggcaaaggctattttacactcggcaaaggctttgccgagtgtaacactcggcaaagaacactcggcaaagatttcatcggcaaagggttctttgccgagggaatctttgccgagtgttctttgccgagtgttacactcggcaaagcctttgccgagtgtaaaatagcctttgccgagtgtcttagacactcggcaaagaacgcgattccggtagtgaaggattggtaa

SEQ ID NO: 1698 - DNA, 1548 bp, Zea mays
  Peptide Sequence Number=SeqID_43477
atggcaccccgcggccgcaccctcctcctcccgctcgccgcggccactgtcctcgtcgcctccaccatcttcctcttcgccgccgtcggcgcgcgctggcggccggccgacaccggcctccccgtcccgcccgacgccttccccacggccgtgaccattgctttacccaacgccaccacaggcaaagagctctcatttcttgacgagaacggccgcccggacgactcctcctccgcctcagcatccggcgccaccgccgtcagatgcgatccccgcgccgccgccgtcagggtcttcatgtacgacatgccgcccgagttccacttcggcctcctcggctggtccccgccgtcccctgcctccgtctggccagacgtcacggacggctccctgccgccgccgcgctaccctggggggctcaaccagcagcacagcgttgagtactggctcacgctcgacctcctctcctcctcctccttctccttatcgcccccctgcggccgccactccgcagtgcgtgtcaccgacccccgcgacgccgacctcgtcttcgtccccttcttcgcgtccctcagctacaaccgccactcccggcccttgccgcccgagaaggtcggcagggacaaggcactccaggagaagctggtggggtacctcacggcgcggccggaatggaggaggttcggcggagccgaccacgtcatcgtggcgcaccaccccaacagcttgctgcacgcccgggcggcgttgtcccccgcagtgttcgtgctgtcagacttcgggaggtacccaccgagggtggccagcttggagaaggatgtcattgcgccatacaagcacatggccaagacgttcgtcaatgactcggccgggttcgatgaccggccgaccctgttatacttccggggagcaatttacaggaaggagagggagtataaatcaggaaccagcaagttgtacagcaagagtaggacaatttggaatttggtgaaactagctttgtcaaatataaatcaggaaccagcaagctatacaggaggaaccattcgacaggagctatattatatgctcaaagatgaaaaggatgtttacttctcctttgggagcgtccaagaccatggggccagcaaagctagccaaggaatgcactcatcaaaattttgcctaaacatcgccggggacaccccttcttccaaccgcatgtttgatgcgatagtgagccactgtgtccccgttatcatcagcgatgacatcgagctaccttacgaggacgtgctggattactcaaagttctccatctttgtccgctcgtccgatgctgtcgaaaagggtcacctgatgagactgctcagtggtgtaagcaagcaacgatggacagagatgtggagtaggctcagagaggtggacagacattttgaataccagtatccatcccagaaggatgatgcggtccagatgatctggcggtccttgtctagaaaggtgccgtcaattaagctgaaggttcatagatctggaaggttttcaagatctggtaggggaaaataa

SEQ ID NO: 1699 - DNA, 645 bp, Zea mays
  Peptide Sequence Number=SeqID_43478
atgaagtgttggagtggcggtgaagtgacagcgtggaggcggcgcgtggcccccgacgacgacgctccccgtcgccttttcaccgatgcatcatctttggggtatttttccctcgacacaatatcttttgttctggatgcatcatctacctgttcatcatgggcaggagacgttgagggctcggactcgggctcagccccggaagacagcgaactccgctccgcccgacccagggctcggactcgggctcagccccggaagacggcgaactccgctccgcccgacccagggctcggactcgggctcacccccggaagacggcgaactccactccgcccgacccagggctcggactcgggctcaaccccgaaagacggcgaactccgcttcgcccgaccccagggctcggactcagccctggcctccgccgacggtctccgcctcgcccgacccaggggctcggactcgacctcggcctcggaagacagactcgacctcgacctcggagaagcctccacatcgcccaacctaaggcacggaccgaccacgtcaataggaggcgccatcattaccctaccccaagctgactcaagctacgaggaacaagaccggcgtcccatctggctcgctccgccagacaagtaa

SEQ ID NO: 1700 - DNA, 1053 bp, Zea mays
  Peptide Sequence Number=SeqID_43479
atgagctctttagaggcgtgcttcggtacgccgatctcgtcgtcgtcgaccgacagcgatgaacaggacgcccggacggtacggggcctccacatcctgccggcgcaggtggagctccgcgtcgaggagctgccgtggctcgtcggcgactcggccacccggaggtccaggttcgccttctggctgcagaccttgcaccgcgcccggggcctccgctgggtgctcgtcaactccttcccggccgaggccgggtgtccagccgccgccgccgccgccgctggggacgaggacgaggacgacggcgcgcaccggcagcagggcccgcgtgtcatccccgtcggggcggcgctgctaccggccggcggcatcggcgagcgcacgaagcagcagcagcagtgcgtcaacattaataagagccccagcatgtggcgcgcggactcgacgtgcatcgggtggctggacgcgcagcgcgcccggtcggtggtgtacgtctcgttcggcagctgggtggggtcgatcgggccgggcaaggtgcgcgagctggcgctggggctcgaggccacgggccgcccgttcctctgggcgctcaagcgcgacccctcctggcgcgcggggctccccgacgggttcgcgggccgcgtggcgggccggggcaaactggtcgactgggcgccgcagcaggacgtgctccgccacgccgccgtcggctgctacctcacccactgcggatggaactccacgctcgaggccatccagcacggggtgcgcctgctctgctacccggtctccggggaccagttcatcaactgcgcctacatcaccggcctgtggaagatcgggctcaggctcggcggcatgatgcgcgacgacgtcagggccggcgtcgagagggtcatggacgacggcggccacctgcaggagaaggtctgggcgctgcgggagcgcgtcgtgacgccggaggcgaggcgcggggccgaccggaacgtcaggtccttcgtggacgagatcacgagagaccacccgctggtggtgcaactatacagtgtcttgtag

SEQ ID NO: 1701 - DNA, 1449 bp, Zea mays
  Peptide Sequence Number=SeqID_43480
atggctgtggctatggcctcggcattgctcatgctcgcgctggcaacggcgtcggcagcggtcagcggcgccggcgcgccctggaggagcaggaggccgaggccggaggccgacctggtgaccgggctgcccgggcagccggcggtcgggttcagccactacgccggctacgtcgacgtcacctcgggcggcggcggcggcaaggctctcttctactggttcttcgaggcggagcgggagccggacaagaagccgctcctgctctggctcaacggagccgcgaacctgctgttcctggaagcgccggtgggcgtggggttctcgtacgcgaaccggacgtcggacctgcggcggctgggcgaccgcgtcacggcgcaggactcgtacgccttcctcctcggctggctggacaggttccccgagttcaagggccgcgacttgtacatcgccggagagagctacgccgggcactacgtcccacagctcgcggagctcatctacgaagggaacaaaggggcgagcagggacagagccatcagcatcaaaggtttcatgatcgggaacgcggtgctgaacgacgcgacggaccagctgggcatggtggagtacgcgtggagccacgccatcatctcggacgagctctactcggcggtgcggcgggactgcgactccttcaaggaggaggccgacggcgggcggcccggcaagggctgctccccggcgctccgcgcgttcctgggcgcctacgacgacatcgacatctacagcatctacacgccgacgtgcctgctgagcaacctctcctccgctagcgccgcggccggcagcgctaggccgcggccggcgaggctcgtcgcggcgccgcgcctcctctccaagcatgaggagtggcataggctgatgaagcgtgtgccggcaggatacgacccgtgcacggaggcgtacgtgaccaagtacttcaaccgcggggacgtgcagcgcgcgctgcacgccaaccggacaggcctgccctacccgtactcgccctgcagcgaggtcataaggaaatggaacgactcgccggctaccgtgctgcccatcctcaagaagctcatgggcgccgggctgcgcgtctgggtctacagcggcgacacggacgggcgggtgccggtgacgtcgacgcggtacagcatcaacacgatggggctgcggccgcggccgcggcagagggcggcgagccggtcggccgcttcggcaggcggagcggcggcggagtggggcgggtggcgggcgtggtactaccggcagcaggtggccgggtgggcggtggagtacgaggaagggctgacgctcgtcacggtgcgcggcgcgggccaccaggtgccgctcttcgcgccggaccgctcgctcgccatgctctaccatttcctccggggccaggccctgccggccgcgcgctcctccggctag

SEQ ID NO: 1702 - DNA, 666 bp, Zea mays
  Peptide Sequence Number=SeqID_43481
atggcgtggcgcggaggcgtgaatgacggggcgcgaaggatgtcgggggcggacgggggcatgaatggaaaagtggttctagtacagagttgtcttgaggccccgtcgctgtctgtctcctcacgcttgactgctcgccggcggcgccactgtcggtggcagctactaatcgccgcgtccggtggccgcgttgcagcgccggggcgtctcttgttctgctgcagcggattgtcgcggactggacgcggtgaggcggacatccctgtgcggaaggcgtgctcgggcagggccagcccaaccgccgttcgtgcgctagagttcctcgctcaggctcataacttctttatggtgtttgatattggaagaggtggtccaatggtggaatatgagaggagaatagcatcaggagagctagtagacggtgatagctttcaggttgatacaattcaacaattacaaaggctctatgaggagttgattgagaatgaagaagactgtcagctggatagatataaatcatctgagaaatcaggccggagtcgatggctatggtcccgcctcattactcagccttctacgtatgctcctattaagggcctttacctctatggtggtgttggtacagggaagacaatgcttatggacttgttctatgaacagctgtga

SEQ ID NO: 1703 - DNA, 177 bp, Zea mays
  Peptide Sequence Number=SeqID_43482
atgaagaaggtgacgctcgaggaggatcctgctgaagcttcaggcgacggagcagctgccccgggctcgacgtcgcgcaaaagcctccgcgcgcgtaaaggagacaacacgtatgggagggaaatctacaaaaagctttgcacaataaagattcatccggagaaccacagactttag

SEQ ID NO: 1704 - DNA, 1638 bp, Zea mays
  Peptide Sequence Number=SeqID_43483
atggcggcgcggtcgctgtggcagctggaggacgcgatcatcgcgaggctccgcacctgcgccactttccgggacctcctccgagcgcacggcctcgccgtgcggttgtgcctctcgcagagcagctacgttgccacccagatcgtgcacatctgcaacgcccacggccgcgccgcgcacgccgcgcgggttttcgcccagatccccgccccgaacctccacctccacaacgccatgatcaaggcctacgcgcagaaccacctccaccgcgacgcggtcgaggtctacgtccgcatgcttaggtgcctcccgcacccttcgactgctggcttctccgtcggcgaccggttcacgtacccgttcctcctcaaggcctgcggcgccctcgctgcttctcggctcggcaggcaggtgcacgcgcacgtggcgaggtccgggtgcgagtcacacgctgtcgtacagaactccctgatcgagatgtacacgcgctgcggggatctgtcgaccgcacgcaaggcgttcgatggaatgcgggagaaggacgtggtctcctggaacacgctcatctccgcgcacgcgagaatggggcagatgaggagggcacgggagttgttctattcgatgcccgacaagaccgtggtttcctggaccgccttggtgtccggatacaccgccgttggggacttcacaggtgcagtagaggtgttcaggctgatgcaaatggaaggattcgaaccagatgacgtgagcatcgtcgcggtgctgccggcctgtgcccagcttggcgctctggagcttggccggtggatatatgcttactgcagcaagcacggcatgctgggaaaggtatacatttgcaacgcgctgatggagatgtacgcgaagtgcgggtgcatcgaggaagcgctgcagctgttccacggcatgtccgagaaggacgtcatctcatggagcacagcgatcggcggcctcgcggcacacgggagagcacgcgaggctgtcaggttgtttgaggtgatggatagagaaggaagggtgatgccaaatggcatcacattcgtggggctcttgtcggcctgctcccacgcgggcctcgtggacgaaggcctgcgctacttggatcaaatgaaggaagattatggtgtggaacccggcgtcgagcactatggctgcgtcgtcgacctcctcggccggtcagggcgaatccaacgcgcgctcgacaccatacgaggcatgccggtccctccagatggcaagatatgggggtcgctgctcagcgcttgccgcagccatggcgacgtcgaaacagccgtggtggcggccgagcggctcgtcgagctggagccaggggacgtgggcaatctcgtcatgctggccaacgtgtacggcgctgcaggccgatggggcgaagtggcgagtacgaggaaggagatacggagccggagcacgaggaagacgcccgggtgcagcatgattgaggtggacaacgtggtgcgcgagttcgtcgccgggcaggacctggggcctgagttgggaggcattgctaccgtactggatatccttgcctcgaagcttgccgacgatgaagaattagttgattcagattgtggggatgccattgtgtttgttagtgggtag

SEQ ID NO: 1705 - DNA, 141 bp, Zea mays
  Peptide Sequence Number=SeqID_43484
atggccaaacagtggtccggtacgggccagacaccgcgggccacaactctggcccaggtacgtcatgccaacctgctgactatgccagtggtccggtacgggccagacaccgcgggccacaactctggcccagaaacttga

SEQ ID NO: 1706 - DNA, 585 bp, Zea mays
  Peptide Sequence Number=SeqID_43485
atgggaggtacaagcgccgcagtcccgagccacggcctcgcctgcgcgcccccggcagccgtcactctgaatccgcgggcgcggcggcggcgcgcttcctcgggcagcggcggccacaggagcagcccccagcagccactgaggagcgacctgctacccccggctaccgtcgcctgccgagctcgctctcagtctgcttcctcgtctaatgtgaactttgggagaggggatgacgcggacaagttgctcgaggatttgctcaaacagcatggcgaggtggtgtacagctccggtggacctccggatcccaccgttgaggccgacgacgatgccgagtgcttgtcctttgccgtctcgttggctaaagctgcaagtgagataaaggctactgatatccgtgtactttgtgtgaggcggcttgtctactggactaggttcttcatcatcctcactgccttctcaaatgctcagatagatgctatcagttccaaaatgagggatattggtgagaagcagtttagcaaagttgcatctggttatcaacttctaccagaagatcctacttattggaatagtaaaccctaa

SEQ ID NO: 1707 - DNA, 463 bp, Zea mays
  Peptide Sequence Number=SeqID_43486
cttcggccgccgccaccggacgctgccgccgccgccgctcttcctctgcagcgccgacgagctgggcttcgacgcgcccccgcgcgcgctggccgcggacgaggcgctccagccggggcagctctacctcgtgctgcccgactccgcgctgcgccggccgctgaccgccaaggacatggccgcgctcgccgttaaggccgccacggcgctcgcggccgaggcgggtctcgccgccggcctgtcgccggggcgcgacagccgaggcgggacgccggcgggcaagaggccgcggcggcagtcggcagcgcgagtggctcctcttctagtcgccgtgagcaaggagagcagcccgcctccgcctggcgatggtgctgctcggaagaacgacgtgcaccgtggggtcggcgcgataaacgatgaatcaagttttgatcaagggccggataacacgatgattcgatga

SEQ ID NO: 1708 - DNA, 837 bp, Zea mays
  Peptide Sequence Number=SeqID_43487
atgaacagcaggtgcaggtgcgtgtctatgaacacaaggaagctcagcggccaccggctgccatcgtcgtctgagcctgaggacgatgttctggagacgagagatgagcacgtcgtcgagtccaggccggaggctgagggcgagatggtgcatttcagccacccggagcaccggctggcccggttcgacttcccgtacctgttcatgtgcatgggctgcagggagtacggcgccgggaagaggttcatgtgccagacgtgcggcttccagctgcacgagttctgcgcgctggcgccgccgtcgctccacgaccacccgctccaccccaagcacccgcacctcctcttcttcgcgaagccagcctcgggcggcttcctccgctgcaagtgcgacgtctgcggcaagcccgtgcggggcttctcgttccggtgcgcgtcgtgcagcttcgacatgcacccgtgctgcgccgccatggcgcggcggatggagctccccgccgtgcacgagcacccgctgctcctggcgcccgcggcgcaggacggcgccgagacgagcttcgtgtgccaggtgtgcaggcggacgaagcggtcgtcggggcagcgcgtgtaccagtgcctgccgtgcgggtactacctccacgccaggtgcgccaaggacatggtcaacgggctctacgtgcacggcgtcgtgccgccggagaagaggaacgcgctggccgccgctgccagggccaccgtcaacgcgctgtttggggtcatcggcggactcatcgagggcatcggggagggcatcggggaggccttcgtcgacaacattggaagaagcaggagaatctag

SEQ ID NO: 1709 - DNA, 1692 bp, Zea mays
  Peptide Sequence Number=SeqID_43488
gcgggcagtgaggcaacaggctgcgcgggcgcgtcagcagctgccatcgccatgcagacgcagcagggccaggccatccaccccgcacacgcaactcagcagcagccggagcctggagcagcagttgagctcccccggagaaagctgagccacggcgcctttgttgctctccgccgcacatggacagacagctcgctcttcccggcagtaacagctcaaggttctaggtctcggtcggcgatggagagggagtcgaggtcaagggtgctctcggagacggcgtcctgcgccggcacgccgaggtcggttcagtcgacttgcagtctccagcgccggtactcttcacggagcattctgaagccacatgatggcgcactggacatgtcgccacggttctcctactgcaagcctgccgccgacagagagaagatgttcaacagaagacactccctgaatttaccagagcaattgccagatttggttggggagatcgcagcgctcgagcaggaagtcatacgcaaggaactgcacctgctcgctctctacagaagagcgtttgatcaatacgtatctgaatcctgcagcttcacaagcgaggaggagcaggaggaggcaccaccagaggcaaaggcaggcgcgaggcattccagcctcgtcaacttcctgagcgcctccatctcggagtacgtgcccaagatctcgtgcaagctgtcggaggacatcctgggctgcatcgccgccgtctactgcaagctctcgggcgcggagggggagtgctgcgtggcttcgccgagcccttcggtctcgtcttggagcaccttctctccgaggcgccggaacgatagctggagccctcggtctcggtgcaacaacttcgatagctggagcccgcggccgtgtggagtcgagaaggagagcggtgagcagagcccaggcgtgatgatggtcgtcgttccgaggatacgcgtcgacgctgacacgtttgagtacgcgtcgaagatgctcgagactaccaggtctctgatacagcgcctggagaaagtcgacccggtgaagatgacgcacgaggagcagctctgcttttggatcaatatccacaatgctctggtcatgcatgcttttctggcctatggtctgcacgacaagcgcatgaagagcacggacatgattctgaaggctgcgtataatgttggcggccaatcagtaaatgcgcagactattcagaactcgattcttggatgccgccagtcccaccgtccatcattgtgggtccgcgcgctgttcacgccggcgaaaagatccgcggcgaggcacccgtatgcgctccagcacccagaacccgttgcgcatttcgcgctgtcgaccggagcgttttcggacccacctgtgcggctgtacacggcgaagaagatacagcagcagctggaggcggcgcggacggagttcatccggggcagcgtggcggtgcggaagcaggcgctgctgctgcccaaggtgctgcactgctacgcccgggacgccgcgctggagctgcggcacctggtggagctggtgtgcgagaccttgtcggacgcgcagcagaagcagctgcagctcggcctccggcggagggccgtcgacaagtgcgtcgagtggatgccgtacaagtcgtccttcagatacgttgtacatagggatctggctgacgactag

SEQ ID NO: 1710 - DNA, 315 bp, Zea mays
  Peptide Sequence Number=SeqID_43489
atggctgggcggagaggagccgacgcggtggaggcaggccggcgcggagctggaagaagaccggcgcaggggacggaccggcggcaggggaggaggcaggccggcgcggagctggaggaagaccggcgctggcggcggaccgccggctccttgggggcgtgtctgcgcggtggatccggcggcgcgcaggatcagccggaaggtgatgttgtggtccatatattccttccgcagcagcgagcattctacaacctggaagagttctacggcaacgctacacccatcgaactcccttttgacacccaacggcagtga

SEQ ID NO: 1711 - DNA, 414 bp, Zea mays
  Peptide Sequence Number=SeqID_43490
atgggcaagagcaagaaaggtggcagctcttcacatcactcgggtgacaagcgcaagcacgagccgagtcctccctcggaggacttcggcgactcggaatactcagaggaggagttctcctccgagtccgagggctcttcggctcctgcctctcccccggcgtcatctgatgattcagacgactcccaggtgatcgccgcggaggtatggacctacatccgggccgtcgagcgtgccgggctcgagggctcggatgagtcggagtactcctcggacgaggaggattcctccgactcgtccgaggagggcagcggtggcgacggcgacgacgacagaggcgacggtgacggtggcagcggcagcggcggcgacggcggcagcggcagcaagggcagcaacaaggccagtggctag

SEQ ID NO: 1712 - DNA, 1104 bp, Zea mays
  Peptide Sequence Number=SeqID_43491
atgtcgacggcggcggagtccgtgcacgcgctcacggccaaggtcgtggacctcgacggctccgtggcgcagttcgcgccgcccgtcacggcgcaagaggccctggccgccaccgccagcggagcgcagccgtcgtcgtcgtcgcgcttcctctgctgctccgacgcgctggacttcgacgcgcccatcagcgcgctggccgcgcacgacgcgctgcacccggggcagctctacttcgccctgccagcgtccatgctcggccggccgctgtccgcccagggcatggccgcgctcgccgtcaaggcctgcgcggctctggggacagcgccggtcggcagcgtcccgtcgtcgtcgtcgtcgctggacagaagcgaggcccgtgcggccagcagctggccgcagcggtggcagtccacgggacgagtcgcgccgctcgtcgtcgtgcgcgctgacgcgcacggggagtggaagacttacccggtgcacggcgggtacaaggcggcgcgtgttggcggcggcggcggcggcggcgaccagacggtggggaagacgaaaaacggagtcggttacaagggtatcgcccgtgaccttgcacccattcagaggctaagcgtgatcgtggaaggagcagagctatcgtcgacctctccttctaccgctaccgttgttgatgtcgactaccggcgccgacctcgactaccaccaccgatatcgcctacaaccgtcgtcctcgtcgttaccgtcgtgtgggcgctgctgctacagttgagagagaaaaattgcagcagcagcagctacataaaaatgctcgtctacggccaagacgacgacgaccaggtgtcaactcgctggaaaggctactccgtcatgcacgacgttgcatgcaatcacatgctcatcggcggtaggttcttcaacagagacacgctgctcagcaacccaactgtggtggacgccaattggacacgtgagaccgagggccaaggcacccacacgctctccaccaccggcaccgctaaggcagtgcgtcgtgggcgcgtgtcggtggagtgcaccaccgccgctgtgggggacagatatctctcgggtccactagaaggataa

SEQ ID NO: 1713 - DNA, 1062 bp, Zea mays
  Peptide Sequence Number=SeqID_43492
atgtcccatgtctactactctgacatctcgctcggcagtcggcaaaccttgttgcctgggctctctatggagacgtcgtcggcgcagtacatactgcagcagtacctggcggcgtcgggcgggcagaggctgctgtcctccatccgcaactcgtacgccatgggcaaggtgcggatggtggcgaccgagttcgaggcgggcggccgcgtcgtccggaaccgcatggcggcgcagcgcgccgagcccgggcgcttcgtgctgtggcagatggcgcccgagatgtggtatatggagctggccgtgggcgggagcaaggtgcacgccggctgcaacggcaagctcgtctggcgccacaccccctggctcggcgcgcactccgccaagggccccgtgcgcccgctccgccgcgctctgcagggcctggacccgctgacggcggcgagcatgttcgccggcgcgcggtgcatcggcgagaggaaggttaacggggaggactgcttcatcctgaagctgagcgcggacccggagactcttcgggcgcgcagcgaggggctggcggagatcatccggcacgtgctgttcggctacttcagccacaagtccggactcctcgtgcacctggaggactcgcacctgacccggatccagtccgccaccggcggcgacgcggtgtactgggagacgaccatcagctcgtccgtcgaggactaccgcgccgtggacggcgtggtggtggcgcacgccgggcggtccgccgtgaccctgttccggttcggcgaggcggccgtggggctgggccacaccaagacccgcatggaggaggcgtggaccatcgaggaggtggcgttcgacgtccccggcctctccgccgactgcttcatcccgcccaccgacgtcgggcccggctccgtcagcgaggccgccgagctcccgcggggcgagcggagcaaggccgccgccggcctcgtcctcccgtgccaccgcgctagggtcgccgcgctcgagaaggccgacgacggtggcgtcgcgtggagcggcgccctgcagctcgggtgcaagtga

SEQ ID NO: 1714 - DNA, 243 bp, Zea mays
  Peptide Sequence Number=SeqID_43493
atggccttcctcttgctggcctttgacaccatggcgtcgatcgggttcgggggcgctagagttcttggtgatgcggtcgtggcaacgggcggaggcgaggctgatgtgcgggaccaggaggcggtggcggcagaggaggggagaggacgatctcgacagttgtttagcggcgtagggaggcgggtgttccgcggcatggctggtggcgtgggggcggatatgcggcagtcgcggcggccgtag

SEQ ID NO: 1715 - DNA, 342 bp, Zea mays
  Peptide Sequence Number=SeqID_43494
atgttcctgctcgcagtgtcagagtgcgagattgcactcagcacgggagagatagttgaacagataccagaagaatctggtagaagctatttagaaatatgcgacgatcttgagaaaaaacctcccaagattatgtggaatcaatcatttgatctgcgctcccccatcgccaccagcgatgacgccacccctgctgcatccatgggtgccaggaaagacggcagcactaagacaattagcaaggctcttgttcttggtgttaacgtcaagatgattgcgggtgatcagcttgctattggtaaagagactggaaggaggcttggcatgggcaccaatatgtga

SEQ ID NO: 1716 - DNA, 405 bp, Zea mays
  Peptide Sequence Number=SeqID_43495
atgatgaggggatggaggtccgcttgggcttcagccctgaagctggactttggtccacaccagcctcagcggggctatccggtggtgcgaaagtgcccgcatcaggggcgacagcgtccctacacgaggcggggggcatcgtccaagctagggtcatcctccatcgtcgccgaggaggcggtcgtggaagaggtcaccttggcctgccccaacactaagcttcgagctcgcaaactggcttttatcgccaccaaggcggtgaaacacgacgctgggacgtcggccggggctgcttcctattcccactcgtggctcgatgctgcgcagaaggctatccagcgcgacatcgaagttgcccggcatgaccttgaggggcaggccaggcaggatgctatcattgtcaag

SEQ ID NO: 1717 - DNA, 279 bp, Zea mays
  Peptide Sequence Number=SeqID_43496
atgcatcgcgggccaacatttcttatgggcccgcttcttctccccgtccttcttcttctcctcctcctcggccgccaaccgatgcacctccctgccggatgtgtcttctgggaccgggggtcaggcgttccaaaagcctcgcaacccctatggagggataggaggagtaagatgagaaggaaagaaccaaaaacagaggcacaggacgcagcctgtgagaaattacattcatgccctttacatttattattaacttatgtacgactctacgaggactag

SEQ ID NO: 1718 - DNA, 327 bp, Zea mays
  Peptide Sequence Number=SeqID_43497
atgggtaactgtaatggggagtggttggtggagagttgttcccataattttaaaaaatgttttgctgtttttggaggttttttgcgattcttaatttgccgagtgcttttcgacactcggcaaagcctttaccgagtgtccgaaaaagtgctcggcaaacaaaacttcaccgataaaatgtttgctgagtattctttgccaagaaccttggagaggtccaacaaggacttgggaaaggccaaggagttgaggaggaggagtaagggcatccacaacaggaaggacatcaagtccgacttagccgcgattccattttgggttccatga

SEQ ID NO: 1719 - DNA, 501 bp, Zea mays
  Peptide Sequence Number=SeqID_43498
atggggactcaccagcgattttggagcagcgacacccgaccatggaagagcttggttccgcggcggacatcagtcttcggtgagcaatcgccgcagcttgggatgagctttcttcacacggactccacgaccagcttccccgtgccacgaggaatccccacggtcgccccacgagagcagaggcccggtcatggcaagatccgggtgcggctacccacggcaatgccagcggcagaaggagtggaatggctgcgaggcgcggcgaatctagccatgggtcaactgaaagcgcaggtggtcggccatctatatagggcgaggaacgagccttgcggcggcaaggatcgatcagagcctgaggaaccgcgcggagttcaaccgaagccgttcatggcctgcgagatctacagggagacggcgctaacgctaggggctcgcgcgacaatgactgaacgcgcgcgacgcccagcagagaggctgacaccactagcccacatggcg

SEQ ID NO: 1720 - DNA, 231 bp, Zea mays
  Peptide Sequence Number=SeqID_43499
atgacgacatcaagaccattggagcttctccacatggacctcttcggacccgttgcctaccttagcatcgggggaagtaagtatggtcttgataagtcagaaacccaagggaccttaaagcgcttcctaaggagagctcaaaacgaatttgagctaaaggtgaaaaagaaaaggagtgacaatgggtacgagttcaagaatctgcatgttgaggagtatcttaaggagtaa

SEQ ID NO: 1721 - DNA, 2985 bp, Zea mays
  Peptide Sequence Number=SeqID_43500
atgggggcaaaagtagaacgggaaagttatatgcctggatattatgccacgggggatctcaatttggaaccaaatggtagatggtctccatactatgaggagatgacatcaaatgatcagttatgcaatggcttcacaacaaaaccaacaaatgactattcagaatttgacaaagaaatactcaagcatcaaatacttgaacatgaagctgtgtttagacaacagcctcacaacccactcgctatccaggtgtatgaactgcaccgagtttacaaaatacagaaggatatgatgaaacaacatcaaagcaaagaggtatattcatacccaactttggcagttgcatcacatacaaattcaccatcacaagtgccacaaaacggtgcaaagatgatgtggcagatgccagttcctccaatgtccacaacatacaggaaagctattggagagcataatgatacaaaccagtcctccatgaagttccttagagaaggcagtgtgcagtcctcaccaaatggatttatatcaagtgatgttggtccaagaagcagacaaggcacttttgaccttcaacttccagctgatcattatatagatgacgatggcacatcagataacaagcccatagatttccttggtttggcatcagatacaaaaccccggaatgatgctgagcttacattagttagtgcagaaggcttgggcaagttcagtgataatagttcatcctcgggtttgcagactacaaataatcttggaccccggcaggttaccgacctgaatgaatcaaatactggcttccatatgggtagagcaaatggatcagtttccagaggccttccgcgtacccttgagaactcatggaaccaaccaatattgagagcaaacacaactaatttcagtttcagtaaaaaacactccaaagaaaagcacacagatgaaggtacaagctcaaatttctttgacacaagtgtgaaaacaatacatgacgacaaaccatcaatcaataaaggtaaacaagtcagcagtgtaacttttttagcacccagatataatgatgctgaccccccaaaatacttcaaagctgttgatgggaggcctgccactgccagttataaccactttgtttaccaaggtcagaatagttcagttggatggattgcacaaagtcctctggaaccttctgttatcaataattttgctagagttgaccgtccacatcatttgaatatgggtacatttactgcccccgtctctattcctcaaatagacaatccttcaattgtctccccgatgggttcttgcacagcagacccaaggagcagcgttatcaataatcctgctttaattccaagattcaatgggttctcaactgtgaattcgtacaccagtcttagtgctgtgacgcagagcattggaacttcaatcccaaagctgataaatgtggataatgtagataaacgctatcgtggttttccacttgattcgttttccgtgtctcactcacgacatcaggtagcagtttcaagtaacctggagcaaaagaattcccagaagttggaagattcagatcaacagtcccatggcaagggtatgaagaacttcaatttgaatgagacactgtcagattgtcaggaagatggtcttgtagaacaagatgggagatgtgcttccagttttcagcatgataaagatggggggtcagtacttgggatctcttggctcaaaaaaaaacttatgtctgctgacccaacagctgtggagaagccagggaagatttttggacattcattgggaactgcaatagagctgaaaaatactaaagaccagaatgaaccagctgtgactattcggaatttgtcagattctgcttctacatctgttggctgtgcaattaagaaggataggccttcggataacattgttaccggaactctgcctgtctgtaataaagcccaagagggtgctacatgtttacctctttcgtgccagaagcatgtgcctaaagatggacaagccgctgaaggagccaccaagaaaagtggcgcccccatcaggaacttcatcgatctcaatgatgatgtaccaaatgatgacaattctgaggaatcagtagtgtcacacgaatgccacgtggaaccttcacggaacaaccatcctaaacgagcatttgtgattgatttagaggtgccggcctgtgaagaggacgcttcgtgggatattgatcaagaatgcgcgcagccgaaacctgatgcgtaccaggaagttgacgacggatctgatacatccgctctagctgcagccgagaacatcgtagcgttgtcaaggaatacgccaacagccgcagaggcatcggacgatacgttgcagtggtttgcagatctcgctgtattaaacatcaacgaccttgctgagcaagctgaactccaagcttgtacgaatgattccagtaactacgagtcggattcattcgagtccttgacactgaagctggaagagaccaagatcgacgatctctggagcaggccactggaacctgaaaccgcaaccgatgaacagacagtttcagctgctcaccttctcaccaagcccagaaggggccagcaaaggagacggcggcagaagcgagatttccagagagatgtcttgcctggcctttcgtcgctttcccggcctgagatcacagaggacgtccagttgctcgaggggttagtccaggcttccgggggatcctgggagtcgagcttgactaggcgaggacgttgtggtgggcgtgctagaggcaggaaacctcggaaaactgtagtaaccgtaattgtagaggaggaggaagaggaggaggtagaggttagcccaccgccaaaacctgctggcactggggaattggaagccgatggcaggggtatgatcgggtggggcagaacaacaaggcggtgtcgcagagcgagatgtccgtcaggtaacagcatggctactgcgtcttga

SEQ ID NO: 1722 - DNA, 309 bp, Zea mays
  Peptide Sequence Number=SeqID_43501
atgggtactactactctgaccgaacccgttcgcttggccgattgtgacgggcctttcaccgctggacgcctggaggactgccgccagcccgcgacgtcgcccactggcgcccgccgcgtggccgtggtcgtgttcgtgtccgtgtcgtcccgtcggatgggcgtggggtgggagtgtgggactatgggagggcgacacgcaaacaacacagacgggacggcggaggcagccagcgttttggcttcgtcctcagcttcctttcctactccgccgttgctcctgctctcgcggaatccgaggtcggaatga

SEQ ID NO: 1723 - DNA, 321 bp, Zea mays
  Peptide Sequence Number=SeqID_43502
atggcgcactcctggttaatggcgctggttccggagggcatgggctgcgtcctcctcctcctccatattggtgcaaagcccaagagctggaccatcctgaggaagaatggtcgtgtctgggtactgttgataccaggtgctcttcactacctggctcgaaggatccgaaaaacaaaaatccccagtgcgatcgttggggccatagatagaatccccaggggtgcaaacctggaacagaagcaggaatctcagctggaggttgaagccgtcgcctgggaagtcagaacatcaggaagacctgatgtcttcatcctcaggtga

SEQ ID NO: 1724 - DNA, 681 bp, Zea mays
  Peptide Sequence Number=SeqID_43503
atgtctgatgaaatcaagtttgggtttcgcctttgcactttcatatcaggcattgtgcaaagcctcgtgaattgttgctacctcctctacggcccgctgggcacaggcaagtccacgttcgcggcggccacggccaggttcctgggctacgacgtcgacctgtctcacgccgacgctgccggcgacgacctatgcgcgctgctcctccacaccacctcgcgctcgctcgtccttgtcgaggacctggaccggtaccttcagggcggcggcggggacacagaggcgcgcgtggccagggtgctgagcttcatggacggcgtcgcgtcgtgctgtagcgaggagcgcgtcatggtgttcaccatgcgcgggggcaaggacgccgtggacgccgtggtggtgcgtccgggccgtctggacgtgcacatccagttcacgctctgcgacttcgaggccttcaaggcgttgttcagcaactacctggggctcaaggaccacaagctgtacccacagtggaggagtggttccaccgtcggtgttatgaaagagatggtgaacgcggcagttgattcagacattcagctttggactctaaggacatggaggaagaactatttcatattcagtgatcggtacagaggaatggggatggatatcgatgatatgtcgtacaagtatgtctga

SEQ ID NO: 1725 - DNA, 318 bp, Zea mays
  Peptide Sequence Number=SeqID_43504
atgtccgcaggatcaaagatccacggtggtaaacccccctgggcgaaacgctatgccccggatggatccagcccgatcatcagtcgatcaacggcccacgagcgtgacggcgccgcccacacgcgcggcggggccatcgccggagtacgccaaatcgaggccacgatgctccctgcacgcaacaaggccctgattcgtaatgaggagggcgacaccaatcgagcacttccccggaaccagaacgcgataacagggccaaagggcggcggctgtagctatctctctttcctgttcctcacggtaatgatgctgggcatg

SEQ ID NO: 1726 - DNA, 168 bp, Zea mays
  Peptide Sequence Number=SeqID_43505
atgcacatgctgaaatacgtgcttccagaaggaacccttctcagtttagtgtcagatgaagtcgacaccaatgaggattggggcgagactgcgtgcagcacggtgcgtgaagggcgggttgctcgaattgcgttggagttgctcggattgacggagtgtgagggctga

SEQ ID NO: 1727 - DNA, 183 bp, Zea mays
  Peptide Sequence Number=SeqID_43506
atggcgaatgcaaggcaagacatatcctccacgcgagaacgtgatgtgcatgcgattagagaaatggcagcgagaggacctctgtcccctgtttggcagagtcaaaggggcagtagacaaatcaggggattaatgaattcagatacgcagctgattgtgggagaaaaatctgcagctgattga

SEQ ID NO: 1728 - DNA, 1602 bp, Zea mays
  Peptide Sequence Number=SeqID_43507
atgggttcctgcgtgtcgtcgacgaggcaccggcggcggccgaggaagctgtcggtcgcggcgaggaagatccggcggaaggtgtgcacggcgatcgccgacgcgcccatcatctgcggcgcggcgagctgcctcgcccggcacggggtcgtccacgtggaggcgccggactccagcgtcaccctgcacctcaccaagctgcagtggcagcgcagccagacggacgccgggaacgtgatttgcgaggaagcatggtacgattctgtcagcatcctggagtcaccggactccgacgacgatctcgacaacgatttcgctagcgtcagcggagaccctctccctgatgtcaccggcggctcaaatgcacaacagtgcaaggacgcggcgtgcttcttggacaccatgcagctcctcaggagcattgcaaacgcggaagcctgtgaccgaagggaacagcctgacaagagcgatgactcgaacggcgaggagtgctgcagtagcagcacactgaaggagcttcaggccgcaatgtcgccgcggccgttcccggcgtcgattccgagcaacaaggtccagccgatgccgatcgctggtgccagcccgcaccagcagcagcagaagaagaaaacggccgtggtcaggctctcgttcaggacaaggtcatacgagggcgacgagatgaccgaaacgatgccgttcagtggctggattattacttcgctgacaagtcctgcaatcccaggtggttctgcgaattacttgtaccgcccaagggcaggtttcacggtgccgtgttgttccacgggcgagaagctgtcggaaggttgctggtcggttcttgagccatcgacgttcagggtccgaggggagagcttcttcaaagacaagaggaaatacccggccccagactgctccccttacacccccattggagcagacatgttcgcctacacgagaaagattcatcacattgcgcagcacctctcgcttccgtctctcaagacacacgaagcctttcctaccctcctcattgtgaacattcagctgcccacataccctgctacagtgtttggcgacaacgacggcgacgggataagcctagttctgtatttcaagttatctgacagttttgacaaggagatctctcctcaattgcaggacagcatcaagaggcttatgaatgatgagatggaaaaggtgaagggatttgcagtagacagcattgtgccctacacagagaggctgaaaatcctggctggtctggcaaaccctgaagacctgcagctgagcacggcagagaggaagctcgtgcagacttacaatcagaagcctgtgctatctcgcccacaacacaaattctacaagggcccaaattactttgagatcgatctcgatgtgcatcggttcagcttcatatcgcggaaagggctcgagacattacgggagcggctcaggcatggcgttcttgatcttggtctaactattcaggcacaaaaggctgaggagctgccagagcatgtcttgtgctgcatgaggctgaacaagatcgacttcgccgacaacgggcatataccgacgctgataactgcagctgacgagtaa

SEQ ID NO: 1729 - DNA, 402 bp, Zea mays
  Peptide Sequence Number=SeqID_43508
atggcggaagccctcgtgggcctccgcgtcgctgccctcgccgtcccgcagcctaggagccaccgcagacggcttcttcccgctgcgcgcctcgctgcgttccggcgcgaccggctgagcaccgcccgcgcggccgtcgcagggccaccggaggtggacgaggacgattccatgagtatcgacaacttgcatcgtttcttcgacctcaacgtcggaaagtgggacgggtcattctacgtatttttcgccctcttcgccagttcgcctctaatcttcgatactttctgcagtttccggattcgtgattggtctgactgtcgtgccttgtgcccgccctgtacttgtgttctgtcattccatgtagcaattcgacgcgcacgggagggttcttcaggagattag

SEQ ID NO: 1730 - DNA, 270 bp, Zea mays
  Peptide Sequence Number=SeqID_43509
atggccgaccaacgccccaagcggcacctagtgcgagagcttcaaacgaacgggtgctacccaagcagagagtgcgcacatagcttcacgacgggtactacttctgctatcggcccgattgctaatggcgggagcgcagggtcttcatttatctactggcaccgcatctgttaccgagatcgcaggggagaagataggccccagccggtagccatcaccggaggttgcgcagggaaaatcgcgatttcagcaacgagttggaggggataa

SEQ ID NO: 1731 - DNA, 915 bp, Zea mays
  Peptide Sequence Number=SeqID_43510
atgcatatgacaacttttggagctcaagagtgccaccttgcttcacctccgaaggattccgccctatccatcccatcaacctcagctaaggtccccagcggcggcgaggcgatggcggcgcctgtgacggtgtacggaccgatgctctcaccagctgtggcccgcgtggcggcctgcctcctggagaaggacgtgccgttccagatcgagccggtggacatgtccaagggcgagcacaagtcgccgtccttcctcaagctccagcccttcggacaggtccctgccttcaaggaccacctcacaaccgtctttggtacctccacctctcagttcttctactactattgttacatatcaaaaatgcatacttttgcaaaagggcaaattgctgaagcattaggatatattctaggagttaccagtgcatatgcatgcctagccgagtcaagggctatttgccgttacatatgcgaccagtatgcggactctggtaatcaggccctcttcggcaagaaagaagacggcgcggttggccgcgctgccattgaacagtggatagagtctgaaggccagagctttaacccaccgagcttggctattatcttccagctcgcatttgcaccgatgatgggccggaccactgacctggctgtggttgagcagaatgaagcgaagcttgcgaaggtgcttgatgtgtatgaccaacggctgggggagagccagtattttgctggtgatgatttctccctggccgaccttgtgcacttgcccaatgcagatttccttgtgaacagaaccagcaaggctggcttgatcaccgagagaaagaatcttgctagatggtgggatgatgtctcgtcccgacctgcatggaaaaaggtcactgagatgcagagcacgccgaggccctcttag

SEQ ID NO: 1732 - DNA, 1863 bp, Zea mays
  Peptide Sequence Number=SeqID_43511
atggcgcacgaccccagcctgggcttcgcggactacttctcggcggcggcggcggcgggcgccacggcgatggacgacgacgtcggggcgccggagctctatggcctgcatgccgacgacatggagttcctcggcatgcgtggcctggccgccatgccccccgccgcggcacaccaccagcaccaccaccatcacggccacagcaaggccggtgcgctcctcgacgacgacgacgcgggggtggggccagacgtcagcggctccgcggacgacgccaccatgcgcttcctgagcgagcagcagcagcagcagcaccaggcgccgctgtcgctgtcgctgtgccggccggacgtggcgacgacgttgcacgagcagcagcacctcgccggcggtggctcctcgtcccggtaccatcaggagcagcagccggcggcgtgggtgcagcagcagcacgactactcgccgtcgccgcagcagcacgcgtggcacctgcgcagctccaggttcctcgtcccggcgcagcaggtcctgcaggagttctgcagcctccccgtggacagcagcagcgctgccgcctccagcaagcgcgccaaggccgcaaataagccggcctcgcagcagcagcagcagcaagaagacggcggcggcgccgaggggtcgtcgtcgtcggcctcctgggcgccgtcgccgcagatccaggccatggacgcgctggagctgcagcggctcaaggacaagctctacatcatgctggaagaggtggaccggagataccggcggtactgcgagcagatgcgggcgctggcgggcgggttcgaggcggtggccggggagcgcgcggcggcggcgtacacggcgctggcgtcgcgcaccatctcgcggcacttccggagcctccgggacggcgtggtggcgcagctgcaggcggcgcgcagggcgctcggggagaaggacgtggcggtgcccgggatgacgcgcggggacacgcccaggctcagggtgctcgaccagtgcatccgccagcacaaggcgctcacccaggccgccggcatgatggagagccacccgtggcgcccgcagcgcggactccccgagcgcgccgtcaccatcctccgggcgtggctcttcgagcacttcctgcacccgtatccaagcgacgtcgacaagcatatcctggctcgccagacgggcctctcacggagccaggtgtccaactggttcatcaatgcgcgggtcaggctctggaagccaatggtggaggagatgtacgtggaggagatgaaggccgagggccaggacggcgggggccagcagcaggtaggcgtcgccgtcgccaacaaccctaaccctagcagcgccggccacgcctccgaggcggctgaggacgatgggcgcggggacagcggcggcggcgccgtcgtcgaccggaagccgacgcgggcgcagctcctgcacgacgccggctcgctcgcctcggtcgtcaacatcggcggcggatcgcgcgcgggattcggcatcatggaccacctcgacttcgacgcctacggcggccaccatgccggcgccgtgtccctcacgctgggcctgcagcagcacgactcccacgccgacggcggcgccggcggcgtcaacatcgcgttcggcgcgccgccgcccgcgcaccaccacgggtacctgttcgctccgacggcggcggcggcaggccatcagatgggcggcggcgtgcacccgggactacaccaccacgtccagttcagcggcgccggcgccggcatcgacggcgaggcggcgcacgggcaggagcactaccggggcctgcagggcggcggcgggttccacctcctgcgtgacctggccgggtga

SEQ ID NO: 1733 - DNA, 1551 bp, Zea mays
  Peptide Sequence Number=SeqID_43512
atggtgtctctctgcgcatccaccaccaccatctatgccttcctagtcatactcttcatccactctggccactctccaaccgctgcattctacctcccgggcagttatcctcagcggtaccggcccggcgacacctttgccgcaaaggtgaactccctgacctcgccgtcctccaagctcccctacccctactactcccttcccttctgcgccccgcaacacggcgtccggcacgccgccgagagccttggcgagctcctcctcggcgaccgcatcgagacgtcgccataccgcttttccatgctcaacaacaccgcatcgcccttgttcctctgccgcaccgaccccctgtcccccggcaccgccgagctcatcaagtcccgcatcgatgacgcctatcaggttaacatcctcctcgacaccctccctgtgatgcgctacgtgaagaaccctgtcgcgcccgacgtgctcctccggtccaccggcttcccggtcggcgttcgcgccgacgacggcgagtactacgtgtacaaccacataaagctcaccgtgctggtgaacaagcagaacaccaccaccagggtggagaccttgatggcgaccgccgacggggccgatctgatcagcttcaccggcggcaaggagggctgcggctacacggtcgtcgggttcgaggtcgtcccgtgcagcgtggagtacgacgcggcggctgtcaagaacaagaccatgtacgacgagatcacgtcgaaggcggccaccggctgcgacccgtcggtggtgagcatgcgtgtgcaggacaacagtccgctggtctactcctacgaggtggccttcattgagagcagcgtcgagtggccgtcgcgctgggacgcgtacctcgagatgggcggtgccaaggtgcactggttctccatcctcaactccatggtggtggtctcgttcctggccgcgatcgtgctcgtcatcctgctgcgcaccgtgcggcgcgacctcgcgcagtacgaggagctcggcggcagcgagtcgggggcgcacgcggacgagctagccgggtggaagctcgtggccggcgacgtgttccgggagcccagccacccggtgctcctctgcgttctcgtcggcgatggcgtgcgcatcctgggtatgggcgtggtcaccatcgtcttcgccgcgctcgggttcatgtcgcccgcgtgccgcggcgcgctggtcaccggcatgctgtgcttgtacctcgtcctgggcgtggccgccgggtacacgtccgtgggcgtctggaagacggtccggcagggcgaagccgccgggtggaagtccgtggcgtggcgcgcgtcgttcgccttcccgggcgtcgggttcaccgtgttcaccgtgctaaactgcgtgctatggtacaacggaagcaccggagccgtgccgctcctcttgttcgtcgtcatcctcctcctgtggtttttcgtctccgtgcccctcacccttgccggcggcctcctcgcctcccgcggtcgccacatcgagtttcctgtcagggccaacaagatcgcccgccag

SEQ ID NO: 1734 - DNA, 264 bp, Zea mays
  Peptide Sequence Number=SeqID_43513
atggccgaggcgcgcgaacgcaccgtgctgctcagcatccaccagccgggagcgcgcatcgtcaagatgttcgactccgtcctcctgctagccgccgggtccatcctccaccatggcaccgtcgaccagctccgcgccctgctatcactggtatggaagtcttcagatgcgaacaaagaagtgcgcaggggaggccatgaacagggacagcgcgggtccgggcgaacgcaaggccggcagaggaagccgccttgggcgagctga

SEQ ID NO: 1735 - DNA, 720 bp, Zea mays
  Peptide Sequence Number=SeqID_43514
atggcggccgaggaccagactccttgtaccaagctccgccccggcaaggcaaagacgcggaagaagacgaagagggacaagtggggccagcctatctccgccgccgccgccgatgaggagccgtcggtggagccggagcaagagcacccggcgggggtagttgaggcggcagtacaggtggagaaggaggaggaggaagaggcgactgcggcggcggaaggctatgagcccgggaaggtggtggcgagcggcttgccctacacgaccaccgaggcggacatccggaagctgttcgagttctacgggcccatccagtcgatgcagctctctcgcttcccggactccggcaacttccgcggccttgccttcctctgcttcgagtcagaagaagatgcaataaagtctcttgagcttgatggattcaaaattggcagcagatacatgagggttgaaaggtgcagggtgacggccacctcaaacaagaagaggaaggcagagttcgaaaccgaccccaagaagtccgaaggctgcctctcggcatatgttggcaacctctcatggaacgtggacgaaaacgacttgcgaggtttcttcgggccgtcgaagattgcatcggtaaggggaaatcgccataggaagggaagaatgcggtggtctgtgacggagataacccctagtttccgggcacgagtagatcagatctcggccacacgctactga

SEQ ID NO: 1736 - DNA, 285 bp, Zea mays
  Peptide Sequence Number=SeqID_43515
atgcaggtccaccgagacgacggcggcggcgcggtgacgacgatgcaacagcagcagacgcccgttcccggcgccaaccgcaagcgcggcggtgatcaagcaggagcgagcctgggcatggagatgggggtggggtacgccggcggcggcggcggcggcgagtgctcgtcgtcctcggcggctgccgcggccgcggccgcggcggagggggaggagcggcagctgctcaagggggagatcgcggtgcacccgctgtgcgagcagctagtggcggcgcacgtgggg

SEQ ID NO: 1737 - DNA, 222 bp, Zea mays
  Peptide Sequence Number=SeqID_43516
atggatatacaaacattatcagatgtcagtgggggaattaagtttgacggccaatcaattatcccacgcatgatgaactgcatgcgtcggcagatgttagctgtggtatacgattctaaaactggacttacccgtcggctctcgcagagtcgcggggtattagttgacgtagatgctgacttcatccaaaagtttttcaacctactgagggagagggagtag

SEQ ID NO: 1738 - DNA, 471 bp, Zea mays
  Peptide Sequence Number=SeqID_43517
atggccaccactaccggaatctggctctttgccgagtgctcggcgctttgccgagtgctttctatcgtgcactccgcaaggaagtctttgtcgagtgccgcactcggcaaagtcctactatcggtaacgaccgtgtttaccgagagcaggacacttggcacagaaaatacactcggtgacaaaggagaagcgactctgatcttctcggtgttgagttccagaatccgtttcttcgataggaagttccacctcctggctgctgaggcggcggcggcggaggatacagctcatggcgcagaaggcgacgagccgccgaaggctctgctaccgaagatccaagcccaaggcacgactgtcgagcccgcgtcgtgccaaggccgtggccttgctctaaccatgggggaaaagtttctcgagtgcgagtgtgacaagatgttcgcgtctaagaaggccatatttgtgcacctatag

SEQ ID NO: 1739 - DNA, 609 bp, Zea mays
  Peptide Sequence Number=SeqID_43518
atgcagcggtactgccgccacaacgtgccttcgctgtggagacagtgcccccgacggactggacaaagcgagggaccaggaggctaccacgtgcagccccaaaacctcgacgaaagcaactgcaggtgggaccagcaaggatctgggggcagcatgacagcgggagtttggtgttcacgaggagaactcgcgggtgtgtggagcgaggagaagcagtcgggtggaggcgaggatgacccggtcgtggcctgtagagcgagaagcagcagggaaaatgctgtttggggggcactggtcagacggtggaggaaaaccgtccgcgaagcgtgggcgctcacggggtgcgtggagcaaggagaagcagccggatggaggcgaggtcgactcggccgtggagcaggacacggtagagaaaacgctgtagggggaggggacacacgtcagccggcggagggcagaggtcccgtgaagcgcggggagagcttaaaagggagtcaggttttaatatctccgattggctttcgactccaactggtaccgtgccacgggatgcacggacaaggcgtgtccgagttgccgtacgtgcacgcacccgcagctggaccgtag

SEQ ID NO: 1740 - DNA, 1023 bp, Zea mays
  Peptide Sequence Number=SeqID_43519
atggcgcttcctgttgacgtggcggtttcgtgccctaggtcgggcgtcgtggaggctcctccgaagtcgaggtcgagtctatcctgcatggccgaggccgaacctgagctcctgggtcgggcgaggcggaggtcgttcggcagaggccagggcggagtccgagccctgggtcgggcgaagcggagttcgtcgtcttccggggccttagcccgagtccgagccctgggtcgggcggagcggagttcgccgtcttccggggccttagcccgactttatgctgatgggggttaccagctgagaattaggcgtcttgagggagccgtttcttccgggctaggcctcgccagggggcgccggcctgcgcctttgctagcctgcaccgaggctgggccgcccgcccgcgaggctgcggggtgctcgcgcgaggctggggctgccggggccggcacgcccactaggctgtggcttgcctgcgcgcccgcgaggctgtgtgggtggcctgcctgcgcgcccgtgtggccgcggctacccacgtcggaggcgcgcatccggctctcacctgcgctggagcgtgcctgcacgcgtcgtggctcccgtgccgaaacgctgtcatggccggggctacgcctggccggagtgctagccgagcccgcgctagtgcccgtagccaaccaaagtcacgccatccgagagcgcctccgcgtcgtgcgcctgaccggatccgccaaggactgcgcgctagtgtcgtgcccgcggccaggtcgcgttgccgcgcccgcgtcgagccaggttcggccgcgtcgggtctccgcgctcaggaggccgagcgcccctgcccgccagggcttccaagcgcctgcacgccgccagggcgcggatccagcccacgtcaagccgctcccagcgcttgcgcgctgccagggcggagcggatccgaccgtgctgaggacccacgctgggggtcgcgctcgcggccagcagcccgcggccggtcgggcatcccgctgtccttgcgcgcgctag

SEQ ID NO: 1741 - DNA, 117 bp, Zea mays
  Peptide Sequence Number=SeqID_43520
atggcgcgctggcggttctcctctacggtgatgacgctcggcatcgggacactgctgctgctggacatcgagtgttcatgtaggattcgagaggggaagacaagatttacgtattga

SEQ ID NO: 1742 - DNA, 537 bp, Zea mays
  Peptide Sequence Number=SeqID_43521
atggcgaactgcacggaccccttgcgaagagcatccatgggacgaacccacaaacctggtgaagatattgtgacccaagatctactagagtccagagaaccttctggacggagcaatgctttggcctcaccgcggagacgggttcaatcgcctgaatttctcgagaagctagatactcttcagaagtcagtatatcaacatggtgcagtggatgaaacagtatcatgggatattataagtgcggcagatatatgggatgataagagtatgaacgttagtgatgattcagaggacggatatgttcttgttaagcaagaggacatagtcgatggtattgcatgcttcatggctgcatacttgctgtcgctgaaacaaactaaggacctgacacccaaccaacttcaacaagctcttagcaagacattttcagctaaaaagaggaaaagcaaactgcagaaggcatgggatggaacgaaagttgtttataatatagcatcatggagcgcgacggctattggaatagcagaagcattctga

SEQ ID NO: 1743 - DNA, 321 bp, Zea mays
  Peptide Sequence Number=SeqID_43522
atgaggcagcgctggtgccgcctggagagagcacaggggaaggccgaaggcaggatgggagggagggtagcggcgccggcgcggtcagagtattcagcgctgcgtccgtcggcgtcgcgggtgaccgggaaagcagcccgcaggagaaaagcacggcaggtcggaggagccgctgttgcttgcactttcccacgctgcgctgcagcggcgattcgccattgggcgcatcagaatcggcgacgtcaactcaaggcagtgagagatctgctgctgctgctgtcggtatggactggccagagcgaggctggtcgagtggagtga

SEQ ID NO: 1744 - DNA, 120 bp, Zea mays
  Peptide Sequence Number=SeqID_43523
atggcatcgctgagatgggacgtccggaaggggtcacgatcggatgacaacacacgtcgagaagatgacaacgacgagcagcgtcaggaacgggacatcagagtagattggttcaagtga

SEQ ID NO: 1745 - DNA, 2160 bp, Zea mays
  Peptide Sequence Number=SeqID_43524
atgatgctgcatgactgcaagcacgacgccaacaacgttcttcactatctaggcttagatcatgttggtcatataggtggccgccggagtgttttgatgacccaaaagatgaaggagatggatgatgtcattagacgggtgcatgctgcgagtcttcaggataatctggacagaacacttttggttgtggttagcgatcatggcatgactgatgggggtaatcatggaggatcttcatatgaagaaactgattcacttgccttttttataggacacagcgttgagagcccatattgttcaccctatgaccagaatgaagcacttcaagtggatcttgccccaactcttgctcttctatttggtgtaccaattccgaagaatagttttggtgtcgtgcttccaaagcttttaaattcgttgacagatgaccagaaactaaggatgttagagcttaactcatggcaaatcttaagattgctgcaagcacaagtgtctgctttctgccttgaagattgtattaatgtggagagcagtattgaacttgacatccttcctgaatctattgagcaaaagttatgttttttactttctaaagccatttcttctcatcagtcttcacgtcttcatcgaggttctgatttcaagtctgttgaagccgggtactatgggactgctgcagataactaccacaccttcttaagaaatgcgagtgagtggttgtctcacagagcaaccgataaaccattatatttacttgtctctgcaatcatgttgatgacaatgtcatgccttttcctcatgggtactgtgtcttacctatttaagggacgatctctgagtcaagctgatcaccattcagagtcatatttggatcaacgctggcaccttgatgaggttctcgttcttgctgggatgtttctctatgtcatcagtcttggctcaagttcttttgtggaagaagagcagtatacatggcacttcctcacttctactctgtatctaatatttctggccaaggcagttcagtcaatgctaaaaggatcaaatccaacacttggtcataaagcagaaggaaatagctttgacagaagtagctttttctatgctacaagctatgaattaacaccaggcaagagaaatggttacaagttatgtactatccttgttgttcttgttgctggaagagttataagagcttggcatcaaggtggaatcaactgggttcactttcctgatatttccaagttactggcgcaagctgacccttctgttgtaaagtctcttcagattatctcagttcttgcagttgtggtattgttttcaatttcactcactttactcagagcaagaccagagtttgttataggagtatggttgacccacatttcttgtggatttttggtcctactgcatgtttggggaaatcatattggtacttcattaccaattaaccataccacagcatcggtagctcgacaattttatgtcattgctagtgtttcagtatctgtcactgttcttgcttcaccttgggtatttccaatattttctagggaagcaaaatcaccgtcctctggttctagtcctgtaaaggcaatacatggcatcagaaaatcacttgttctcactggaatgacatacacagcgttctggggccttctgcaattgcttcttcaacaaccaatcaatgcaattcctcttttcctcattttattgcaaacagtctcgagtgcagttcatttttctctggacaaaacattacataaacaatgggtacaggttgtggcaatgcatttcttgggaatggctggtcacttcggtcttgggaatacaaatagccttgccagcattgatgttgcgggagctttcattggcatttcaagttactccacagttctttctggtatactgatgtttatgataacatatgcatcacctctcatgttataccttgggttggtccttcatgcatcggtgaaagatgtcgatgatgcctccaatctacggcagctgaaatggagctatattctagacaaaattgtcacattgccatgtttgtttcctttgctcatcaattctcttgcgttgacttcatacaccattgttttgctagccatgaggaatcacttatttgtttggagcgtattctcaccaaagtaa

SEQ ID NO: 1746 - DNA, 348 bp, Zea mays
  Peptide Sequence Number=SeqID_43525
atgggccctgatgctatcccaattgaggtgtggagatacctcagggacatagctatactgctgcaactcaaccaccctcaaagcttcccgaagggaagggaggaccacaacctctcgggatcagtcctggctaaccacaaccatctcatgcggccgtactatgaagctatggagagagttatcgagcatagtctgagaggaataacgatgaactctttgaaccaatttggtttcatgcctaaaagtacacacgaggaaggagatgctattttggcaagtcaagtagtgcctaggaaggacacctttaggtggagtggtcggcaaagacgtcgaggtgggggtgcctga

SEQ ID NO: 1747 - DNA, 363 bp, Zea mays
  Peptide Sequence Number=SeqID_43526
atggcgtggtgtgatgatcttgcttcgtgcgtcagcgtcatgggagaagtgagggaggaggaggctgaactcgccggcaacttcctccggtaccattccggcggcgagcagtatagttcgacacttgtgttccacttggacgacgctcaggaggaattaaggcgccatcgctgcactgcaccccccgaagcgacaggctgcagttgcagctgcgtctgcgtccctccggtggtcgctccactaggtagcttaggtgtgtttggtttgacttttggctttggcttttgcccccctaaaagccaaaagccaaccaaagggctggatctaggaaacagcttttttgaaaagccaactttctcgtag

SEQ ID NO: 1748 - DNA, 643 bp, Zea mays
  Peptide Sequence Number=SeqID_43527
atgaaaggagtgcttccgattaagggggcatcaggccgtgaaaagaaagcgcctaaggagctcgagagcgtcttgaaccgatatttcgggtattcgggatttcgaggaaaacaactcgaagctatagaagctgttctatcagggagagattgcttttgtttgatgccaactggtggtggaaagtccatgtgctatcagattccagctctggagaaccaggttgccagcttgaaaaataaaggggttccagctgaatttctctcttcaacacaggcatctcacactaaacaaaggatacatgaagaccttgatactggtaatccttctttaaagttgctatatgtgactcctgaacttgttgcaacatcaagctttatggcaaagctaaagaagctatacaacagaggtcttcttggtcttgttgcaattgatgaggctcactgtatttcaagttggggccacgatttcagacctagctaccgaaaactttcatcattgaggaagcagttcccagatatccctttgttagctttaactgcaactgctgtaccgaaggtccagaaagatgtggtatcatcattgtgcttgcaaaatccagtaattcttagagcttcatttaatcgacccaatatattctatgaag

SEQ ID NO: 1749 - DNA, 1533 bp, Zea mays
  Peptide Sequence Number=SeqID_43528
atgggtattgatagacaagatgtccgtattgtttgccacttcaacttgcctaagtcaatggaatccttctaccaggagtcaggtcgagctggtcgtgatcaacgaccttcaaggagtgttttgtattacggattagatgaccggaggagaatggaattcattttgagaaaccccaaaactaagaaatcacagccgtcttcctcttcaaatgagctttctgagaaggctctagctgacttcagtcagattattgactactgtgaaatttctagctgccggcggaaaaagatcattgagagctttggagagaaagtacaaccaactttatgccaacgctcatgcgatgcttgcaaacacccaaatttagtgttgtctcgtctggaggaactccgtcgtgtgcccaactgtcgctttaataagatctctccagtgtttcaaagctcagttaaagaagcacacttggacacagaattctggaatcgtgaagatgaggcgagcttatcagctgaagacatatctgattctgatgatgggaatgaggtagtgagtaatatagccatttcaaaggttccggcaaaagctggtctggatgcaaaatttaaagcactggagcgtgctgaaaatgcttattaccaaggcaaagataaatggttaaatgggagtgctatccatgatattgcaccagccattgcctgtatggttggccgtagagccatctccaccagaactgtagctcaggcgcttgataactggcagtgggttagtgatattgagagccctctttctctgattggtctgcaacagtatttgaagttatgggatgctttgaggggggttgtttttgatggagtgaacccttccattagctctattaaaaggctatttttagatgagttgatcagctgggataagggtggcggccttgctgacaagaaaagcatctctgagacgctaagagatgcatgccgaaaaagattgttggatgctcttggacaagcaaagttgcgactcgggaatattccgtgcggagacgaggcttctgctacacaccttgaaacagagtgcttcaaaaaatatgtgaaggcgggcaagacgttctacaactcacagatagccgccacagttcggtggctgtcatctgcaacactcagtcagatgcgtgaccgcctcgacactcttatcgaccgaaccaaagatgatggtgcgtcaggctgccccgacattgtcccagagtcacctccagcatctcctgaaatcgtcgtcggcgcaaggtcaggagaaaccagtaacgacaaaccgcagcatatttgtgagttgaagagttcagatgagtctgcaaagggtgctgcatcatcgactgggaacatggtgctccccgccataccgacgttcagagaattcttgagccaaaaaggaagggatcgggcgaagtgctattcaaattctaatgcgacgaaccagccatctggtattcgtaggaagtttagtggtcaccttgataaggaagaagccagcaagaggatgaaatcatga

SEQ ID NO: 1750 - DNA, 453 bp, Zea mays
  Peptide Sequence Number=SeqID_43529
atgcacgcgtgccgcctccgcccgtccgctcgcccgccgcaaaccccgccgcgacctctctacgaaagtcgtgaccaccgcaaatcccgccgcaatccgatgcccgcggagcaacagacgcccatctcgcgcaacagacgcccccacgctgtgcatgccgctgccgcctccgacgcctgcggagcagctcatgcccccacccatctcgcgctgcctccacacatctcgtgccaccatcaaaccactcgcccgccagatttgcctctctgtgataagaagttttcccctcctttgctacaactccattttactgcgttctctggctccaatccgcaaacccagctgcttgaggaggacctcatggtcgttgccaacgtcggcaactctcggattgttctgggcaccgcatccaacgacggtgccatcacgtcgtccaactcatcgtctatctaa

SEQ ID NO: 1751 - DNA, 567 bp, Zea mays
  Peptide Sequence Number=SeqID_43530
atggcgctgcacttcgccgcggtggtggtgcgctcgcgatggacgagtaaccagtgcttggacaagattcagagcacgacggccaagttcaacaccctgatgcactcgcccccgggcggcggtggcatctgcgcgccgttcgcgcaccgcgccgtgtcggcgatgtaccgcgggctgaggtggtggctcgccggcgagatcatggctacggcgagcagggccagctgctggggcgagtcgtcatcgtcggtgacggtggccgcgggcggcgacgtggagcggagctgggagtcggccttcatacagaagcactggtcggcgcagcagctgcggcgcaccgagcagcagtgctggctgccccagcgtggcctgccagagaagtccgttgccgtgctcaaggcgtggatgttcgagaacttcctgcacccgtatcccaagcaccatgagaaggacgtgctggcggcaaggagcagcctcaccaggaaccaggcacagatcgaaatcccaccagactcgtttcaaattcgattcttttttggcgagatggggtttcgaattggttcataa

SEQ ID NO: 1752 - DNA, 321 bp, Zea mays
  Peptide Sequence Number=SeqID_43531
atggcgcgcgtccgcttgccgctcgggcggcccgcactggttgcgccctaccacgcacgcaaggaggccgggtgccgggtgggcgcgcaaaccgccaagcaaacgcggcccgcgggagtacactgccagtgccaggtcttgggggtttcgcgccgctgcccaccgcggtgccggctgcagaagcggcggcgtggacgtggtggtgatagcgatttctccggggccggggccgggaaacaagacggcttctcgccggccccgccgcggggatttgggttggtattcgtacgggtctccccctgccgttgcatcacggactag

SEQ ID NO: 1753 - DNA, 564 bp, Zea mays
  Peptide Sequence Number=SeqID_43532
atgcagagctccctcgcccggccgccggtactggccggatgcggcgagagacggggcctggcagccgtggcacggtgccgcgctgaggcggcggcgcccgtgtggacggcgtccagggcgtctgcggggccgtacaccgggagggacccggaggtgaagaagcccgcgtggctgcggcagcgcgctgcgcagggggagaagtacgctcgcctgcgggagtccatcggcgagctcaagctcaacaccgtctgcgtcgaggcacagtgccccaacatcggcgagtgttggaacggaggtggaggggccggcggcgaaggggacggcatcgcgacggccaccatcatggtgcttggtgacacctgcacgcgcgggtgtcgattctgcgctgtgaagaccagcaacaaaccgccgccgcctgatcccctggagcctctgaacacggctttggctgttgcaagctggggagagtaccaccgcgcctcgcaccaggccgcggaccgtgcggccccgcgcgcggaccgtccgcccctgtgcagagggcaccaccatggttctcttgagtaa

SEQ ID NO: 1754 - DNA, 222 bp, Zea mays
  Peptide Sequence Number=SeqID_43533
atggcgctccacaagctctgtgacgacggcgacccccagctctcttacggaagcagggcgacgtcagcagggactcgaccgctccaacagctgtccctccgccaggctccgtcgcacctccgaccgccacgacatcacgccagcaagttcaaaggatgcaacatggattttgatgaaggcaaagtgatgataggaaatatcaacacctcaagcaaaaattag

SEQ ID NO: 1755 - DNA, 285 bp, Zea mays
  Peptide Sequence Number=SeqID_43534
atggcgctcttcgtctcctccctcgccgccgccctctcccacctctccctcccatcgacctccacccccaagcctcacccggcctcgctcctgcgcctgcgctccacctaccgccgcgctgttagcctcgcgctccgcgtctccgtaggcgaagccgccgaagccttcgaggcgggcctgcccgcggaggaggtgatggctgtcgaggaggaggcggaggaggatgccctgttcgatttggcaaagaatcatccgccgccatcaacaccctcctcccactcctag

SEQ ID NO: 1756 - DNA, 693 bp, Zea mays
  Peptide Sequence Number=SeqID_43535
atgaagatcgcagaattcacttgcctaggcccattcgggttgatgcataatagtttagtagtgtcagtaataattcttgtgtttttagttacagttgggtccatcactggttgcccctgggcgtcgaatacacaatatagtttgaaattgcattatcagccacaccaacccccaccctgctcggtgctaggtttctggaatactgccaatagacaatttcatttgctgcaccggagacaaacccatcacacccagatacaaatggatacaccatctggtgtgaagggttctattcctgcatgcatcaagttttctgtgaaggttccaggtgaaataccatactatggtatatattatgacccacctgaagagatgaagactatggaatcccctctgctgcattcaattaactgccccaaaaagacaggtaagcagcctgtgatgaagatggatatattttcgtatgactattcacctgattttggtagcgtcgcccggatagccatagaacttgaggatgaacagattgatcgggctctattgaagaatgtcttggatatttttattaaaattaggttgggtcaaatggagtgtttcgagaatgactttgaagatttcttgctcaaggatactacagagtactgctttgtcaaggctcaaaggatgcaaagattcttgagagtaactttgtga

SEQ ID NO: 1757 - DNA, 225 bp, Zea mays
  Peptide Sequence Number=SeqID_43536
atggaagacgccgaagtcgggccagtagaggatgccccttgcaccatgaacacgtcgccggtgtcggatccctcagtgcttggagcgggcatcagaagacaattcaacgatttggaggaaatagacggggcgatgcggacagggtggaaatggggggtgtatgggtggactcatgtaccatatgacgaagaacttgatggactgcatgacagcaaagtcgagtag

SEQ ID NO: 1758 - DNA, 429 bp, Zea mays
  Peptide Sequence Number=SeqID_43537
atgagacttgaagattctactcttaggaaaattcattgtctgtgcttcagacattatatctttgaacttgcttatcgaagtgctttgatcaactgccatattgaacattggaaactacatctatttgagcttgaagaggagctgaagactaatcctctgaccaagtatgtgttgtatcagcttcataatgaatctcataagcaagatgagaggagcaagaattggcgagtccaagctgtcgcagttggtcctgacaggttcgagagccggaaggctctgtcagaaaagtggaggggcatgagagacgatggactttcagcagaaaccaacattcctggctgtgtgtttgtccatatgagtggcttcattgggagcaacaagatcaacgagggagcattggaaatcacaagagctactctgaaatgttga

SEQ ID NO: 1759 - DNA, 585 bp, Zea mays
  Peptide Sequence Number=SeqID_43538
taccatcatgagttggatgatcttagaacacatttgtcatttactcaagctacaggagaagcaggtgttgcatcagccatgtcattgctgaaagagctgaatgagaaggacatctcactcaaagaccatagacttcgagtgaacaatctaggtgagcatcttgatcttctccaaaaggatgtacaagcaagggaggactcacaaatgcaacttaaagatatagttataaggatcgagaccaacatcatggatgaagttgccaaagcttttgaaattgcgatgttgagaggggaaatcagaatattgtctactcactggacgaacaaaaccaagaaccttgaatcacagttaaaaaagcaccagcaaactgatcaggagctgaagaagagggttctaaagcttgaattttgtctctggtcctgtcatcccctggtgcattcgccaccgcacctaccactgttactagctcccttgctcttctcttgctgcgactgggataaagcatcgtggatcttgaacctaggccagaatttaggcgggtctagaaccaccatgatgcctggaacatactcctattttatctga

SEQ ID NO: 1760 - DNA, 264 bp, Zea mays
  Peptide Sequence Number=SeqID_43539
atgtctagagggattaactcaactaaggatcagcatgctattctggttcatgttcagcgtgatgtggccgcgggtggtgaccgtccagactccatggttcggacgagcggcaccgtgtacctggaagcacactttcttgtcgcggccaaaggcgaagacatggtcgccgagacggggcagccagatggaggtggcaacgctgaggacaacgtcatcgggctgtcccgagtcagggaacaaattgaatctgcaatgttagtatag

SEQ ID NO: 1761 - DNA, 180 bp, Zea mays
  Peptide Sequence Number=SeqID_43540
atggaggcagttagcgttgcaatgcctcctgtttatgtaaatcacggtaatggtggtgggccagctgttaaggatatacatatggagaactttagcgtcactattgatctaattcaagaagccactttaacaatcgtatttggaaggcactatggtctagcgaagatgatttttagttag

SEQ ID NO: 1762 - DNA, 468 bp, Zea mays
  Peptide Sequence Number=SeqID_43541
atgggcaagaacaacaagcgcaagcgtgagccgactcctccatcggaggagtttggtgactcggaatactcagaggaggagttctcctctgagtccgagggatctccggctcccatccccctgcgagagtcgtctgatgactcagacgactcccaggggcttgcggcggaggtctggacgtacatccgggccgtcgagcgctccgggctcgagggctcggatgagtctgagttctcctcggatgaggaggactcggacggcggcgaggacgaagttgacgacgacgacgacggcgacgacgacgacggtggcgacggagacggtgatggcggcaacggcggcggaggcagcggcggcaagggcagcaccagaggcggcagcagcacgggcagcaccagaggcggcagcagcaagggcagcaccaagggcggcggcggcaaaggcagcggcggcaaggccaatggctaa

SEQ ID NO: 1763 - DNA, 471 bp, Zea mays
  Peptide Sequence Number=SeqID_43542
atggtctgtaaccccatcgcagtaattatagtcggcattatactatacagcgacgcctcccgcttgacctttcgggtaagggcacgtacgcacgtccaggcaacctgtgggaccttaagaactgttcatagaaattggacgaccctaggggactatatgctacgcttctcacggcaatgcaacaagctgaccaaccctgtcgacgccgacatcatcgacgctttcatcttggggaccactaacgagaccctagtgcataagctagggcggaagagcccgcgcacaatgaaagaacttctcgacatcacgaccaaccacacgtcgggagaggacgcggtgggagcgggatctttgatcaccgcaggcagaaagccagacacgacaaggagcctgacgagggtttcgacagctagcccgacagaaaggaagaagagagacctgtgggggatagatatcccccgggtccactaa

SEQ ID NO: 1764 - DNA, 327 bp, Zea mays
  Peptide Sequence Number=SeqID_43543
atgggtcgagagttccatgtcgcgactagagatggcaatgggaccccgatccccgattcttcgcggggaattcctccatcagaggatggggatggggacgggatgggatcacgtcagggatttatcctcatggggaatgggatggtgaagaaatatcccccgcaagtgttcgcggggatccccatgtggaaattttttcttcgtggggacacatatagggagctattcctcgatggggaattacccattgccatgtctagtcgcgacatcgggacctgggggctgaccaatatactgcatcaaccccagcaggaaataacaccttga

SEQ ID NO: 1765 - DNA, 321 bp, Zea mays
  Peptide Sequence Number=SeqID_43544
atgctggccgcagcgcagtgcggatccacggagacgtatttctctggtgagaaattcaacggcgccccgctgcccggccacggcgcggcaacagcacccggtggagcaatttcctcccaagcgatgatggctgaggtggtagaaaggaggggagaatcacgggagtcggagggacccaggcccacatcacagcagcacaagcgcatgcggcttcagcgccaggtccacggggcccacgcgtcataccagccctgcgcacgcgccataggccaagtgggccgcgcggatgggaagttagagtgggccgaaatggaggtctga

SEQ ID NO: 1766 - DNA, 288 bp, Zea mays
  Peptide Sequence Number=SeqID_43545
atgaggaaggaggcttaccagaaaatggaaacgcccgcaggcccggacggatctccactccacgcgattcagccgagagggcaacgacgaagacgaacgaggaaacacgcgaattacttcgagatggatgacgtgctccggcggcgggatgccggagatgcgaccgctggcgaagtggacgtgcggcggcgatggtgctgcctggcgtggcgcgggcgctgccgaagtgcagaggacgacgatgcttgtgtagctgatccattttgcttagcttgtgtagctaagtag

SEQ ID NO: 1767 - DNA, 3051 bp, Zea mays
  Peptide Sequence Number=SeqID_43546
atgtccatgtacaacgttggcataaagaaagtaaaacaaagactcaccatcgcatcgacctcctcaccacttcgccagcgccagcgcccgcgccacgccagcgccgccgccgtccacttcaccagcggccggcgtcttcatcctgacgccgagcacgctgcccgcttccaaatggattctcttgaaatcaagagaaaagaagattatcagatggagcccattgaaatcaaggatgatgaagagcatccgatagagatgcttgttgatcagcctcgttttctagaacctttatgtccagaggaggtcaatgaagacacacgggtataccctcgtgtaggagatgagtaccaggtgaaagttccagatctactaaccgtagaggaacagatgaaactaaggtcatcaacagtttatggcagcatggcgtttggcttcgagtaccctgtgggagtaggattagctattccagtcacatggacccaaaatagaagcagtcatataaaagaagagcggatgggatttccaggacacagttcatttccttcacaaggtgaaggttccaaccacaagagcgggaatgttctggacattttgtatcagcatggtgtttgttcagagtgtgtaaactgtaaagttgaatccgctgaacaaggtgagaaattaccaggatttgttggacaagacatgcactgcttacagaaaaggaagcttttaggttgttcttgtgtaaataggaaacttactgattcttttccattgcctgggatgacaagatactcctggactgatgaagaggcacagatttttcttcttggtctctacagttttgggaaaaatcttgtccaggtgacaagatttactgaaactaagacgatgggagaagttttgtcatactactatggagaatttttcaggtctgatgcatacagacgatgggctgtatgtagaaaagcaagaagcaggaggtgtatttttgggctgcgtatattttctggtccaaggcagcaggaattgttgtcccgtttgcttgctggtgtagctagagaagttgaagctcctttgttggaggtctttaagatattaaatgagggaacatctacttttgagcagtttattttgaccttaagatccacagttggtgctcaggttcttgtacaagcaattggaattggcaaaggaaaatatgacctgacaggatttgcattagatcctagtagaaatcatggtatctcagcacgcccagaaatccctgttggcaaggcttgctcagcactttcatctggagatatcataaagtttttgactggtgatttcagaatgagcaaggcaagatcgaatgatctattctgggaggctgtttggcctcgcttgctttcaagaggctggcattcagagcagcctaaggattcttcaccaattggaaaacatgctttagtctttctgattccaggtgtaaagaaattctctagaaaaaagcttgtcaagggaaatcattattttgattctgttagtgatgtcttgagcaaaattgcatctgaaccaaggctgcttgaatttggagttgagcgtggtaatgatgaaagtgtcattaagcatgaaaatggatggagccatgattctgaacctgacagaaacatacttcctaacaagaaaccttcatgctataaccgtcccactgagcctggctgttctccagagctaatgaaatttactgtggtggataccagtcttgttcaaggggaagaaccttccaaggtgaggtcactaagaaacctaccaacagattctagccatggttacatgtcttcaccacattgtggaggctctggaagtgacagttcagaggaacactcagattctgaggacagctctcggtcttgtgaacatataatcactgatgatcgaagcacaaccaatgcaaagtatgctagtgatgagagaaaaagtaagcccccaacagctgataaggtggattctagtgtaattcagaagtctgcttcctcaggcacattagtgtcgattaatggtcatatttcaactgatcaaggtttcagcacaatgaataatgtatcctcttcaaatgcaactattcttcctgttgatgttcaaatggtccatgctcctactacttccactgaaataagctttcagtttgatcaaaggcttaatgctgagtcccaaattttcttagcgcctttttcaaagaggaggaggttggtttcatccaagactgaaagaactggtcgcaagaataccaccaccattgaaaaccattactggaagcaagttgacgagccagtgcatcatgatgcatctggagaaaatgaagcaagcggacccaaagcttttgtatggggtgcaactcctagctcatcaactaacatttcctttgaagtgaataacaagaaaccgtactgcagacagcttgacaatgtgctccctaacgctgaaacaatggtttacaaggaaacatgccaaaataggcatgtcattgatcttaatatcccacaaatgccttctgattttgagtcaactgtgagctacatcgtccctccatctgacaaaaatgcagaaaccacaatcagacctatacgtacttctggagctgaggaggtgactgaccgtgttccagacatagaggcctctagtgatgtgctctatgatgagttttctttcaactcaagaagacatagtagcagaagccgcccaccaacagctcgagctttggaagctcttgcctgtggctttcttggaaccaaacagaagggcagggagacaagtttcccatcttcaagcaggagcagcagacctgttcggcgaccacgaagatcacctgatgttgcacggccatttccttctgaaggcaaagaatgcacttctcgtttccctgatccacccatggatgtcaatgcatggcagatgaataattctccataccaaatgattcatagcagctcctccgataaatccacagaaaaaggtagccctgacttgtttggagcagacaagtctaccgataaaggagttcatgaattgtatggcataccttag

SEQ ID NO: 1768 - DNA, 1017 bp, Zea mays
  Peptide Sequence Number=SeqID_43547
actaacggctctcaagtagagcaagttgatcttgttgagataggtaatgaagaggcttcgtgcatcgcgctaaggaacatgtccattagggatgtgtgtcctaaggaatccaaagagcctccaaaggcacaagatcaaccatcctcctccacgcaagcatctccaccaactcaaaatgaggatgaggctcaagttgatgaaggagaagatcaaagagatgagccacctcaagatgacggcaatgatcaaggggagatgcaaatgatcaagacaaggaggatgaagaaccgaggccaccacacccaagagtccaccaagcaatccaatgagatcaccccgtcgacaccatcctcggcgacattcataaggggggtagaggaagcactacaagattcagattgggtggtggcgatgcaagaggagctcaacaacttcactaggaacgaggatgccaagcccatcaagacacccatgggaaccaatgagcatctcgacctcgacacggaaggaggcgggaatacccaagctgcaaattctggttctgttactgtacaaagtcgtctcagcctatcaggcacccacctgggcatctcgctgacgctggccaagcctcggccaccaccccagggtatggccgcccgctccctcctcctctacgcgctgctgctcctggccctcgccaccgccgcaccgtcccacggcctcactcaagcggatgttgcgaagcgattgaaggaggtgctgtcggagaggaaccgagggcatgagatgctcgattcgtggaatggggatggggacccgtgttctccgtctacctgggaaggcttctcttgcgaacccaaggatggtgcccaggtcgtcgtcaagttgaacttttcttcgaagaaactgcaagggccgattcctgcagagattgctaacttgacggagctaaatgaaatacatctgcagtataataacttcactggatttattccggcatccttttctgctttcagacacctgctgaagctgtaa

SEQ ID NO: 1769 - DNA, 180 bp, Zea mays
  Peptide Sequence Number=SeqID_43548
atggctatggaggccaggggtcgatgtggtgcagaggaagtagtgatggcaccagggtcttacgtcacccatgccatccgccataatgagcacgaacagagacaaggcatatacggacaagcggcctcgctaagtgtacaacttataacacactcttctacttgcttctctataacataa

SEQ ID NO: 1770 - DNA, 345 bp, Zea mays
  Peptide Sequence Number=SeqID_43549
atgcaggattatggatcccacagtaccggcaggcgtgttccacgaagtctccctgccgtaatcatacccgtcctctccgacgcaggctccaacaggatcctcgaagctgagtgcggctaccccagaggcgagcccatctgccgcagccaacgagcgcgccttggaggcagaccgcggcgacagcgaggaggaggccggtggggtggggacgtccaaagacgtgacatcgggttcagcggaggccacgtcggagggcggcggcggcggggtcctccgccaccaccatccccatgggctcgccgcagtagctgggtggatctggatctgggcagagcggtggtttga

SEQ ID NO: 1771 - DNA, 144 bp, Zea mays
  Peptide Sequence Number=SeqID_43550
atggatgatttgatgattaggaaccttggagaggaccaacaaggacttgggaaaggccaaggggttgaggaggagcagcaaggaccagtctgtactaaaatggacgccgaggacgtatccgggctccaattatggcggacttga

SEQ ID NO: 1772 - DNA, 147 bp, Zea mays
  Peptide Sequence Number=SeqID_43551
atggcgcgccagacgcaacttgatcttcttgagcagggcccaatcattgtagttggccttggtcaagacaaggactcaaattttcgtggctcggtcctgctcatcggcacgaccacttcatgggtcggcaacgactacccggcctga

SEQ ID NO: 1773 - DNA, 516 bp, Zea mays
  Peptide Sequence Number=SeqID_43552
atgaacgtatgtgagctcactcttgctgtctcacaccccccacaggtcaagaacaggtaccgcaggatgaggagcatggaggatgctgtggcgaaactcctactagtgcacttaccagaggtcagggtggagatggcgagcttggccacggcgcaggtggtactgcggcaattacacggtgacggacagcgcttggcgaggaattcttggtgcctgcccgacaatccgactccggagcgccctgaggaggtctccgatcacctccgatggacacgcagggaggcgaatgcggctgtcgacggtgatggtggatctctcgtgctctgccccctcccctttctctcagctggctaccgaggtgggtttaaggctatggcggcggacctaccgggtcttataggcgcacgacacggggtactcgatccgcagattacgacgctgaccggcgaggcttccgcggtgatcccgcgcgacgcgcgcggagttcgttgcgcgccgggcaaggaggacgactga

SEQ ID NO: 1774 - DNA, 645 bp, Zea mays
  Peptide Sequence Number=SeqID_43553
atgaagttcatgtaccctatgggccgaattgaacttagccgacccaacacccctttccacttctctcctcctggccagccactgtgccctgccgttctcaccgtgccgtgggccccacaagccagcggcctcagcctgagtccgtgcgcgcctacgctgtccggggttttccggctctcgctgactcgtgggcccaagctgtcggatttatcccctccagatcccaccaacctctgtccgattatggtgcgtattggtcggcatgttccgcccgaaaattccggcaacatcgccctcagtcggacttcgccgtggagtataaggaccgccacggccaagggccgcatgaactgccattgcgtgcccttggacgtacacccttgccggaacccgcttgaaggctctggggttcacgcgagtcaactgaaactcggactcggcggaatcgcgctcttgaccaatggagtgcctcgccggaatgggagcttcgccatgctgtcgcgcatgccgtggacagcttccctggcgtcgtttctgtctccgtgggtgctcagctgtgggggcctgcgcgccgccgccctgctgcagtgggagaaggaagacggcgcctgggtcgttgatccgataagggatggcctagattag

SEQ ID NO: 1775 - DNA, 429 bp, Zea mays
  Peptide Sequence Number=SeqID_43554
atggcggaggttgtcttccatggcaaccgcgcgctggtcaatgatggagggcggccaagagagtcccagggagcgcaacgtcgaccatggattgtgagtcgaggaggggatgcggctttggcttttatagcccagggaggatctcgaccagaatctggccgtaacaaccatgcgatgaccgcaaaatccgttctgattaacaaggtgaagaggctctcgagctggggggtccacatgtctgcggtcttataccccaagccagggaagtccgaggagggggaaagaaaggacccggccagcagaactccccggcaatcgcgggtgagcgcgcagcggtcttcacggtgttctgttgaggaagaagctgacaactgggtcccgcaagtcatagacgccaaaagagatgagaagacggctgtgcgggagtga

SEQ ID NO: 1776 - DNA, 354 bp, Zea mays
  Peptide Sequence Number=SeqID_43555
atggcaacctccaccctgtggtcatggcaggctggtcctggcggcattgcggaatgggtgcaaggcagaatcgtaaagttgaggacgctcttccctattcttaaaccgctggactcacttgatgtgattggcttccaagagggcacagataccattttcattagcatagatatggaggtctttgcagtcacgctcagatcggagcaggtgaagaaggtaggcaagacgggctccaaatatgccatggcaccctatgtgagcttctacactccagatgtttgtgttgtctgtgatctgcaaaatttagtcaaacagaggataaatcttgcaaagggcagattgctatcaccatga

SEQ ID NO: 1777 - DNA, 429 bp, Zea mays
  Peptide Sequence Number=SeqID_43556
atggcggaggttgtcttccatggcaaccgcgcgctggtcaatgatggagggcggccaagagagtcccagggagcgcaacgtcgaccatggattgtgagtcgaggaggggatgcggctttggcttttatagcccagggaggatctcgaccagaatctggccgtaacaaccatgcgatgaccgcaaaatccgttctgattaacaaggtgaagaggctcccgagctggggggtccacatgtctgcggtcttataccccaagccagggaagtccgaggagggggaaagaaaggacccggccagcagaactccccggcaatcgcgggtgagcgcgcagcggtcttcacggtgttctgttgaggaagaagctgacaactgggtcccgcaagtcatagacgccaaaagagatgagaagacggctgtgcgggagtga

SEQ ID NO: 1778 - DNA, 201 bp, Zea mays
  Peptide Sequence Number=SeqID_43557
atggaattggactcgtggcgatcaaccaaggctgcgccaacgctgcttcccttgccccgcgggccgcgccttcgtgctatctgcggcactgttctcacactgctgcccgtcacaggggacgatcccaaggacgtgaaggcgcggctcaaggtgtgggcgcaggcggtggcgctcgcgtccgcatctcgtctcggttcctga

SEQ ID NO: 1779 - DNA, 228 bp, Zea mays
  Peptide Sequence Number=SeqID_43558
atgccccgagccccgatgcccacgtggaccatgaagaaggggggattgacgggtacatttatagcgcaggggaaggagtccgcatcgaggacaattggttggcgaggaagagaggaccccgagatccccggcgacggccatggcggcaaccgagccgagttgttgcgagattttagctcgagggaggagaagagtctggcatcccagcccacatggcggagacagtaa

SEQ ID NO: 1780 - DNA, 384 bp, Zea mays
  Peptide Sequence Number=SeqID_43559
atggagaacgagaagcacgagagaaatgggggaattgccgccgcactcgacttccgaattcgcgcccgaccgatgctcgaggatgagtctcggaggttcgtcggcgttcatgcctgggagccgccaatcgccgtggctaacgttctctcaatccccaccatcggtaaaaatccttgtgtcgtgttcgccatcgtctcctccgtaggtagcaccttacgattgagggttagtgccgctatggttgatccacgcaactccggtatgctccgccgctgggaagccgggcggcgccgccgtgccctgtcggctgaggtaggagatggcctctggccatcggatcgtgaatgggtggtcacgattaaatcgcgatacctcttcgcttga

SEQ ID NO: 1781 - DNA, 689 bp, Zea mays
  Peptide Sequence Number=SeqID_43560
atggacaaactggattctgggctgaatttcctccccctcaacccattcctctcacctacgacccacctcctctctacccaccgcgtccagtcggtcgcggccatcgtgggctccgtcgggcgtctggattcaaccaccgccgcggattactcggcgtttgactctggagtcctcgactccgtggttaaaagctgggcgcaccgtgctatgtccttcgcgtgcgaccaactccaagctagggcggcaatcgttgtcaccgcgacgggagcaacttggtgtctcggcgtcagggattcccggagctcccatcgcggggcggactttcagactgttcgtgccggcctcgtcttcatctctgtggcggtatgttgcgtctcgctgttaacaagtgtgaattccgcggatacctatgtcagcgtcaagtggttgttgtcgctgggcgagctcacgatgggcggtaatggtgccatcgcggctcactcacgcaccggcggtggggcattagtgtcatgggtggaagatgatatatggtcgttagatgaagatcgtagggttgcgattccgcaacgggtgtaccggttcaggcttttgtccgtactgtggatcaatgatcctacgaccgagagcgagcgaggggccgtgcgctgtgtaccgcggatcttggatccgacgatcaggggcgggtacgg

SEQ ID NO: 1782 - DNA, 573 bp, Zea mays
  Peptide Sequence Number=SeqID_43561
atggcggagcatcgccgcggacttgcaattcgaagcctggacgccccaaccttgaaattgatcggtgccaaccgtagagggggtgatggcgattacggaaaggggtatctcaccgacgaaggcgctacgatggtgtcggtccacgggaggaggcggatttgtggcggcagaactcctccgtcgaggaattcccgtgttcctcgtggctctcagctcgacttgagggctcctgcagcttcactgcttcccggcgaacgtcttcgaccaccagtgcggatccgagcgcagtcacgaaggggaatctccggtggcggcgcactcggttcgactcacttccgcgcggcggcgcctgtactctgcgcgtcgcggtctgggtggatggagctgataggcctcgagggggtagtcccggtgtcccttttatctcggtcaatggaggatggtgcatgctcgcatgcaccgcgtgcaacagcctcacccgagtctcccggctcaccgcgattccgcgaactacggcgagaagaaaggataggtgaagacgctgcgccctgggccccacatgatggtgtttag

SEQ ID NO: 1783 - DNA, 537 bp, Zea mays
  Peptide Sequence Number=SeqID_43562
atggagagaggtaacggcggcattgaaacttcattaatgtcgggacgacgaacggacacattgaagctcaacgtaggggaaacggatgccgcggggtcgcttggtgtcgcggctcgggcatcggactttggctctgtcgcgggcggcacttcggtcctcggcgcggtcggcatcgggctggcggcggggcttcacgttgggttcctggggttcctggtgggcgtggcttcgggtccggccggcgtgcagggcgctcagctcgcacggcacggcgcggtcgggcttcggcctgtgcgtcgcgggcgtgtcggtgcacggcagctgggcacgtcaggcttcgtcggctcctgggcgggctcgatgcacggctcagagagaaggagaggagggatggagagagaagggccggtgggagagagagagagccgagtgggagaggagatgcaggggcggcggctgccaagggaagaaggagcggcgtggccggctcctagggttagggaggggcgcggcctaatgggccttgggccggcttag

SEQ ID NO: 1784 - DNA, 315 bp, Zea mays
  Peptide Sequence Number=SeqID_43563
atggcggctagaagacgttggcgcgaggtagcagggggagtggttttatcccccaacggaggtggacaccgagcccaacagtccgcaccgcgcgcacaggcgaggacccggcgtggactccggcttctgttgagcagggccgacaatcgtgggaggtgggggaacgaactgacaaacggacccgcgttgccagtgactcatggagaaacgtccagcgcgcgcgtgaagataatgggccgcacggaggtaaagaaatctggggccaaaagtgatgtagccggcccattttctaatgaatttgaattagtgatttga

SEQ ID NO: 1785 - DNA, 411 bp, Zea mays
  Peptide Sequence Number=SeqID_43564
atgggtatgggtatgggggtaaatccatacccgtcagtgtatatgggtgtcccggtggagttatttttgtatcgtgggtatgagtatgggatagtaatacccagtggatatttacccattgccatctctagtcaggaacttccacggcatgaactccaggtccctagccttctgaacttaaatttatggtctggtcgccattggcagcctatccctagatgcacacagccatcgtcgcccctccactctgcacgcgcagtcaccgctgccggccctctgcccctccgccctgcatgcctcgtgcctcaccgtcccataaacgccaccacccaaccgatgacgagccctcggccgcccgtgcccgtgcctgcgagtagggatagcagcgggtcgaattttgtttgggtgtaa

SEQ ID NO: 1786 - DNA, 699 bp, Zea mays
  Peptide Sequence Number=SeqID_43565
atggagtggacgacggtggagacgagggacggcgcgaagctgagcgtgcggctgttcaagccccccgcgtccggaacggggttggagccggagccgagggaggatgtggcggtggtgctggtgcatccctacaccatcctcggcggcgtgcagggcctgctgcgggggatggcggagggcgtcgcgcggcggggttacaccgccgtcaccttcgacatgcgcggcgcgggccggtccacggggcgggcgtcgctcacgggctccaccgaagtcggggacgtcgtcgccgtctgccgatgggtcgcagagaacatcaagccgcgcggcatcctcctcgtcggatcctcagctggggcaccaattgccggatctgcagttgataaagtggatgaagtgattggttacgttagcatcgggtacccctttggtctgatggcctcagtcctattcggaaggcataatgatgctatactcaagtctgaaaaaccaaagcttttcatcatggggaccaaagatggcttcaccagtgtgaaacaactgcaaaacaagctcaaatctgcagctggacgggctgatacacacttgattgaaggagctgggcacttccaaatggagggccctgcttttgatgcccagatggtatggcatctgtcattccgaaatctgaaacttaaattatttgagatcttttcgttatag

SEQ ID NO: 1787 - DNA, 156 bp, Zea mays
  Peptide Sequence Number=SeqID_43566
atgtcggtggccgagcgcagcgtgcagggcacgccacagtgggccagcgtgggccgctggcgggtgacggagaaatgggccgaaggaagggtttctgtccaaattgaggatttacttaaatcacaacttcaggattttgggtgttacaacaactaa

SEQ ID NO: 1788 - DNA, 432 bp, Zea mays
  Peptide Sequence Number=SeqID_43567
atggtcgccgcacaaacgccaaacatagagaaggaatctgccacggacgaatcacgcgtacaccgtcggtggggtctcgacagcgggtctgggagcttcactacgttctcaggcgagtgctcgtggcctctccaagcactattggcacactgggcacttgtgatttctcactggagctccttcatcaccaccgagccgccatcctcagtcgacatggttctgctggactcgactaccggtaaattgcttcctccgaagtccgctgtcgtccctactacattttgcgctgacccgttctttgtttggggcatcagtgcaccggccacgccgtgctcccgtgatgcgccaccgcgagggtactcggagtggggtggggtagcgcccatcgttggatcgtatgcgagcgatcgggatggtatcgtgatgttttaa

SEQ ID NO: 1789 - DNA, 633 bp, Zea mays
  Peptide Sequence Number=SeqID_43568
atggaggatgactcgccgctgacgaagacgatgaagggtgcggtgacaggactcgccgcggggaccatctggggcaccgtcgtcgccacctggtacgacgtgccccgtgtggagcgccacgtcgcgctccctggccttatccggacgctcaagatgtgcggcacctacggggccaccttcgccaccatcgggggcctctacatcggcgtcgagcagctcgtgcagagccagcgcaagaagcgcgacttcgtcaacggggccgtcggcgcgttcgttgccggagcctctgtctgcggctacagaggattgataaaacatagggataggaaaaatgtaggaatagagttgtatgccacttacaattccataggaaaatttccaagaggccatgttcagttctaccccaatccatatggattgagggtgtttcaatccctatatattggctatcaacttcgatttctgcttaatctggatgccacttttgcaggaaagagtattcagtcagccctcatcggaggctcctgtctggctttcacatctgctgtgctggacattggcggcaatacgaccagagttgacaacggcaaagagtactatgcctacacaactgagaagaagcctgcaaattga

SEQ ID NO: 1790 - DNA, 543 bp, Zea mays
  Peptide Sequence Number=SeqID_43569
atggcgcggctgtcaggcaacccgcagggtctgactgagctgcagcgcatgggcgtcggtcgggctcgtgatcggcatggcggcgatggtggtggcgggcgtggtggaggtggagcggctgaagcgcgtggcactggcagtcccgtaccagccgagctccctgagtgtgctgtggcaggtgccacagtagtgcagtacgcgctgatcggggcgtcggaggtgttcatgtacgtgggccagctggagttcttcaacgggcaggcgcccgacggcgtgaagagcttcggcagcgcgctgtgcatggcgtccatctcgctggggaactacgtgagcatcatgctggtgagtgtggtcataagcctcaccgccggggagaagcgtccggggtggatccctctcaactccggccaccttgacaggttctacttcctcctcgccgcgctctcgctcgtggacctcgccgtctacatcgcctgcgccatgtggtacaagggcatcaagcttgacggcgataacaggagaaaagtctctgcgcacgtctag

SEQ ID NO: 1791 - DNA, 936 bp, Zea mays
  Peptide Sequence Number=SeqID_43570
atggcttccagaaggttaaatcttgctagctcaacacgcttctttagacaacgactgcagaaatccctgaagaggccacaagagaataaattaagcaataaaaaggataaagctgacgaggatattgtgaagaaccacaaaagctcaaagaactgtgaaggttcggaaaactcactggacaagctgatgaatcctaccagtaccactcctgattcgaagtggatgcctcccgccaccaccgatggatccatggacagacgaggaaacccagctgtcaagacaaccaccggaggatggagatctgccatcctggtgctagctaactatggactcgccacgtgcgccttcttcggcgtcggcgtcaacaacatcgtggtgttcctgcgccgggtgctccaccagtgcaacgccgaggccgccaacaacatcagcaagtggacagggaccgtctacatcttctcgctcttcggcgccttcctcagcgactcctactggggccgatacgtcacatgcgccatctttcagatcatctacgtcacggtgcgatcatctgttcagacactggccaaaccatcagtctcctgtgatcggtcctgttcttacttgcctgtgttgtgttgtgtttgttcttggtggtcaggggctcagggcctggtgatcctgtcgcttgcctcatggacatggttcttgttggtgaagccctccggctgcggcggcgtcaaggcgcactgcgacgaggggtcggcgcccggcgtcgcgctcttctacctgtcttccatcgcgacgttcgggtcggaccagttcgacgagacggaccccaaaggaggcgcgctccaaggtcgcctactggccttcttcagctacttctacctggcgctcaacgtcggctccctgttctcccaacaccgtgctggtgtactacgaggactctgggcg

SEQ ID NO: 1792 - DNA, 324 bp, Zea mays
  Peptide Sequence Number=SeqID_43571
atgtctgatcctaaagcttatcctgaccatgctgagagccgaggggtgggtttgcagaggataaggcagcgccataatttccctggttgggacagtcgatccgaggctggctcggtcgggacaaagatttgtcccgaggcaaaggtcgggtgctcgggcgaggcggatattcctcccgaggccgaggccgggtgctcgggcgaggcggatattcctcccgaggccgaggccgggtgctcgggcgaggcggatattcctcccgaggccaaggccggggcggctactgttgctagtcatgcctgggtgcctgacacggcggtctga

SEQ ID NO: 1793 - DNA, 345 bp, Zea mays
  Peptide Sequence Number=SeqID_43572
atggacagtcttcaacaaccatggcagttcggcacggtgatccggttcgggagtctcgagttcatggcccctggcatcggctatgacatggtactcctctcaccccagcatcacatcgacgccgactaccgtcttgcccagccggggggagcacgaccacgtctaccccctagcttgaggagggacatccagagcaccgtcgccacccttctcgccggaggaggaggaggaacaaccgcaaccacgccacagatagcacttccctggctgtcatccctaggcaagctaacgacgcaggctcccttgcaagggacctgtcagccgtttgcctcgtcccaggaatga

SEQ ID NO: 1794 - DNA, 702 bp, Zea mays
  Peptide Sequence Number=SeqID_43573
atggatctgttgacaacccctccaacctcggagcccgcgggcttcgaggaaggagatgacctggacgctggcctggatttttccgggctccatgaccctggggccatgcatcacttcctgtctgcatgcgactactacctctccgacggctccagcgactacagctctgacgacgagggttatgactcgactcgcgagtgcttccatatcgagcatgaggagcacggaggggacaaccagcttggcatgccaacaaacaacatcgccctaggcgccagcatctcgcgtcgagatcccgcgggagcaagttgtggtccggacccctgcggggagccaagctcgacgaggagcgggagcaactccagcagcttcagcaagccctcgagcaggagagggcaggtcgagcccccgatagaggagcacgcttcagggcacacgacgaacaccgccgcatcatcgacaacaccaagccgagccacggggttcatgccgtttttcctagtctatggggccgaggccatcctacccacggacttgcaatatggctccctgaggctgaaagcatacaacgatcgaagcaaccaagtcagccaagaagattcactcgaccaactggaagaggctcgggacgtagcactgctgcattccgccaggtaccagcagtcgctgcgacgctaccatgcacgacgagttcggtcctga

SEQ ID NO: 1795 - DNA, 1476 bp, Zea mays
  Peptide Sequence Number=SeqID_43574
atgagtgaggtgaataatactcagctggaccttgagaaaggattttctcaagtgtctcatgataatgattcgagtagccctgtaacggtgcacaagatgaaagttgagacagaaggtggaagtgaaatcgaatcacccactccagaaaaacgtgaatctagaagcaaaggggtcgttgtgagttcactggcaaggaatttgcttgcagagaggtacaaagacagacttgcaaatcagctggtggaagatgagagtgagacagatgatgaagactataatgaaagtgtttcgcctagtggtagccgatctctttttttagaaagcattgaacttcttgagaattggatgatagtctttctgcattacaggaagttattatacagccatttggcccagatgaagcatttgttcccagaagcaatccagataaagaggatactagtacatgacgagaagagcatatgcatgtatgctgatatggaaatcacacttgtaatggatgttgtggaatgcacaagccctgatcactctctatccatgacaatttgtgaggctttttactcaaagcttttgagatttttggatgctcatcataagggtgcagacattcctgaggcaatcctaccggaaccctttaactcaaggccaagggagaagttatatcttgaggcagtacataacggacatgctgctgagccacctctgcatggtgccgttgaggagggattctcaaatgcttcccacttcccacaatcttttcaaaaattcatgtcgaaaaaaatcattgctgatggaactgaaaagactcaattgctatccgacccagcagaactgagctctgtgagtgcttatggtacaaaagggtcaaacagaaaccctaaaaagcaagatgaacatgctccagttccagtgaactctgaaatttctgctactccaagccgccatttgatctcttgttgtcaagagagtacgccaaaacaacagacctcagagtcaccattgttgtctggaacacctgcaatgcagacaccaaaaaggccattgctggctccgcttgagaaacccaaggccacatgtggacacattagtgaaccacgttcagccagttctgcccgcagatcactaaatacatccttaacatatgaaggaggaagcccttcttattatgatggaatggaacatacggctacagctaaaaagtgcatgatctcagaagacttgtcaagttttaacaagtcatttgaggaagatagccatgtcttctttactgataaagacaaaatcaatgaagtggagtcagtggatagccaggaaaggatagcttctctacgtaccacatttgacattgtctatgatatttctcattctaccaagaatccacttatcacgaaacaggaacttttccacaatattcttgccaacaacttggagatagaagagattggtaatgcagtgtacactccaaattacacttga

SEQ ID NO: 1796 - DNA, 1443 bp, Zea mays
  Peptide Sequence Number=SeqID_43575
atggagacggcagccgcacctaccctggcgccgcacgtgctggttgtccccttccccgcgcagggccacgcgctgccgctcctcgatttcgccggcctgctcgccgcgcggggcctccgcctcaccgtcgtcacctcgcccgccaacctcccgctgctctcgccattcctcgcggcgcaccccggtgccgtcacaccgctgaccctcccgttcccctccagctcgtctatccccccgggtgtcgagagcaccaggggctgccccccggagtacttccccgtcttcatccacgcactcaccgcgctccgcgagccggtccgcgcgtgggccaggtcacgctcgccgtctgacgacggccccatcgtcgccgtcgtcgccgacttcttctgcgggtgggcgcagccgctcgcccgcgacctcggcgccgcgggcatagtgttctcgccgtccggcgtccttggcgccgccgtccctcactcgctcttccggcgcctggtgaggcggcctgctgctgccgaggagtccagcgtggtcacgttcccggcgatccccggagaaccggtgtaccagtggagggaggtctccatgctttacaggtggttcgtggaaggcggggaagaagacgagcaggcccgcgagccggtgaggcgtaacttcctgtggaacgtggaggagagctgggggttcgtgttcaacacgctccgggcgctggaggggaggtacctggagcagccgctcgaggacctcggcttcaggcgcatgtgggcggtgggccccgtggcgcctgacgcggacgccgccggcgcgcgcggcggggagaccgccgtcgcggccgccagcctcggcgcgtggctggacccgttcccggaaggctcggtcgtgtacgtgtcgttcgggagccaggcggtgctgaccccgggcgtggcggcggcgctggccgaggcgcttgagcgcagcgccgtgccgttcgtctgggtcgtgggcgccgggagcagcggcgtggtccccaaagggttcgaggtgcgcgcggcgtcggcgggccgcggggtggtggtgcgcgggtgggcgccgcagctggcgacgctgcggcacccggcggtggggtggttcatgacgcactgcggctggaactcggtgctggagtccgccgcagcgggggtggccatgctaacatggccgatgacggcggaccagttcgtgaacgcgcgcttgctcgtggacgaggcgcgcgtggcggtgcccgcgtgcgcgggcgggttcggcgtcgcgccggacccgggcgagctggcgaccgtgctggccgacgtggtaggggagaaggggcgcgacgtgagggcccgcgccaaggagctcgcggcggaggccgcgcgggcggtgatggaaggcggcagctcctacgctgatttggacggattagtgcaggagattcggaatcttcgttga

SEQ ID NO: 1797 - DNA, 1173 bp, Zea mays
  Peptide Sequence Number=SeqID_43576
atgcctgaaggagttccgcctgccgggaagcgtcctgcgccttcgtcgaagtctggtgtggcagcgattggacgacgaccggcaactcttccttccgccgtcgtgccgacgtcccaaggtcctgttcgaggtgtaggaaccagtatgatggataaaaggcacgcgcaaaaacctcgtcgatcttcgttgaatattgccttaggtatgattggtggtggctgtgaaggttcttcacaaaattgtggaagaaaccccattgccaacagtgcatcttttggttcaatgtatgaggagatcagagggccaatgccctcccaagaaaattacttcacaaatctgctgaacgaagatggtttagaagtgtcaggctcagaagacgttgtcgaagctgattacgatttgttggagccagtgcttgcggttgatatgagttcgcagacaaaaagtaagggacggtctaagaatttttcagaagaggaggacatgttgctcatttcagcatatcttaatgtgagcaaagatcctattgctggaagggatcaaaaagatggacgattttgggaaaggattgagaaatactactatgagaacaagacctttgaatcagatcgcaattggtcctcattgcggcaccggtggacaacaatttcgaaggaagttagccttttcaatagttaccatgaagccatagaacgaaagaatgaaagtggaaagacgataaacgataagcttgctgaagctaaaggaacttatcaaagattaaggaaaagggcattttctttgttccatgcatggaacgccctaaggtttgagccgaagtgggtatcaataaaagatgacaaaccacctgttgatggtaatgatggtgctgcactgaacgttgaaaggccaccaggacgcaaagctgaaaaggaaaagctgagagcgagaaagcgagaagaagatgcatgtgatccttttattgaagaagttaaaaaaatgagagaagcaaagttggatagtgaaagagatcgaagactccgcgaagatcagttcttggagcttgagaagactaaaatggacaccaagatcatggaaactgacacaagtacaatggacaacgagtctaaagaatactttagattaatgaaacaggaaattttggatcgtcgttttggttctacgcaggcttag

SEQ ID NO: 1798 - DNA, 657 bp, Zea mays
  Peptide Sequence Number=SeqID_43577
atggcggctccgcccgcgaccaccgccacgactcaccaccgcgcgctcctcccgcccacgcgcacccacgccgccgctacgcactccgcgctccgcctcccgctccgcgcgcatccccacgcccacgcccagcgcgcgcgcctcaccgccgccgctgccccggcccccgcggcgtcgacggcctccctcgagtcctccgccgcggggaagcctacggtgctcgtggccgagaagctcggcgccgcggggcttgcgctgctgcgggaattcgccaacgtcgactgctcctacggcctctcccccgaggacctccgtgccaagatctcgctctgcgacgcgctcatcgtcaggtccgggaccaaggtcggccgcgacgtcttcgaggcgtccgggggcaggctccgcgtcgtcggccgcgccggcgtcggcatcgacaacgtcgaccttgccgccgccaccgagcacggatgcctcgtcgtcaacgcgcccactgccaacaccgtcgccgccgccgagcatggcatcgcgctgctcaccgccatggccaggaacatcgcgcaggcggacgcgtcactcaaggctggtctgtttccgtcagtgcaccgcctccactctgaaagtgatgcctgtttctgtttgggcatggtgcttccgtaa

SEQ ID NO: 1799 - DNA, 1923 bp, Zea mays
  Peptide Sequence Number=SeqID_43578
atggcaatgggtaaatacccaccgggtattactacctcatacccatacccacgacacaaaaataatctcaccggattacccatatacactggtaaatggcagcgcaacaagtatgttggtgtatctcttgtgggcaaaactctcgcgattcttgggttcgggaaggttggttcagaagttgctcgtcgcgctaaaggtttaggaatgcatgtgattgcacatgatccatacgcttctgctgatcgggcccgtgcaattggagttgagctagttagtatggaggaggccatgacaactgctgacttcatctcattgcacatgcctcttacccctgcaacaaacaagatgctcaacgatgaggcctttgctaagatgaagtatggtgttcgcattataaatgttgcacgcggtggtgtgattgatgaagatgctctagtcagggctcttgattcaggaatagtagcacaggctgctcttgatgtgttcactaaagaacctccagctcctgataacaagttggtgctgcacgagaatgttactgtcacacctcaccttggtgccagcacagtggaggcacagctacgagtttgcttaccgcaacaagtttcacaggaaggagtggctattgagatagctgaagctgtcattggagctctgaaaggggaacttgcagcttctgcagtcaacgctccaatggttcctgctgaggtgctgtcagagcttgcaccttttgttgtgcttgcagaaaagcttgggcatttagctgtgcaactagttgctggtggtggtggcatcaagtctgtgaaagtgacctatgcatctgcacgggcccctgatgatcttgacacgagacttctccgtgcaatgatcaccaagggattgattgagccaatctccagcgtttttgtcaatcttgttaatgctgacttcaccgcaaagcagaggggagttcgcatcactgaggagaggatcatcttggacggctcacctgagacgcctatcgactacattcaagttcagattgccaatgtcaagtccaaatttcctagtgcgatatctgagactggagagatcacagtggaggggagagtgaaggatggcgttcctcatctaacaaaggttggagcattccaggtggatgtgagcttggaaggaagcctgatcctttgcaggcaggttgatcagccaggtatgattgggtcggtaggaagtgtcttgggtgaggagaacattaatgtcagtttcatgagtgtcggaaggattgctcctcgcaagcatgctgtcatggcaatcggtgttgatgaggaaccaagcaaggtcacactgagaaagattggggagattccagcaatcgaagagagaacaccgcacccaagccacaccacctccaccgtcgttgggaaggagaacactgcgtccaagccgtccaagcccacctccgccgtgcggtggtccacgtcgtcgctatcgcaggccagcaagatccaaagctcggtggactccaccttctgggctcccgtgctgctggggagtcgcgccagcggaggatggcgacaatggagacgggtgggcctccagctctgccagaaccgcaactccttggttgccttctttgcggctgacgaccccttcgcgccagcgaaggatggcgatgacaaagacgacgaggccgtgcggtgcccgcccaaggaagcggatgtagacgccttactgagttgggacgtgacaggcttgaaggggctggaattagcgctcctcctgaggctacagcacgacctcgctgacagggccagggacgatgacctgactgccgcaatcgacatctggctggcgattgcatttgatttgcaaagaaaacgtgagttctgtggactgcggtgggggcaagcagggagatttactctgaaatacgaggtgctttga

SEQ ID NO: 1800 - DNA, 213 bp, Zea mays
  Peptide Sequence Number=SeqID_43579
atggcaagaggtggtggcgggagagggttgctgggtgtcggaggaggcggcagcagcgtcgacaccagggacgggcaagctcactgcgactgccggaggatgcgagaggtggtggcgggggcagaaggatcctccaatggcagacgggccgtgctgcagacaaggtctccagcggtgtactggacctgtgaggtgttactaaccttcgattaa

SEQ ID NO: 1801 - DNA, 357 bp, Zea mays
  Peptide Sequence Number=SeqID_43580
atggggaggtgcgtgccagggccggaggtggcagcggtggtgtcgtccatggcggccagcatggccgcagtggtggtggcggtggagacgtccatcggggcgacggcttgcggctcggcttggagtgtgcaggttcttgttggggtcgcgtggcatcgggattggcgcggcttcctggcgacctggcgcgtcggttgcgcaggcgaaggggcgctcggggacggtcggtgtcgcggctgcgtcgggcagcgcgcggtcgggctgggtgctgggcgcggtccgctgctctccctggcgcggcgtcaggctgttgtttctgcacttcaaaaccagccaattgttaatggtttcatctga

SEQ ID NO: 1802 - DNA, 312 bp, Zea mays
  Peptide Sequence Number=SeqID_43581
atgcagcaagggctccagacacacatagatgggagattccagggtatgatgacccacatggatcagcggattggtgccttgcagacccatatggatggtcaccacactaccttggtcaacagggtaaatcttatgagtaatcagtttgacagtctgcatgatgaggttgtgcccactactacaacatgtaccctcgtcctccacctggtggtcagtgaggcccctcttttgtggcaattgatgccaaagggggagatgaagatgaagatggggttatcacaatcagggggagctcactttgtggacttttag

SEQ ID NO: 1803 - DNA, 870 bp, Zea mays
  Peptide Sequence Number=SeqID_43582
atggacaacggcaccatcctctccggtgaggctgctatgaaccacgccgccgtcagccccggtacggccatctcgggcttcacgcgcctcctcaaccaaaagctcaaggacgatttggtgaagagcgagatgaagctttcgccatcgtacaagttctccgagagggagggacgggccgccatccaaatccaagccgccggcggcggccaggtcatagagttgtgccccctagatctcgccgacatcctcttctccgagctgaagcacagggcggaggctcacctgggctgtgagctctcggctgctatcatcgccatgccgcatcacctcaactacaacggaaggcaggacgtcgtcaatatggcaaggtacgatgctggcttccgccgggccgccaaggccatcgaccgacagatcgcggcggccgtggcgcatcaccgccacacggagcaaggtgacgacttcacggcgcggatcatcgactacatggcggagctcatcaaggagccgcaccagtgggacatcaggcaggacgcggaggcgctgcgcaggctaagggtgtcctgcgagcacgccaagaaggcattgagcgaccaggaagagacgatgagccgcaaggacatggtcgatgagatcgtcctcgtcggtagcggcgcgaggatgcccaagctccatcagctcgtcgaggactacttccatggcaggcagccaaacagccgcaagggagtggaaccagaggacgccatcgttcgaggcaccgccattctttcccgtcctaaggcggcgtgctacctggaggagtgctttgactttctttacggcaaggacggtaggggtcttccaagctttcttttcagaacgtccgattaa

SEQ ID NO: 1804 - DNA, 159 bp, Zea mays
  Peptide Sequence Number=SeqID_43583
atggtaatcggcgtcaggtgcatggccaaggcgtaccacctggcatgggggccacaggattttgggcgggtgcacttcgccacccgaccggaggaatcgtttccctccgtcaatgctcaagacaagccgttcttcaagttcaaggcgaagaagtgctag

SEQ ID NO: 1805 - DNA, 432 bp, Zea mays
  Peptide Sequence Number=SeqID_43584
atggccatccacacgagatcatgtaagtccaacgtgatcaacatgaagcctattcatcttcaggcaccctcgaaagccaatatgggtgaactatcttgcatggccaaatattttcaacgtccctactggcttttacaacatcaacaacaccaagatgctcagccttgcgaagatgctcagcctactggcttttacaacatcaacaacaccaagatgctcagccttgcgaaggtatttccgagcaactatgtagccatctatgaagccaagtcaagagttgtacaagcccgacaaaaaacaaatcccgacaaaaaacaaatcgacattaggagaatccgtttgggtcgtgcttgggctaaaattgcctggacggggaagatgatggggcttgcttgcctgggccacgcagatgttgccccagccaatatttag

SEQ ID NO: 1806 - DNA, 447 bp, Zea mays
  Peptide Sequence Number=SeqID_43585
atggccttgggagtgcagcagctgaagaaggagttgggccgatcaaggaaggttccattcgagttcgatgagatccacgagttccttgaccggttctacatgtcaaggattggcatccacatgctgataggttcgcaaccttcaaactgctttgtcaagagcttaatttatgaagggcagcatgtggctttgcatgaccctaaaccggagcctggtgtcataggcctcatcaatacaagattatccccaatccaggtggctcaagctgcttgtgaagatgcccgttctgtctgtttaagggaatatgtatcagctcctgatattaacatttatggcgatccaaattttacatttccgttagcgatgaaggtggcgggataccaagaagcggcctcccaagaattttcacgtatctgtacagcactgcaaagaatcctcctgagctag

SEQ ID NO: 1807 - DNA, 321 bp, Zea mays
  Peptide Sequence Number=SeqID_43586
atgggggacttcatcggtgaggtggcctatatgatgagccaggcacgaccgactgtcacttattcaatcatttcccacgaatggttcttggagaactacagtgtagatcatagttttgttggagttcaatctcgaataggctccaatgtgaacctcaaggatattgtaatgcctagtgttgattattatgaaactgacacagaaggagagaactacttgcaaaaggaaatgttcctattgggatcggagagaatacaacgatttagtatgaatgcatattttacttctaccactaacgcctttgacatcatcttgtactga

SEQ ID NO: 1808 - DNA, 516 bp, Zea mays
  Peptide Sequence Number=SeqID_43587
atgcaggcggcatgcaaccgcgccaagtgggcgcaccccttcgactccaacgcgcccagcatggaggcccaggcccacacgtcatgcaaccggcgcgccagttgctacgtgcgagcaactgcaccgccactcgtgccactaccgcgcctcctcgactgcgaaaccagcgacacctttggcaggagaagcgggcgacgcttcaccttcgccataacgaccgcgtcaaaaaaggtgcgccacgtcattcgatttcgtatccttttcctcttcctctttctctcttacaacagggaccgggaaaggggataccccgaaagggatccttctccgcgaaggaaacgggccccgagcccccctactgatcagaggttcgaaggtcggcccctcagaggggttcaacagcagcctcagagcgctcgggctccgcgcccactactggtcagaggttcgaaggccggccccttggaagggttcaacggccgcctcaggccactcgggctctgcgcccattactga

SEQ ID NO: 1809 - DNA, 198 bp, Zea mays
  Peptide Sequence Number=SeqID_43588
atggatagaaacttgactgagttcagctacatgcatctgcatggataccctcaattccatttctgctatatattgcaaagtgtttcaaccaacacattagtgaatgagggaaaaaccattatcgggatggttgatgaggtgctggatgcagaggattcggggggtgcctgcatgagacattgtgatgttaaatgttaa

SEQ ID NO: 1810 - DNA, 276 bp, Zea mays
  Peptide Sequence Number=SeqID_43589
atggcgtcgtcgtcggatccggtgtccagaacaacccgagagtcgtcgatgttggcaacaaccatgaggcctctctgcttaacgatggacagcgcggtgcagctgctctggatcgcgtccaagtggtggcttcgcgggagcttgtcgtacacagcggcgcatgcgaccacggggcaaaagccaaaagccaaaagtcaaaccaaacacaccctaagctttgcgggaggagggaatgagaaagacagaataaagaatgggaatgacagaccttattaa

SEQ ID NO: 1811 - DNA, 444 bp, Zea mays
  Peptide Sequence Number=SeqID_43590
atggcgtcctcgcaaggggagccggtacccccgtggctcaagtttctccctctggcgcctgagttccgccccaccgtggctgagttcgccgaccccatcgcctacctcctcaagatcgagcctgccgcagcgccattcggcatctgcaagatcgtgccaccgctctcgccgccgcccaagcggaccacgctcggtaacctctcacgctccttcgtcgcgctccacccggacgatcccaccccaacattccccacccggcaccagcagctgggcatctgcccacgcggcccctgccccgcgctcaagcccgtgtggctctctccccaccgctacacgctccccaagttcgaggccaaggtcggcgcctcccggaaggcgctgctcgcgcgcctcaatgtccccgcctccaagcagcgccgccggatggaccaccatgaagtttga

SEQ ID NO: 1812 - DNA, 333 bp, Zea mays
  Peptide Sequence Number=SeqID_43591
atggcgaaccagttcgccgggtttcaggagatgatgaagacgacgcgggatacgttgagcgacctcgaggcttggtgcacgatcacagagacatcgatgatgcagcaatcgaaggagacgacagcgcgcgttcagcaaccggagacaacccggcgcagcgtttcgactccaacctccgcccaggtggatcgatttgaacgccgcgccattgctgtcgcggccgggctgggcatggcctgcacaacgaccaccgggcaggctgctctgctggcgtcggaatcctctgatcctcgccgacacacccggtcacaggtgtataggattcgcccgtag

SEQ ID NO: 1813 - DNA, 1530 bp, Zea mays
  Peptide Sequence Number=SeqID_43592
atgtcccgccgccccgcctgttccctcctccctctgctccgaagccgccgctgcctttacgacgccaccaccgctaggcccttcacctccgtctctgtcccacccgacgtgatctcctccacctggccgccgcactccccgtcgcctcttcatcctccgcccgatccggccgggacgtggtgctcagcctcttgttcttctacctcgccggcgctcccgccctttaccgcatcccatctccgagccgccgtctccttgctcgccacctcgctcaccgcgctcccggggcctgacccggacccggtgtccgccctccacgaccactccttccctaccctcctcgccgtctcgccgctcgcgtcacttgagctcctctcgctgctccggtccaggcctcggttagggctcgctgtattctcattccgccgtgtgctctccccggtgccctctatcagtgagtttgccctcgccatctcgctcgcgggccgcgccggagaccatgacgcggcggccgcgctctttgccgacggcaccgctattcattcccctaacctagggctttacaacgctcttatgtcggcatacatgcacagcggcctccttgacaactgcatcgaggtcttccacgcgctggagcgcgatcccaggtgcggtccgcctaacgtggactcgtacaacatcctcatcgccctgttcggtcgctccatcctcgttgaccacatggagcgcacgctccagtcgctggacgcttctggccaaccccgcactattggtacttacaatgcaatcatctctggttacctcaccgcatggatgtgggacaaaatggaagcgtcgtttcaggagatggtgtcgttccatgttgctccagatgctactacgcataagttgatgttaagaggatatgcacatgccgggatgatctgtaaaatggagcaagcttatgagcgtgcttgcaagcttggcataaaggttgacattttgcatatacgtgcaatgctgtgcgcatactgcaagttttaccatgtaggtagaatccaaaagattgaggatttgctcaagaagttgggtcctgatgattacaggccatggctaaatgtcctcttaattaaggtgtatgctcaggaggggttgaccgaggggatggagctgtatatttctgaggcattggaacgcaataccattgttaccgcagtaaaggtgatgcggtccatcatatgtaactattttcagtatgacgcggttgacagacttgcactttttgtccgacgggccgaagatgctggttggaagctgtgccggagtttgtaccactgcaagatggtgatgtatgggaagcactatcggttggaagagatgcatggggtgctcgatgagatggaatgtttgaagtttgatcgaacaaagaagacattttggatcatgtacaaggcatatgttagttgtggtaggaggactgaagccaacactataattggcatgatgtggaagcatgggtttgctgttcgtgacgacatgtctgatcaataa

SEQ ID NO: 1814 - DNA, 171 bp, Zea mays
  Peptide Sequence Number=SeqID_43593
atgcagcaaggcgaagctgccatgcttttctgccatgttgggaaatcagcaagtttcattgttctcaagcaatcagcgctctcctttggaatctcaatagtggtgttagagctcaagtggcgatacatgcgaaatgtacttgtacagtacctcgtcgatcatatgaactga

SEQ ID NO: 1815 - DNA, 246 bp, Zea mays
  Peptide Sequence Number=SeqID_43594
atgttttctctgacacactacactaagcacccattgtaccgaaaaaacttaaatgatgaactagatgcaaaacttgaagaactagaaggagaagagttggaatctcagcttctagagcctgttacagctctttcggtgtatccagtgcatgtccaaggcaacaagcaaccagctcgccctgctccacagaaagctaaagctaaagacgatgaactggctgcattgcaagttgaaatggcattgtga

SEQ ID NO: 1816 - DNA, 237 bp, Zea mays
  Peptide Sequence Number=SeqID_43595
atggcgagctccaaactcgcctactccatgtctacgtcgaggtaccttaggagaacatggcacacttctacccttccactaaggaggagttgcagaggaaaacaatttagtggagaagtgtttgctcaaagttttctattagatttcttggatgaaactgaagacggtaaacgaccaagcacattggctagagtggagttcactgtcattgccaacagatcaacaggagatgtttga

SEQ ID NO: 1817 - DNA, 489 bp, Zea mays
  Peptide Sequence Number=SeqID_43596
atggtgcctccccgaaggccttctatcgtggagagcaactcagaggaccctcccaccgaaattcaagaagaaaaacacatgttgagtgccctcgatgctctatgcaaaagagaggtcatggctctatgcaaaagagaggtcatggctctggcaccgtcgaggctgggcctagcacccagcctagaggacgtcgaccgggctacggttggttgtgccactcgtccaaatccccagggcccaacacctgtggatgatgacaacgatggtatgggctacgtcgttgatcttccccctcctaatgctctagttatctgtgggcttcactttcgtcaggatcgcgctattcgtcatggtggtgaacccgatgtggattattgttccaagggtggttcagcaacattgcaggacaagaggtcatcgcctagttctactccactttgtggatcaaggcgagtgatgaacatggtggttaccctcacccttacatga

SEQ ID NO: 1818 - DNA, 204 bp, Zea mays
  Peptide Sequence Number=SeqID_43597
atgtcggagaccgaatcggcggcagcggcgccggtggctgcggctgaatcgaagcctcggcgactgcgggggcacaagaagggcgccgtcacctgctgcgtcgcctcctccgcccgccccggcgtcgtcgcgtcctccggcgagggctcctttttagtaactgccaagggcgtgtgtttcatgaagagggagaacaacaaatag

SEQ ID NO: 1819 - DNA, 586 bp, Zea mays
  Peptide Sequence Number=SeqID_43598
atgcgcaaaggcgccgcctccgcgcgcgactccgagagcaccacgccggcacagcgaaacctcttctccgcgcgaccgaactcagatctcgacgccgccgagcttcagaaggacggctccgggctccaggcaggggcaggggaggattgcttcgctttgcttcttctgtcttcctcgtgctgccgctcctgctcgcctccgtcccccctgcacttcctcgcgcttgcgtcccagcaaacacctctccgtctagggttgccgccgcccgatttagtagccatagtgacgcccctctgccccacccctaccgctatgagaacattcaggttgtcggtcgcgcggttccccctgcaacgtgccccttctcctccgtcaccgcccgactccctcgcgtggacagcgccacgcaacaaaggagagtgggctgctgcttcgtcccaggtcaaggtgagcctccctctccctgatccgacacgaagcggtgagcgtctcgtgggcgtgcttgtcgtcgtggaggtcgagccagcactcgagcggctgtccggaggcgacgcgcgcggcggtaacagatccggcccaggtcaag

SEQ ID NO: 1820 - DNA, 754 bp, Zea mays
  Peptide Sequence Number=SeqID_43599
gagaaatgttgttaatattcctagaaaagttaatgagccttctacaatatatcatgctttgaatgcttcctttgcaatttgtagaaaggatagaaaggtttatgcatccgggggttcaagctggattattgatagcggatgcacaaaccatatgacgggggagaagaagatgttcacctcctacgtcaagaataaggattcccaagattcaattatattcggtgatgggaatcaaggcaagagtctcttggatataatttgctatctgttagtcaattatgcaaaatggggtttggttgaagtctctagcgacgttgtatttgatgagactaatggctctccaagagagcaagttgttgattgtgatgatgtagatgaagaagatgttccaacggccgctatgcgcaccatggcgattggtgatgtgcgaccacgggaacaattggagcaagaacaaccttcttcctcaacaatgatgcatcccccaactcaaaacgatgagcaggttcatcaagaggagtgtgatcaagggggagcacaagatgatcatgtgatggaggaagaagcacaaccggcacctccaacccaagttcgagcgatgattcaaagggatcatcccgtcgaccaaattctgggtgatattagcaagggagtaactactcgatctcgattagttaatttttgtgagcattactcctttgtctcttctattgagcctttcagggtagaagaggccttgctagatccggactag

SEQ ID NO: 1821 - DNA, 1488 bp, Zea mays
  Peptide Sequence Number=SeqID_43600
cctctggggcagatctccaactgggacgacctggtccaagccttcgccggtaacttccagggcacgtacgtgcgccctgggaactcctgggatctacgaagctgccgccagcagccgggagagtctctctgggactacatccgacgattctccaagcagcgcaccgagctgcccaacgtcaccgattcggatgtcatcggcgcgttcctcgccggcaccacctgccgtgacctggtgagcaagctgggtcacaagacccccaccagggcaagcgagcttatggacatcgccaccaagttcgcctctggcctggagggggttgaggccatcttccggaaggacaagcagccccagggccgccagccggaagatgttcccgaggcgtccactcagcgcggcaccaagaagaaaggcaagaagaagtcgcaagcgaaacgcgacaccgccgacgcggaccttgtcaccgccgctgagtacaagaaccctcggaaacctcccggaggcgccaatctcttcgacaagatgctcaaggagccgtgcccctatcatcagggacccgtcaagcacacccttgaggagtgcgccatgcttcggcgccactttcacagggccgggccacctgcggagggtggtagggcccaccatgacgacaagaaggaggatcacaaggcagaggagttccccgaggtccgcgactgcttcatgatctacggtgggcaagtggcgaatgcctcggctcggcaccgcaagcaagagcgtcgggaggtctactcggtaaaggtggcggcgccagtctacctagactggtccgacaagcccatcaccttcgaccaagccgaccaccccgaccacgtgccgagcccggggaaatacccgctcgttgtcgaccccgtcatcggcgacgtcaggctcaccaaggtcctcatggatggaggcagcaacctcaacatcatctacgccgagaccctcgggctcctgcgtgtcgatctgtcctcggtccgggcaggcgctgtgcctttccacgggatcatccccgggaaacgcgtccaacccctcggacaactcgatctgcccgtctgcttcgggactccctccaacttcagaagggaaaccctcacgttcgaggtggtcgggttccgaggaacctaccacgcagtgctggggaggccatgccacgccaagttcatggccatccccaactacacctacctcaagctcaagatgtcgggccccaacggggtcatcaccgtcggccccacgtaccgacacgcgtacgaatgcgacgtggagtgcatggagtacgccgaggccctcgccgaatccgaggccctcatcgccgacctggagagcctctccaaggaggcgccagacgtgaagcgtcatgccagcaacttcgagccggcgaagacggttaagttcgtccctctcgaccccagcaacgacgcctccaagcagatccggatcggctccgagctcgaccccaaatag

SEQ ID NO: 1822 - DNA, 438 bp, Zea mays
  Peptide Sequence Number=SeqID_43601
atgatcctacaactgttggaagggccccaagatgagacaaacctagatgattggttatcaggtgatttgcatccatccccattgttggagacaaatgcccattaccaggacccgatgttctttgagagacctgttagcagggagtactccacagccaaaggtaggaaaaacaatagccggtggacttctaaagaagtggagagactggcacgaggcgtctcaaggtttggtgtcggacaatggaccctgctgaagcaggaatttttcaaaagctcaattaggacagcagtaaacctcaaggacaagtggagaaacctgctgaaaggttaccaggaaaactcacagaaaagtacgctgctgtatcttgagccatcattggttgaaaagatcaggaacctggcagcaaaacagccatacccatatagaaggcacagatag

SEQ ID NO: 1823 - DNA, 414 bp, Zea mays
  Peptide Sequence Number=SeqID_43602
atggaggctggtaaggacgccggtggcggcggcaccaagtaccgcggcgtccggaagcggccgtggggcaagtttgccgccgagatccgcgacgcggagcgcggtggggctagggtctggctcggcacgttcgacacggccgaggaggcggcgcgggcgtacgaccgggcggcgttcgcccagcgcggcgccacggctgtgctcaacttccctggcgagatcgctggggctgccggcagcggcaggggcggcgggtcgtcgtcgtcgtcgtctgcccccgccgccactgcctcgtcgaggggggcggcggggaggggccgcgccggggacgacggggagaagattgagctggagtacctggacgacaaggtccttgaggacctcctcgacgacggcaagtacggccgtcactga

SEQ ID NO: 1824 - DNA, 1632 bp, Zea mays
  Peptide Sequence Number=SeqID_43603
atgttccagcgtacattcacgtccctccgtaagtccgcatgcacctctccccatgtcgtccggtctgtcacaccgctcgaggggcatgggcgaggtcgtccttcagtgacagcggaggacatgtttaggccccacctctgccatcctctcatccatgaccttactgctggtctaccactttctcatcttcccaatcccaccagcttccctcccacagtcccaccttgccctcctgccttcccgacgacatcccctctgcctccgaccaccctccctcccacctcgcccaccttccctcccgacgaggtaacctctgcctttgattccgttcgactatgcccgacctcagtctctgccgcatccaccgccgtggcctcacccacggtcgccttcccgatccgggcgagcctcgccgtcatccccaccgtcgcgcccttgtcggcctccccgtcgctgcgcctcgcatcggcgtcgtccatcgtcgatgcgtccgggtcctcctccccggcctccgcccactccggtctccccaatccggttgagccccgtcgacatccccactgtcgcgcccttgctggcctccccatccccagtctctgccgcgtccaccggcgtggcctcacccacggtcgccttcccgatccgggcgagcctcgccgtcatccccaccgccgcgcccttgtcggcctccccgttgccgcgcctcgcatcggcatcgtccatcgtcgatgtgtccgggtcctccccggcctccgccactccggcctccccaatccggttgagccccgtcgacatccccactgtcgcgcccttgctggcctccccgtcgtggcgcctcgctcggcaccttccgccatcaacgcgtccgggtcctcctctccgacctccgcccactccagaaccagctctccgtccccgacgcctcgaacgctgctcgcgagcaggagcgaggagtacatgcttctattccggctgcctcccgacaagagacttgaatcatcaggcaaaaaagtccgcttctcatattacttctacctcatttcaaacacacaagaacttccagccagagactacaggtcgatgtgtcttgccaagtccataagcttgccgtccaggcctcagtccagcgaagccgcagtgcagcaggagatgtgtattctagaggcgatcatctcctcaccatcaacatgtatcgtcacgatgtgtgacggtttgaggaggcttggagacatctacagcagtgttgtggagatgactcacttgccgagcaaccaagtttgctcttcccagcaaaggaagatgctggacggagaaactgagtcttctctcgagctgctggatctctgcaacaccatgcaggagatcttcgttgagttgaaggccattatccaagagctgcaagtggctctaagaaaaggggatggtgcaaccgtccaagccaagatccagtcttacagccgcttggtgaagaaggctaagcagtctttcaagaagtcaagcaagaaggccgtttctgacaagacagactgtgcaatggtcaggctactgaccaaggccagggagatcgccatctctctacttgagtccacggtgcagctcttgtcaaagcaaattgaagtgccgaagcagtaa

SEQ ID NO: 1825 - DNA, 270 bp, Zea mays
  Peptide Sequence Number=SeqID_43604
atggagcccagctgcgctgcccaccaaggccaatggcgcgtgctctccctttcggactgctggcccaaccgccgcataggtggacagcccaaccgcgtcctcatccgatcccgcagaacagttgcagcggccatggagacctcttgttatgccgcggatgggctacaggttgaggcagcgatcgtccttggtgggcatgtgtggggcagcgatggccccggtgttccacagtccgagcagcaaggatcactcaaggcatggaggagatga

SEQ ID NO: 1826 - DNA, 198 bp, Zea mays
  Peptide Sequence Number=SeqID_43605
atggaggatgggatggatctactaggtggctatggaggatgtcacgagcatgaggcgtgtgagcttgaggtggaggcgggagcaaggcatcgtgtaggaggaatactttctggaggtagtaaggatcaaggagagtatggaggcatcgagaggataaggcaagaatccgacaacccgagcgtgcaaacggtaggttaa

SEQ ID NO: 1827 - DNA, 207 bp, Zea mays
  Peptide Sequence Number=SeqID_43606
atgactcgacccttgcttttttctatgctaagcctgttggggtcagatctgactagcttgttgatgaaggataaaaccgctgaagatccggtgcctacggggcctgaggaagttgttcctgaaaaggctattgaagaaatacctagggggactatggatgtgaagcagaagaaaactatagcagaggcattggctttgaaggagtga

SEQ ID NO: 1828 - DNA, 918 bp, Zea mays
  Peptide Sequence Number=SeqID_43607
atgatcaccattaagtccgttagcacagcaaaggagcagggattagaagatttcttgaactattcgttcatttacgggaatgtgactgcatacttgtgctttaaaactgtttatacttgcatttatcttgcgtggtgggcaaacaaggctgatgttggagtgacattttctgcttctattttactagatattgctccagtttgtgaaggagctgttcaacacatagcttctaagagattagagattgggggagttgacttgacaaacctgtttgcacaagaactgaaaaaatccaacccatcagtaaaccttgatgttgctgatgttgagctgctgaaagagcagtatgcgtgttgcacagaagattatttgacttttgaaagtatagaaagctcttgccaaccagaaaagcacactcttcctgatgggcaggttataacaattgaaaaagaggggtacattgttggtgaagctttatttcaaccacgtatattgggcttggaagattatggtatcgttcaccagctagttactagtgtctcaaatgtttcatcagagtaccatcgtcagctgcttgaaaataccatgttatgtggtggcacctcatcaatgactgttgaacacaacttcattcaagatgaaaatctgccttggactcgtttgatcgctaaggtttatctcacttgctttcctcaaggctttgaggacaggttccagagagaagcaaatctgtctgcttcagcaatctgtccatcacttgtgaagcctcctgaatacatgcccgagaacctagcaaggtactcggcctggctgggtggtgcgatattggctaaggtcgttttccctcaaaaccagcatgtgaccaagggcgagtatgatgagacggggccgtccattgtgcacaagaagtgcttttag

SEQ ID NO: 1829 - DNA, 915 bp, Zea mays
  Peptide Sequence Number=SeqID_43608
atgcatggcgagtgcagctgtgcgatcaaactagcgaagcacagcggatcaagccgtgagagcgcaagacctgggcatcggccgccgggcaaaaggccaacaacgaagcaagcaacaagcgacgattccgaggttgtgagatcaaaggatgcctcagaggccatcagatcgaaggtggtcgtcgtcgtcggaggccctccgatgcgctgcatcgaaggagattgttgtcttcagatgccaccacagatggtcaccgcagccatcactgcttgtgcctcgaaacatcgttgccaccgccgccgccaccaatcacgcctcgggaagtcgcggtcgccgccactgctcgcgcctcgggcagacgcggccaccgctgctcacgcctatgtctctctcgccgtcccccgtctatgcattcgtgttcaaaccaagaaccaatcggacctccgtaccaaattatttcttggcacctcagatcagcatattccatctccaatcccccgccgcgttcccccgcacgctttgacccataaagtcgatccatctccgagcaccaagttgaacacgcgatcccattcccattctcttgctcaatacaacctccggctccagcaagccgcagcgccaagcctagaagcggagcgcggaacacacgaggccaggaagaggaggtgctgccgtccccgcgccgccgctgtgggagtgcggggaatggggcggcacggcgtggaccagatcggcgctgtggcagcgttcgtctgggtcaccctccttcccttgctgcttgtgtgcgtcgtgtggccgggcgcccaggccggccatacaagcgagtaccggcgccaactcggctccgccatcgacatgccactcgacgccgatgtcttccgccctcccccgggctacaatgcgcccgagcag

SEQ ID NO: 1830 - DNA, 507 bp, Zea mays
  Peptide Sequence Number=SeqID_43609
atggcgcctcctgttgacgtggccggtctacgtcctaggttgggcgatgtggaagctcctccgaagccgaggtcgagtctgtcttccgtggctgaggtcgagtccgagcccctgggtcgggcgaggcggaggccgtcggctgaggccagggcggagtccgagccctggggtcgggcggagcggagcggcgctgtccttctgtcaggccggtcagtggagcggcgaagtgacggcagtcacttcggctctaccggctggctttgtgctgatgggggttaccagctgagaattaggagccttgagggtggcaatgagattgatggttttggttatgactatggtactggtaagtgtgatgcccacgtatgtcgggaatgggactccgacataagctccactaactcctcctccgacaaggatgccgccaacatcgccgtcaataagggtcttctcttccccaacgtcgtccacaagtgcctcatggcaaagaacagcaaaaggaagaag

SEQ ID NO: 1831 - DNA, 2475 bp, Zea mays
  Peptide Sequence Number=SeqID_43610
atgcccggcataccgagggatgtcgccgagcactcgctggatattcgggccggagcccgacccgtcaagcagcctctgcgccgattcgacgaggagaagcgtagagtgataggcgaggagatccacaagctaacggcagccgggttcatcaaagaggtattccatcccgaatggcttgccaaccctgtgcttgtgagaaagaaaggggggaaatggtggatgtgtgtagactacactggtctcaacaaagcatgtccgaaggttccctaccctcagcctcgcatcgatcaaatcgtggattccactgctgggtgcgaaaccctgtctttcctcgacgcctactcagggtatcaccaaatcaggatgaaagagtccgaccagctcgcgacttctttcatcacgcccttcggcatgtactgctatgtcaccatgccgttcggtttgaggaatgcgggcgcgacgtaccagcggtgcatgaaccatgtgttcggcgaacacatcggtcgcacggtcgaggcctacgtcgatgacatcgtagtcaagacgaggaaggcttccgacctcctctccgaccttgaagtgacattccggtgtctcaaggcgaaaggagtcaagcttaatcctgagaagtgtgtcttcggggtcccccgaggcatgctcctagggttcatcgtctccgagcgaggcatcgaagccaacccagagaagatcgcggccatcaccagcatgggacccatcaaggacttaaaaggggtacagagggtcatgggatgcctcgcggccttgagccgcttcatctcacgcctcggcgaaagaggtctgcctctgtaccgcctcttaaggaaggccgagtgtttcacttggacccctgaggccgaggaagctctcggcaacctgaaggcgctcctcacaaaggcgcctatcttggtgcccccagctgccggagaagccctcttggtatacgtcgccgcgaccactcaggtggttagcgccgcgattgtggtcgagaggcaggaagaggggcatgcattgcccgttcagaggccagtttacttcgtcagcgaggtactatccgaaaccaagatccgctacccacaagttcagaagctgctgtatgcagtgatcctgacgcggcggaagttgcgacactacttcgagtctcatccggtaactgtggtgtcatccttccccctgggggagatcatccagtgccgagaggcctcgggcaggattgcaaagtgggcggtggaaatcatgggcgagacaatctcgttcgcccctcggaaggccatcaagtcccaggtcttggcggacttcgtagccgaatgggtcgacacccagctaccgacggctccgatccaaccggagctctggaccatgtttttcgacgggtcgctgatgaagacgggagccggcgcgggcctactcttcatctcgcccctcgggaaacacctacgctatgtgctacgcctccatttcccggcatccaacaatgtggctgagtacgaggctctggtcaacgggttgcggatcgccatcgagctaggggtcaggcgcctcgacgcccgcggtgactcgcagctcgtcatcgaccaagtcatgaagaactcccactgccgcgacccgaagatggaggcctactgcgatgaggttcggcgcctggaagacaagttctacgggctcgagcttaaccacatcgctcggcgttacaacgagactgcggacgagctggcaaaaatagcctcggggcgaacaacggttcccccggacgtcttctcccaggatctgcatcaaccctccgtcaagatcgacgacacgcccgagcctgaggcgccctcggtccagcccgaggtaccctcggcacagcccgaggcaccctcagctcgacccgaggcgccctcggttcagcccgaggtaccctcggcctccgagggtgaggcgatgcgcatcgaggaggagcggagcggggccacgcctgatcgaaattggcagaccccgtacctgcaatatctctgccaaggagagctacccctcgaccgagccgaggctcggcgggtagcgcgacgcgccaagtcgttcgtcttgctgggcgatgagaagaagctctaccaccgcagcccctcaggcatcctccagcgatgcatctccgtcgccgaaggtcgggaactcctgcgagagatacactcgggggcttgcggccatcacgcagcgcctcgagcccttgtcgggaatgctttccggcaaggcttctactggccaacggcggtggctgacgccactagaattgtccgcacctgcgaagggtgtcaattctatgcgaagcagacccacttgcccgctcaggctctgcagacgatacccatcacctggccctttgctgtgtggggtctggacctcgtcggccccttgcagaaggcgcccgggggctacacgcacctgctggtcgccatcgacaaattctccaagtggatcgag

SEQ ID NO: 1832 - DNA, 576 bp, Zea mays
  Peptide Sequence Number=SeqID_43611
atgggtggtcatctcgtatcccccgttacaccaccccatggtggttgtgtcatcgtcatctcctccatagtttgtcaagcatttcgcaacgttggtatcgatgcagaattagacttagagcaatattacgagcatgatcaagaatttagagaaagaataaatcacaagaaagttgaggtggtagtgaaggacaaatatttctgtgatatttctattgtgagacctggtccgaaggacactgtccagcacccagagaaagatgagctatataggcacaagggatttagtccagaagcacatagccttttgggtgtgaccacttgtgaatcagtgggaaatgctgaaggtgaaagaaggactattccttcccgatacaaggaggaggagaaaagtgatgaagaagttgttgaggtgcctattcaaaatgaggtgcccctagccagtttgcagctagggtcaaagccagaggcacaatcgaagcctaaatcgtcctttaagggcacacctcgaaaggtgaatagatgcaacgatactacaaaaataaataggaaagcaagtgctaggttgttggcttaa

SEQ ID NO: 1833 - DNA, 990 bp, Zea mays
  Peptide Sequence Number=SeqID_43612
atggctaaaaattttggcagcaaaacagtgcaaatagcaatgaatgctgtggtaacttcacacctactcgtctgtttatatagtactgcaggttcaactgttattcggccatggatccatctatctgtggagaaaaaaacatggaaagatgatgaagataagtcaagccagttgttggagatgcctcaggaagatattaatccactgaatcaggctcagatgcatggtggaagcactaagaaatcggcacctgatctatccccgaccaaacagaagaagcaacaagcagttcaagaaaggaaaaggaagcaacagtcaaagaggggaaaaaagtggctggatttccttgcgttcaagggacacatcactcctttactagcgaggttttcttatggggaaaactgtgtatatacagctgaaggtgaatccctgaaaataccccaaacaaattttgaatcggagaatcaacctcataatgatgatgtcaacattgagaaacagacaattacgagtagcacaccttcaccaaatggtgccaaggagcaaaagagagctcaaaggagaaaccagcccaaaaaaaggaatcaaagaaaaatccttggagatgctgaccttgcatgccagcctggagtgagaaaaagctcaagaacacgctcaaggcctttggagtattggcttggtgaaagattactatatgggcctatacatgacaatttgcatggagctattggcatcaaagcatactcccctggccaagatggcaagagatcattgaaagtgaaatctttcgtgcctgaacagtattcagatcttgttgctaaatctgcaagatttaagatgcgataccacagatatcttgggcaattggagtatcttgatgttaagatctgtggcgttgagcttgatgtcaatatttatagcaccaagcttaataatatggattgtggcaccaatcttagcattatagatcatgacgctcacctatactaa

SEQ ID NO: 1834 - DNA, 957 bp, Zea mays
  Peptide Sequence Number=SeqID_43613
atggacgctaccgaccccctctgcgccatctcctcgactgcgcgactccttccgcgaacccttggccccgcccccgccatcgggccttccccctcgaaggcccgcgacgcgctcctcgaggccatcgcactcgcccggtctctgaaagggtctgaggagctggttaagcaggctacaatggtgccgaaggaacacggggacatccaggctctctaccatgatgatggagtgaaaggcaggcctcctgcaaatggcagcaaagagcaacagggaagaaggccagcactggatcgtaaacgggctcgaagccgagggtggcatcgaatttcagagttagagaaacatttgtttcctggaggtgcagcaaatgctaaatgcacagatgatgaatctaaagggtcaccggatattgtgatgggtgaaccatcattggtgcattattcttctgatgttctgatgactgatgagaactttactgcaagtgacgttgacagggagaccccaaatctgggtgctagagcagcagaccctgttcttgatcctgaaccaaacttgcctgatcatgcatatgaaaggcaacctggaggttcctcacttggtttgtacagagacacagaagttggagttgccaaagaaaatgagacatgtagcaagagcattatatttgtggaggaagatgatgtgccaatagactatataactattggcaggtctactgatgaaacagaagtttcttcttctcatcctttggagggcagctcgacagaagaattggtcactaaaccagttagacatgcggctccagatggtatctgtaggacttcacatgcagctgaggatagcattcaacatctagttcttgcttcatggcacatgaagcggtcaaagagggtggtgtcctacaaggtacatagcttttgctatgcacctggatatacgattatacgctgtatctag

SEQ ID NO: 1835 - DNA, 972 bp, Zea mays
  Peptide Sequence Number=SeqID_43614
atggtaatcgatctagagttcataagagctattgtaactgcggacgaagtcctgctgctggaacctcttgctcaggaggttatccctttcatcgataaattgaggcggcattttccattgaagagcctggaggttgatgttggggccacacaagtgggtaatgtgaatggcaagcatgctaaaactgctgcagagtgtgagctccccctcccctttgagtttcaggtgttggagctcgccctagaagctgtatgcttgtcatttcattcaagcctatctgatctgaataggcacaccatctttgtgatggatgagttgactaagaatgtgagcaccaggaaccttgaacgtgttcgaagtctgaaaagaaatctaacctccctgctcgctggtgtgcaaaaggtcagagatgaagtagagcatcttttggatcataatgagaatatggcacaactgcacctatccaggaagcaaataaaatgtccgcaggatgaaattctactggcttctgctgctttaaatagcaatcttccttcaaaaacaaagctgggtacaccaaattctgttgttaaccaagccatgggcattgctatgactgcgccactggccgacaatgtaggagacctagagatattacttgaatcttatttcatgcagctggatggaattcgcaacagaattatgatggtccgaggatatattgttgacacagaagactacatcaacatacaacttgacaaccaacgcaatgaactcattcagttccatcttgtactgatcattgtatcatttggcatagctatgaacacattgatagctggagcgtttgccatgaacatgcctcacaatggggagatgaagaagtttgtaggcccgttttggccatttgttggggccacatcatctttctgcttgttggtcagcgttgttttactgggatatgcaagggggaacaggctacttggcagttga

SEQ ID NO: 1836 - DNA, 1065 bp, Zea mays
  Peptide Sequence Number=SeqID_43615
atgttcgaattgcaggtggcaatgagactaatggttcttggttttgactctggtaatggtgcaagcgtgcatctcgacagcctcgactttgttatcactcttgaagagaagctggaaagagtggaagcagctgccaagcctccctcccataccagcactaattcctccttctcggagtatgagtggtggatgttcgatggcaaggacaggcgcgagggagagaactacccctcacgagagtgcttcatgcctaggacacccaaaggccaccttaaggacatcctcgagagcaatgatgtaacacccggaatttggggccgctgcctgcgcgcgcgccagcacgcgctcgtccctgccgccgcgctcgcacaggcgcgctcgtctcgccgcgtcctggggcccacctgccagagcgctggcctccacttctccccatgcacactcctgcaaccgccgcacgccctgctgctcgcgcggcactcgcccactactccgagaaacctgacgtccgcgcccacgttctcctatccgacatctgcacatcatctcctcttcctccttcattttcccttatcaccagccctcgacctcgacgtgccgagctctcccctcgcgcgcgctgccgcccgacggctcgtgcccggcatggcgcgtggcccacgcggtggccagcctgattcgtgcccctgtgtggctgctgcccgcgagaagccccgcgagccctcatttggcgagcaggatcgccgtcgcctagcccagccatcggtgacctccagcgcaccctgcgctcctgctggccggcatccgccatgcgctagggaccccattcgtcggcgtcgtgcagcccatccatgccgtcatccatcacgcgcgtcctccctcctttctccagcgtgtctgcgcagcccgcgcagcctgcgcccgtgcggcatgccgtcggcgagctcgcctaggccggctccacggtcgagcccccatgctgtaactcactctcctagtctcgccgtcgtctcgccgcggcagcgcctcatcgagctcgcccctgtgaccgtgtcgtcgtcctga

SEQ ID NO: 1837 - DNA, 300 bp, Zea mays
  Peptide Sequence Number=SeqID_43616
atggccgagcctaggcagggatggcgggtggcggtgctcgcttttcacggcgaactccggcgcgtggggcagggcgaccacgcgcggggcgcgcgctgccgcggccagtctgcgctcggccggcggtgcgcgcggagccccggcgcggcccgtgcacgcacggtgcccccggcgagctcgccgcacccgcggctcgtggccgtggcgctcggcccggtgtcctcggcttgcccgcccctgcgcagcgcggccccggcccggcgcggcttcggctcgcgcggccgtggtgccccagcgtag

SEQ ID NO: 1838 - DNA, 270 bp, Zea mays
  Peptide Sequence Number=SeqID_43617
atggcgacgccggacaacaaggggcacgggcatccgctgcccaagtttggggagtgggacgtgaagaatccggccacgtccgagggcttcaccgtcatattccagaaggcccgcgacgacaagaagaccaccaccggccctggggctgggaacgcgcgcgcaggcattccgccggccttcaggaacggcggcggcgacggcgggtacaggcccgacttcggcgacggcaaccagtacacgccgcccaaacgggacagtgatcacacctag

SEQ ID NO: 1839 - DNA, 207 bp, Zea mays
  Peptide Sequence Number=SeqID_43618
atgaccaccgtcttaacgcctaggcgatgccttaaatacattgtttctcattacgtattgcatgggatgaagctggttgcttatgccatgagggtgatttgttcaattatgctgcttatgatgatggtccttgcttatggaacatacacaaacatgaaactccttgaacgctatagcatcatatgtgtttggattgttttgatttag

SEQ ID NO: 1840 - DNA, 741 bp, Zea mays
  Peptide Sequence Number=SeqID_43619
atgctggtgactgggcagctgaagaagctgctggcgccgaggacggggctgcagccggcggaccagcagctgagctaccggggcagggcgcggggcaacgccgagtacctggacgcatgcggcgtcaagaacaagtccaaggtggcgctcgccgaggaccccgccagcgtcgagcgccgctacatcgagcgccagaggaacgccacggccgagagcgccaaccgcgccatcggcgccgtcgcgctcgaggtggacaagctcgccgatcaggtaactagcatcgagaaatcgatttccagagggaacaaggtgccggaggtgcagatcacgacgctgatcgagctgctgatgcggcacgcggtgaagctggagagcatacctgcggccggggactcctcttcgcagaagaacattcaggtacacacacctacactacactactgcactcctggcgcatgctgccaactgaatggcatcccggcatgggcattgttcggaccagttccagactttcaccaggggcaccgttctattagttatgctacagctgccagtgccaccagctctgtttctgacgatgatatatcctctctgcaaagggcgaagcgggtgcagaagtgcgtggagacgctggacgtgctcaaggtgtccaacgcgcggctgcaggcggtggtggtgacgaccaaatgggagacgttcgacgcggcggccaccacgacgaagtgggagctcttcgactga

SEQ ID NO: 1841 - DNA, 4944 bp, Zea mays
  Peptide Sequence Number=SeqID_43620
atggggttcgacccactggagtggtactgccagccggtcaaggatggtgtgtggtcgcatgtggttgagaatgcgttcggcgcctacactccatgtggcactgacacccttgtagtctgcatctcatacctcgcactctttggagtttgcttctatcgtatatggaggacgacgagggactacacagtgcagcggtacaagttacgttcaccatactacaactacctgcttggactgctcgtggtgtactgcatagcagagccgctttatcggatcatcactggtacctccatcatgaacttggatgggcagcctggccttgctccatttgagattgtctcattgatcattgagtctgttgcttggtgctgtatgcttgtaatgattctgcttgaaacaagaatttacatcaatgagttcagatggtacatccgatttgtggttatttacatgatggttggcgaagctgctatgttcaatcttgtgctctctgtgaggcagtactacagttcaagttcaatcttttacctatactgcagtgagattgtatgccagttcttgtttggaattctcatggtggtttatctgcctagcttggatccatatccgggttataccccgatcaggaatgaagtgttggttgataatactgattatgaacctcttcccggcggtgagcagatttgccctgagagacatgccaacatatttgccagaatattcttttcatggatgactcctttaatgcaacaaggatttagaaggcccattacagataaggatatctggaaattggatagctgggatgagactgaaactttgtatagccagttccagaaacgctggaatgatgagcttcaaaaaccaaacccttggctgttacgagctcttcatagtagtctttggggaaggttctggctgggtggatttttcaagattggcaatgatgcttctcaatttgttggtccacttgtattgaacctgttgttagagtctatgcaaaaaggtgatccatcttggagcgggtacatctatgctttctcaatctttgcaggagtgtcacttggggttcttgctgaggcacagtactttcagaacgtcatgcgtgtgggtttcaggttgaggtccacattgattgcagctgttttccgcaaatctttgcgactaactaatgatagtcgtagaaagtttgcttctgggaggattaccaatttgatttcaactgatgcggagtcccttcagcaagtgtgccagcagcttcacagcctatggtctgctcctttccgcattgttatttccatggtccttctatatgcacagcttggtcctgcagcattagtcggtgcactcatgctggttcttttgtttccaattcagtcccttttgtttgcacttattcgtgctgtcagcaatcagcatgtgttttggcttttccagactgtaatcatcagcaaaatgcaaaaacttactaaagaggggttgcaaaggaccgacaagcgaatcagtctcatgaatgaagtattagctgctatggatacagtcaagtgctatgcttgggagcaaagtttccagtcaaaagtgcaggacatccgtgatgatgaactttcttggttccgcagggctcagttgcttgctgcgctgaatagctttatcctgaacagtataccggtcgttgtcactgttgtttcatttggtgtatattctctactgggaggtgatttgacaccagcaaaggcgtttacttctctttcattatttgcagtcttaaggtttccacttttcatgctcccgaatctgataactcaggtggttaattgtaaggtgtcattgaagcgtctggaagatctcctgttggctgaagagagattacttctgccaaatccacctattgatcctgatcttccagccatttctatcaagaatgggtatttttcatgggaatcagaggctcagagaccaactttatcaaatgtcaatctggatgtacctgttggaagtttagttgcaatagtaggaagcactggtgagggtaaaacttctctcatatctgcaatgcttggagaaataccaccagtatctggatcaggtacctcagtggtcattcgtggatcggtggcttacgttcctcaagtttcctggatcttcaatgctactgtacgtgacaatattttgtttgggtctccctttcaacccccacgatacgagaaagcaattgatgccacttcattgcggcatgaccttgacctactcccaggaggcgatctgacagagattggtgaaagaggagttaatattagtggagggcagaagcaaagagtttcaatggcaagagctgtgtattctgattcagatgtgtacatatttgatgatccactcagtgcattagatgcccatgttggccggcaggtatttgataaatgtatcaaaggcgaactgcagcataaaacccgggttcttgttaccaatcagctgcattttctgccatatgtcgataaaatactgctaattcatgatggtgtaattaaagaggagggtacttttgatgaacttagcaacagtggggagctcttcaagaagctcatggaaaatgctggaaaaatggaggaacaggtggaagaggatgaaagtaaaccaaaggatgttgcaaaacaaactgtgaacggtgatgttacaatagctgatgaaggttcacagaagagccaggatagttctagtaaaacaaaaccaggaaaatctgtccttattaagcaagaggaaagggaaactggggttgtcagtgcgagggtcctttcacgttacaaaaatgcactgggagggatatgggtggtgtccatactcttcttttgctatgcactgactgaagttcttcgcatttcaagtagcacatggttgagcatttggactgatgagggttctctgaaaattcatggctctggttattataatttgatctatggaattctttcctttgggcaggttctagtcacactctcaaattcatactggttgattatatcaagtcttcgggcagccaaaaggcttcatgatgccatgctccgatcaatattgagagctcccatggtattttttcatacaaacccacttggacggatcatcaacagattttcgaaggatatgggtgacattgaccgaaatgtcgctgtatttgtcaatatgtttatggcacaaatatctcagttgctctcaactttcgttctcatcggctttgtcagcaccatgtctctttgggctatcatgccactcctgattttgttttatgcagcttacctctattaccaggcaacatctcgcgaggtgaagcgtctggattccattaccaggtctcctgtgtatgctcagttttcagaggctttgaatggtctgtccacaatccgtgcctataaagcctatgatagaatggcaaatatcaatgggagatcaatggacaacaacattaggttcacacttgtgaacatgggtgcaaataggtggctagctattcgtctggagacattgggtggcatcatgatatggtttacagcaacatttgctgttatgcaaaatcaacgagcagagaatcagaaggcctttgcttctacaatgggtcttcttcttacttacactctcaatattaccaatttactcacagctgttcttcgtcttgctagtcttgctgaaaatagtttaaatgctgttgaacgggtcggaacatacattgagttaccttcggaagctcctcctgtcattgaggatcataggccaccccctggttggccatcatcaggtgtcatcaagtttgaagacgttgtgcttcgatatcgaccagaacttcctcctgttcttcatggcatatcttttgttattaatggaagtgagaaggtaggaatagttggcagaacaggtgctggcaaatctagcatgcttaatgctttgttccgtatcgtggagcttgaacgagggagaatattaattgatgattgtgacacttctaagtttggaatttgggacttgcgcaaagttctaggaataataccacaggcaccagttctattctcaggttctgttcggtttaatctggatccctttaatgagcacaatgatgcggacctctgggaggctctggaaagggctcatctaaaagatgttataaggaggaattctttaggattggatgctgaggtttctgaagctggtgaaaatttcagtgttggacaacgacagctgttgagcttagctcgtgcgctgctgagaagagcaaagatacttgtccttgatgaggcaacagcagcagttgacgtgcggactgatgctcttattcagaaaacaatccgagaagaattcaagagttgcacaatgctcataattgcccaccgtttgaacacggtcattgactgtgacaggttgcttattctaagttctgggcaggttctggaattcgactctcctgagaatcttctaagcaacgaggggagtgctttctccaagatggtgcaaagtacaggacctagcaacgcagaatacctcaagagtcttgtatttgcaagtggagaagagaggtcccggagggaagaaatcaagctgcaagatatccaaaggagatgggttgcatctaaccgatgggctgaagctgcccagtttgcgcttgctagaagcctcacatcatcacatagtgacctccttgcattagaagctgccgagggaaataatattctgaggagaacaaaggatgctgtaatcactctgcaaagcgtactggaagggaagcacaatactgaaatcgatgaatctctaactcagtatcaggtcccagctgatcgatggtggtcttcactttacaaagtgatcgaaggcctcgccacaatgagcagattgggccgcaaccgtctgcagcaaccttcttataattttgagaacaacaattctattgactgggaccaaatgtag

SEQ ID NO: 1842 - DNA, 252 bp, Zea mays
  Peptide Sequence Number=SeqID_43621
atgtcgcgcgcgttcgacgactactatatcaaggattgtggcgtcatctcggcgctggagacctcgagactgccagtgccagtagtgtccccgattggcctgctcgtcagcaatgacgccgcccggcccagctcgaacctcgtagcagccatctgccaccgaatgtggcgcgtggtcgtggatgcgatgcgagagcgaaaccactcgatttttaaaatcgcaacggcgaagaagtggagcatagacaactag

SEQ ID NO: 1843 - DNA, 354 bp, Zea mays
  Peptide Sequence Number=SeqID_43622
atgcgcatcgcccttccagtgtctctactctcccaccgtctctctcagctctgttctgagagttctgactcctccccatgtgatgtgagcactagcagcagcatggcaaaagtgacgtgcagcgaacaacaagtcctggagcatccgcttccaagttccaactgcctagcacttgaagatgaggtattggttgccaggacagtatggatggcacgcaaactttcaggcagaacgagcgttggtctcagcttaaaagagcttttggcctgggaattcacctgctcctcgctcgtggatccgaggggcctctacatccaaagttacacacagtggtctgatgtatcccgtatttaa

SEQ ID NO: 1844 - DNA, 1752 bp, Zea mays
  Peptide Sequence Number=SeqID_43623
atggagtacgagaggattcatcagaaagcccagttacgggctctcgtggagaaagaaagactcacagctttgaggttattgctgcagcctggtgctctttctccaacaaagctgaggatgaagatcctgggagcccacaatcgagttagagtcatcaccagcaactcgtcatcgcggacgtcgcctgcgaaaaccatcgaggcttcacaggcgcagaacaggctactagtttgtgatgttcttgaagaagacagcgcagatagcacaaaacacccgtcggcaactaacaaaaccgaagccgtagaaaaggttcaaaaggatccagcagtggacatcagtcaagtgcagaacgcttccaccagttcggctgctaagccagcgacaggcagctcgagtatgatacagatacacccactgagacccgcggaagaagacagcactaccgaatgcgacagtggtctcgacaacgccagcactagcagcttcgagttccacggagtggagaaggcggcggcgacgcagaatccagcagccgggtacttgtccaggcagacttccatttcctccaagtggaatgacgcagagaaatggatcgtgagccgccagaatgtcagtcagaagaacaacgtcgccaagggcgcgttgcagaaccagacagtaaaccagatgagctccgccgcagccaggggcgccgttgtgcccaaaatctctgctcgtcccgtgcagaaaatgaagagagtgaatccagctttgtctgctccgcgcagcatactggagaggttgtccttcgcttcgtatcagcctaagttggttaggcatgcagatgtctgtccagttagtaacgctggtgctaactcagagcatcacaaggcaactgatactggttcatcgattgaagtgaagccctgcaacgatacgaatgatattccaacagtccagtcgtcggtgtccgtgagagatgtgggcacagagatgactccaatacctagccaggaaccttcaagaactggaactccactagggtcaaggacaccaactcgaagccctaactgttcagtaccgtcaacacctgtaggggggaggtcaatagcatctcctcctggagaagactgcacagacgatggcccatttttccacaggaaatgcggcgtacatgcaaatgaattgtcagatactgagacgaggcttaaaacaaggcaagaaatcgctgcgcttggcatacagctaggaaagatgaacattgctacgtgggccagcaaagaggagctagagctagtctctgcggcaccgagcatcgctgatttggagcgcatcaggaaggaatatgctgctcgtgctgcatcgtatgaggaggcagaaaatactaaacatacagcaagattcaaaaaagaagaggtgaagattgaagcttgggagggtcgtcaaagagcaaaaattgaatatgaaatgagaagaatagagcaataccgaatgctacgatatttagaatttaacaatttggacgtggcagtaatgtcgaaaaacactttgtggcaggaatttgctgagagaatgagaagtgaggccatggaaaagatggccgaaaagctagagatgacgcgccgcatagccgaagagaaacgagcttcggccaacgccaaaatgaaccagcaagcagctatagcggttcagaaggccgagaagattcgccaaacgggacgagtcccaggatcgagtatcctacgctgcggtggctgcttctgtggaccgtag

SEQ ID NO: 1845 - DNA, 459 bp, Zea mays
  Peptide Sequence Number=SeqID_43624
atgtctacagtcagaaagcgacttgaagcagaaaaactatgccaaaagtatggttctactaatgccaaaaggggcaagagatctgcttctacgcatgtgaccaaccgaggtggcactaaccggtgggcttcaggtccagcccatcgaggcagtagtagcttgatgcttcacctgaatgaaaaaaaggaaagactgataaactcagctgatcccaagatggttgctgttaatcttggcagcgaagcgagggtggcctgcagctcacacttgacacagagctcattctttggcccatgtgcagtgctggatgcttgctgccttgtggtcgccgttgatcttgacagcgagggtggccaacagatctgggatgatgctcagcttagtactgaccatttgctcggtgtcatatactgtggcatcgagttaacacagctcgacgccatagcctatgacgccgag

SEQ ID NO: 1846 - DNA, 1725 bp, Zea mays
  Peptide Sequence Number=SeqID_43625
atgcatggcgagtgcagctgtgcgatcaaactagcgaagcacagcggatcaagccgtgagagcgcaagacctgggcatcggccgccgggcaaaaggccaacaacgaagcaagcaacaagcgacgattccgaggttgtgagatcaaaggatgcctcagaggccatcagatcgaaggtggtcgtcgtcgtcggaggccctccgatgcgctgcatcgaaggagattgttgtcttcagatgccaccacagatggtcaccgcagccatcactgcttgtgcctcgaaacatcgttgccaccgccgccgccaccaatcacgcctcgggaagtcgcggtcgccgccactgctcgcgcctcgggcagacgcggccaccgctgctcacgcctatgtctctctcgccgtcccccgtctatgcattcgtgttcaaaccaagaaccaatcggacctccgtaccaaattatttcttggcacctcagatcagcatattccatctccaatcccccgccgcgttcccccgcacgctttgacccataaagtcgatccatctccgagcaccaagttgaacacgcgatcccattcccattctcttgctcaatacaacctccggctccagcaagccgcagcgccaagcctagaagcggagcgcggaacacacgaggccaggaagaggaggtgctgccgtccccgcgccgccgctgtgggagtgcggggaatggggcggcacggcgtggaccagatcggcgctgtggcagcgttcgtctgggtcaccctccttcccttgctgcttgtgtgcgtcgtgtggccgggcgcccaggccggccatacaagcgagtaccggcgccaactcggctccgccatcgacatgccactcgacgccgatgtcttccgccctcccccgggctacaatgcgcccgagcagtttgacacaaagtattactatgctgttgggattggacaaacggtgaggaagttttggtttttgacccctccaaaaagcggcccagatgttccatatacactcggtctcataggtgatcttggtcagagctttgattccaatgttacgctcacccattatgagtccaatgcaaaagcacaagcagttctttttgttggggacttgtcatatgcagataactacccatatcatgataatgtgagatgggatacttgggcaagatttgtagaaaggagcgttgcgtaccagccttggatctggactgctggaaatcatgagatagatttcgctcctgaacttggtgaaacaaagccattcaagccattcagccataggtatcccacaccctacaaggcttctggtagcacggcaccttattggtattccatcaaaagggcctctgcctacattattgtcttggcatcgtactcagcatacggaaaatacactcctcagtacaagtggcttgaagctgaatttcccaagcacaggatatcgaatgtcgcatacaatgttgtgaatggcctgtgcactccaatccctgatcaatcggccccagtttacatcaccatcggtgatggagggaaccaggaaggattggctaccaaggaggcgagcttcgggcacgccatcctggacatcaagaaccggacacacgcgtactacacgtggcaccgcaaccaggacgggagcgcggtggccgccgactccatgtggtttaccaatcggtactgggaaccgacggacgattcggccgacgatttccaatga

SEQ ID NO: 1847 - DNA, 1003 bp, Zea mays
  Peptide Sequence Number=SeqID_43626
catgggttcagggaatctggtaacgaagaaggtggtaaggaggcccagctccatcgaccaggacataaagttcgatcaaagctgggtggaggatgtcgcgtgcccaatctgtctcgattccccccacaatgcagtgttgctcaggtgcgcctcgtatgagaagggctgtaggcctttcatatgcgacaccgaccagactcgctccaactgtctcgagaggttcagaggcgctcatggactgccactgccagtgccagccaacgccagagcctcctcccgtaccgtggctcctctcaacagcatccataccattaccatctcttcgtcgaatgcaaacaacaaccgcccggcttgcccgctgtgtagaggcgatgtgatggggtggttcgtcatcggcgaggctcgctcgcaccttaaccagaagagaagatgctgcgaagagagccgctgctcgtacgtcggcagcttccacgagctccagaggcacacccagcaaaagcatccggactcgcgcccttccgcgatcgaccctgctcgccgggccgattgggagaacctgcagcggtcttccgacgtggtagatgtcctgagcacaatacacgcgcaggttccaaacggtgtggttcttggagactatgtcatcgagtacggggacggtgacgaagctggagacgacgactacgaggtttaccacggggttagagcaagctggtggacgtcctgtatcttctgcaaagcgttctgtaggtcttcccccccaggaggagtccggagaaggacgagaacaggggaaaggagaagcagtggtggaagtggaacaaggagcagcagcaacaggtctagctctagtcaagaaaggttcactcttgatgaagttgacgatggatatgtagttgcaggggccatggccagggctgccgtgtcagggacaatggatgctcgttacagcttcaccggaaagcagcagttgagtaagcacgaagtgaggcaaaagcattgctaa

SEQ ID NO: 1848 - DNA, 642 bp, Zea mays
  Peptide Sequence Number=SeqID_43627
atgtcgtacacgttccccacgcagcccatcgtggcgccggcgaagaagaaggacgcccgcaaggacgccgccgacgccgcagagaggcactgcagccctctgccgtcgagggagcacgggagggcggccgtcgccgtcgacggcgacaggggcagccagtacgcgctcaagtgggccgccgacaacatcctctcccgcgcccgccccttcttcctcgtccacgtccgccgcaagcccaccttcctccagggccccggcggtaagcagttcgccatatcacacgtgcaggacgacatcccggccgatcttcacgcccagatggaccttcaggcgaaagatctgatgatccccttccagtgtttctgcagcaggagagggggaaattatcctggacggaacagacgtgtcgaaggcgatcgtcgatttcgtcgccaccaacaaggtcgacaagttagtgctgggctcagcatccaggaacgcctttacaaggacgatatggaagctggacgtgccgacatccgtgacgaagtccgcgccgagcttctgttcggtctacgtgatagcgaaagggaagatctcgtccttcaggcccgccacctacgcgaacgagacaagcggcagcaggggagatccggaacctga

SEQ ID NO: 1849 - DNA, 1380 bp, Zea mays
  Peptide Sequence Number=SeqID_43628
atgggcaggaccccagaaagctctcacaggaacagaccggaggcggcggcggcggcagaagcagaagcagaagcagaagcgtgttctcagtcagcaatcggcccgaagcataagccttcgagcctggacactctacctcatcagcgtggagaggagttcgcagactacgactcgcaggacatcatccatccgatcttgaggcgctggccgccgatttgctcgcctagggacgacagcaggggcgggtcgtcgtcggctactccggaagaggctcgcaagctcgacctgaagctcagggccctgccgaggccgatcgagaccaagaggatgctggagtgcctgcctaccaggctcgagtgcaggatattcaccgcggacgatatcgcgaacgcgaccaaccatttcgccgatgagctcaagatcggggaaggagggtatgggccggtctacaaggccacgcttgacgacactctcgtggccgtcaagatcctctactctaatgtgacgcagggactgaagcagtttcgacaggaggttgagctgctgaacaacatccgtcacccgaacatggtgcgcctggtgggggcgtgcccggtgtacggctgcctggtgtacgagtacatgccgaacgggagcctggaggaccggctcttctgccgcggcggcacggcgccgctgccgtggcggctgcggttcagggtggccgtggagatcgcgagcgggctgctgtacctgcacaagatgaggcccgaggcgttcgtgcaccgcgacctcaagccgggcaacatcctgctggacgccgccttcgcggccaagatcggcgacgtcgggctggcgcgcatcatcccgcgcgccgtggacgtggacggcgccgccacgcagtaccgggagacggcggccgccggcaccttctgctacatcgacccggagtaccagaagacggggctgctgtgcaccaagtccgacgtgtacgcgctcggcgtcatcctcctccagatggtcaccgcccgggagcccatggggctggcgtacgccgtctcggacgcgctggaggagggcacgttccccgacctcctggacggcaacgtggccggctggccggtgcccgaggcgcaggcgttcgccgagctcgcgctcaagtgctgcgagatgcggcgcagggaccggccggacctggaaaccgtcgtcatgcccgagctggtccgcctgcaccgcgtcgtctcgccgtccgagtatccctcgtcttcttcctcgctccctcattccatggatcaagctcatcaccgttcagcgagcaacaaggatttgcggttggataatgacctggttgacattctgagcgagggaagactgaagggaggagcatcatttgccatgtaa

SEQ ID NO: 1850 - DNA, 2493 bp, Zea mays
  Peptide Sequence Number=SeqID_43629
atggatcccccacgcggaggtcagcgcccctcgtcccctactacctccacggtttcccctcctacttctccggcgcgaccgctggttcgtcccgtcggtctccgcgcgcgggggcggggccgattgggccgctgcggagcgggattctccgtccgcgtcccctacgcgtcgaggttccatggcgctctccgtccttcgtcccccccgcagtcgtcgctgcccgcgaatccgagattcatcgtgcatgcgcggcgcctggcggttcccgcgctccaaattgctggtcgaggtactcgggttgctctagtcgccgacgcgtggtggggcgggctcggcgccgcgtgcggggatgccggcggcgccagtaacgtcagatttaccagagggtttaagtttgttagtggagtgtacttcttaccttccattgtcgcagaggctctgcaagtagaaggaccagtgattgatcctgctaaatgtcgattgatgagtgtggatgaaaagcgagaactcgttcgtgatttatcaaagagcccagaaagtgctcctgacaggctccagtcatggacccggcgagaaattgtagagattctttgttctgatcttggaagggagaggaaatatactggtttatccaagcagagaatgctagattatctatttagttatgatgataacaaggacccaagcctctggttgtcctgtagttcagaccaacacttacaaaaggatacctgtggtttctcatgccatcttgaatgtgctctaaaggatgaaagaacagcttatcttccagatactacactttatggaccttacctggtgaaaaagttcagatcttattataaatcactttcttttagctttgctgttatgttcttttggatcgatccatgtacggtcatcatttattcaaggaaaagaatgctcacagatcttactgctctagtttcaaggtcctggaagaaacaactggtgatagcaaaagatgctcggcgattggatgtgttgtgtcatcggatttatctcagtcacaagatcctcgtctccacagaaaagtacttggtattgcatgagattgttgatacagcattgaagaaactggaggctgaggtcggtcctatatctggagctccaaatatgagtcgtggaattgtcagtcgacttactgttggtgccgaagttcagaaactttgtgctcaagcaatagatgctatggaatcattgttctcgggtgtatctcctgctggttcaagaatcccgcgaccatgtatggtaccaccaaattttgtgaagtttgaagctataacccaaacatctgtcatggtatttttggatttggttcactatcctatgcttgcccaagaggcaacttcatttaatatatggcaccgaatggctgttactgaagcttacctgacaaatccgactggcataatacttcccccatcgaaaaaattacctgtcactgggcttgcaccggctacaagctatatctttaagattattgctttcaaaaactcaatcgagttgggttcatgggaaattagaacgaagacaagctatcaaaaggatgatccaaggggttcaatgccaggtggtactagactaggacataatagtgagagcctgaaggcaaacagtgatggccagtctgatccttcctcagagggtgtggactcaaacaataatactgctgtttatgctgatctaaacaagtcccctgaaagtgattttgagtactgtgaaaatcctgagatcctagattcagataaagcgtctcgtcgcctcagcgaacacatcgatgacttgcaaaatatacagatggctgcagatagggtaacagaagtcactgagctggaagaatcgcctgggctctcagcctcagccttggatgaggaacccaacgcttgtgttcaagcagtgcttctcagggagccaaacccactaggacacaatcaaagaactgtagttcctagatcacagcatgcatctaatgtactgggtggaaatgagttggtgattgttggacctcgatatgctggttctgtgccacccattgcaacaagaggtctggaaaacagcaaggagagcggtggaaggggcttcaaacccaaaccttgtaacaacattttccaaaatggctcttcaaagcctgaaagggaaccgggcaattcgtcaaacaaaagaacagctggtaaaacggaggaccttggtcacaaggatagttcatctgaagtgtcctacgagtactgtgtaagggtggtcaggtggctggagtgcgagggctacatcgagacaaacttcagggtgaagtttctcacatggtttagcctgcgtgccaccccgcaggagagaaagatagtcggtgtctatgtggatacccttattgaggaccctgtcagcctttctggccagctcgttgacagcttctcggaggcggtatatagcaaaaagcggacgccttctggtttctgcatggacctgtggcattga

SEQ ID NO: 1851 - DNA, 1929 bp, Zea mays
  Peptide Sequence Number=SeqID_43630
atggagaaaggggacgtgctggtggacctggacaagctccctatgaagcgccttgaggccatcgacgagactggcaacgagcactacccaccggacactagcaacgaggagcagcggctcgcggccatccgccggattgacttctcttgggtcatagagaaggatgcaaagaaggccaagaaggcggctgaggctgatactacccagcaggcatggccctggcagggccttatggagagcctgcagcaggcacatcaggagctctccgtcgtcatagacctcatcggcacggttgaggctaatgacgccatggcagtcgcctcgacaacgaagcccaagtcacagccaaacgaaatactagttgacatggcagtgtgtgctgccaccaagctccagtgccttaggcatttgtcacggtacttcaaacaatctgctacgacaatggagcaacagttccaaaaggagactaggttctacagctccttaataagattacagcagaactggaaagtgaagcggcagcggtctgttgggagtccaggaagtgagggcttcatgtttgatctagttgatacttctcagctagacacaacaacaatgcctcgattatcaccattatctttgattccaattgatcaagactcttcaggcactttgtctgtacaaattccacagaagtgtttccattccttgagccttcgatttcatggagacatagccaataatgcagaaagcagtgctgtcaaaaggaaagaaggcacattaaccaacactactaccggagccgaaaatgatgttttggagaacgatgatgtcaataagtctactgaacatgcacattccatcttgcgcgacatccataagtccatatttgaggagcaggtttttgatatggtgatccaggagacatttatccaatctcaaggcatcaatgttactggaatgtgcgaagattttctccaattagcgattggtcaggaatgttctttgtgcctttcgcatgatctctctgggcagaataataactcggggacagtagggcaggaagatcatatggatatagatcatactggaaatcttgcagtagccactgtaaatgggaaggagtcttcaaataaggatgtgagagggtttcctaaccccaaaagcttagaaatttacctgctacatgtgttccatgaaggcatccttagaaaactcagggagaaatctcgtcatgtggttcggtaccagagttctgctcagggtacacctgacgagtgtggcctgctaagtcatttttgcatgacagtgtctcacaggatattttctagcaaagtacatttggagcttgaaagtgtggttagtagggttccttatctccatctgtgttcccttcctacatggcattctcgaacgtcctcctggtctctctgcctgaaagttcctcagcctatcctggccactgatcgagtcagaaggccttcagactacagtgagttgaagtgcaaatccaggtcacagttcggtacaaaggtgatcttgaaagatggacagattagtttaatgggcgagggctctccaagcattgctggatcgttagctgggaagccatccgatggacgcctggttgccagccaagtaatccactggctccacgatgaagcggtggtccttgggatgaacgcgacaatagatttcctgtgcctgtacttggaccttgaccaaggtgaaacactaggcctggtggcacacgttgacccggatgacacctacggctgcgtctcatggtacctcactcttgatcatcacccaacggaggaagggaagatgtcagcgggtagtccggagctagaggagcgcaggtttttggggtacctttccccggaattgctttactctaccctgatggacctggtaaaactgtgcagcacaggtgtccaacgctga

SEQ ID NO: 1852 - DNA, 387 bp, Zea mays
  Peptide Sequence Number=SeqID_43631
atggggaaaagaccacagccggcggcgggtagggccagggaatgctcgcgcacagagggttcacccaagtgccatggctgtgcgaggaagaaggccagagaagaaggggttagggagaccagagtactgaccctggcaacactagacgtcgcgaacggggatgtcgaagaggctcaacggcaagctccgaacgcgcgcaatcaaggctccaggaagggggatgctgggcacgacgtcgaggcctccaggcatgaggcaaggcgctgcgatggatctggcgtgggaaaagagagagaggatggtggctggcggttttggcaagggaagaggcgacgtgagcggcagctgggcgtaggacgtgcggaagcgatggttgggggaagatga

SEQ ID NO: 1853 - DNA, 1518 bp, Zea mays
  Peptide Sequence Number=SeqID_43632
atgccgcagcccggcgccgccgctggctcaaccgcgccatcccgcgtgcctgccgctgccgtccacaaactcaccctcattctcgatcgcctcgtggccaacggcaggcaagaccgctgcgtggccgtttatatcgacgcgcgcgggggtgtggtcagtgccagtcttcgcgctcttggcctagactacctgcgtgagccgtctcaggatgcacaggcattgggacctgctcttgagctgtgggggcggcatctagagtttgtggtccgccgtctcctcgagtcggagcggcagctctgtgccaaggtgtttggcctgcataaggatgtcgcgtccgcatgctttgcagaggtggcggcacaagctggggttcttgaattcttgaggtttggccgtgcagttgctgatgccaagaaggatcccatcaagcttcagcgtctgctcgaggtgtttgattctttgaataagctgagactggatttcaataggttgttcggtggcaaagcatgtgcggagattcagagccagacaagggaccttgtcaagttgttgatagacggtgctgtcgagatctttgaggagttgatcgtgcaggtggagctacagcggcacatgcctcccccagtcgatgggggcgtgccacgcttagttacctttgttgtcgagtactgcaaccgtctgcttggtgagcaatacaggcccatgcttgggcaggtgctaactatccatcgcagctggcgcaaagaggtgttcaatgacaggatgcttgttgatgtggtgctaaacattgtcaaggcccttgaagctaattttgatgtttggtccaaggcatatgacaatgctacgctctcgtatctcttcatgatgaatactcattggcatttctttaggcatttgaaggctactaagttaggagagatcttgggtgatgtgtggctgcgagagcatgaacaatacaaggactactatttgtcaatgttcatcagggagagctggggagcactttcgccactactgaaccgggagggattaatactgttctccaagggccaggctacggcaagggacctggtgaagcagcgcctcaaaacattcaattcaagcttcgatgagatgcattgcaggcaatcatcatgggttataccagacaaggatttgcgggagaggacatgtaatcttgtggtgcagactattgttcctgcctatcggagctacttgcagaactatgggccacttgttgagcaagatggaaacaccagcaagtatgtaaggtacactgttgatggtttggagaagatgctcagtgccctttacatgccccggcccaggagggctgggagcttccagatcaaacactcgagtggatggatggaaggaactaaggaacttgaaatcatggacactgccacactgcactattgggcattcgcattcagggcaatagaagcatctgaaatccgtttggagaattttgtttgtttattccccattgcactaagataccttggagcaatctga

SEQ ID NO: 1854 - DNA, 377 bp, Zea mays
  Peptide Sequence Number=SeqID_43633
atggatcacggcggcgaggaccgcgtcgtggcggcgagcctcgcggcggcgcggcgcacgctgcgcgccggcttggacaagtcgcgcgcgctgggccacgcgctagcccgcgcggggccccgcctgaaggagatccaagcggcgctgccggtgctggaggccgcagtgcgcccgatccgcgcgccgcgggccgagctcgccgccgccgggccccacatcgaccgcgccgtgggccccgccgccgccgtgctcaaggtgttcgatgccgtgcacggtctcgagccgccgctcctggcgcccggcgccgcgggctctggcgcggctggggacttgccggggtacctcgccgtcctggcgcagctcgaggaggcgcacag

SEQ ID NO: 1855 - DNA, 705 bp, Zea mays
  Peptide Sequence Number=SeqID_43634
atggatgcaatgtttgcaaggggtatacttaagtgccccaatagatcagcgaggccaatatggctaatgagcacacgaaatcctagagaatcctcggttaaaacaaaaggcacgagcgacaatcatgaggagaggcaggagataggtaccgaacgatctgaccccaatcccagggcaggcagcgacccgccctcaccatcgacatgggggccaaagcgaaaacagaaagacagggagagggaggggataatacctgaggttggcggtgtccgccgacccgtccccggcgagccccatgagcgccacctccgcgccgccctcccggccctggcaccagcagcaggaggaggaggaacaggagagcgcccgccccgggagcagggggaggaggaggaggagcaccaccgcgagatgcgcgcggatggaggtgctggtggtggtccccacggcccctcctcgcgcatgaaaaggggcgtgcagggatggggggagggagagccgggaagcaggggaaggggggaacggatggacgagaggagagggaggcgtgcaagggaagctgctcgcgtgctttcctttgagtttgaggaaagcagaggagtggatgagaatgatcggggagcggttgacgtggcgggccgccgcgactggacggtggacgcacccgaccccggcgacccggccgtgtcgtgggccgagagatga

SEQ ID NO: 1856 - DNA, 525 bp, Zea mays
  Peptide Sequence Number=SeqID_43635
atggaggacttctatgaggcaaggatagacgacgttgacggagagaaagttggaatgtttggtgtgtatgatggtcacggaggagtcagagcagctgagtacgttaagcagcatcttttcagcaatttaatcaaacacccaaagttcatcactgataccaaggccgctattgctgaaacttacaaccgcacagattcagaatttctgaaagctgatagcactcaaactcgagatgctggctcaactgcctcaacagctattattgtaggtgatcgtttgcttgttgcaaatgttggagattctagagctgttatttctaaaggaggacaggcaattgcggtttcaagggatcacaaacctgatcagacagatgagaggcaaagaattgaggatgcagggggctttgttatgtgggctggtaatggttcctctgaatttttcaataaaaagaaaccatctatctcaggacatggagagtgggtggcgttctcgctgtctctcgagcatttggtgataaactcttga

SEQ ID NO: 1857 - DNA, 339 bp, Zea mays
  Peptide Sequence Number=SeqID_43636
atggtcaagcctatccaggacccccaggaagcagcaaacaagcttctcgaagaagcttcccgaaggggaagctccgataacatcacagttatcatcgtccgcttcatagacggaactaccggggtcaagcttgcattgggcctgcaatatggacttggcctgaccctgacggccctgacctcgcattgcataaggattctatcctctgtttggtataacttgtcgcacagtttcttcgtagatttaagcagaagtcgtactaaacagcagtctctcattacttcatctgcttctcggacaagtcgcttttcgaaagagcaacagtttaaaggattctaa

SEQ ID NO: 1858 - DNA, 186 bp, Zea mays
  Peptide Sequence Number=SeqID_43637
atgtcgagcctcaccacggccgccagcagcagcagcagcatggaggagcactgctactccgtgtccgcggaggaggtcgtcggcacgcacctgtccttagggatcggcggcggcggcggcggaggagataagaggatgctaacaacgctgccgccgtctcggacggtagtgcagctgttcggcgag

SEQ ID NO: 1859 - DNA, 291 bp, Zea mays
  Peptide Sequence Number=SeqID_43638
atggccagcaacagaggcgtagggcccagtatggtccagtattgcctgggtaatacattagaccgacttaatgtgaagagctatttcagtcaagcttctagtggaagtagaccaagcactcacgctagtggagtttgcaatgaacccgaaatacaagttggagttcaagagaataatagtgaagaagttgcacatgttctagaagagaatggacgtattccagatgccaatggcgaaaatattaatggtcaagtcgaaggtatcttcggactcgagtcggtatcacagtag

SEQ ID NO: 1860 - DNA, 240 bp, Zea mays
  Peptide Sequence Number=SeqID_43639
atggggctcggtgtatgcggctcactctgccaagagtgttatgaaactgatatatcagccgtgctcgcggttatgagcgccaagggagctccattgattagagacacattgatcagagatggttggtttgcaggtggtgatgaggatgatggttttgattatgattatggtaatggtaaagaagaaggtgtcgaggtggatctccagaagttccaagacttcgacgagttcgaggattag

SEQ ID NO: 1861 - DNA, 279 bp, Zea mays
  Peptide Sequence Number=SeqID_43640
atggcgtggccggctggctcgctgtcgggcgcggcttcctgtctgcccgcgcgagcccctcccggccacggcgtccacccgcgggcgcgcgtgccctacgtggcgtggccggctccctgcggcggtcgagctccccctcccctgcgcagccccatggccatggaatttgaacgtggtgatgaggatgatggttttgattatgattatggtaatggtaaagaagaaggtgtcgaggtggatctccaggagttccaggacttcgacaagttcgaggattag

SEQ ID NO: 1862 - DNA, 867 bp, Zea mays
  Peptide Sequence Number=SeqID_43641
atgatcgggtggggcgacgtgtacaaggtggtggcggcgacggtgccgctctacttcgcgctgttcctgggctacggctcggtgcggtggtggcgcatcttcacgcgggagcagtgcgacgcggtgaaccggctggtggccttcttcgcgctgcccttcttcacgttcgagttcacgctgcacacggacccgttccaggtgaactaccgcgccgtggccgccgacgtgatctccaaggccgtgatcgtgggcgtgatcggctgctgggccggcagcagggtgggctccgcgggcaagggcaagggcgccgtcggctggtccatcaccgggttctcgctgtccacgctaaccaactccctggtggtcggcgtgcccatggccagggccatgtacggcgagtgggcgcagcagctcgtcgtccagctctccgtcttccaggccatcgtctggctgacgctcctcctcttcgtgctcgagaccagaaaggccgccatcggcatgtacgtcgtccccggcggcgctgctgacagcgacggcggcgtgccggactcgccggtcaaggacaaggacgtcgaggccgctgccggcgatcgtcgtcccgccgccggccctgccgctgctgccaccgtcgtggtcgtcgtccccgtgaagccctcgctctgggcgctcatcaaggtggtggcgcacaagctgtcgcgcaaccccaacacgtacgccagcttcgtcggcatcacctgggcctgcgtcgccaacaggctgcacatcgagctgcccagcgccttcgaggggtcggtgctcatcatgtccaagtcgggcacgggaatggccatgttcagcatgggtgagagtgatttccctgtctcatga

SEQ ID NO: 1863 - DNA, 224 bp, Zea mays
  Peptide Sequence Number=SeqID_43642
atggtggtggtacttgatatcggcacggcaactacgttgagcgggcgcggcaatcgacgagctagcagagaactcggcaacgaggtagcagcaagcagagcgaagggacgcatggcgcggtgcacgagggctcgggcggtgtcggtctctggcgtccaggcgggcgtcgaggcggggtcctgggcggtgtcgggctgggcactgcaggggggcgtggtcgggag

SEQ ID NO: 1864 - DNA, 311 bp, Zea mays
  Peptide Sequence Number=SeqID_43643
aatgtgtcaaaaaccgcatcacatcaaaattaaaactggatacaacactatacatagcactcactgagcctattgatatatatagtgaatggattgatgagtgtgagcgtgtcaacactgttgaaggcgacgatgatgcggtaaaccaaatgcaaccagaatataatctgcagcggaagatattcatagatacaattgttttcagttcattcaacgctgaaagcggtttcggtctggaggctgagctttggatcattggatggcactatgcagctttggcacctggagtaccgctcattagtttttcataa

SEQ ID NO: 1865 - DNA, 300 bp, Zea mays
  Peptide Sequence Number=SeqID_43644
atggcgcagcaggagaaggtgctggcgtgcgggcccagcttcgcggcgctgggcctggtgctcaagttcgcgctcggcccggccgccatggccatcggctccatcgccgtcggcctccgcggcgacgtcctccgcgtcgccatcatacaggccgcactaccccaatccatcacatcgttcatatttgcaaaagaatatgggttgcacgctgatgttcttagcactgcggttatttttgggatgcttgtctccttgccgttgctagttggattttatattgttttggaactaattagatag

SEQ ID NO: 1866 - DNA, 219 bp, Zea mays
  Peptide Sequence Number=SeqID_43645
atggatgggcacgctacgccggatttctcccccgcagccggttccttcgtccacacgaccgcgcgctcggaaaactccgcggagggcgaaggaggcgaaccaagggcgacgtatccgccgccggagaaggtcttcgccggtccctttgccgcctccttgccgccgacgagcaccagccaggtgcttgatgttttgattgttttctccaccacagcctaa

SEQ ID NO: 1867 - DNA, 522 bp, Zea mays
  Peptide Sequence Number=SeqID_43646
atgagggaggcatcgatgttcttctgtggtgacccatcgacaccgcagtgggtcgaccaacaccatcagcacgtggagattcacagggatgcaaatggatctacattattgaagggatttaggaaaccatcaccgaacaacaacctattagagtgtactcaacatgcttacgatatctgcactgtggaccagggctctcttctgaagcaactagcaaataagagtatcagtggtggtgtagctgctgttctagctgaaagggacaaggaagagatggagatggacatagcaaagctagaagttggctccatggaaacatctgtaatatgtaggagtgacggtcctctaattctagcatacttgaggaagtggtctttgatttcatctcattccacaataagatctcaaataattgaccctttccaggtttctgtttctaaagcacaggccattattgtgttaacatctgatgaaaatgcagaccaagttagtatttttgttctacacacatcacctgaatag

SEQ ID NO: 1868 - DNA, 996 bp, Zea mays
  Peptide Sequence Number=SeqID_43647
atggtggtcctcgccaagggtgagctcgagcagatcgcgctgcctgcggcggcgccgccacgggccgacgtgcggtcggtggacctgtcggccccggcgggcccggcgcgcgaggccgcggcgcgcgcgctggtggcggcgtgcgaggagcacgggttcttccgggtgacgggccacggcgtgccggccgagctcgtgcgcgccgcggaggccgcggcggccgggttcttcgcgcggccgcagggcgagaaggacggggaggcccccacgctcgggtacggcagcaagcgcatcggcggcaacggcgacctcggctgggtcgagtacctcctgctcggcgtcaaccccgccgtgcccgccgcctccgcgtcctcctcgacattgccgttgcggggccttctggacgagtacacggtggcggtgcggcggatggcgtgcgcggtgctggagctgatggcggaggggctgggcatcgccggcgccggggacggggacggggacacggtgctggcgaggctggtggcgcgcgcggacagcgactgcatgctgcgggtgaaccactacccgccgcggccggcgctgaactacccctgcctcacggggttcggcgagcacaccgacccgcagatcatctcggtgctccgcgccaacggcacgtccggcctggaggtcgcgctgcgggacggcgcctgggcctccgtcccgcccgacggggacgccttcttcgtcaacgtcggcgacaccctgcaggtgttgacgaacgggaggttcaggagcgtgaggcacagggtggtggtgaacagcgagaagtcccgggtgtccatgatcttcttcggcgggccgccgcccgacgagaggctggcgccgctgccgcagcttctgggagacgacggcggccggagccggtaccgggacttcacctggagcgagttcaagaccagcgggtgcaggaccaggctcgcggaagaccgcctgtcccgcttcgagaagcagtag

SEQ ID NO: 1869 - DNA, 216 bp, Zea mays
  Peptide Sequence Number=SeqID_43648
atggcgccggtggccgacacaacactatacctgcggcagggagcaccgtccaccggtgatcgaaccagggaaggaaggctgatgcgagtcatgcgccactgtggtgaacaacggtggaggtgtcaggcatggagtggagactgtcgtggagtggaggcgactcagcaaggggctgacggtgtcggtgtggcacatggtggacccatggaggcctag

SEQ ID NO: 1870 - DNA, 651 bp, Zea mays
  Peptide Sequence Number=SeqID_43649
atggaggctcaggcccacgcgtcatgcaaccggcgcgccgaatgcttcgtgcatgcaactgcaccgccacttgcgccaccaccgcgcctcctcgactgcggaaccgataccgcgggcaggagcagcggtcacgtcgtcagccaagcttacgtctcatccgggggcagcgagagaaccctctctcacggcgtgaagacaacacgcccgtgttccattcctcaaacggctcgcgcacgcgcaacggccgccccgcgaaccactcgccccgtcgcattaactccgcggcgggacaggcggcgcctctggcaagagaagcgagcgacgcttcgccttcgccataatgaccgcgtcaaaaaaaagggaccgggaaagggggataacccgaaaaggatccttccccgtgaaggaaccaggttccgagcctccctactgatcagaggttcgaaggctggcccctcggaaggattcaacagccgcctcagagcacgtgggctccacacccactactggtcagaggttcgaaggccggcccctcggaagggttcaacggccgcctcaggctactcgggctccgcgcccactgctgatcaggggttcgaaggctggcccccgaagggttcacagccgcctcagacacagagcgagggatga

SEQ ID NO: 1871 - DNA, 198 bp, Zea mays
  Peptide Sequence Number=SeqID_43650
atgaacgcggccgacgaccggaagggcatggctggcccaggccctaggctgcgcgcgacggcggtggcgcccgacccctacgtccctgacgacgcgctcatcgatatatttgacctcctcctcgccaactccctccaccgcttcaagtgcgtcttcaaagcatggtgcggcggcttcactgacccgctccaccgctag

SEQ ID NO: 1872 - DNA, 519 bp, Zea mays
  Peptide Sequence Number=SeqID_43651
atgagaacccaggcgctgttcttcctcgcactcgcacttatcggcgccgtcctcgcgcagtccagcaacaggcaccaccaccactaccaccacgcccatgtccaaggcaaagggcagggagccggaggaggaggaggggagctggcgagccgggcgaaggcggcggcgcgcgcgtggccgtgctgtgacagctgcggcgggtgcaccagatcggagccgccgcggtgccagtgcctggacgcggcgccccgcgggtgccacccggcctgcagggactgcgtcaagtccagcctcagcgccgacccgccgagagatgagcatgatggatcactgagatttaagaaaagagtcaaagagacgtttgcttttcttgccgtctatacgaagctttcgacagggaaggaaacacgccgtcagggtcagattgtcgtggatctttcgtctgggtattttgggagcagtcgagcagaggcagagctcgtgcctgtacaagtggaggatgatgcacctggacgctaa

SEQ ID NO: 1873 - DNA, 1425 bp, Zea mays
  Peptide Sequence Number=SeqID_43652
atggaggatgtgcaggtgcggacccgtgcgcagcagggcgatggcggcgccgcggcggagggggacgccgcgttctcgtgggcgcccgtcgtcctcccgtttttattccctgcattgggtggtctccttttcggctatgatattggcgcaacctctggagcaaccatctctgtgcaatctcctgatctcagtggcactgattggttcagcttgtcatctttgcaactagggcttgtggccagtggttcactttatggtgctcttggcggctctcttcttgcataccgcattgcagattttctaggaaggaggatagaattggtcacagcagctgcattatatatccttggtgctttagtcactggatttgcccctaattttgtagcactaatcataggtcgtgtcctgtatgggattggtattggtttggcaatgcatggtgcccctctttatattgcggagacttctccttcacaaatacgtggaacattgatatctttgaaggagctgtttattgtgttagggatactgttaggataccttgtaggaagtcttgaaattgacaatgtaggaggatggcggtacatgtttggttttagtgctccgcttgcagctattatggctattggtatgtggactttaccatcttcaccaagatggctacttctcagggcagttcaaggaaaggcttctttggaggataataaaaagaaggcaattcaagcccttagaacattgaggggccgcacagcaagtgaaaaggttttggcagatgatgttgacgatacaattgtctctattaaggctgcctacgcaggacaggaagctgaaggaaacgtttgggatgtatttgaaggagctagcttgaaggccttcactattggcggaggtctggttctgtttcagcagactgctggattctcagctgcatcagatgctgccaaagtagcaatcttgattgggttgttcaagttgctaatgacaggtgttgcggtatttaaagttgacgatgttggaaggcgcccattattgataggaggtgttggtggaattgctttgtcactcttcctactggcagcttactacaagatcctgaacaacttcccctttgttgctgtcggcgcgttacttctatatgtcggtgcttaccaggtctcatttggtccaattagttggctaatggtatctgagatctttccactccggacaagagggcgtgggatcagcctcgcagtactaacaaatttcggctcgaacgctctggtgacatttgcgttttcacccttgaaggagctcctcgggccagccaatatatttttcctgttcggcgtcatagcagtgctctccctcgtgtttgtgatcctcgtcgttccagaaaccaaaggactgagcctggaggagatcgagtcgaagatcctgaagtaa

SEQ ID NO: 1874 - DNA, 527 bp, Zea mays
  Peptide Sequence Number=SeqID_43653
cgattacacagaattccctcccaatcggcggcgccacgatgcgcctccgcagccgggcaatctttcccctcgtccgcaccaccgccaccaccacgtcggccgcgtcttcgtctccggcggtgctgagcatcggccacgcgctgcgcgagcgccggctgttcacgggggacgacgtggcggcgtacgcggcgatcagcggtgaccgcaacccggtgcacctcgacgacgccgtcgcccgggagctgagcgggttccagcgaggccgcgtgcctggcgctgtgtacgcgagccagacgctcaagtttgcggcgccggtgtacgtcggggatgaggtggttgctcgagtccaggcactcaacatcaggacgacggcggcggcgacgaacagctgcacggcaagacgatatgtcgtcaagttcgcaaccaaatgcttcatggacgaagaggagggctctgttgcgattgaaggcgaagcaatggctgtcctgcctacactggagctcagctctcagtcgactagaaactag

SEQ ID NO: 1875 - DNA, 507 bp, Zea mays
  Peptide Sequence Number=SeqID_43654
atgagcgggagcgcgttcaacgcgttcaagtcgcgggtgccggtggcgtggagtccccggctgtacatcacgctggtgcggggcctccccgggacgcggcgcctccaccgccgcacgctcgaggccatgcgcctccgccgctgccaccgcaccgtcgagcaccgcaccacgccgtcgctcctcgggatgctcacccaggtgaagcgcctcgtcgccgtggagaccgaggagatgtacaacgcgcggaagcaggccgaggcggagaggcgcgcgcccagacccccgctcgtcgtctcccaccagccacagccgccggctccgaagccggcagccgccgccgcgggcatcagaagcctttcatcacagttcagcggcataataattgatttgcctgtgtttgggtctgctggttttcagacgatcgctttgggtcttcttgctcaacgagatctagcaacggatttgatcgatcttctcaagatcgttgtgtggtgcaacctgcattga

SEQ ID NO: 1876 - DNA, 774 bp, Zea mays
  Peptide Sequence Number=SeqID_43655
atggcggcgccggcgccggcgccgaagcaggaggagctgcagccgcacgccgtcagggaccagctgccctccgtctcctactgcctgacaagcccgcccccatggccggaggccgtcctcctcggcttccagcactacctcgtcatgctcggcaccaccgtcatcatccccaccgcgctcgtgccccagatgggcggcggcaatgaggagaaggcgcgggtggtgcagacgctgctgttcgtggccgggatcaacacgctggtccagagcttcctcggcacgcgcctccccgccgtcatgggggcctcctacaccttcgtcgcgcccaccatctccatcgtcctcgccggccgctacagcggcatcgccgatccccacgagaaattcgtgcgcatcatgcgggggacgcaaggcgcgttcattgtggcctccacgctccaaatcatcatgggcttcagtggcctttggcgcattgtcgtcaggctgctcagtccgctgtctgctgctcccttggtcgctctcgtcggatttggactctatgagctagggtttccaagtgttgccaaatgtgtggagattggtcttcctcagattttactgctggtggcgctttctcagtccactggtgcgtttatcgccgtctcacgcgaaaatgctgggttgctcggtttgacacgcgttggtagtagacgtgttgtgcagatttctgccgggtttatgatattcttctccatccttgctgtgatcgtcaacatcgcccactatgcgatctag

SEQ ID NO: 1877 - DNA, 564 bp, Zea mays
  Peptide Sequence Number=SeqID_43656
tgtacaagaagcaccacccaccatttcttgaagatgaagtctggcgcctagagaaaattggcaaggaaggtgcttttcacaagcgtttgaatagggagaacatttgcactgtcaaagattttctcaccttgttaaatcttgatgcttctaggcttcgaaagatattaggtggtggcatgtcaacaaagatgtgggaggccactgtggaacatgcaaaaacatgtgttctaactgacaaagtgcatcactactatcctgatggtctaaacaaagctggtgttgtattcaatgtagttggagaagtaagagggttaatatctgataaatatgtttttgttgatgactttactgaaaaggagaaggccgaagcacgtgcagcagtgaagcaagcatatgaacactggaaggatactgaagaaagcagtgctaatcaatttcagtcggtgttgcccccagttggtggccatgaagtgccccgagaacctcagacgctggataagttctccaactcgttgctggtaagctctgctggtttcttcagctgtacatgggctgtcagctatg

SEQ ID NO: 1878 - DNA, 826 bp, Zea mays
  Peptide Sequence Number=SeqID_43657
atgtcgcagaagaggcagccggaggagggcgacgtcccgcggcgcgccgccgatgccggcggcggcggcggaggagacgagcccggtgggagctcgtcgcgctcctctctgccccagcgccacggcgagccgaagcggcagaggatcgcccttcgcgatgtgatcacggaggtgatgcggaacaccagcatcgagaagtttctaatcgcgctcgagcccctcatcaggagagtggtaaaagaagaaattgagtcggcttttgcaaaccatgcctctatgatggcaaggagtgtcacagacagtgttccatctgtgtcaaagaatttgcagctgcagttcatgaccagactttctcttccaatatttactggatccaagattgaaggagagggctccttaagtataactattgctctagtcgacgctttgacaagacaaattgtagcaccaggcaaagagttccagataaaggtcgagattgtagttctggagggggattttgaaagtggagaagatgatgactggacagctcaggagtttaacaataacattgttaaagaaagagaaggcaaaaggcccttgatttctggggatgcattcattgccctcgtcgatggcattggaacagtaggggaactttcattcacagataactccagctggacacggagccgaaagttcaggctaggagcaagaacagaggatggttctttcaatggtgtaagagtacgggaagcaaaaactgaatcatttgtggttaaggaccatcgaggagaatggctagtttgggaaccacattttcccaagggtttttcgttttcccaag

SEQ ID NO: 1879 - DNA, 411 bp, Zea mays
  Peptide Sequence Number=SeqID_43658
atgaacgtatgtgagctcactcttgctgtctcacacccccccacaggtcaagaacagtactcgaacccgggagagccaccacctaccagacagaggttggaagcgacggcgctgccggagatggagacggagacggaggcggcagcggcgaggcgggcgaaggagtctctggagctggctttccagatgtcccagatcctagacaccggcctcgaccgccacaccctgtcgctgctcatggcgctttgcgaccgcggagccaaccccgaggcattggccgccctcgtccgcgagctctcctctgctgctcccccaacctccgccgcggcttcctcccccgtgagcaacggcgccgcggggccggcctcggcaattgcgcccacgttctcctccggccttcgccgtccctag

SEQ ID NO: 1880 - DNA, 912 bp, Zea mays
  Peptide Sequence Number=SeqID_43659
atggcggacggcgacggcgcggcggcgacggggaagctcgcggagctccccagcggcgccgagaaggggctccccaggaggggcaaggcttcttctgggaggacattaaacaccgcacaaattccgcttgttgcgagccatccagatgtgtatgagccatgtgatgattcctttgcccttgttgatgcactactctcagacaaggcacaactcttgacactacagccaaggttatgtatggaggtagggtctggtagtggttatgtcatcacctcgcttgcaatcatgctcaggcagttaggctctggagcccagtacctagcaactgacatcaaccaacatgctgccgagacaactcaagcgacccttgaagctcatggggtgcatgcagatgtgattgttactgacatcatgtctggtcttgataaacgccttgctggtatggttgatgtggcagttgttaaccctccttatgtgccaactcctgtggaagaagtcggatgtagaggcattgcttcgtcctgggcaggcggtttgaatggccgccaagtgattgacaggatccttcctgctgtgcgtgagatgctatcagaaagggggtggctgtacatggtggccctcgaagataatgatccttcagacatatgccatctgatgagcgagatggggtatgcatcccgcgttatcttgaagaggtgtactgaggaggagagcctttatgttctcaagttctggcgagacccacacgctgttacaagtgtcgccaaggcgtccaaaaatcataggcgccttgctcgcctaggcgtccagtcgataggccaacgtcttatctcgacttatgctttaagaaccatgcacactctaaaagattctgtcctctatatcttctatgtctccagcaacgtcccctaa

SEQ ID NO: 1881 - DNA, 1958 bp, Zea mays
  Peptide Sequence Number=SeqID_43660
ctcgcaaagacaaccgcaggcaaaaagagagcgggacatcaacccggcgccaaaaggtcctctccgaaaccacgccgcaccgccgcattctcgcaaacacctcgccggcggaggtgacgctccagatggtcaggtccaacgtctctcccggcggctccggcgcgcccccgggttcccccaggctccggcgcgccccagaggtgtcggcgcaggtggacgtggaaggcgcggtggcgtgggcgcgtggcgcggccgcgggggagctgtgggccgtgcgcagacgcaaccgtggcatcgacgtcgacgaggagcagctgagggcggtgatgctggcggtgcggcagttgcgctacgagctcgaccccgacgatcccgacactccctaccccaaggctttcagaaactgcgggtttgatgcaatgggtgagcgagttctgaagttatggacagcagaagacaagaaaaaacttgctgatattgagaagttgattcctcagagccatcctcggcatgcgacgcggggcccgtatgacccagccgtcccagcggccggacggcgacaccaaccacgccccgttccgttgaacagcgtcgagtcgtcgccccatatcaaacgcccacgcagcgccggggatggagcgcggccggcaccagatgagagctgcctcccacacatggcatcgtggccagcagcgtcaaggaggcggtccagcggcggcatgaaaagcgccgagctttcgggctccggtgcttcttacggctatggccggacgtcctcctcccctgatgcctgcggctacggccggcagttctcggcctacagcgcccgctcctcccaggtcagcaggagtggctccttcagtgcggcggcgcagcgggtcgccggcgccttcaccggctgcttcgtgccgcgccggcaggtcaaagccggggaagaggaggaggaggaggagaagaagagcaagcgctccatggattcaggtatcgctgcagtgatgtctcctcttcccttcttcctcagctcttcagtagcaggagaaggcagggctctcaccatcgctgacgtgtcgaaggcaacatcaaacttcagcgaaaagaacgtgataaggcagggacgctcaagcaccatgtacagaggaaagctcagggatggttctcagatcgccgtcaaatgtgtcacgaagctgaacgaccagagtccgacggctgaactctggagggagcttgagaagatccagcacaggaatctggcgaggctctttggattcttcgaacgcgcagctgatagtctcgtcgtagtcgagtatgtcggcaatggttccttgagggaacatttggatgagctcgcgcaacggctcaacatcgcgatcgacgttgctcaggccatcacctacctgcacgagtacaaagagcgtccgatcatccatggcggcatccggtcgtcaggcgtgctactgaccgacgcgctggcggcgaaggtggccggctttgggctggccgggactgcggcctcggggtcgggctcaggctccgacgcaacgccggcgaggagcgccgccgggtacgtggacccggagtacctgatcacgtaccagctgaccgacaagagcgacgtgtacgccttcggcgtcctcctcgtggagctagccaccggccggccgcccgtcgagcgcagccgcggcggcgaggcccggctcaccaccaaatggaagtgcagagcaggggaagccgtggtggccatggaccccaggatgcggcggagcccggcgtcggtggccgcagtggagaggacgctggcgctggcagcgcagagcgtcgcggcggccagggatgagcggccgtccatgcggcggtgcagcgagctgctgtggaccatccggagagactaccaccgccaggaggagccgcgctgcggcgccgtcgctgcggaacgtagcgacgagtgggtcatcaggtag

SEQ ID NO: 1882 - DNA, 282 bp, Zea mays
  Peptide Sequence Number=SeqID_43661
atgacgagccaccgcagaaaagggtctaccccttacactgcacaaacctccgagcaatctacatggatcactcagggggacgaaggactacatctagcacatgcgctcacgcgcacccgagaaacaaatggactcacacccgaagaggaaccacacaagaaagcctctatgcaactccaaggacttacaaaggctcatggactgttgttgggtacctgggaacatggtacccaaagaaggccccaagacaccccaagaatggcccgcccgtcaagaatgtaa

SEQ ID NO: 1883 - DNA, 240 bp, Zea mays
  Peptide Sequence Number=SeqID_43662
atgaagcattctggcatgtcactgccattttgcatgactggaatcatccacgttgagtctgaattcttgccactttacagcacctatggcattggattgactacatggagtcctctagcttcaggagtactaactggaaaatataccaaagggaacatacctgctgatagcaggtttgccctagacaattacaagaggtaccagtatttagcaacaaacaaagtcactctatcaatttag

SEQ ID NO: 1884 - DNA, 174 bp, Zea mays
  Peptide Sequence Number=SeqID_43663
atggacgtgagagccttctctggtatcatttacaatgttatagatcagcaagcttttgttgaggtagcaaaaggttttgtctataaagtgtgggactggacagacataaggcaacttctcaatcctgatcagactaagcattttatctccagcttgatggtcactgctggctga

SEQ ID NO: 1885 - DNA, 108 bp, Zea mays
  Peptide Sequence Number=SeqID_43664
atggccaactactcaatcattcaaaggacaacaagaaattacgggacactatgggccatgttgcagctatttaaggggaacctgacctcccacatgggcattggttga

SEQ ID NO: 1886 - DNA, 2281 bp, Zea mays
  Peptide Sequence Number=SeqID_43665
gaggaagataagtctgaaacccaagggaccctcaagcgcttcctcaggagagctcaaaatgagtttgagctcaaggtgaagaagataaggagcgacaacgggtccgaattcaagaaccttcaagtggaggagttccttgaggaggaagggatcaagcacgagttctccgctccctacacaccacagcaaaatggtgtggtagagaggaagaacaggacgctaatcgatatggcgaggacgatgcttggagaattcaagacccccgagtgtttttggtcggaagccgtgaacacggcttgccacgccatcaacagggtctaccttcatcgcctcctcaagaagacttcgtatgagctactaaccggtaacaaacccaatgtatcttactttcgtgtatttgggagcaggtgctacattctagtgaagaagggtagaaattctaaatttgctcctaaagctgtagaagggtttttgttaggttatgactcaaatacaaaggcgtatagagtcttcaacaaatcatcgggtttggttgaagtctctagcgacgtagtatttgatgagactaatggctctccaagagagcaagttgttgattgtgatgatgtagatgaagaagatgttctgacggccgctatacgaaccatggcaattggagaagtgcggccacaggaacaagatgaacgagatcaaccttcttcctcaacaacggtgcatcccccaactcaagacgatgaacaagttcatcaaaaggaggcgtgtgatcaagggggagcacaagatgatcacatgatggaggaagaagcgcaaccggcacctccaacccaagttcgagcagtgattcaaaggaatcatcccgtcgaccaaattttgggtgacattagcaagggagtaactactcgatctcgattagttaatttttgtgagcattactcttttgtctcttctattgagcctttcagggtagaagaggccttgctagatccggactgggtgttggccatgcaagaggaactaaatatcttcaagcgcaatgaagtttggacactggtgcctcgtcccaagcaaaatgttgtgggaaccaagtgggtgtttcgcaacaaacaggacgagcacggggtggtgacaaggaacaaggctcgacttgtggcaaaaggttatgcccaagtcgcaggtttggactttgaggagacttttgctcctgtggctaggctagagtcaattcgcatcttgctagcatatgccgctcaccattctttcaggttgtaccaaatggatgtgaagagcgctttcctcaacgggccgatcaaggaggaggtgtatgtagagcaaccccctggcttcgaggatgaacggtaccccgaccacgtgtgtaagctctctaaggcgctctatggacttaagcaagccccaagagcatggtatgaatgccttagagactttttaattgctaatgctttcaaggttgggaaagccgatccaactctttttactaagacatgtgatggtgatttgtttgtgtgccaaatttatgtcgatgacataatatttggttctactaatcaaaagtcttgtgaagagtttagcagggtaatgacgcagaaattcgagatgtcaatgatggacgagttgaactacttccttgggttccaagtgaagcaactcaaggacggcaccttcatctcccaaacgaagtacacgcaagacttgctaaagcggtttgggatgaaggacgccaagcccgcaaagactccgatgggaaccgacggacacaccgacctcaacaaaggagtcgctacgccttgcttcgggatctggtatcctaaggggtctaactttgacttaattggatactcagattccgactatgctggatgtaaggtcgataggaagagtacatcagggacgtgccaattcttaggaaggtccctcgtgtcgtggaactctaagaaacaaacttccgttgccctatccaccgctgaggccgagtatgttgccacaggacagtgttgcgcgcaactactttggatgaggcaaaccctccgggactttggctacaatctgagcaaagtcccactcctatgtgataatgagagtgccatccgcatggcggaaaatcctgttgaacacagccgcacaaagcacattgacatccggcatcactttttgagagaccaccaacaaaagggagatatcgaagtgtttcatgttagcaccgagaaccagctagccgatatctttaccaagcctctagatgagaagaccttttgcaggctgcgta

SEQ ID NO: 1887 - DNA, 468 bp, Zea mays
  Peptide Sequence Number=SeqID_43666
gaagctcgagtcagattgcagatacgtgtttcccagaaaagcagcagcctactaaatgaacaagatgttttagggaatccgccattctcggtggatctaccaggcatattttggagggaaaaagatgaagattcagaatggagcaaagcaaatgataatgctgatctagaagaagggtatgatagttctaaagatgaagtttcatctgtttcctcatacaatccttccaaagcaaatcgtgaattctccctggggagctcgttgtcaacgcagtctctgtcatcacggctctccacgagtgaaccattttacaatcaagtagaacgacctaatttcccatcatacagtccaattcctggattgtcagtgtcagagatttcagatgatcatgacggaggtaaagaactgaagcttatagttggatacttagatttaagatgctttagaattttagtattcaactcataa

SEQ ID NO: 1888 - DNA, 1293 bp, Zea mays
  Peptide Sequence Number=SeqID_43667
atgaagcggctccccatcctggtcgtccccgtcctcctcctcctactctccatctccttcttcctcttccggcctaccaccccgcctgtcctcagttcgcggcaagccttcgaacccgaccgccgtctcagggtctacgtcgcggacctcccccgcgcgttcaactacggcctgctcgaccgctactggtccctccgcgcagcggactcccgcatccaggcctcgtccgaccctgaccacccgcccccgcacgaccacccgccataccccgagaaccccctcatcaagcagtacagcgccgagtactggctcctcgcctccctccgcgccgcggcgacggcgccggccgccgtgagggtcgtcgcggactggagggaagccgatgtcgtctttgttcccttcttcgcgacgctgtctgcggagatggagctcgggtggggaaccaagggcgccttccgcaagaaggacggcaacgaagactaccggcggcagcgggaggttgtcgaccgcgtcacctcccaccccgcgtggcggaggtccagcggccgggatcacatcttcgtcctgacagatttatctgcgtaccagcttattgttcttttgcgtgctcagcacactcaagtgtcattgcttaaggatgttattgtgccttacacgcatttgcttccgacactgctcttatcagagaataaagatcgtcgcacacttctctacttcaagggggcgaagcataggcatcggggtggtttagtacgagagaaattatgggatttgctgggtaatgagcctgacgttatcatggaagaaggcttcccgaatgccaccggacgtgaacaatcaataaaagggttgcggacatcggaattttgcttgcacccagccggtgacaccccaacctcatgtcgcctctttgatgctattgccagtctgtgcataccagtcatcgttagtgatgaggttgagctccctttcgaagggataatagactacacagaaatctccattttcgtgtcagttagtaacgctatgagaccgaaatggctaacaagctacttgaggaatatttccaagcagcagaaggacgagtttcgaagaaacctggctcgtgtccaacctatctttgagtatgacaccagctactccagcagcagaggctctacctccattgatggtgctgtgagtcacatatggaagaagattcagcagaaactgccaatgattcaggaggcaatcatcagggacaagcggaagcctgatggcgtgtcaatcccgctccggtgtcattgtacatga

SEQ ID NO: 1889 - DNA, 1632 bp, Zea mays
  Peptide Sequence Number=SeqID_43668
atggaccagccaccgaatggattcgccgccggaggttttttcacgcacattgatgggcaaaaccgttctcccccttctgtaattgtcattgggggagggatttcaggcatcgcagctgcacgtgctttgtcgactgcttcatttaaggtcacactcttggagtccagggaccgacctggtggccgtgtgcacactgactattctttcggttgcccaattgacatgggagcatcatggttgcatggtgtttgcaatgagaattctttggcaccactgattaggatgcttgggcttaggttatatcgcacaagcggtgataactctgttctgtatgaccatgatttggaaagttatgctctttttgataagcatggtcagcaagttccccaggagatagtaagcaaagttggagagacatttgagagaattcttaaggagactgtcatagtaagagatgagcatgcaaatgacatgcctctttttcaagccatagcgatcgtgcttgacaggaatccgcatatgaagctgcagggcctggaatatgaagtactgcagtggtgcatatgtaggctggaggcatggttcgctactgacatggacaatatatctctgaaaacttgggatcaggaacatgtgcttaccggtggacatggtcttatggtgaatggctacgaccctgtcatcagagctctcgctcaaggtctcgatattcacctcaaccacagggtcacaaagatcatacaacgctataacaaggttattgtctgtgtggaagatggggcgagttttgtcgcagacgctgctatagtaaccgtccctctcggggtactcaaggcaaacatcatcaagtttgagcctgagctaccgaaagagaagctctcggcaatcgccgaccttggcgtcggtatcgagaacaagatagctctcaagttcgacactgtgttttggcccgacgttgaagtgataggtagggtggccccgacgtcaaacgcctgtggctactttctcaaccttaacaaagccacaggaaacccggtcctggtgtgcatggtggccggaaggttcgcgtacgagatcgagaagctgtcggacgaagagtccgtgaacttcgtcatgtcccagctcaggaacatgctgccgcaggcaactgacccggttcagtatctggtctcgcgctggggtagtgaccccaactcacttggctcctactcgtgcgacctggtggggaaaccagctgacctgtatgaaaggttctgcgctccggtgggcagcctgttcttcgccggggaggccgcctgcattgaccactccggatcggtgcacggagcttactcgtcaggcatcgctgccgcagaggactgccgaaggcgtctgtcggcgcagctaggcatctcggccggcctgttccaggtcgggaaggctgccatgagggaggagatgacggctgaagccatggtccccttccagatatccaggttaccttgtttgttggaatattcgatggtggatgctgtttttcgtcagtgtttgcttggttcgctgtatttcaaaagacaggccagcacgaacctcaaagaaccacgagccaagtccggcgggaacggtcgcacgcgcgaggccaggcttgactga

SEQ ID NO: 1890 - DNA, 546 bp, Zea mays
  Peptide Sequence Number=SeqID_43669
atggcggacgaccggggcaccagatggcggcagcgagggaaccagatgttggcggcgcgggaaccaaatggcggcggcgcgagcaccagtggtaggcggcgcggccaaaactggacaggagctgcggagtgcccacgagagctcgatctcaagttgctagctctgtacgcactggtcgaatccagtgagcatttcttcgcctctgactgtccctcgaaagtcgcctccgccggccaacgaaggcatacagatccctcgctacgcccgttgtggccgcgccagcagtcgtgtgtcacgccgggactgcaacacgccgcgctagaagcgccggagccttgccaggcccacgtccgtgtcaaagccgtgacacgtcagaggtcgtgcccgcgtgaacgctctggaggcacgctgcgcgccggcagcggcacccgtgccgaggagccctcacgaccattgctgcctccgtgccatgacccctactcccacgcatggataaaggggagcccggtcaaagtgctaccgaaaaaagtggatctgacgggttaa

SEQ ID NO: 1891 - DNA, 594 bp, Zea mays
  Peptide Sequence Number=SeqID_43670
atggcgccccgcacgctctatgatgacggcggctctcagcccccttacggaagcgagaagataggcagcgtggcccagcggctttacgtcaggcccatcccgcatgcttacgtcatgcaaagtaggccgcttgactgcaccagggtccgggtattccctgccccagaatcccgggacccggcggtgattagtctggaccccactcagaagggtccgggacccatctcggagccttacattgcgaagcgccaaaaccggacgacacggctgtgggccctgggtggaaattttgggaaccacggtcgcgtgctggcgaagtttcctggaagtcgcaggacgcggtcggagattgcaatcaaggaaagaaaaaccctctggtcccactcgccaacggcggcgctcatctcctcccccacggttctccccatcggcctgctggcttctccccggcttccccaactttctgggttctgggctgaggactggggcattaattcgtcgattgatactgatcctcatcactcatgtctgctgaagttgctggaggacacccttatttcctctcgtgctacttctggttcatatactgcataa

SEQ ID NO: 1892 - DNA, 408 bp, Zea mays
  Peptide Sequence Number=SeqID_43671
atgccgaagacggtggcccagggcctggcccccagggcgaggccgcgtgcccgcgagcaggagggagatctggagctgagcgaggccggaggggcagaggcggaccacggatggatctgggcgaggaggcggcgtgtcagaccaccggagaccggagggagctgcaacggctgtagggaggctagcgctctcgatctttcgtcgctcgtcgccactcggctcctgctttcgtatgcagcgtgtggagatatcgaagctgcatgttgggtgttcaacggaatgcccaccaagaacgccagcgtcttcaaggacatggcgccctcagccgatccaaggagtagcttctggaagatgctaccggtgagccagttcaaagcgagcctcaaggagacgagcgtctggtgctag

SEQ ID NO: 1893 - DNA, 322 bp, Zea mays
  Peptide Sequence Number=SeqID_43672
atgacgatgactactgcgccttctgcaagctcatccactcggccccataggagagtttgtgagggctgtggaatgtcgaaggtgaagaacaataatggttatcttggagtcactgagccaatctcgctgagttactcatcaaattctaagattggttccaaacattatggaaaattttggagtttccccattgttgtgcggttccacggctgtggcttcgtcaccgggagcaacactgtcgtggccaaagacgccttctgcaagaaggtcaccaagctctgcgatgtcattgtcttcatctgctcaaggtccatgttcaccg

SEQ ID NO: 1894 - DNA, 336 bp, Zea mays
  Peptide Sequence Number=SeqID_43673
atgggaggcggcaggacaaaggagcagcagcagcagcagaagctgaaagctgaccacctctctagagaccttgcagagcggctcacatatcatcagaaggaacatggcttgcaagggcattttgaagatgatagggcagtgttgcccattgctgacaacggcagggcagttgataaccgcatagttgcactggatacgttgcacaagagattggatcatgaacaaagatctcggcacgaggaaactcttggatatgattccagcagtatgtcgaaggcatgggagttactggctcgcgtggaccatgctgagaaagtgaccgcgtcgtgccggtaa

SEQ ID NO: 1895 - DNA, 540 bp, Zea mays
  Peptide Sequence Number=SeqID_43674
atggggatacccgtggtggttcccgtcgcggcggcctactcgtgctcctcctccctcgccgcgccaccgagggccgccgccgccgcggcgagggcgccgagccgcgcgcacgtcgcggcggccgggatgtcctccagggcgtcctccttcgtcgggggcagcggaggcgacctcgcggcggtggccgcgtcggtagccgcgcggcccaggagggcgggctccgggggaggcggcgcgctcgggtgcaagtgcctcttcgggctcggcgtgccggagctcgccgtcatcgccggcgtcgccgcgctcgtgttcgggcccaagcagctccccgagatcggccgcagcatcggcaagaccgtcaagagcttccagcagtgtgatgagtggtgtgggtacagggatgcggctaaggagtttgaaactgaactgaagaaagagcctggggaaggcggcgatcagcccccacctgcaactcccacagctgtaagtggcggggaggagaaggggcttgaggcatctagtagcaaggagagcgcgtga

SEQ ID NO: 1896 - DNA, 267 bp, Zea mays
  Peptide Sequence Number=SeqID_43675
gaggaacttgaagagctcgataaagcggataaggtatcatctgcgttgcaagaattgactgggctgttttacgtggccaggtttctaatagcaatggaaagaaaagctgaccctctacttcctgtatctgctggacctgtgaatcagtcctgggataggtggtttgaaggtcctcaagatctgcgcggatgcaaatgctgtataaccagtatccatttgaggcgaggattctggatggcatcatccaaagatccgtgtaaggcgtga

SEQ ID NO: 1897 - DNA, 312 bp, Zea mays
  Peptide Sequence Number=SeqID_43676
atggagaccaatgaatgtcagccactgtacattgatattcaagaattttatgagggtatgaacatgaaagtagagcaacaagctcccttgcttttggttgagcgacaagctttaaatgaagccatggaagcagagaaatctgtgcaccaccttcctgaaacaagaggcctctgcctatctgaggagcagattgtcagaactaaccatgtatttttagaaagttctccatataataaagacacttttctagtttggcagatgcgagtggaggatttgatgagatgcttgcctctacacagaggacatgagtga

SEQ ID NO: 1898 - DNA, 219 bp, Zea mays
  Peptide Sequence Number=SeqID_43677
atgaccgaggcgcaagcaggggcgatgttctacggcgacggcgacggcttcctcacattccgcttcaattccgacgatgctggagcttgcgattggttggataggttatgtaacctgttatatcggtcaagtttggtgttatcatcaaggataatgggtattggtgttgccataactagggacatagttgagataggtgtgggtacatgggataggtag

SEQ ID NO: 1899 - DNA, 450 bp, Zea mays
  Peptide Sequence Number=SeqID_43678
atggagaataattcaagagtcaaaggatatattgcggaagaatttaaacttaaggatgtagcacactttacaagttgttactttgctcaaaagaagaggatgctaccaaagacgaagaagctgacaatgaatgggttgttcaagggacccaggaggagcatcactatgagaagatgtagcacagcaccaggaggtgcatcactaggcatggaacttggtcgtgtagcaccaggtgtgggaccagtggcaacaggtgtagcaccaagaggtgtagcactaggcatgggactagtggctatggcagatgcgagtgggattgaactagatggaacatgttttgtggagtcgctcttcgttacccttatcctagaggaggcagtggccaaagctctaatcatccaattgttggtcccttggcatgagtaccattgtatgcttctttacatttaa

SEQ ID NO: 1900 - DNA, 294 bp, Zea mays
  Peptide Sequence Number=SeqID_43679
atgacgctcggcacgagtacggcggcaacacaagagtctccggcgcgggcaacgacggcgatgggcacgacagggaggcacagtgagctgggtctaaaggcgacgttagcgacaagagctgagctcggcaccgatggtgaagggcggagctccggtgaggtgctgcgcaacacaacgaagagcagcagcagcgcgctggcatgggagctgtgcgagaagcagggcgagagagcatggacgagcagctggggaaagggaggggttcgtggccgcggcgtggcttttataagctag

SEQ ID NO: 1901 - DNA, 324 bp, Zea mays
  Peptide Sequence Number=SeqID_43680
atggctctcgggccctcggccaaaggggtatccagtgatctaatcgtggtcgtcagtgtggatgcaatggtcaggggccatcttcaacctctcgactacgcccaggcggcgacgccgaccattgccaatgctcaggacgcggagcggtggtgggaggagagctcgaaaggcgcgaccgaggtgggggcggtgcgcggtggccgactggacggggccggagtggcgcagcgaggactgggccgaggaggacagcgacggggccaggggtggcggcgcggcgtgagcggcaaggcggcggcacgatgtggttgctggttcgggtga

SEQ ID NO: 1902 - DNA, 2103 bp, Zea mays
  Peptide Sequence Number=SeqID_43681
atggcccagctgttgcaccatcaggattctgggttctatgacaaggaattacatgggtgccgatggggaagtagacgccgaagccgctcctatgctccattgaaaaacgaagacagtgaaattttggatgatgacaaaaatactgaggttacaaaaaaacagaaggcctcccaaaaaaattctggcaaggctagtttgaggtccttgattctaaggaaattatatggaaaggaaggtcaggaagaaaagatgcttccagttgcaccaaagctactccgcactatttcggtatactatctggaaaataatgaatatgttcttgatggtgaatccacttcgagtggtgatggttcttcacatagtactaactcatcgatgcaaaatgctaccaatatgaatttgcaccatgctagatgtagcatcccagatggttgtggtagtgattccagttcttcacttcttttaaagacagacgacatctccatgaagcgaaagagccaccgtagcatttcaatggacggggttcttcacaaggtcccttatgggaagaaggtgtctggagatgtgatcagtgaaggtctcccccgatcagcctctgcgacgtatgatagggatggtgtgaaaccttactttggtactgctacaaagaggcatgtaaaccaaggttttcggcgttcacgttccctcagtgaatcttgggaaagttactcacgcttacttgattccatctcaagcaatgaatctaaaagagtactgacaagctctaagtctactagggttcattccccagatggccctagtgtgattgcttcactgcaaagaacttctgaagccttcaggtcccaaggtttggataaacgtgatgaaaatcttgtaactgcagaagatgcatcggcaccacattttgaagagaaaactgacgtcgatgtagatgtggaagttgctaagggtgagagctcaagcgatacggttcctggtggctctgagaatcctcctttacctgacgagtacgttgatcacaaaagtgaagaagacacatgcactgctccttcaccttcagaagctgttgatgtttcagaagaacagacagtaagttgtgatgataacaatcaggttccctcatctgaggtcaagctgtatggcgactgttcaacatcatcaggaattgacatcccagaagaacatgcagagatttatgacgataaccaaatccactcatcaacacaggctgattcatatacttctctatcttcaaagggcatcaccatttcagaagagcacacttcaacttctcatgaaaaccaaatgcacccattccagatttcaaaacccatagaaggtaccttttgtgctccttaccccggtggcgagtttgaagcagacataagtctaagctgtgaacaagaaactgaaagcccaatgtctattcttcacgtggccttctcagatgatcctgatagtccggtgaaacacaccccgctggatgatacgttgttgaacccaagaattctccatttagataatgctgatgcttcagctggcactgctgccatacaaaaaggcgattttgacggtctccaagtagatccaaggcatgaaattgagttcaaccatgtgaaggatatattcaagaagtcaagtttcagcaatgagatactgtttgatgaatggtgttcacagaacatcacagctctccaagaggtggattgccagcactacgaggccgccgcagcatcatttgacttcacggacatgtctgctgatcagctacttctgttcgacctgacaaacgaaggtctgctggacatctacaagaaatactctgtttccgagtccagattctcctggttctcctcttttgaccgaccaaaacctgtcggaaaccgtgtcctcaaggagctgtggtctggattgagctgtcatctggatgaacggccacggtccagcatcgaagtcgacacgattttgtcgaatgacctagtagccaggagcgacccctggacgactttttcgggagatgctgatcatgtggggaacaagttggtagactttgtatttgacaagcttctgactgagctcgttcttcagcttgcagagttttga

SEQ ID NO: 1903 - DNA, 483 bp, Zea mays
  Peptide Sequence Number=SeqID_43682
atgtcgtgctgcggaggcaactgtgggtgcggctccggctgcaagtgcggcaacggctgcggagggtgcagcaagatgtacccggacatggctgagcaggtgaccaccaccacccaggctctcatcatgggtgtcgcaccatccaaggggcacgccgagggcgggttcgaggcggccgccggagctgagaacggcgggtgcaagtgcggcggcaactgccagtgcgacccctgcaactgcggcaatcagttgcgtgccatggcatgctctgagtctgagatgatgatgatggctgatggcggcgtcgtgtcctcccctggcctcctggggcgcttctggcgagcacacgagcacgacccgaaaataagagcccaaagcacggctcggcatgaaataatttggaccgggctagcacggcctgaaggcgggcttgggacgggcctcaatttccggcccgtcaggcccccagcacggcccgcatag

SEQ ID NO: 1904 - DNA, 237 bp, Zea mays
  Peptide Sequence Number=SeqID_43683
atgccgccgcggcccggacgccgccgcgcccccacggccgccctcgccctcggccccgacgccgccgcgccccacggccgccctcgccctcggcctcaacgccgccgcgcctccacgctggttttggaaacctccccgtgcaggggagaggtcttcctagccgctgcgggtctgcctcgcgtcgccactgcaccgacccgccacagccccactagcctgactccaccgccaccctag

SEQ ID NO: 1905 - DNA, 147 bp, Zea mays
  Peptide Sequence Number=SeqID_43684
atggggcctctggggactgtggttttggggcgagaggaaaacatatttgttgagaacttgttagattttcttgatgttgaaaaaccgacaaatgatggtgtatctaaggaccataagacacaatccagtgctaatgtcgtatggtag

SEQ ID NO: 1906 - DNA, 1542 bp, Zea mays
  Peptide Sequence Number=SeqID_43685
atggcggctgttgtagacggagaagacgacccagttgtagacggagagcggcgggccaaccactggcagggttgtgaatttggaattgaatgggttcggatcggggcggatgaaggacagctctccgagaaaagctgcaatttcttctatccgtcggcagccctcctcaatctctacaactcggtcacgcggcacggcaagagcgtgtccgtccgtgggccctgccccgggatgatcgtcgggtcagccgccgagctgaacggaggtcgctcaccgttggggggccgttgggccgcccgcgctactccccaaccaactgcggccagatcacgctgcgcagcgcaggccctctttactcagctgtccatgctgctgctgctcagagtgtggggcgccgtggacacggtccacatcaagatgctgagccacataactccggtgggtgtgggtccaacgccccccacctgcacgctgccctcccccgccccgccgcgggatcaaatacgccgcctccgcccgtccactccctcgccgcccccgtctcctctcctctcctctcctctcccccgcatccacggccgcaggcagcaggcagccactcgacgatctagtcgtctctctccccgctctgccgcctcgctgccgcggcttcccgtcggcgggaggatgaaggtcacggtcgtgtcccggagcggccgggaggtcgtcaagggcggcatcgacctcaaggactcggccaaggtcgcggacctgcaggaggccatccatgccaggactaagaagtattatccttctaggcagcggctcaccctcccccttcaacctggaaaaggcgggaagccagttgtcctcagtccgaaggccagcctgctagaatactgcgagaagggttctgggtcactgacagtggtcttcaaagatttagggccacaggtctactacagcacactgttcttcttcgagtacctgggtcctctcatcatctaccccatgttctactatctgcccgtctacaagtacttcgggcacgagggggagcgggccatgcaccctgtccagacctacgcaatgtactactggtgcttccactacttcaagcggatcatggagacgttcttcgtgcaccgcttcagccacgcgacgtcgccgctctcgaacgtcttcaggaactgtgcctactactggaccttcggcgcttacattgcttactactgcaaccacccgctgtacaccccagtgagtgatctgcagatgaagattgggtttggttttggggtcgtctgccaggtcgcgaacttctactgccacatcctgctgcggaacctcaggagcccaagcggcagcggcgggtaccagatcccccgcggtttcttgttcaacatcgtgacctgcgccaattacaccaccgagatctaccagtgggtcggcttcaacatcgccacacagaccgtggcaggttacgtcttccttgtcgtggcggcgggcatcatgaccaactgggcgctcggcaagcacagccgtctgaagaaggcaagaacatag

SEQ ID NO: 1907 - DNA, 513 bp, Zea mays
  Peptide Sequence Number=SeqID_43686
atggcggcgggtgacgacgggtcggcggttcggcggctctacctctccgtgtacaactgggttagcttcttcggatggttgcaggtgctgtaccacgtgaccttggcgctgttgggtagcggccatcaggccgtctacgctgctgtcaaactgccactcctgttctcacaaactgctgccctagcagagacacagtcccatgtcctcgttacttccttggtcctaagctggtctatcactgaggtcatcagataccctttctttggcttgagggaggcatttgggatcacaccttcctggctcctatggctcaggtacagcacgttcactgtactctaccctgttgggctgatcagtgagctcggcttaatcttcactgccatgcctcacatgaagggaaggtccttctacatctgcgctgcactgaccactatctacattccaggtgaggtgcacctccctcgctctactcctgtcgccccttcagctgccgatcttcgtcatcgtctctga

SEQ ID NO: 1908 - DNA, 498 bp, Zea mays
  Peptide Sequence Number=SeqID_43687
atgaagattgtgagggttggtgaggtctccagtctctgcaactcttccacaaattggatccagattattcctcacgtgaggtgtcttgtggagttttcccgaggtctaaaagcatttgctagaactagagaacatgcagtagatggctatgtgactttcaggacgttaagattagtcaattattcaatttttaagtccgataatggaacccagtcacatcttcttgctactgccctgatcataagctggtctgtcactgagatcatcaggtactctttctttgcaatgaaggaggcatttggatctgcaccttcctggttatcatggctttgcagctttatgctgttctatcctacttgtatctctagtgaagttggtctgatctacatggctttgccttacatgaaggtaagcctttccctcctcgaccgccctcctttttttttcctgtttgcttcagtgccttataagaagaagggcacatacaaccttatttaa

SEQ ID NO: 1909 - DNA, 2775 bp, Zea mays
  Peptide Sequence Number=SeqID_43688
atgcccggcataccgagggatgtcgccgagcactcgctggatattcgggccggagcccgacccgtcaagcagcctttgcgccgattcgacgaggagaagcgcagagcgataggcgaggagatccacaagctaatggcagcagggttcatcaaagaggtattccatcccgaatggcttgccaaccctgtgcttgtgagaaagaaaggggggaaatggcggatgtgtgtagactacactggtctcaacaaagcatgtctgaaggttccctaccctctgcctcgcatcgatcaaatcgtggattccactgctgggtgcgaaaccctgtctttcctcgatgcctactcagggtatcaccaaatcaggatgaaagagtccgaccagctcgcgacttctttcatcacgccctttggcatgtactgctatgtcaccatgccgttcggtttgaggaatgtgggcgcgacgtaccagcggtgcatgaaccatgtgttcggcgaacacatcggtcgcacggtcgaggcctacgtcgatgacattgtagtcaagacaaggaaagcttccgacctcctctctgaccttgaagtgacattccgatgcctcaaagcgaaaggcgtcaagctcaatcccgagaagtgtgtcttcgcggtgccccggggcatgctcttggggttcatcgtctccgagcggggcatcgaagccaacccggagaagatcgcagccatcaccagcatggggcccatcaaggacttaaaaggtgtacagagggtcatgggatgtctcgcggccctgagccgcttcatctcacgcctcggcgaaagaggtctgcctctgtaccgcctcttaaggaagaccgagtgcttcgcttggacccctgagaccgaggaagctctcgggaacctgaaggcgctcctcacaaaggcacctatcttggtgcctccagctgatggagaagccctcttggtctacgtcaccgcgaccactcaggtggttagcgccgcgattgtggtcgagaggcaagaagaggggcatgcattgcccgttcagaggccagtttacttcgtcagcgaggtactctccgagaccaagatccgctacccacaagtccagaagctgctgtatgcagtgatcctgacgaggcggaagttgcgacactacttcgagtcgcatccggtaactgtggtgtcatccttccccctgggggagatcatccagtgccgagaggcctcgggcaggattgcaaagtgggcgatggaaatcatgggcgagacaatctcgttcacccctcggaaggccatcaagtcccaggtattggcggacttcgtagccgaatgggtcgacacccagctaccgacggctccgatccaaccggagctctggaccatgtttttcgacgggtcgctgatgaagacgggagccggcgcgggcctactcttcatctcgcccctcgggaaacacctacgctatgtgctacgcctccatttcccggcgtccaacaatgtggctgagtacgaggctctggtcaacgggttgcggatcgccatcgagctaggggtcaggcgcctcgacgtccgcggtgactcgcagctcgtcatcgaccaagtcatgaagaactcccactgccgcgacccaaagatggaggcctactgcgatgaggttcggcgcctggaagacaagttccacgggctcgagcttaaccacatcgctcggcgctacaacgagactacggacgagctggcaaaaatagcctcggggcgaacaacggttcccccaaacgtcttctcccgggatctgcatcaaccctccgtcaagatcgacgactcgcccgagcccgaggtaccctcggcacagcccgaggcaccctcagctcggcccgaggcgccctcagctcggcccgaggcgccctcggttcagcccgaggtaccctcggcctccgagggcgaggcactgcacgtcgaggaggagcggagcggggccacgcctgatcgaaattggcagaccccgtacctgcaatatctccgccaaggagagctacccctcgaccgagccgaggctcggcgggtagcgcgacgcgccaagtcgttcgtcttgctgggcgatgagaaggagctctaccaccgcagcccctcgggcatcctccagcgatgcatctccatcgccgaaggtcaggaactcctgcgagagatacactcgggggcttgcggccatcacgcagcgcctcgagcccttgtcgggaatgctttccggcaaggcttctactggccaacggcggtggctgacgccactagaattgtccgcacctgcgaagggtgccaattctatgcgaagcagacccacctgcccgctcaggctctgcagacgatacccatcacctggccctttgttgtgtggggtctggacctcgtcggccccttgcagaaggcgcccgggagctacacgcacctgctggtcgccatcgacaaattctccaagtgggtcgaggtccgacctctgaacagcatcaggtccgagcaggcggtgacgttcttcaccaacatcatccatcgcttcggggtcccgaactccatcatcaccgacaacggtacccagttcaccggcagaaaattcttggacttctgcgaggatcaccacatccgggtggactgggccgccgtggctcatcccatgtcgaatgggcaagtagagcgtgccaacggcatgattctacaagggctcaagcctcggatttacaacgacctcaacaagttcggcaaacgatggatgaaggaactccccttggtg

SEQ ID NO: 1910 - DNA, 1224 bp, Zea mays
  Peptide Sequence Number=SeqID_43689
atgggagccgcaagccgcctggtgacatacgtgcctttgggctttggcctacgatcttgcaatataaaagctactgagctgaggccccgcttcactcaacactcaagcagtcaagtagaacctccagctccccagcccccaggtggtcaagactcaagagacagagagagcatggccgctgctcccatggtggtgccgcgcgtgaagctgggctcccaggggctggaggtctcggcgcagggcctcggctgcatgggcatgtccgcctactacggccctcccaagccggagccggacatgatcgcgctcatccaccacgccgtcgccgccggcgtcaccctcctcgacacctccgacgtgtacggcccccacaccaacgagctcctcctcggcagggcgctccgggcggcaggcggggtgcgggagaaggtgcagctggcgaccaagttcggcatacgcgcggacgccgacgacggcgcctgggagatccgcggcgatcccgcgtacgtgcgcgcggcgtgcgagggcagcctccagcgcctcggcgtcggctgcatcgacctctactaccagcaccgcatcgacaacagggtgcccatcgaggtcacggtaggtgaactgaagaaattagttgcggagggcaagatcaaatacatcggcctgtccgaggcgtcggcgtcgacgatcaggagagcgcacgcagttcacccaatctccgctgtccagctggagtggtcgctctggtcaagggatgttgaagctgacataatcccgacctgcagggagcttggcattgggatagtagcctacagtccactgggcagagggttcttgtcgagtggtcctacgatggtcgacaagttgtccgatcaagatttccgcaaggagctgcccagattccagccggagaacctggagaagaacgccgtgatattcgagagagtcaacgcgatggcggcgaggaaggggtgcacgccgtcgcagctggcgttggcctgggtacaccaccagggagccgacgtgtgccccatacccgggacgacgaaggtcgagaacttcaacagcaacgtggcggcgctttcggtggagctcacgcctcaggacatggctgagctcgagtcttacgcgtcggcgggcgtccagggcgatcgctaccatgacttcctcaacacttggaaggattcagagacacctcccctgtcgtcctggaaggctgatgaataa

SEQ ID NO: 1911 - DNA, 657 bp, Zea mays
  Peptide Sequence Number=SeqID_43690
atgggttgctatttcaccaaggacaatttgatcaaacgctccgggcaaactttggtcggtattggattcggattgacaatagttaaccccgtggcgaacagaacgagaaacgctgattgcttcgataacaaaataattaaagattatatgcatggcgtgttctttcatcaccgggcaagtctgcaaatggaaggcatgaaacagcaactgatcgaaatggggaagaagacatcattagtctttgttaaccctgctacacaggaaactactgtgttggcatcagacgacacaacgatggcaaaggagctggaagcagatgttcaagagtgttcgaaggagaagaacgaagtgcggctgcatcggcagaagcacgacaatgtccgagttactggtccagggtgggccatgcttctagagggtgctaacagtcttccacaagatgatcgccagatgaatatgacccagccaaatgtcagcaatatgtcaagggagacgccagaagaggcagccgacgaggaagagacggcgctgtccagcaaggagcagcagcggcagaccaagaaaggtgaaagccaacctgacttgcctgaagaccatgaagtggtgcagcaacatgaagaacaggagggcgacggcgacagaaaaccaaagccgtaa

SEQ ID NO: 1912 - DNA, 819 bp, Zea mays
  Peptide Sequence Number=SeqID_43691
atgtgtaggttgagggctaacctcgatgagacacggcttgccttggaggtcagaaacagttctcttgagaaactgcaacaatcagtgcttgagaaagagcagttgctagataaagtccaaggatcccttcaatctgctgaaaataaggggatggcaataatttcagagctcactgctaagcatcagaagcaaatagaaagcttgcaggcgcagctagctgaagtttctgcagaaaggacgaaggcatctgaaaccatacaatctctacaggtggtattaacggagaaagactcagaaatagctgaaattgaagcagcatcaacaggtgaagctgcccggcttagagctgctctggaggagatgaaaggggagcttgttcatctaaaggatgaacatgaaaaagaaaggcaaagctgggagtctacttgtgaatctcttaggtcaaagctggaagcatcagaaaatgcatgccttagatctgaaaaagaatccgccgaagttaaaagtcaactggaattagagttgtcaacacgaagtcaattgttacaaaccaaagattctgatctaatggctgcaaaacatgagattagtcgactggaaagtgaattttctgcatacaaggtccgggcacatgcacttctgcaaaaaaaggatgctgagcttaccgcagctaaaagttcagatttcattaaagaacatgaagaggccataagggaagctgaaaaggaggtggcagctgctttagcagaaagagataaagcaatagatgatctccaaaaggcagaatccagacatggtgatgagattgaggcaaggtag

SEQ ID NO: 1913 - DNA, 528 bp, Zea mays
  Peptide Sequence Number=SeqID_43692
atggatcccgaggacaccaccccaccggcgccgagccaaggtgatgcggagacaactccgccgccggtgttggaagtggcggcgggggaggacagcctagctagcgggggcgaggcggccgagcgggcccacgaggaggaggagctcgcgcgggaggtcatggagctcggcctccagaacgagtaccttaggtcccagattgctggcgtccgcccggcgggtgacgcggacgaggtccccgggcttgtgaggggctggaaggagcaggtggagaggatgagcagggaggtgcaggaacagcggctgacgcgggaggccacggagaaggccctggagcacgtcaacgtggcctatgctgaggctgacggcaaggtgcaggagcttacggccaagctggcacaagtttgccacattgcgagtaagagcctgtccttgcgtgttgtcagcgaaaagccaaaaacccaactaacaaccgaatttttccctgcatttatcggcaagggcgcaacttcattgcatgtcagttaa

SEQ ID NO: 1914 - DNA, 1021 bp, Zea mays
  Peptide Sequence Number=SeqID_43693
aaggacagcgccgcctgcgccactccgactgcagtgccactcgacagagtgagtctgacaggcaatcaggccttgccaaaggcgccacggcgaactccgctccgcccgaccccagggctcggactcgggctaagacccgaaagacggcgaactccgctccgcccgaccccagggctcggactcgggctaagacccggaagacggcgaactccgctccgcccgaccccagggctcggactcgggctaaaacccggaagacggcgaactccgctccgcccgaccccagggctcggactcgggctaagacccggaagacggcgaactccgctccgcccgaccccagggctcggactcgggctaagacccggaagacgacgaaactccgcctcgcccgaccccagggctcggactccgccctggcctcggccgaacgacttccgcctcgcccgaccccttggctcgggctcggccacggcaacagaaggcagactcaacctcggcttcggaggaaaccccacgtcgccctgcctagagcacagaccgccacgtcaacaggagacgccatcatcatcccaccccgaatcgactcgggacaacgtcagcagggactcgaccgctccaacagctgtccctccatcaggctccgccgcacctccgacagccacgacatcacgccagcagggtgcccagatctctccggctgccacattggcatggccttctcagagaaggttggccgcgcgggaccgaggacgggacaggcgctctcttggggccgctcgcttccctcacccgcgtggacgcttgtaacccccctactgcaagcgcacctgacctgggcgcgggacgaacacgaaggccgcgggacttccacctctctcacgctcggctccggccgcctcgccttccccccttcgcgctcgcccacgcgctcgacccatctgggctggggcacgcagcgacattcactcgtcggcttagggaccccccggtctcgaaacgccgacagttggcgcgccag

SEQ ID NO: 1915 - DNA, 420 bp, Zea mays
  Peptide Sequence Number=SeqID_43694
atgagttatcgttgccgaactgtgaccgagatgcaggttgagggcatgcagcgacaccggatgacatgggacctgttgattcttgccgaattgcatttatggcggtgtttagcgaggaccttcgacgacccctttgtggctgttgcgccttcctttgatccatgtgttgagttcgagatcgctggagcagggaacgccgactggttgcagcagggcacggtgacgagatgccaatcctgtgcgggcggggctctagctgaagaaaacgggagggatcaggttgtgcgtctccgactgcaagctgggaggacgggcggggcggacgggagcacctgtgcgccggcgactgcggatcacagttgtcgatggcccatcgacgaaggagacgaagattcacggagggtttggcggttgagatag

SEQ ID NO: 1916 - DNA, 1536 bp, Zea mays
  Peptide Sequence Number=SeqID_43695
atggctaaaccagaggggccaaccattggcgtgaagctgttcgtggacaaagagaagaagaaggtgctctttgctgagtccgacaaggagttcgtcgacgtgctcttcagcttcctcaccatgccgctcggcaccattgtccgcctgctggacaagcagtctcagatggggtgtctcgaccagctgtacaagagcgtggaggacctcaacttggagtacttccaaaccagtgcttgcaaggcgatgcttctgaaaccgctcaacgcggcttccggccactgccgtcgcctcaagatcaacgtcgatggaagcgttccaagggtggtctatgtctgcaaggacacgtcgtgcagcgcactcagcgacaacgcgttcagttcgttccctggcacggtctgcaaatgtggaaaggtcatggagtccattggacagtgcccaaaatacgatggtgacactgaaaccgccgccgccgccgcttgttcagaggatggagtttttgtgaaaggttgcttgaaatttatcgtcacccatgatctccaggttgcgccagcaactacctctcttatgatgtctctcttcgagaaatttggtgtgcttgatccagctgtcctagagcagcaggttctgcagttcagttcagaaaagataacatgcttgctgaagagattgttgacgtccaagcaacctctcactgatcattatttcgaagctcctgttccacaagatgatgcaagcctagaagcgcttgttcagaacttacatcctaaacaagaaagcgaggaccaggaaatgccaggtaacctgaagatcagggtccttcagacgaaggacgattccgccctgttgtatgctgaagttggtgttgattttgtggactctctcttcagcttattaagcattccactgggatccgcaattaagttatatggccagtgctcggcaaaaggctgcctcggtaatgtttacaggagcatagatggtagtgtccaagaattcgtcagagaggagtgccagagtcttcttctggacccaaagttgccacccttctttggttgctgcgcttctaagatccttcaggtcgacgaattagctccaagagaactgacgatcaaagcctgctttgtttgcttcaagagtctagggttttcaggttgtagcctttgtcacggttactacaacagtaactatgtttttgtgaagtgcggaaatatggtgaagtccattaaactttgtgaggcgaatccaaaacaaaaaggtggatgcgagaaaggcgaagtatatgtaagccggaaggcgaatttcctggttactgatgacctgcgtgttcttccactctcattagcatccactgttaagattgttagtgattccaaaatccagacctcgaatcttgtggtcaaagaaatcacattaacaaagtccaaggttatggagctacagagggctgtcctgctgctgagtcgcaacatactcagctccgtgcttctgcatcctaagaagaacaagaagctgcaccattaccatcgcatgtattag

SEQ ID NO: 1917 - DNA, 2757 bp, Zea mays
  Peptide Sequence Number=SeqID_43696
atggcttcgagttcgacgtgtgttcttaagaagaactaccgctgcgaccgctccctgcagcagttttacactggtgggccctttgcggtcgggcttgcccccggcggcgatggcgagggcggcgccgaggctgaggccttcctcgcatgcgcctgcggtggagaggtgcgcgtggtgtcctccgcggacgcctctgccataggggagcccgtcgacggcgactcggaggccatcaccgcgctggcgctgtcccccgactcacggctcctctttgccgcggggcacagcaggcttattagggcctgggacctcgcgtcccgagcttgcatacgcagctggaagggacatgatggtcctatcatggccatggcatgccatgtttctggtggtttgcttgcaactgccggagcagacaagaaggtctgcgtatgggatgtggatggtggattttgcacccatttccttagaggccatacaggggttgtgacatccgttatgttccacaaagatccaaagcgccttctgttgttttcaggaagtgaagatggcaccgtgcgagtgtggaaccttgaaactaaaaaatgtgttgctgtgcttaaagagcatttttcagcagttacttcattggcattgtctgatgatggacaaacattgctgagcgctgggagggataagattgttaccgcgtgggatattcgtaaatacagctcaaagaagacaataccgacatatgaaatgatagaagctgtttccttcattggaccaggaagtgagtttttggcttgtttgggcatagaactggcaaacaaaaaggagaaagatactgcttatttccttacagttggtgaacgtggggtcgtgcgcatctggtgcttggagagttgtctttgcgtatttgagcagcaaacatctgatgtaactgttaactcagagaacaaggaaacaaggaggggctttacatctgctgttatgttgccaaatgaacaaggattgctatgtgttactgctgatcagcagtttttgttctattgtcccaaaaggactgatgatgggacctttgaactgtccctatatagacgactaataggttataatgatgagattcttgacttaaagtttattggggaggaggaacaatatcttgctgtagctaccaacttggagcaggtccgtgtttatgatgttgcgtcaatgtcatgttcttatgtgcttgctggccacaccgaaataattgtttgcattgacacatgtgtctctgcttccgggaagacacttgttgtaactgggagcaaggataacactgtgaggttatgggatgctgaaagaaaaagctgtattggcattggcaaaggccatctgggagctgttggttctgttgccttctcgaagaaaacaaaggacttttttgttagtggcagcagcgatcgaaccatcaaggtatggacctgggacaacacacttggtgatgctgaggatgaagtccctcttaaagcaaaggctgttgtagctgcacatgataaagatattaattatctgacagtttcacctaatgatggtcttgtttgcagtggttctgaggaccggactgcttgcatatggaaactccctaatctagtgttctctgttgcccttaaggggcacaaaagaggaatctggtcagttgagttttctcctgttgaacaatgtgtcatgacatcctcgggtgatagaacaatcaaaatatggtccgttgctgatggctcttgtttgaagacatttgagggtcatacatcaagtgttctgcgagcgtctttcctttcacgtggaactcaagttgtttcttgtggaagtgatggtctagtgaagctatggacaattaagacaaatgaatgcattgctacttatgataagcatgatgggaaggtctgggcattggctgttggcaggaaaactgaaatggttgctactggtggaaccgatgctgtcctcaatctgtggcatgattgcaccatggaagataagcaggaagatttccgtaagaaggcaagtgaaactttctgtgacactttagtatttataattgcaagcaagatgcttgcttttggaaaaactgtgaaatacctgacgttagaccttgagcaagaagttttaagaggccaggaattggaaaatgctgtgtcagattctgactatgcaaaggcaatacaacttgcatttgagcttagaagaccacacaagcttctagatttattctcacagcttgccaggcgagctgacgcagaggatccaatagaaaaggctcttcttggtcttccaaaggatggccttcgtgtgcttctagagtacgcccgtgaatggaatacgaagcccaagttctgtcatgttgcgcagtttgtgctttttcgggtattgaggagtttctctcccactgatatcctggagataaagggcatcagtgagctcctcgagggccttattccgtattcgcagaggcatttcagcagagtggacagactagtccgaagcacgtttctgttggactatacgctgacgcgaatgtccgtggtagacccagatgtggatgcggggtcaatcaaagacgaaatgaatggttcgtctgtggagaacggtgaacttgcagagcctcggcctgcttcacctgtgccagagaagtcaagcaagaagagaaaatctggcaaatcaagtaaaaagggaaaggagaaggtgatgaagcttgcctcgagtggacttggcaagggtgtttctgttgaagcctga

SEQ ID NO: 1918 - DNA, 894 bp, Zea mays
  Peptide Sequence Number=SeqID_43697
atggggaggtccccgtgctgctgccacgacgccggcgtgaagaagggcccatggacggaggaggaggaccgcaccctggtggagcacatcaaaaggcacggcgggcacgtcagcagctggcgcgacctgcccaaggccgccgggctgaaccgctgcgggaagagctgccgcctccggtggtcgacgatcgcgacgcacctggacgggcggacggacaacgagatcaagaactactggaatacacacatcagaaagaagctggtgcgcatgggcatcgaccccgtcacgcaccaacgtctgcccccggaagacattatcgcctcccctatggcgatcctctcggcggcggcgagcctgggaggcctccacagcgctctgatgcaggtgcaggcgctgcagcttctgctgcaggccgtcaataacgacggaggaagaagcgctgctgccggtggtctcatcatgcctgacatcctcaacgcggccgcagataacgccatccttattaataacgcgagtcgtagtagcgtcgtcccgagcttacaggaccagacgaacctccccgccgcgtctcacgcgaactactacggttcacctgatcaccatctcagcagcaacatcgcgagctttgcagatcagcagcacgacgacgcttcggctccggtggtcggctgcgcgtacgcggagccgctggctgctgcattggtgtctgccgcttatccgcaggaagtggcagccgcagctgaggggtggccggtgcagggtttcgccgagcttctgtcggggcccatcgagatgcaggtgcagacgaaggcgaggacgtgctccctcgaggaggacgaccaagatgatttctggaaggacatgctgctagagagcagcaggttgccgctatga

SEQ ID NO: 1919 - DNA, 855 bp, Zea mays
  Peptide Sequence Number=SeqID_43698
atgcagcacccggcagctggctgctcgtcttggtccaacggcaagcctggcggcatcttcgacaccgccgaggagcgctcccaggagggagcagtagagacaagatatctgaatgctagcattcgggagcttggtgatcattttcagacaaaacgtgatggtgaaaatggtgttgatgcatcaattgaaaagagaacacctaagctacttcagtttacttttcaagagttgaaatctgccacgcttaacttcaggccaggcaatattcttggggagggtgggttcggttatgtattcaatgggtggattgagccaaacagcactgctcctgcaaaacctggcacaggggttactgtggcagtaaaaagtttgaagccagatgcgcttcaaggtcatagagaatgggtgttgcatcataaacaccttgttaagttgattggatattgtattgaggatgatcaaaggttacttgtatatgaattcatggcacggggaagtcttgaaaatcatcttttcagaagggctcttcccctaccttggtccaacaggatgaagattgttctaggtgccgcgaaaggagtagccttcctccatggaggtcccaaacctgttatttacagggattttaagacatcgaatgttcttcttgatgtggagtacaacgcaaaactatccgatttcagtttagcaaaagctggtcctcagggtgataaaactcatgtatatactcgggttgttggcacctatggttatgctgcaccagagtatgtaatgacagatgcgttttttttgggaccaagccctatgggcaacaatggagatgaccagcgtcttggtttatcaagaggaagttaa

SEQ ID NO: 1920 - DNA, 510 bp, Zea mays
  Peptide Sequence Number=SeqID_43699
atgcgcaacgccggcgccacgctgcgcgtgtcactgaggtccgagtccgacgaagtggcggctgctaggttttaccggaaccggagtatcgagcggcgagcagagatacaaccatgtcacgggttcgcgccttcatcggaatccgcagacggtagggttgggaggtctgccatccacggcgcggtactgggtggcggatccacggcgtggtacagacgaccttccattgcggcaatgggattcgagggtgggggatccgcgctgttgaaggaagccacgaggatggaagggagcgcgggattcgtgggtggggatccacgaggatggaagcgagcgttggggatccgcgccgtcaaagctcaaaatggaaggagagggcggcaggatgagggcggaggatggaaggagcgcgggagggcggcgggatgcggggcgaggtccggccgcgggcgggatgcgggctgcgcgcggcagaacgtgcaccatgggaggtgtggacgcctacattag

SEQ ID NO: 1921 - DNA, 1896 bp, Zea mays
  Peptide Sequence Number=SeqID_43700
atgcctcggaagtcgcacaaggcgaggggcgcggccgcgcacgccgccgttggtctcacggccgggccgaggcctcccctgaaggccacggccccaaaccctagcgccgccgccgagcttccccaggtcgtcgttgccgaggcagagggcctcaaggtacctgacgccggggcgtccgccgccgctgacgccctggagcgcctccacgtcgcccctgctcccgacggtgatccgccgcctcccgagcccgtgcacgagcccgccgcgccgcctcagcccccgccggccgaggcgtcgtcttctgggaggtctgcggcgggcgggagttgggaggaggaggctgtaaggaagctgcgggagctggcggaggttagtcgggatgagacggagttgaccgaggaggaggtgcgcgccaatgatcagaggcaggaggacgagatctgtgccctcgaagcaatttttggagatgctgtagtgattttggacagaaagggaggccagcggtctttccaggttcttgtgcatattgaggttccagattatatagatgtatcaacaaagctcagttatggtgatggaacattaaattatgcggcaacacatgatgatgatgaccttttctacaagttcagagttgagcatttgcctccgatcctgctaacatgtctcctgcctacatcatacccaagtcaccgtcctccctttttcactatatccacatattggcttgataaaggcatgatttcaccattatgtcgcatgcttgacatgctttgggaagagcaacaagggatggaagtaacatatcaatgggtgcaatggctccagagttgttccctttctcacttagggtttactaatgaagtagttttgagaaagagttatgtaacatgttatgcagatggtgaagataagcgtgcttgtccagattatgcttcaccagatgttataattccaaggatgatgagatacaatgacaataagcatcatgaagctttcttacatgctatccatgattgcatgatttgtttaagcgagtgtcctggtgttgatttcatcaaacttccgtgtcaccatttcttttgctggaaatgcatgcaaacttactgcaaaatgaatgtcaaggaaggaaatgtagtgaagttgctatgtcctgatacaaaatgtgaaggtgctgttcctccgaatgtattgaaaaggctgcttggagaggatgaatatgaacgttgggagggattattgcttcagaaaacccttgatgccatgaaagatgttgtctactgtccaagatgtcaaactgcttgcttggaggacgtaggtaatgaagcaaaacgccaagaatctgggaatgtgcaaggagatcagatgaaagttctacaggaactacgcagcctgaaggaaattatgaaggattcaaaacagtgcccaaaatgcaggatggccatatctaagacagaaggatgcaataagatgcattgtgagaactgtggggagtacttctgctatcaatgcaaccgtgcgatcactggatatgagcatttcaggggttcgtgtgtgcttttccctcaagaggaattggacagatgggaaatgcaaatgaatcaaagggtcggacgccaaattgttgcacatgctcatgctgcaatacatgggcagaatggtcaagctcatccttgccctacatgtcggcaaccgtctccaaagaaccaaacaaatgccttggcattacctcttatgtatttgcttggtaacttcggcagatcggaaacaacaaccacctcttctgttgggcatgccagaagcatttttgtgccctgtgccataaggctgtccaaaagcccgcacagcattatggccccaaaggatgcaagcaacatacggcagatccctgaatga

SEQ ID NO: 1922 - DNA, 471 bp, Zea mays
  Peptide Sequence Number=SeqID_43701
atgaagatgacctgcggcagaacgtcccccgtcgttgctgccgtcctggtggcgctcgccgtcgtcgccgcggccgtcggcccggcgccgaagcggagaggccaggagatccacctgttcgaggccacggtccgcttcccggacgacggcgtggacgagctcgactacaactaccgcctgctcgccaaagtgctcggcaggtcgcatgcatggctcatggacctctccattctccattctcctccaagactcaagcaactttatctccctgttttttaccctgtgttttttttgctggacgacctcagcgtcgaagcagcgcggagagcaacgtacgacagtgagctcggggtattcagcgcgctcatcaccaacaaccagggccgtcggctgtcaaaagtaccaggcgtgctgaaggtcacacgactggaggaccctccttcgcttccggagacggacggccatctctga

SEQ ID NO: 1923 - DNA, 507 bp, Zea mays
  Peptide Sequence Number=SeqID_43702
atgacaaacaagcatatgttagaggaaaatgttttgaaccaggttgagatgatgctaagaggtgttgtgaatgctagagctcctcattcttattctgcttggaatcttcctccggtgccagtgactgccccggtcgtggtgaaccttgatgataatcagttgggtgctggtctagaggatgtcgtggaaggtgggggtggtgtgaggacaggtaggtatgtggtggaggaaggtgatgatgaagaggaagaagaagtgctccccttggtttggcatgagcagcgatccaaggcttgtagtaacacctcaaaccttgctgccgtggagatgatgaacatccgaggtttgactatgtctgttgtcgatggtgtgctagaggacaacattcctgaggaccttctgcttgaattgcttgaaaccagagttgtcgacgtccgtacaaaatgcctagttgaagtatcttctgctagcttgctggctgaaccagaggtaagcttgccagtctag

SEQ ID NO: 1924 - DNA, 774 bp, Zea mays
  Peptide Sequence Number=SeqID_43703
atgaaatctcagatatccttgtggacgctatttgtattgcatagttttaattcgccgaggaaggacgaggagggggaggaggtggtgcgaagggagaaggaggagaaggcggtcaccgtcgcttctgatgagaagccagaacattcgccgaaatctggtctcttcgttgacctgtaccttgggattggtcttgcaggattacaaggaagcagcgaagttgagggactcgctgaggtccttcgaggagaaggagcccatgttgtgcctcgcaggttgatgaagaaggccattgaggaggagaggtttgaggatgctgctaaatacagagatgaattaaagattttggctccacactccctcctcaaatgttctagcgatgcaactactttggggataagagttcaagtcaggagcgtctatattgaaagccggagccaaccattgaaagggcaattcttttttgcttatagaattagaattacgaatagttctcagcgccctgttcagcttctcaaaaggcactggattgttacagatggaaatggaaggacagaaaacatttggggagttggagtagtgggagaacaacctgtcatattcccgaagactggttttgagtactcttctgcatgcccattgagcactccaaatgggagaatggaaggtgactttgagatgaagcacatcgacaaggctggatcatcaacattcaatgttgcatttgcgccattctctctgtcaattcttggtgacgataatgatgttctgctatga

SEQ ID NO: 1925 - DNA, 162 bp, Zea mays
  Peptide Sequence Number=SeqID_43704
atgcccctagagaggtacttggagatatggatgtacaacatccgctttgcaaaggaagacatgttgaaagctaccaacgagatcctccaggaaaagtttaaatctcagggcttgtttgcagaagggggttgtgagctaaaatcccttactattcaaaattga

SEQ ID NO: 1926 - DNA, 432 bp, Zea mays
  Peptide Sequence Number=SeqID_43705
atggagtacagacatgtagcaatgtctaaccaaattttcatgtgcaccctaaatcatgtatgtctctatgccttggcctcacatagcaccttcttgtctcacaggatgaacgtgagcactggtgctgctcgtccgaatcctcaaggatcatttcactatggatctatcaatgtgagccaagtttacaagatgaggaatgaaccacctgttatcatcaatgggaagaaacagactacactgagtggtatctcttattccccacccgacactcctctgaggttggcagatctgtacgacaagaaagatgtctacacactcgacttccctacaatgccaattgatggaccgctagtgatcagaacatctgtcattaactccacatacaagaactttttggaaattgtatttcagaacaatgattcaactgtctag

SEQ ID NO: 1927 - DNA, 535 bp, Zea mays
  Peptide Sequence Number=SeqID_43706
atgattggaagcaagggtggcaaaggtaagcatggtcggatggatcaatacgggaagcgaaagcgtcctatgactcccccttcggaggacttcagtgactccaagttctcggaggagtggttctccttcgagggcgaggagtccccacctctggcaaggctcgaggggtcagacgactcaaaggaggaggactcctcggaagacttcgaggaggagggcggtggcggcgacgatgggagcgactacgatggcgacaacgacggcaatggcggcggtaggggcagtggcggcacaagtggtggtgatgatagtggctatgacgacatcaatgagggcggcaacaacaagggtggaggtggcggcagcggcaacgtcggtggcggggcaccaccgatgaagaagaagcaggggaacattgtgcctgttattcccccatcgatcccaatagtcaactccccttctacggggatcaccgttcccacggaggatacccatgactctatagtcttcgtccctttcctgatccgtggtctag

SEQ ID NO: 1928 - DNA, 485 bp, Zea mays
  Peptide Sequence Number=SeqID_43707
ggacttttcgccagccagccgccgcgccgccttgttcgccccccaccgccatagccgacaccgcccggcgccctcccaccgcgccactgccgcccgcgacgccccggccgcgccgccccgccaccggcctacccgcccgcgccgccccgccaccggacggccacggccgcgccgcgccgcccccggacggccacgcccgccccgccccgccaccggacggccacgcccgcgccgcgccgcccccggacggccacgcccgagccgcccctgcccgcgccggcccggcccgcaagctccaccgcgccgcccaagaagcgccgccgccaacgcccgtcccacggccgcgccccgttccggccaaccccgcgaagcccagttccctcccggcgcccgcccccggccgtcgacacactgccccgctcctcgcccgcatcgtcgtcgtccatccccgaccccgaccgtcaagttattgcgataaatgctaa

SEQ ID NO: 1929 - DNA, 465 bp, Zea mays
  Peptide Sequence Number=SeqID_43708
atggaagcctactgcgatgaggttcggcgcctggaggacaagttctacgggcttgagctcaaccacatcgctcgacgatacaacgagactgcggacgagatggctaagatagcctcggggtggacaacggttcctccggacgtcttctcccgagacctacatcaaccctcagtcaagaccgacgacacgcccgagcccgagaagaaggcacccgagggctacacgcacctgctagtcgctatcgacaaattctccaagtggattgaggttcgacccctaaacagcatcaggtccgaacaggcggtggcgttcttcaccaacatcatccatcgcttcgtggtcccgatcttcatcatcactaacaatggcacccagttcactggcagaaagttcctggacttctgcgaggaccaccacatccgggtggactgggtcgccgtagcccaccccatgatgaatgggtag

SEQ ID NO: 1930 - DNA, 1098 bp, Zea mays
  Peptide Sequence Number=SeqID_43709
atgtttgggatccaaaccagggatgtggcagaagatttcaactcctggaggaggacattaaggaacacacccaccgtctcaatgcccatgaacaaccacaacattatgtacaacacaggcaagagtttgttcaatgtacacctcatgtctgtcaagtttgaagacctgtatggattcatggtggagggcaatgtggacgatgtcaatgtgctgaatgaggtgcgggagaggatcagggagcaaggcagggtgtggtgggcgctggaggcaagcaagggtgcaaattggtatctccaaccaaagatttcttcaaacgagggggtgatcagtgtcacatcactcaagttgtcagtgctcactaatacaattacattgaggaggttgatcaggaaaggtgtccccccggtgttgaggccaaagatctggttatctgtgtcaggagcagccaagaagcggtcaacggtgccagaaacatactatgatgagctaattcgtgctacggaggggaaaaccacaccagccacaaggcaaatcgatcatgatcttcctcgcactttcccttgtcatccttggttgaacagtgacaaaggtcaggcatctctgcggcgagtacttgtggggtactcattccgtgattcagaagttgggtactgccagacagaggaggatgcattttggatgcttgctgtactccttgagaatgtacttgtcagtgattgctatactgacactctttctggatgtcatgtcgagcagagggtgttcaaagatctcctggctaagaagtgtccaaggattgctgctcaccttgaagcaatggggtttgatgtttcacttgttgctacagaatggtttttgtgcctcttctcaaagagcctgccttcagagacaacacttcgggtatgggatatattattcaatgaaggagccaatgttttgttccgtgttgctctcgcaattttcaagttcgcgtttgacaagattggttcaatgccaacaaatacaatcacaaaggaaaggaaaaagcaggagactgttgtcctggctgagcttgatcaaagaacaagacggctgagttcactcaagatggatggatag

SEQ ID NO: 1931 - DNA, 327 bp, Zea mays
  Peptide Sequence Number=SeqID_43710
atggcgcactacgcagcagcgtgcaagcaggggaatggagcttgggcgccgagaggagtagccacggccatggaggcccttgctgctggggtacaagaaagggggggtgccgagccaatatgggagcagggcgttgtgcagggggcgcggccacaggtaaaaggggatgcccgagcctgcagggggcgccatgggaaagctcggcctcggccatgggaaagaaggggaaaggaggaaggggagccagctgccctgcgtggaagaggaatagggagggcgccgggcagaggagatgggagcagggagctcggtggccaccatggctag

SEQ ID NO: 1932 - DNA, 1227 bp, Zea mays
  Peptide Sequence Number=SeqID_43711
atgtttttcgacgggtcgctaatgaagacaggggcgggcctgggcctgctcttcatctcgcccctcgggaagcacctccgctacgtgctgcgcctccatttcccggcgtccaacaacgtggctgagtatgaggctctagtcaacgggttacgcatcgccatcgagctaggggtccgacgcctcgacgctcgcagtgactcgcagcttgtcatcgaccaagtcatgaagaactcccactactgcaaccttaagatggaagcctactgcgacgaggttcgacgcctggaagacaagttctacgggcttgagcagaccccgtacctgcaatatctccaccgaggggagctacccctcgacagagccgaagctcggcgactggcgcggcgcgccaagtcattcgtcttgctgggtgacgggaaggagctctaccaccgtagcccctccggcatcctccagcgatgcatatccatcgccgaaggccaggagctcttacaagaaatacactcgggggcttgcggtcaccacgcagcgcctcgagcccttgttggaaacactttccgacaaggtttctactggtcgaccgcggtggccgacgccactagaattgtccgcacctgccaagggtgtcagttctacgcaaggcagacgcacctacccactcaggctctgcaaacaatacccatcacctggctgtttgctatgtggggtctggacctcgtcggtcccttgcagaaggcacccgggggctacacgcacctgctggtcgccatcgacaaattctccaagtggatcaaggtccaacccctaaacagcatcaggtccgaacaagcggtggcgttcttcaccaacatcatccatcgctttggggtcccgaactccatcatcaccgacaatggcacccagttcaccgacagaaagttcctggacttctgcgaggatcaccacatctgggtggattgggccgccgtggctcaccccatgacgaatgggcacgtagagcatgccaacggcatgattctgcaaggactcaagccgaggatctacaacgacctccacaagtttggcaggcgatggatgaaggaactccccttggtggtctggagcctgaggatgacgccaagtcaagccacgggtttcacgccgttctttctagtctacggggtcgagaccatcttgcccacagacttagaatacgattccccaaggatgagggcctacaacgactga

SEQ ID NO: 1933 - DNA, 306 bp, Zea mays
  Peptide Sequence Number=SeqID_43712
atggcgctggcgctggccgggctcccccacgccgcttcccgcctcgtgcctcgtgtccgccagcctcccttccgcgctctctgcgccgcagctgcggccggcgatgcctcgaagcggatgctggagagggacatcacgacgaatccggagtgggagcggctctaccagtacgagattccagtgttggccaaggtgctccccgacgggaccgagtactttgattcgtggagctcctccctgacttccctttttgttgttccatactcatactgcaggaagtacttcccagattatcgccacgtctaa

SEQ ID NO: 1934 - DNA, 483 bp, Zea mays
  Peptide Sequence Number=SeqID_43713
atggcgggggcgctggccctcgcggtgttgctcgccgtcgcgtcgctccatgctgaggcggtgtggctggacgtgccacagtcggggaccaagtgcgtgtcggaggagatccagtctaacgtggtggtgctcaccgactattccatcatgtacgagtcccacccctattcgcaccccaccatcgccgtcaaggttacttcaccatatgggaacaccttgcatcacagtgagaattctacagttggtcaatttgcattcacaaccgcagaagctggaaactacgttgcatgcttctgggttgatagtgcagagaaaggatcaggagtatctgtgaatcttgactggaagattgggatcgcaacaaaagattgggatgctattgctaagaaggaaaaaattgaggtcgggatgcgaattgctgtaccgagctacagttctaaatgtcatgagctcaagttcaatgcaatatttggtgtttgttaa

SEQ ID NO: 1935 - DNA, 1206 bp, Zea mays
  Peptide Sequence Number=SeqID_43714
atgggcaaggccggcagcgttttccctagccctgcgccggcaaccaggtccagccgctgccggtgtgggtgtggcgcggtcgttgaaaaggtggtggtcaacggcaagtgcgtatccgtgctgttcctggcagtcagcgggttcctctcggccttcttcctgctgcttcgtctccggacatcaggagacgtccccgatgatcctggcatactcgccgaaatcgaggcaggcttcattttgtcagtgccacactcacaggtagcttcacagactggaatgctcgaaaaagagatatatacccaaataggtgtccccaacagcaaggtttcagtttccatgcaaccatacgtatatgcagacaccacttatgtgaagtttggtgttcttccagacccaagaaatacctccatgagcacagaatccatcgacgcactgagagcgtccttgataaaacttacgctacagcagctgaatctgtctctgacaccgtctgtttttggagacacgttttgcttggagattctagggttcccaggagggatcacggtactgcttccgcatagtgctccgcatgctgacttgagagaacctctcttcaatgtcacgtttaactcgaccattcatgaaataaggggggttcttgaggagatgaagattgagcttggatccacactagagcaaacaccagatgaggaattatatgtcgagttaacgaatatgaatggctcaacggttgcaacaccagttacagttcaagtttccatctcccccgttgaccacagcatctatctaggaaactacaggctcgaacagctagccagaatcataacaaactggagtgcaaggaaccttggcctaaatacctcaattttcggcgagattataggtttgacgttgtctccactcctacaagccttccttccatccagtgctcctagcttctctccaatatcaccgccatccatgccctggcctccaataccggaggggccaaaaatctacccttccagggaaatctcatgccctcctttggttaaaattcaaaatgcaaccactcaacatcgcagactaatgcgtgtgccatccaagacgatttctccacaattgtcgacacggtttcataggaagcacacatctgagggcaagaaaaatagtattgcagtgccagcaacaacattcgctgcaccagcacccaagcagaaatga

SEQ ID NO: 1936 - DNA, 300 bp, Zea mays
  Peptide Sequence Number=SeqID_43715
atgaggctaaaagacgcggatagaagtccgaaaattagttcaaaaaaggccacaatcgttaaagaaagggaccttgatcctttcattgtttttgcacttgaaaaagaaatttgcaaagcggttgagaaccgtccaaaagcgctgaagagggtgtcggaatcattcgaggctcctggaagttaccagcgagtgccggatgaattgaaggctcgacgactccctcgaatcctgcagggtttagggaggctacctgaagctgctggaaggcgagaatcgtttaataaacagactgagttataa

SEQ ID NO: 1937 - DNA, 252 bp, Zea mays
  Peptide Sequence Number=SeqID_43716
atggaggtggcaatttcttatcaaaagaaaagaaagaaaagcagtttcaagcctaacaaccttcttacataccctagccagaataagggaattatggtcaagggaaaaatgaaagagcataagccagaaaatggaaactctcagaataggaatgaagtatgggaagaaataagagccttaggcctgtgcttgacatgtgttgagctaccctggtcatcagtgcaaggtgaagatgaacatagtaataggtga

SEQ ID NO: 1938 - DNA, 246 bp, Zea mays
  Peptide Sequence Number=SeqID_43717
atgaagatggacaaggagatccaacgacagcgagatcaggcgcttacggtggtgaagaaatggttcctctcctactttaggatagattgccaccagaaggttgtccgggagaaggaaataaacatcgattatatgtcagttgtgttgcagcagctccccacgctatgtgatgccaggacgaccgtcaccgccatcttcgctaaacgatgggtcgactctgagcacggccggaccgtctgcacatga

SEQ ID NO: 1939 - DNA, 1719 bp, Zea mays
  Peptide Sequence Number=SeqID_43718
atggacatcaaggagcggatccgccgctcgccgccgtcgtcgccgcaggctgtgggggaggcggcggcgtccgcgcccggacacccgcgcgggaggaaggcccgggtcgcggtgcttcccctgtcagtcgcctgcggggtcacgctgttgttgctcgcgggcgtctccgccgcgaggaggggtgcccaattctccggcgcggatcctaccactctctccggcaacgacgatcgtggcggctttgaacaggccgggccgcgcgatggagagcatgcaactacggtgtcttccaaagttcaaagggacaaactaattggtggcttgttagctcctggttttgatgaacagtcatgtctaagtagataccaatcagcattgtatcgtaaagagtcgccccatttagtatcaacctaccttttggaaagactgagagaacatgaggttctccagaagaaatgtggcccatatacagactcatacaagaaagctattgagcaactgaattctggtcaggatataatggttggagattgcaactatttggtgtgggtatcttatagtggtcttggtaacaggatcttgactattgcctcagcatttctctatgccatccttacaaacagagttctacttgtagatggagataaaggcactgcagatcttttctgtgaaccattccctgaaacttcatgggtattaccgccggatttccctattactaaatttaagaacttcagtattggctcccctgagagttacggaaacatggcgaaaactgaagctattcattctgatggttcttttaagggtcctaaacctgcctttctatatcttcacctggctcatgactatgatgatcatgataagctttttttctgtgaacatagtcagcaacatctccagaagatcccatggctgatcttaagatccgataattactttgtaccttcgctttttctgatctcatcataccaagaggagctcacgaggctgtttccgcagaaagatgttgtcttccatcacttgggacgttacttgttccaccctaccaatgctgtgtggggcttgattacaaggtactatgattcttatcttgccagagctgacgagaagttaggtatccagatcagagtcttcgatactgaaaccggtccatttcagcatgtcttggatcaggtccttcattgcacactgaaggaaaaattactaccagagatcaacgcgcaacagccaattatctcgacagggaacatcaagtctaaagttgttctgattacttctttgaactcaggatactacgaaaggatcaggaacatgtactgggaacatccgactgagaatggtgagatgattagcttccatcagccaagccacgaggagcaccaggattcagacaagacaatgcataacatgaaagcatgggcagagatttatctgctgagcttatctgatgctatggtaacaagtgcatggtcaacttttggatatgtagctcagggtctgagtggttcgaagacgtggcttctgttcaagcctgaaaatcgcactgcgcctaatccaccttgccgtcaggtcatgtctatagaaccgtgctttcatgctccgcctttctatgattgcaaaactaggaagggaactgacacagggaagcttgttccacatgtaagacactgtgaagatatgagctgggggctcaagctagttgatacaggtacatag

SEQ ID NO: 1940 - DNA, 831 bp, Zea mays
  Peptide Sequence Number=SeqID_43719
atggaagcgccctgcgtacccgtaccgcctccccaaggccggtcgcgggctggagctgcagacgcacgctttccacgcctgcacaccaccaccacgcgcggccgtcacccagagctcgggttgtcgccgtccgagccgccggcactcagcgggcgacctggttgcccggactggacccgcccccatacctcgacggcacgtcggttacctgacgccctgatatctgccggtgtcatcacttctgcatgtggtgatggtgttggtgacttcggcttcgaccctctgggcctcggcgaggagcccgaagccttgaagtggtacgttcaggccgagctcgtgcactgccggttcgccatggcaggggtcgccggcatccttttcactgacttgctccgcgtatcagggaacagcgacctccccgtgtggttcgaagcaggcgcggcgaaattcgacttcgcgaacaccacggcgctcttcttcgtccagctcttcttgatggggttcgctgaaaccaagaggtacatggacttcaaaaatccaggatcgcaagcagaggaagggacattcatagggttagaggctgcactcgcaggtcaacagccaggctaccccgggggtccactgttcaatccactaggactcgcaaaggatatagagaatgctcatgacgagaagctcaaagaaatcaagaacgggaggttggcaatggtagccatgcttggcttcatggtgcaagcatccgtaactcatgccggccccatcgacaatctcttgacacacctttcggacccgttcaacaaaaatatcattcacacattctcctcttcctaa

SEQ ID NO: 1941 - DNA, 276 bp, Zea mays
  Peptide Sequence Number=SeqID_43720
atggctgccggagatgtttgcttgccgggcaaactacagtcggggatgggtgttccgtgcttgctcttgtcttttgagcgtgctggggcaggaagctctctcggttctggatatggaattagaggcgttcgttccttcattcaaaaagctgactggcggaaaagcgcaaaagtgtggctctacgataaggtgaggactaaggagaacttgggccacatgggcctgcacgagcgcagctactgcctaccggttggtggcatttcttttgtaggctga

SEQ ID NO: 1942 - DNA, 1488 bp, Zea mays
  Peptide Sequence Number=SeqID_43721
atggggaagaagttgaagaaacccgggcaagccgaggggagaaagtgggcaccatggagttccacaaatgtgacacctaacacagcaaggccagcatggggtggcagtggttcctcgcacccttctggaaccagctgggctcaagctccagatcatggtgctgctaccagaggcaatcctagaccaccatcacaaacatcgcgccctgttctgactccacctctagcaaatggttggcagtggcaatccaggcctcgcccatctggatctgaagtcaagaaggatgatgctcctccatctggttctgtccctgaggtggagaatgttgatggcaacaatacatcagatgatgatgatgatgatgatttgagtgatgatatcagtgatgactatgattctgacgcaagtgagaaaagttttgagactcgaaaaacaaacaagtggttcaaagagttctttgaagtattgaatacattgagtttggaacaaattaatggacaaactcggcaatggcattgcccggcatgcaaaaatggacctggggcgattgactggtacaaagggctgcaacctttagtgactcatgctagaacaaagggttctacaagggttaaacttcacagggaattggctgcattgctggaagaggagctttctcgcaggggaacttcagtgttaccagcgggtgaacaatttgggaaatggaagggactgcaagaaagcactgatcgtgagatagtgtggccaccaatggttattgttatgaataccttcttggaaaaagatgaagatgataagaagaaagttcactttgtgtttgtgtgcaagggaaagcacaaaaggaccacctacaaaataaacaacatcttgtatgaaaggactggaagtgctagtgagggcgaaaccttgagggagcggatgtggtccccggcggcacggtacatggcctcggcgaggcgagatcctgtggcggacgaagaggagaagaggccgacggtgaggggcggtgcgcgcgtgcagaagcttagggtggagagaaaaggtctgggagttctgccttccacgtcgggccactggatccgtggcggctgtgattcgaatgcagtggcaactacgactgcgggggtgggggtgatgccatcttgggaggtcgagcggttagggttttgggaggaggtgttgaacggggaaggacgagactcgggagagaagcaactcgggagagaatcgaaggggtggcaggggcaggcgggggcagaggcaagggtcgcggggaacgcacgaccggggcgggtgctgtgggatcgagagctgcgtgacggggaaggcggggcagaagaaaggcaaggcgggggcagaggcgggggcacgaggggttgtggacgcgctccttacgttcttaataggagtacagataaaccacttcactggatctctcccgcatccgggatggagaacgacatcgtcgccaccgtcgtggtcggctaa

SEQ ID NO: 1943 - DNA, 234 bp, Zea mays
  Peptide Sequence Number=SeqID_43722
atgacggtggagcccgacgaccttgtgcggccttctctgctccatgtcatttcagctaagagtgataaagagatggttctgatgatcatggttggaggttacacaaacttgttttgttctatgcaccatacaagtaatcagccaaatatagtatgtggtctggagttcatatttttgctacttttctggcgcgacgatgtggcggaggcgatggcaaggcctagaacagattag

SEQ ID NO: 1944 - DNA, 711 bp, Zea mays
  Peptide Sequence Number=SeqID_43723
atggcggcgccgaggctggagcgcggcgggttccagctcccgaacaccgagcaggagaactccctcttcctccgcgcgctcatctccgtcgtgtccggggacaccgccgcgttgctcccggaagcggcggccgtagaggctcccgcggcccccgtggcgtgcgccaggtgcggcgcggacgggtgcgcggcggccggctgctgcgagctcgtcgccgggtccagcagcgacagcgacgacgcagggtgctccgggacccgcgccaacggcggcggcctaggcctaggcctaggcgcgagcaagcggagagggagggggaggaaggtgatccagtacaggggcgtgcggcggcggccgtggggcaagtgggcggcggagatccgcgacccgcgccgcgccgcgcgcaagtggctcggcacgttcgacaccgccgaggacgccgcgcgcgcctacgacgtcgccgcggtcgagctccggggccagcgagccaagctcaacttcccggcgcgcgctgccgccgcggcgccggcggcagtgcagcctccgcaccaccgtccattgcccgatcggagcctccgcgagaactgcggatccaacgccgcgtcgccggtgcacgtggcgctggcgccgaccacgcaacagaatatctgggagggcttgaacgagatcatgatgatggaggaggaacgcagcttctggtctatgcgatga

SEQ ID NO: 1945 - DNA, 189 bp, Zea mays
  Peptide Sequence Number=SeqID_43724
atggccgggtttcgggcgtccgcgccggcccagcccaaccaccagcaggcagcagccgacaactggatctgtgatgggctgatggtgatccccaattccccatccaccggggccgtgcagtcgctgcgtggaaaactcgcccggaccgggggccctcgcagagcggcatgcagctccaaggcattctag

SEQ ID NO: 1946 - DNA, 753 bp, Zea mays
  Peptide Sequence Number=SeqID_43725
atggacttttttatacgcttgcttggtcagcgtggtttcctgaaactcccgcaagcgaagctttttgacgaggctttcttgtcttgtaggagtacgtgtacaacaggcttcagttcaggggttcgtgtacctggcgctgatacggctgcaggggttcacggtgaagcagatggtgaacccgtggcggacctacgtgcgcctctcggcggtgctcatgggctccaatggcctcaccaagggatccctcgccttcctcaattaccctgcacagatcatgttcaagtcaaccaagatagcacagctatgaatgaaaagggagcacaagtagtgtacctggcatcaagatttgatgttttggttaggttctaccgggtgatggtgatgggagccttcatccctggtctgaggcgcaagtacgcgttccaagagtacgtgtcggccgtgatgctcgtcgtcggcctcatactcttcacgctcgcggacgcgcagacgtcgcccaacttcagcatggccggcgtggccatggtgtccggggcgctcgtcatggatgctttccttggcaacctgcaagaagcaatcttcaagatgaacccggacacgactcagatggagatgctgttctgctccactgtcgttggccttccgttcctagcggtgcccatggtgttaacaggagagctcgtgacggcttggacttcctgctcccagcttgttgctgaaaagggtcagacgattgaccaagccgatcgatga

SEQ ID NO: 1947 - DNA, 2064 bp, Zea mays
  Peptide Sequence Number=SeqID_43726
atgaaggagtccgaccagctcgcgacttctttcatcacgcccttcggcatatactgctatgtcaccatgccgttcggcttgaggaatgcgggtgcgacgtaccagcggtgcatgaaccatgtgttcagccaacacattggccgaacggtcgaggcctacgtcgatgacatcgtagtcaagacgaggaaagcctccaacctcctttccgaccttgaagtgacattccgatgtctcaaggcgaaaggcatgctcttggggttcatcgtctccgagcggggcatcgaagccaacccggagaagatcgcagccatcaccagcatggggcccatcaaggacttgaaaggcgtacagagagtcatgggatgtcttacggctctgagccgcttcatctcacgcctcggcgaaagaggtctgcctctgtaccgccccttaaggaaggccgagtgcttcacttggacccctgaggccgaggaagccctcgggaacctgaaggcgctcctcacgaacgcgcccatcttggtgccccccgctgccggagaagccctcttgatctacatcgccgcgaccactcaggtggttagcgccgcgattgtggttgagagacgagaagaggggcatacattgcccgtccagaggccagtctacttcgtcagcgaggtactgtccgagaccaagattcgctacccacaagttcagaagctgctatacgcggtgatcctgacgcggcggaagttgcgacactacttcgagtctcatccgctcccaacagctccgatccaaccagagctctggaccatgttcttcgacgggtcgctgatgaagacaggagctggcgcaggcctactcttcatctcgcccctcggaaagcatctacgctacgtgctacgcctccacttcccggcgtccaacaatgtggctaagtacgaggctctggtcaacgggttgcgcatcgccatcgagctaggggtccgacgcctcgacgctcgcggcgactcgcagctcgtcatcgaccaagtcatgaagaactcccactgccgcgactcgaagatggaagcctactgcgatgaggttcggcgcctggaagacaagttctacgggctcgagctgaaccacatcgcccgacgctacaacgagactgtggacgagctggctaaaatagctttgggactaacaacggttcccccggacgtcttctctcgagacctgcatcaaccctccgtcaagatcgacgacacgtccgagcccgagaaggcacccgggggctacacgcacctgttggtcgccatcgacaaattctccaagtggatcgaggttcggcccctaaacaacatcaggtccgagcaggcggtggcgttcttcaccaacatcatccatcgtttcggggtcccgaactccatcatcaccgacaacggcacccaattcaatgacagaaagttcctggacttctgcgaggatcaccacatctgggtggactgggcagccgtggctcaccccatgacgaatgggcaagtagagcgtgccaacgacatgattctacaagggctcaagcctcggatctacaatgacctcaacaagttcggcaagcgatggatgaaggaactcccctcggtggtctggagcctgaggacaacgccgagccgagccacgggcttcacgctgttctttctagtctatggggccgaggccatcttgcccacagacttagaatacggatccccgaggacgagggcctatgccgaccaaagcaaccaagctagtcgagaagactcgctggaccagctggaagaggctcgagacatggccttgctacactcggcgcggtaccagcagtccctgcgacgctaccacgcccgaggggtccggtcccgagacttccaggtgggcgacctggtgcttcggctgcgacaagacgcccgagggcggcacaagctcacgcctccctgggaagggccgttcgtcatcgccaaagttctaaagcctggaacatacaagctggccaacagccaaggcgaggtctacagcaacgcttggaacatccaacagctacgtcgcttctacccttaa

SEQ ID NO: 1948 - DNA, 957 bp, Zea mays
  Peptide Sequence Number=SeqID_43727
atggggcggccttacgcggtgaaggggcggaagaagaagcgcaagctcgaggaggcggcggcggcctcggacgctgccccgcccgtcgaagaagcggaggagctgccaccgccagaggtgagaagcggcgaggaaaagagcagcgaggaggatgaggcagcagcgggggaggaggagcacgcggcggcggacgggctcccaatcctacccaggacggttgatgggaagcggcgacccggcgccatcttcgtactcgagagggcctgcctcgaggtcggcaaagtcggcaaggatcattgtttacatgacacatgtgaggcttgtcatttccattctacagtttatggcaaagcttatgcatattttttccagcaaaagattgttagagcacatctagaattgcggtgtcccttttaccattctgtgcagactatgcaaattttgaactctgatgatcatgcgaattatttgaggaagcagaatcgcaatcctgcagattataggcctgatatcattcatcaggctctactagcaatatttgatagccctctaactaaggctggaaggttacaggctgtttatgtgagaactgaaaagggcgtattgtttgaaatcaaacctcatgtccgcatgccaagaacctttaaacgtttctgtggtttaatgtcacaattgttgcaaaaactgagcattacggcagttggaaagcgtgagaagcttctcaacgttgttaaaaatcctgtcactcgttatctacctgttggtgcacgcctttcatttagtgctgagaagtcagtcaacttgtttgactatgttgccaaatccaatgacgacgaacctcttgtgtttgtggttggtgccatggcccatggaaagatcgacaaggaatatacagatgattacatacaaatcaatggtagcttggtagcaacttgggctgatgaccagtttggatga

SEQ ID NO: 1949 - DNA, 1071 bp, Zea mays
  Peptide Sequence Number=SeqID_43728
atgggtgacctgggaggaggagactggcgggaggcggtggccgagaaggggttggcggaagccgacggcgggcccgaccatctggtgatcatggtccacgggatcgtcgggagcacagcagattggaagtttggagctgagcagtttggtaaactgctctcagacaaagttatagttcattgtagcaaccgcaacatgcacaagctcactttagatggtgttgatgtgatgggtgaacgattggcacaagaggttattgaagaaatcaacagaagaccgtatatcaaaaagatatcttttgttgcacactctgttggaggattggttgctagatatgctattggaagactttataaaccacctaaacgaacatcagaaaatactccacaaactctggatgacaacaatataggtaccatacatggacttgaggcagtgaactttataacagttgcgtcaccgcatcttggttccagaggaaataagcaggttcctttcctttttggagttactgcaattgaaaattttgcatgctacatcattcatttgatatttggaagaactggcaaacacctctttcttactgacaatgatgatggaaagcctccattgctacaacggatggtggacaattggggtgacctgcaattcatgtctgctttgcaagcatttaggcggcgtgttgcatactccaatgttggtcatgatcgtatccttacatcactcctgaaattagcatgcaatattgttgggtggagaacatcatctatcagaaaagattctgaactacccaagtgggttgattcaaccaacaagatttacccgcatattgtatatgaggaactatccaaagcagaagctcctgatcaatgtgctgacacagataactgcacactagaagaacaccttttacaaggacttaagcgcgtttcatgggaaaaggtggatgttagtttccacaatagtaaagtaagatctgcagcacatagtgtgattcaggtaaaagatcctgtgatgcatagcgaaggtgccgacgtcatacagcatatgattgaccaatttattctatag

SEQ ID NO: 1950 - DNA, 708 bp, Zea mays
  Peptide Sequence Number=SeqID_43729
atgacccagggcgaagcgaggcgcgacggcggcgaagagcacagcgacaccaggttgggatttgtggaaatggatggacgcaagtctactatggctggtggctcaaatacatcacaatttcctaatattgatacatggaactttgatggatgctattacaacatcacggagggtgaggattcgcaccataatgaacatgtccatgagctaaaggatgccatgaagatgtttgaaggattacaaaatcatcctttcctattcacacattgttggatattattgagaaatgagagaaagtggcgtgaaaggtctactgcaacaagaccagggagggtcgtaaatgaagatcaaccaacgaacatgtttccttctagtgaacctgaggtgtcaataagtccagagggtcgtgactcatgcaagagaaagcgtgcaaataaaaatactacatccgctgattccactgcttgtgttgaagtgcttaagcgtatgaccaagaaccgcgagcttgtcgaggttaaatgtgatggacagtataaggagctacttgcacgtagggaccatgagcttgatttgaaggaacaagagatggagttcaagatcatggctgtgaacattgacgaggtggcagaggagaagcgagcttactaccgaaacatgcagcgccggatcatagagaagagtaacaaagacaacaatagctcaacttag

SEQ ID NO: 1951 - DNA, 429 bp, Zea mays
  Peptide Sequence Number=SeqID_43730
atgacgcaagagccgacgtcactcctcccgatctgggcgcggacgccaacgacgcgacggcccaagtcgcgacgccaccagctccccatcccctcggacgccatggaggaagctcgcgaccacaggctctcctccaccgccggccgccccttcctctctggcttctgcgccgcggcgctccgacgtaagcccctcggcgcccgcgcctccgccgccgccgccgccaccggcgagggccttgtgcggcagctcggcgtcctcgacctcgtgctgctcgggatcggtgcgtccatcggcgccggcatattcgtcgtcactggcaccgtcgcccgcgacgccggcccagaatcatcagcagtgaacacgtttatgacaacattgaagataatcattgttatagtcattgtatttgctggtaataccttctaa

SEQ ID NO: 1952 - DNA, 369 bp, Zea mays
  Peptide Sequence Number=SeqID_43731
atgaagtgcaggttgcggctctcgcgcctggccagtgtgctcctaacaacgagcttggtgcagcagaagaggttgcacatctcgcaggcctcgacgcccaccatggtcggcttccacccacgccgaaataggaactcctcccactccgactctaggtccccaagcctccactctgcctacttcagccgccccatcgagcacacgatgctgacgtactcctacatcactgactgcatctccaccctggcctacctcgtccgctccacgacgtctgacagcgcgctgtcgcccaacgccagtccgacatcgttggccgcacccaccgcgccaccagtgagttccaccgctaacggatatcatgaccaatga

SEQ ID NO: 1953 - DNA, 657 bp, Zea mays
  Peptide Sequence Number=SeqID_43732
atgccccgcctcctcgactgcggaaccagtgccgcgaatcgaggcagccctgcgtgtgacccaacaatgccaactgggtgcaacgatcacgggccagtcagccgcgggaggaagcgcgacggttgggactgggaaaggggatattccgaaagggatccttctccgcaaaggaagcgggccccgagccctcctactgatcaggggtttgaagactggcccctcggaagggttcgacagccgccccagagcactcgggcttcacgcccactactgatcaggggttcgaaggctggcccctcggaagggttcgacagccgccccagagcacacagagtgagggatgactctgggtacgtccgttacgtggacgaggctcgggctacgctcccgagggtgaggctgacaacagccaagttcaacctcgggcgcaaaaggaggtctccgcctcgcccgaccctagggctcggcctcaacgtcggccttggaaggtggtctccgcctcgcccgaccccagggctcggcctcaacctcggcctcggaaggtggtctccgcctcacccgaccccagggctcggccttaggagaagtcttcgcctcgcccgaccttgggctcggaccgatcgcgccacgggggatacatcattaccctacccctag

SEQ ID NO: 1954 - DNA, 2046 bp, Zea mays
  Peptide Sequence Number=SeqID_43733
atggcggtggcgttttggggggcgaaaatcctatccctgcatttgtctgcgcttcttggtggcataggctcatgtcctgcccagcggtcgaagggtgacccaagtgatcctttgaacagctccaggagttctgttggtcccagtaaacacctcagtctgcccaatgggaatgacgcgactatgacgtcagtaagtggccacgcagatgatctttcctaccgttgctcgtccgatacgtttgatccccaaggacgcactttcgatatttcagaaaattggactgtgctgtccacagagggagacaaacctattcctcgtttctatcatgcagcagccattgtaagtagcaagatggtagtgtttggtggtgattctggtaatcgcttattagatgacacaaaggttccttggggaaatagtgtcatccttgtcggaggtaaaactgagcctgcttctgatcatttatcaggtcatgtcttccgcaaccatataatgcttaatcattccatctgtggtgcagtatggactttcaatacagaaacagagctttggtcacttattgaagccaagggtgatatccctgcagctcgaagcggacacacggtgattagagctggtgctacattgatactttttggcggtgaggacacaaaaggaaagaaacggcatgaccttcacatgtttgatctgaagtcatcaacatggcttccattgaactataaaggcactggaccttctccaagatccaatcatattgctacactgtatgatgatagggtccttttaatttttggaggccactcaaaatctaagacacttaatgacttgtattctttggatttcgatacaatggtttggtcaagagtgaagacccatggtcctcacccatcacctcgagctggttgcagcggaactctctgtggaactaagtggtacatagctggcggcgcaagcaagaaaaaactgccccctagttcatcgattactacaaaaaaaggttttagcatggttcctttctaccacaaggacaagattgctcttattgcatttggaggaaacaaaaaagagccatgcaacaaggttgaagtattagtggtactgcaaaatgagcattcttttagttggcgctcagccccagaagtggacaccatggtgtatgagtattctccaagcaataaggagcttgctgatcatctccacaaatgtgcccccttgtactctaatagttccatcgcaaggcatagtctcacttctgtgatagaacaccctcctagaagggaacccctctctgagtcattgttgaagcagtccagtttgggcacttcactccatacgcagttggatcacgcagaagagtgcagcctaggtcagaaactgcagaaaccaatcgatgatgacagatatgatgacgtagatgactcttcttcatgccaagatagcactggaacagctatgagcaaatggacatgttatttgtttctctacataacagattgtttcttacagccaaaagggccctacagcaaaaggacagggcctggttttcagaatggcgcggaaaacatggtgactggaggatcaaaagtgagaaggatagctagatgctcttcagatgttggccagagccacttgtacaacacaaaaatagcagacttgatcagaagaaacaccacgctcgaagaccagcttgcgaccgcactggcaagcaaagatcagctagacaagagcttagcatcggtcattcacagcagaggacagctggagaagatgcttgccaacaaagataaggaggctgagatgctgaaagagaagatagcatgcttagagctggcgcaagaagagtcgaacagcctctcgaacacagtgcacgctgataatgtgcgcctggagcgtgaagtggcgttcctgaaggccgtcacaggcgaaacccagaaggcaaggaaacttgatgtttaccagtactgtttggagctgcattccactcgtagagttttagcaggggaacagtcgcgcgcgttccagctccagggtatggtaaaactataa

SEQ ID NO: 1955 - DNA, 447 bp, Zea mays
  Peptide Sequence Number=SeqID_43734
atgggtttcgacgatgtcgcggatggggttgcacaacacaacaaatactcagggggcatcacggcgcactgctcactgcgcagcaccccacctagacatctcgtcgaacacttggcacgcgcacagtgctggcagcgaggaagcaagatcggcatagggtctgctcgtggcgggctgctgttttgtggggaagagaggaggagcaggggcctaaagttgggcggcatcggcctctcaccatgggtggatctcggatggggggatgatgacatgggagaggaggagccgagctccctgtttgttgcacgtcgtggacagcagagggaggaagaagaccggctgctgctgcgcgagggaggagcagggggtgtcggcatggagcagggtaacaggggcgctggcttcttgctagccgtagagaagggggaggggcgcaagggcaagtga

SEQ ID NO: 1956 - DNA, 411 bp, Zea mays
  Peptide Sequence Number=SeqID_43735
atggcggagttgctccagccactgctcacgtcgtggccctgttcagaccgcctttcacagatgggtcgtggcgctcaccagctgatttcacctctgcagcaaaagtttgatgtggtttattttcttatctgtgagatcgaggacacgatgttggatgcccctgaggacctagtgttagtaccagatccagtgccagacactcaggctgaggatgcggcattccaccagttcgagacccagggcacagctgtccctgatgatgatgatgatgattttgggatcccgccaccgcctcctcagcagactcttctggtagccgagcaagctcgacaggcagccgagcaggctcaacaggtagcgatccagcagcagatgtccgagaggatgctctctatgtttcaaatgatttag

SEQ ID NO: 1957 - DNA, 594 bp, Zea mays
  Peptide Sequence Number=SeqID_43736
atgcaagacgttgctgcgggtctgtggcacactgtatgtacatccgtagatggtgatgtttattcctttggaggaaaccagtttgggcagcttggcactggttctgatcaggctgagactgttccaaaattggtagatgctaccagcctagagaataagaatgccagatctgtttcttgtggagctcgccatagtgctattataacagggatctcaattgtatcatcttgtacgcccatttgcctttcttacaagaccacactactaatacatgctcatgcaggagctacacatcattatattaagaagaaaaataaggtgtccaaaatagaccaataccaaaaggaatgccaccttcccgtggccaaaatcgagaaatacataaaggaagtcttctcatctgacaaaggttacacaactattgcagatgaaggcgaggtattctgctggggatggaacaagtacggccagcttggccttggcgactcaatggacaggaacgtgccttgcagtgttcctgtggacgcttaccaccccctaaacgtgtcctgtggctggtggcacaccttggtgctcgcggactcgcctacttga

SEQ ID NO: 1958 - DNA, 684 bp, Zea mays
  Peptide Sequence Number=SeqID_43737
atggcactttcaaagcttaacagtggtggatgggttcatatattccctgaaggaagtcgttcaagggatggagggaaaaccattgctcctgccaagagaggtgttggaagattggtgattgtggtcgtgggtgacccaatcaactttgatgacctgctcatcgacaactgtggtgacacccaagatattcctagagggatcttgtacgacaaagtgacacagagaattgggcagcgattgcaggaactcaaggtcgaagtcgatagactggctgcagagcaggaacctgaactccaaaaccgcaacgtgggtgatgatggataccggctgtggcagcaggtcgattgggaaggatttgggatagggagttccatgttgccatcagaaccttcagctgctgcgcaagtgccatcaagggaagccgagcctgaaccgcacctggaagtggagcaaagtgtgtctccagccccaagtgcagcaaccttttacgatgttgctgttccacactggttccagcggcatgtggacccttctgagctcatggggttcgcttcccatggcctgatcaagcatggcaagttcttggaggaaggctacagggaattccaacaatcggctactactctgcacacctggtgggtttctcgtgccaacaatgctgcacaccgatggagcactgcttag

SEQ ID NO: 1959 - DNA, 615 bp, Zea mays
  Peptide Sequence Number=SeqID_43738
atggcgggcggcgaccgggagcgagacgcggacgaggagacgaggaatctgatgatgcagaaccttttcggggaccagtcggaggacaaggacgatgcggacgacgacgacgtcgccgagatggtcgatgaggacgacgatcaccagccgcagttgcccccgcagtcgcccccgcagcgccaccaggagctggacgacgatgcctacgacgatgaggaggaggacgcccgcagccacgcgcccgcccgcgcaagcgaataccactccgtaagcctgcccgttttccttcgccccgcgatcccgattcggctcggcagccggcgccgaggttacttggctctcggcgatgagccgcaggagggcggccattccttgctggcggcggctagggtttgcgggggttttgggggcgggcgcgtggtggtgggggcggacgcggaggtgagcagccgagaggataagggcactcactggacagtccggtgcccctctatcagcaagctgattttcctcttttcttcaaactttcttcaaatcattttggctatcttcaaggaagttcttagaacttatacaaacgttcatatgggtgtaagcaacttgtccaaggaatga

SEQ ID NO: 1960 - DNA, 204 bp, Zea mays
  Peptide Sequence Number=SeqID_43739
atggactccatagtgtttgaggttgctgaattggatggagcaacaatgatttattacactagcagtaaaatgaaaggttgggagtatgggcgccctgtcacaaacgcgccgtcgtccatcagcacccgcgtgtacccaggcttcatgtttaacagcccaatggtgctggtgacgaaggcggaggcgacacgcccgtgcacctaa

SEQ ID NO: 1961 - DNA, 309 bp, Zea mays
  Peptide Sequence Number=SeqID_43740
atggcctccgcgcccgggttcaccaactacacagccttctggtgtagaaattggctatacaatgcatctgttcatttatggcttggttttcaactgcataacccatctttgccgcttctaccaaatttcagctacttggttgcatctatgggactacaagcactatggagcttggggcttggatgtcttgattactatgccttgacattgagaagagatcttcagcaagctcttctcatgagcttatttgttgttggcgattgtgtaaattatttaaggccaccttttatccatgttgttcatcactga

SEQ ID NO: 1962 - DNA, 321 bp, Zea mays
  Peptide Sequence Number=SeqID_43741
atgacgacgcctaggaccatcaccgtccccacggcatctgccacaataaatacgagacggccagacaacctcaggccccacgaggaagccacagctgaccgactcttgtcctggcctataaaaggaagagaccaacctccgggcaggggggttgaggagataactctcgaagacaaccggatgcctttagatggagacgaacccacaaagacgaacatgaggaggagcactggcgaggaccaggaggtcggagccccaccaagccaagacttagctactccctctggtgtactattagttgtcgttttagataagaattga

SEQ ID NO: 1963 - DNA, 246 bp, Zea mays
  Peptide Sequence Number=SeqID_43742
atgtccgaccctgagctcggtgttgcggggttcgacggggggacagatccttctaaggttggcgcacatgtctcttccgacggactaacgggccaaagcgaccagggctatttcctcagcacgctcactgaccggtgggtcccaaggaccaagggtcattcccgtgactatatgaagcgccatgtcaaaaaggaaaacattgagataccaagtgaaaatgagttgtcaaactttgcccaagcctag

SEQ ID NO: 1964 - DNA, 426 bp, Zea mays
  Peptide Sequence Number=SeqID_43743
atggttaggcgatgtggaggctcttccgaggtcgaggtcgagtccgagcccctggatcgggcgaggcggagaccgtcggctgaggccagggctgagtccgagccctggggttgggcgaagcggagtttgtcgtcttcaggggctgagcccgagtccgagctccgggtcgggcggagcggagttcgccgtcttccggagcctagcccgagtccaagccctaggtcgggcggagcggagttcgccgtcttccggggcttagcccgagttcgagccctggataatgttccgtgcgcggaggtcgaagaagttgcagaagaagcccttgagcaacaacagtttggtgcagggggctcgagcgtttcccgagtgcctttcagtaaggatctgttcgttgacagaccacctgggatagcagtacaaccatga

SEQ ID NO: 1965 - DNA, 438 bp, Zea mays
  Peptide Sequence Number=SeqID_43744
atgggcaagaacaataagcgcaagcgtgagccaactcctccatcggaggagtttggtgactcggagtactcagaggaggagttctcctctgagtctgaggggtctccggctcccatccccctgcgtgagtcgtctgacgactcagacgactcccaggggctcgcggcggaggtttggacgtacatccgggccgtcgagcgctccgggctcgagggctcggatgagtcggagtactcctcggatgaggaggactcggacggcggcggcaaggacgaggacgacgatgacgacgacgacgacgacgacggtggcgacggtgacggtgacggcagcggcaagggcggcggcggcggcagcaagggcagcaactggggcggcagcagcaggggcagcaccaggggcggcagcggcggtggcagcaacagggccagtggctag

SEQ ID NO: 1966 - DNA, 318 bp, Zea mays
  Peptide Sequence Number=SeqID_43745
atgtcgggagaacacgctaaaaaggagttgatgaccgaggaaaagcccagatcttcgagaaagaaaaatgaaggcaagactccgtcacaggaggccgacgacaagcacaaggaggacaaggatgaacccgctagctccatcaactcacacaagaagggagacaagaagaaaaagaagatgaagaaggtggtctactacgagaccgactcttccacaccctcaacctccaaagccgagtcaacatcttcaaagcgccaagagtgcaaactgaaagggaaatgtgcccatgggccatttctaaagtgttttggtgattaa

SEQ ID NO: 1967 - DNA, 708 bp, Zea mays
  Peptide Sequence Number=SeqID_43746
atggagagcggcacggagcggcggcggcggcggcaccacttcgtgctggtgcacggcacctgccacggcgcgtggtgctggtacaaggtggccacactcctgtcatccgcgggccaccgcgtgacggcgctggacatggccgcgtgcggcgccagccccgggcgcgccgaggaggtgccgtcctttgaggagtacagccggccgctcctggccacggtggccggcctggcgcccgaggagaaggtggtcctcgtcggccacagcttcggcggggtcagcctcgcgctggccatggagcagtacccggacagggtcgccgtcgccgtcttcgtcgcgaccggcatgccctccgctgggaagccgatggcgttcgtcttcgagcagtacctgaagcagagactgtaccagctcagtcccccagaggacttgaccctggcaatggcgatggtgaggccgtcacagcggttccgagacgacgcgacgatgaaggggggtatcctgacggcggaacggtacggcggcgtgaggcgggtgtgcgtcgtcgccgaggacgacgcgtcagtgccggcaggcttccagcggcggatggcgtcgtggaaccccggcacggaggtgacggggttgcagggagccgaccatatgtccatgctctcgaaaccaggggagctgtcagaacttctcatggaggttgccaacaagtacagctga

SEQ ID NO: 1968 - DNA, 900 bp, Zea mays
  Peptide Sequence Number=SeqID_43747
atggagagtgacaggaaacggcagcatcacttcttgctggtgcacggcgtctgccacggcgcgtggtgctggtacaaggtggccacgcgctcctgtcatccgcgggccaccgcgtcacagcgctggacatggccgcgtgcggcgccagccccggggcgcgccgaggaggtgccgtccttggaggagtacagccatccattcctgaccgcgttggccggactggcgcccgaggagaaggcggtactcgtcggccacagcttcggcgggctgagcctcgcgctcgccatggagcactgcccggaaagggtcgccgtcgccgtcttcgtctcgttcctcatgcccgccgccgggaagccgatggtgttcgtcttcgagcagctgtcgcaagaaacgcggccagaggatcgctacatggactgcgaattcgaaaccaacgtcgccggcgaccaccagcggcccgtggagacgtttcggttggggccacagtacctgaagcagagactgtaccagctcagccctgccgaggtaggtgacgatggcccagccacaccacacacacacgacacgtccttcaggtggtctgttcaccatcgtgctgtttcctctggtgttggtgggcgcaacgcaacgcaggacgtgaacgtgaccctggcaatggcgatggtgaggccgtcacagcggttccgagacggcatgacgatgatgaacgcgaacgtcctgacggcggagcggtacggtgccgtcaggcgggcgggcgtcgtcgccgaggacgacgcgtcgttccagcggcggatggcgtcgctgaacccgggcacggaggtgagggggctgcagggagctgatcacatgccaactagcgatggccaaaggggtcgcccggtccgggtccaggcccgatga

SEQ ID NO: 1969 - DNA, 2442 bp, Zea mays
  Peptide Sequence Number=SeqID_43748
atggagctcgtcctcgtcaagcccgcggcaggagctctcgtcgaggtgggctccgggtccgttgccggcgcgggctcgatcccggcgatggtggcggcgcagcaggagattttgcacgaacaggtggaccagctccaacgcctcgtcgtcgctcagtgccgcctcaccggcgtcaaccccctcgcccaggagatggcattgaagaaacctcagaaggacttaatatgtaaacaaaggataagtgaaattctccgtgacgagtcttggaaatctgaagttgatattaccgaggaggtacttgctttgactgatggtgctaatgagagcagaaagcctgaacccagaaaaacaccaatgcttctcactgcttctgctattgagacaaataaaaggagttctgtgcagacaaatgatattcaaaaagcaaagatgcgtgccatgttcatgcaggagaagcgtggcaagattgacataaataaattgagtgataaaccacaagcaatggacacgaaaaaagcagctggattagtaaattcaaatccatcagctatgcccataagtccccatacgtcagctgcacaacctgttgacccaagcccatctacttcaaaacaaagcacagatcctcagcctgataatacagaaatttcaggtggtttgaagttaaacataggttccaaaaacaatgtcatagagaagttggattgcaagagagttctttggcaaataccaccagctgtatggatagacccctcgtggagtgtaggagctggtgacaacagcaaggagcttgaggttcaaacacagaggaaccggcgtgaaaaggaaaccttttatacaagccagaaggacgtcccaatgaatccaaaggacccatgggatctggaaatggacttcgatgacagcctgaccccagaggttccaattgaccaggtgccagatgtggacgccatggaaacggaaagcgttggcgcggcgcctagcgctgtggctcctgttaaggacaagcagattgaatctgcctcatcgacatcaggcgcagttgctgatgatgaggaagctaataccgattacgaattgcttacggtgctactcaggaacccggagcttgtctttgcattaacctctaacaagggggagaacatgcctaacgagcagaccattgcgcttctggatacactgaagcagaccggccttagcctatcagagcttgttaaccgtctggggaacggcgctgggctcccaaaagagccagagccggagccagaacctattcccgcttcgcttccgtcaccaactccgccagaccgtacatcaagggctgtctggataccagaacacgcaatgcaggtgagggctgctccaaccttgcatctgccaagccgggggagtacacctcctgttgcaaatgccgtgcaacaaggcttctcaaacgttgtcagttcgttaccctcacaaccttacgcccctccagtctcggtcttgccggcacagattcaagctaacgcacccccatctcttcctctgctggcggtctctgtaaacccgccagtccaacatgtttcccctgtgaataaccttctgaacagagcttcagtgcatcagcatggacagcagcaatacgctttgttgtctgaccctgttgccacgcccttgcatcaacaagcagcggggagcaaaccagctgtagcagcacatccgtcgttgcctgagcctaatgcatcatctcacacagcattcccttggcaatctaatgctgctgacatgacccacgctggacggaatgcgacggctgatccatgggccgccgcccgcgcagctaactcgtatagtacagcatcagcaagcacagtgccgtctgctaaccagaatgcttacggcgatcaaggcaagcagggtgcgtacagctcttatggatcttcggcagcctcgtcccgtcctgttgtaccagggcacgggcatgacagaaatggctacagccggtctgccctggtggagtacccatgggacgggcaccaccagcggcactcgaggtcaccagatcctggcgtggtccgggactacgacaccgactatggcggtgcgcagggctacagtcagcagcccctgacgcagtggagtgcagggaaagtgcagcagcagggctacaatcctgagccgtcaaggcagtggagttcttcccaggcgcaccagggcggctacgcacccgccgagccgtcgaggcagtggagttcttcccaggcgcaccagagctacgctcccgagctaccgaggcagtggagctccgaacgccgtggctacgatgatgcggagccctcgaggacatggagctccggccagcagaacccggaggcgccgaggcagtggagccgcgggaagcaggatccttactacagcccgagccatagccgaagatcgtacgatcagcaccggaggagatag

SEQ ID NO: 1970 - DNA, 210 bp, Zea mays
  Peptide Sequence Number=SeqID_43749
atggagtgggatttgaatttttgggatgctacaggactgcaggatgtgccttccatcgttgcgcactgcgggggtcccggggcaaggggcgtggacagcggtggtgaatggatgatggacgacatggtgaatggcgcggtcaccggtggggaagcagatgcgtgctggcgaatcccgggcgtggtgaatgtcgcggtctccggtgggtaa

SEQ ID NO: 1971 - DNA, 249 bp, Zea mays
  Peptide Sequence Number=SeqID_43750
atggctctcggcgttgaaggcggcctggggtcgggtgctgattgctctacctatgccatgcgggcgttgatgggaggcgcggcgcagggattggggatgaaattccatggcgggggctcgggcgcgatggtggcggacttgggggcaggggcatgttgttgccgtgagataaaggtgaaaagccgatgtgtagagatggcaacgggtaaaaactcgttcgctattacttgcccaaactcatacccgtga

SEQ ID NO: 1972 - DNA, 507 bp, Zea mays
  Peptide Sequence Number=SeqID_43751
atgtgcgagagggctatacatcgcacgggccagacgtggagcaggccagggtcgaggcccaactggagctccaggaaggcacacaggccgaaagccgccaccgtttcttcatctcccatctgccggcgctccatcttcgactccctccccgactcgcgctcggcacgcaggcgacgacggcggcgctcaggctcgggctcgggctctcagcgacggcggggcagtcccaatttcggcggcggcgtcagcggctccccctcccgcctcttgccaatcgcctcgcgccctcgcctccggtcctccgcacaccggccggtgaccctgcgtgcgcgcctcccgctcccctcccgcctccggtggaccgttgacagcgcccggccccggcggctgcactgcgcgccgcgtacggccggcgggcagcgggagccagcagccgctgctctaccaaggcggccgcaccgctttggtagcgcttatgccccaacgaagcgttacccgtccgcttag

SEQ ID NO: 1973 - DNA, 288 bp, Zea mays
  Peptide Sequence Number=SeqID_43752
atggagaatatgcgttatgctgaggagctcgtgagggagtttctagttttcaggggtttcacaagtatcgaagagtcgacattctcgttggagcacccgtacaagggtgccactccccttggtccgtgtaagaaaagtgctctctacgagctggttcttcgccgctctgcctcctcggcagcggcggccagcagcctgcacagcggcaagatgagtacattgtctgaagaggatcagcaggttttggtgactgaggaagagtttcctgaggtgaaagtagatttccag

SEQ ID NO: 1974 - DNA, 897 bp, Zea mays
  Peptide Sequence Number=SeqID_43753
atggcgtcgtcgctggccgaggaggaggaggccttcgagcacacgcttctggtggtgcgcgaggtgtcagtgtacaagatcccgccgcgcaccaccagcggcggctacaagtgcggcgagtggctgcagtcggacaagatctggtccgggcgcctccgcgtggtgtcctgcggtgaccgctgcgagatccggctcgaggacccggccacgggggagctcttcgccgcctgcttcgtgctgccggggcagcgggagagcgccgtcgagaccgtgctcgactcctcccgctacttcgtgctccgcatcgaggacggcagggggaagcatgccttcgtcgggctcggcttcaacgagcgcaacgaagcattcgacttcaacgtcgccctctctgaccacgagaagtacgtcaagagggagcaggagaaggagaccacgggcgctggcggcgaggagactggcggcgagatacaatcctacatcttgtataactatgtatctagaattgtaaagctgatcaaagattgggaatgcaagaaacacatccaaaataagcaaattctagaaggtgaaaccattaggataactgtaaaaaacaagccatcaactggaagtggtatgctttcagctgctggtttatctggagggaccactgcaaaacccaagacaagcatgcttcttgcgccacctccaggcgcagctgggaagcttagatctccacttccaccaccacctaacgaccctgcagctgcaaggatgaattctggacatactgcaggaatcagggctccaaaagaacccaccaagagaaataacgatcctttttcagatctttctgctataaaggttttgaagtttgctgatattggaagctcttcaacgcttggtctctacgcctga

SEQ ID NO: 1975 - DNA, 1872 bp, Zea mays
  Peptide Sequence Number=SeqID_43754
atgcgcaacacagcgcctgcggccccgggacgcctcggcaacgagcaccaccaccacaaccgtcgggcccacctcgacgagagggtgcgccgaggctaccaccctaggcgtgagggacgctacgacagcggggaggatcggagtccctcgcccgaaccacccggtccgcaggctttcagccacgccatacgacgggcgccgttcccgacccggttccgaaccccgactactatcacaaagtactcgggggagacgagaccggaactgtggctcgcggactaccggctggcctgccaactgggtggaacggacgatgacaacctcatcatccgcaacctccccctgttcctctccgataccgctcgcgcctggctggaacacctgcctccggggcagatctccaactgggacgacctggtccaagccttcgccggcaacttccagggcacatacgtgcgccctagaaactcctgggatctccgaagctgtcggcagcagccgggagagtctctccgggactacatccggcgattctcgaagcagcgcaccaagctgcccaacgtcaccgattcatatgtcatcggcgcgttcctcgccggcaccacctgtcgcgacctggtgagcaagctgggttgcaagacccccaccagggcgagcgagctgatggacatcgccaccaagttcacctctggccaagaggcggttgaggccatcttccggaaggacaagcagccccagggccgcccaccggaagatgtccccgaggcgtcaactcagcgcggcgccaagaagaaaggcaagaagaagtcgcaagcgaaacgcgacgccgccgacgcggaccttgtcgtcgccgccgagtacaagaaccctcggaaacctcctggaggtgccaacctcttcgacaagatgctcaaggagtcgtgcccctatcatcaggggcccgtcaagcacacccttgaggagtgcgccatgcttcggcgccactttcacaaggtcggaccacccgcggagggtggcagggctcgcgacgacgacaagaaggaagatcaccaggcaggagagttccccgaggtccgcgactgcttcatgatctacggtgggcaagtggcgaatgcctcggctcggcaccgcaagcaagagcgtcgggaggtctgttcggtaaaggtggcggcgccagtctacctagactggtccgacaagcccatcaccttcgaccgagacgaccaccccgaccgcgtgccgagcccggggaaatacccgctcgttgtcgaccccgtcatcggcgacgtcaggctcaccaaggtcctcatggatagaggcagcagccttaacatcatctacgccgagaccctcgggctcctgcgggtcgatctgtcctcggtctgggcaggcgctgcgcctttccacgggatcatccccgagaaacgcgtccagcccctcggacaactcgatctacccgtctgctttgggacgccctccaactttcgaagggagaccctcacgttcgaggtggtcaggttccgaggaacctaccacgccttgctagggagaccatgctacgccaagttcatggccgtccccaactacacctacctcaagctcaagatgtcgggccccaacggggtcatcaccgtcagccccacataccgacacgcgtacgaatgcgacgtggagtgcgtagagtacgctgaggccctcgccgaatccgaggccctcatcgccgacccggagagcctctctaaggaggcgccagatgtgaagcgccacgccggcaacttcgagccagcggagacggttaaatccgtccctctcgaccccagcagcgacgcctccaagcagatccggatcggcttcgagcttgatcctaaatag

SEQ ID NO: 1976 - DNA, 2328 bp, Zea mays
  Peptide Sequence Number=SeqID_43755
atggggcagagaatcgatatcaattggactgaggtgtttggcaagtcatcctcccccgaccgcgaggccgacgtctgcttcgcctccccctcgtcggcgtcggcagcaccgcggacgcgggcgcgggcgttgggcgccgcgaaggtgttaccgggcgacgagcggcggcgggggtccccagacagacaccaacggaagaggctcgggaagctgcgcatcgacgatgactggtccgtcggcgggcagcgccacaccgccgtgcatggggatgacggggcgcgccgaccacggacccgcggggccgccaaggtacgcgcgctgcagatggtcgggtacaggatgctcattccgtttctaaggatgtgtatgatttcagtccagaagatgagcaggcggaacgtgtgggcaacagattctgttcgaggaatatatctcttgaaaactattatgagggaattctggatgcagttacctttgaataatctcaaaaggcaagggtgtgcggaaaaaaggaaacctatatcggtggacaagatgtactcagagtctgaccgaccaagttccacatcttcatctgcgaagaggactcatgccattgatccagaggtgtcagatcatgaaaaatgtcacaagactgaaagttcccatcccagtagattctctaagaggaggaaggaacaacttcagaattcatcttctgtgtaccctcgaaaggttcaagatgtggttctattggatgacgaagatatgcagcctgaggaagaagtaaactgtgacatgtctgacggacagaatggaccaaagatctactacccatcgagagataatcgggaatctgttgagctcagcagatctgatattaaatgtcttgatcctggagtatatttgtcatcaccagtgataaacttctacatccagtacattaaaaggaacagactgtctagtgaagattttagagacaaattttacatatttaacacatatttttatggaaagcttgaagaagcattgtgtcggcagaaacgctacccaatcaacagatttgtggcatcatggagctcaaaccgtaagcacctgttaagagtgaaaggatcacacagaccgcagccaaaggatgagttctcaaagttgagaagatggtggaaaggtgtcaatatattaaataaagcatacataatcttgccgatccatgggatataccttgaaaaagaatggtgccaattatcatcatgggaggattttaaaaataatatacataagcaaagcgttgaggttccacgacagaataatgagtatgactgtggcatcttcatgctttattatattgaacggtttataaaagaggctccagaaagattcacaattgataaacttgatatgtttaatcggagttggttcaaacctgaagaagcatctggtctaaggcggagaataagagagcttctgctggaagaatttgaaagtgccaagctggatgatgctttaccaggagcggatgcatctgagcgtgatgacagcataaatgatggagaattgaaaccagatgcatcttctgacagttcagaaatggtcgtagaggtggtaggagggttgggaggcactgacaagagcaatgaaggcatcaaggttgtagcatcagaagaggcaagtggagagtcaggagatgctggtaagagtaccgaaggtactgttgcagcatcagaagaaaagagtattgaaggcatcaatgttgcagaaccagaagatgcttgtgagagtataggaggcatctatgttgcagaatcagatgaagcaagtggggagtttggagagattggtaagaccaacaaaggcaccaaagttgcagtgtcagaaggagcaagtgtgtctggatacactgataagaatatggaagacatctctgactctgaggttgcagtattagacaaagctcccactagcagctacagacgtggagagaagaccacagcctgtgttctatcagaagcagcttcactttccgatagcgtcaaagatgaacaaggtatggtgaaaccagattctggcagctcaaaagctgagagagaaggagatttgattgtaattgcatcgccggaaagatcggaagggaatgatgagatcattggtagcatgccaattacagatgtagtttgtgacagctgcgacagcgacaccgagaccaagcaattgacacaaggggccatgcaccgtgcaaaccttctggttgcgttctcacgaagatgcgaaattgtgacagattttggtaatgatattttgaggttcctgtggccgtataccaagcacatagatgaccaggccaggcggtga

SEQ ID NO: 1977 - DNA, 112 bp, Zea mays
  Peptide Sequence Number=SeqID_43756
cgagaaatttcagtatcttacgctcagtatgcgcgcctctccagatctgacacctaatatccacgcgaccacgctgatcagcccaaacggctgcagccagccgaacggctag

SEQ ID NO: 1978 - DNA, 504 bp, Zea mays
  Peptide Sequence Number=SeqID_43757
atggcggcgtccgcgagccgggcccgcgccggcgccggcggcgctggcgaggagtacgaggacctgctgccggtgatgggcgagcggctgggcgtggcggggctgctggcggagctgcgcgcggggttcaggctgctggcggaccgggagcggggcgccatcacgcccgacagcctgcggcgcggcgcggcggcggcgctgggcgtggccgggatggcgcacgccgacgcggccgccatggtgcgcgagggcgacgccgacggcgacggcgcgctcagcgaggccgagttctgcgtcctcatggtgcgcctcagccccggcatcatggcccacgccgaggcctggctcgccgacgccatcgccgccgacgagatgcagctggttgatgatgccatgcccatggatgctgctgccgctgatgattacggtggcgccggcagccgaggccacgccgccgccgctcctgatagtgatactgctcccgcccgccggtcgtcggtttga

SEQ ID NO: 1979 - DNA, 861 bp, Zea mays
  Peptide Sequence Number=SeqID_43758
atgccacagggcactcttccttgttatgaatgccgcgtgctgaaatggtacatgtggtccatgacagccctccaaggaagttccttctccagattccgggttgagatgaccaagataatctcgcttgtctacgttgtggacgacatatttgactttgttggcacactggaggagctctccctcttcactgaagcagtcaaaatgtgggatactgtggctgctgattcactccctagttacatgagatcatgctataatgctctttacaccattacaaatgagatagcggaaatggcagaaaagaagcatggattgaattctattaatcatctcagaaaagcgtgggcaacgttgtttgatggatttatggttgaggcaagatggctagcaattgatcaggtccctactgcggaggactacttgagaaatggtgttgtcacatcaggagtgcctcttacatttgtacacatattcaccctcatggggtgtgaacaaagtatcgaagcactcattgaccagatgccctctgtcatctcgtgcccagccaagatcctccgacttcaggatgacatgggcagtgctaaagatgaagctcaagaaggatttgacggatcctatagggatttctacctcaaggagaaccctagatgcaaccgtaatgatgcggaagcacatatgcgtagcttgatcgcaagggagtgggaggagctcaatagggagtgtttatacacgaggaccttctcctctaactgcacacgtgtctgcttgaacaccgcgagaatgatcggtgtcatgtactcatacaacaaggaacagaggcttcttgtccttgaggactatgcaaagatgttgatactttga

SEQ ID NO: 1980 - DNA, 738 bp, Zea mays
  Peptide Sequence Number=SeqID_43759
atggaggactgggattctgaagaattccagccagttgtgcctgttgtgaaagccgagccacttaaaaatcagtgggctgatgaagatgttgaagaagatgatgtaaaagaatcatgggaagaagaggaggaggaggagaaacctaagccagcgccagtggaaaaggtcgctgcaaaacctagcactaaggctcctgctaaaaagggaaaacagcaagcattgacaagtgctgaagaaccagatgagcctcctcttagtcccacttcacagaaaattcgccaacaaagacttgtggaagaagctgacttcaagtctaccaccgagctttttgcaaagaagggcagtgagcaaaagtcactagatacttttattccaaagtccgagagtgactttgcggaatacgcggagcttattgcaaacaaactacgcccctatgagaaaagctttcactacatggctctgcttaagaatgtcatgagactttccatgacatcgttgaaaggtgcggacgccaaagatatatcttcttccgtgacggcaattgctaacgagaagatcaaggctgagaaggaggctgcagcaggcaaaaagaaacaaggagcgaaaaagaagcaactccacatcgagaaaggagacgacgacttcatccccggccggggtggtggctacgatgaccccgatgagtacgacttcatcacgtacctcggcctcggcgccacaggctacggcgccgagtaa

SEQ ID NO: 1981 - DNA, 2259 bp, Zea mays
  Peptide Sequence Number=SeqID_43760
atggagggcgttcacagcctcctggcccggcccaactccgcgccgttcgccttctcaccgctgcccctccgcaggagccacaggccgccaccgcctggcccctccacctgccgcgccgccagccgctgggccgaccgcctcttcgccgacttccacctcctccccgccgccgccgacccgccagccgcggcctcctcttcctcctcgtccccgttcgtcccgatcttccccgaagccgccgaccgcgccttgcccctcccggtcgacttctacaagattcttggtgcggagccacatttcctaggcgatggcattcggagggcgttcgagtcgcggatagctaagccacctcagtatgggtacagcacagaagctcttgttgggcgacggcaaatgctgcagattgcccatgatactctcacaaaccagagctcgcgcaccgagtacgaccgtgcgctttccgaggaccgtgatgcggcactcaccatggatgttgcctgggataaggaggctggggaggcacaactggtgttagcaactggagagcacttgcttcaggaccgtccacctaagcggttcaagcaggatgtggtgctagcaatggcattggcttatgtggacatatcaagggatgctatggcagcaagccctccagatgtaatctgctgttgtgaggtgcttgagagggcactgaagctcctgcaggaggatggtgcaagcaatcttgcacctgaactgcttgcacagattgatgaaactttggaggagattacacctcgttgtgtattggagcttcttgctcttcctactgatgaaaaacataaaaataaacgccaagaaggtctgcaaggtgcaaaaaacatattgtggagtgttggcaggggtggtattgctactgttggaggaggattttctcgtgaggccttcatgaatgaggctttcttgcagatgacatcagctgagcagatggatttcttctctaaaacaccgaatagcataccacctgaatggtttgagatctatagtgtcgcacttgcccacattgctcaagcaattgcaagtaaaaggccacaattcatcatgatggcagatgaactcttcgaacaacttcagaagttcaatataggttctcaatatccttatgaaaacgagatggacctcgcattagaaagggcactctgctcgttacttgtgggggatatttgcaattgcagaatgtggcttggaattgataatgagtcctcgtcatatagggaccccaaaaatatcgagtttgtggtgaataactctagcatgaacgaagagaatgatcttcttccagggctgtgcaagctcttggagacatggcttgtctccgaggtattcccaaggagcagagatacccgagggacgcagttcagactgggagactattacgacgacccaaaagttctaagctacttagaaaggatggaaggcggtggtgcttcccatttagctgcagctgccgctatagcaaaacttggtgctcaagctactgctgcgcttggtactgtaaaatcaagtgctcttcaagctttcagtaaggttttcccattgacagaacagctagacatgtcaggcaaggatatcccaagtgatgatcttgataaatctcttgaaaaactcgcccaaggaagtgttgctggagacgctatccatgattccagaaatgacgccttgaagattatctctgctggtacactgcttgcactatttgcagtgttaggtctcaagtgcttgcctcgtaacaagtcacttcctgctcttaggggcgagtatgggtctgtggcggttgttgactccattgatggtccagcggcagatgaagagccactggaaatccctaggatggacgcgaagttggctgaagacattgttcgcaggtggcaaagcatcaagtccaaggctttggggccagaacacactgtcacggcattgcaagaggtcctcggcggcaacatgctgaaggtgtgggcggaccgagctgcagagatcgagcgccacggctggttctgggagtacgcgctctctggcgtgacgatcgacagcatcaccgtctccgtggacggccggcgggcagcggtggaggcgacgatcgaggaggtgggccggcttaccgacgtgaccgaccctaagaacgacgacgcgtacgacaccaagtacaccgcccggtacgagatgacctactccaggccagcagggtggaggatcaccgaaggcgcagtcctcaggtcgtag

SEQ ID NO: 1982 - DNA, 561 bp, Zea mays
  Peptide Sequence Number=SeqID_43761
atggcgcgcctccgccccgaaccaatcgaccgcgagaaggtcagttcttacactccttgcgtcccccttgctcatggtgtcagtcttctaaacctgccctctgctgctcagggttttcacaaggattcagcagaaaggtttgaatcatcaaactatgatatttttttaaaagggcaatttactgccagtttacttacactgggaattatattagaaatgaaaaagttgatcatcagttactgttttcaggttgctggtcaccaccaaaatgaagagttttctgtgagagggaaagaaccaaaggatgaagttcagatttacacatggaaggatgccactctccgtgagcttactgatcttgtgaaagaggttgctcttccagcaaggaaaaggaacgcgaggctttcttttgcatttgtatacccagacaagaatggtcgttttgttgtcagacaggtgggttcgaccttcgcttatggccatggaagaggtgatgatgccaaaactcttgcagagcttgggttccagattggcgattacctgagcgtcgcgatcatgtaa

SEQ ID NO: 1983 - DNA, 1878 bp, Zea mays
  Peptide Sequence Number=SeqID_43762
atgacggaaaaaaaaatcccacgtggtcagtcaaaggttagtattaaacgagaggtccagattggtcttgtgcttgagttcatatgctggctgttgagaagctgcatgcttgcaacaccacaccacataaatttggagggcctgcggacgccccgatgcatatcactcacatgcattcttgctcctgctaggaggatcggaaccagcatgtctgaacgatgcatcttctccttctccactctggcttcgccggcggcagatggaaacaacagccggcgaggaggccgccaccgtggcgattccatcgtcacccgctcttcggcggcggccaacacgctgccgctgctccgcaatgacgacttcgacctccgggagggcctgacggacgtacgaaatgttctccgtcaacgtcagaagagtggctgcagcagcagggacatgatggtcaccgtcgacaacctcaagcgcctctgcatcgaccactacttccaggaagagatcgagcgcgccatgggtgcctgctgcatgggtctcatccacagcgacgatctcttcgacgcgacgcttgccttcaggctcctcagagaggccggccatggcgtttcagcagatgatgttttacggaggttcactgacgacgacgacagcggcggcgagttcaggctcgatctcagcaaggacatcagagggctgctgagcctgcacgacatgtctcacctggacatgggaggggaggagttgctctgcaaggcaagagtgttctcgcgccaccacctcgcttctgccgtcaggtacctggagccaagccttggcgagtacgtgagacagtcgcttgaccacccctaccacctgagcctcacgcagtacaaggctcggcaccacctcgcctacctccagagcctgcccgtcagagacaccgcgctcgagagactagtggctgcagagttccagctcaacagatcgctgcatcagaaagaaatgcaggccattaaaagatggtggatggagctaggattggttcaagaaatacctgtggtgagggaccaggtgctgaaatggtacatgtggtccatgacagcgctccaaggacgttccttctccagacaccgggttcagatcaccaagatcatcgcgctcgtctatgtcgtcgacgacatatttgaccttgttgccacactagatgagctctccctctttgcagaggcagtcaaaatgtggaacagcacggctgcagagtcactccctagctacatgagatcatgctacaaggctctttacaccgtcacaaatgagatagcggatacggccgaaaaggagcatggattgaaccatgttaatcatcttagaaaagcatgggcagcgttgtttgatggatttatggtcgaggcaagatggctagcaactgataaggttcctactgcagaggattacctgacgaatggtgttgtcacatcaggagtgccgctcacatttgtacacatattcatcatgctagggtgtgacgatgatcaaagtacccaagctctcgttgaccacatgccctctgtcatctcttgcccagccaagatcctccggctttgggatgacatgggcagtgcagaggatgaagctcaggaaggattcgatggttcctatagggatttctacctcatggagaaccctagatgcagccgtagcgatgcggaagcacatatgcgtagcttgatcgcaagggagtgggaggagctcaatagggagtgcttatgcaagaggaccttctcctctagcttcacacacgtctgcttgaacgccgcgcgaatgatcagtgtcatgtactcatacaacaaggaacaaaggcttcttgtccttgaggactatgcaaggatgttgatactttga

SEQ ID NO: 1984 - DNA, 483 bp, Zea mays
  Peptide Sequence Number=SeqID_43763
atgaattttgtgaggatctcggtgaagcttggtatagctgacggtggctacgacgatcatgtggtagccgacagtagaagaggaggtgagccggtcgtgattacgcatctcgacgaagacacaaaggagcaaggaggagccggcgctggcgggccctgtagccgcgtcaatgaagctgaagggatggtgggcctatggcatggtggaggcatgatggaggcctcaatacctgacgacaggctcaagatacacaccttcaatggctcactcatctccttcaaggcattgggcgggggtggccacggcaggcgggggcgggggcgggtcggtcgcggtgggcggggccgttggcggccgcgccggcgggagtggcggacgggggtcggagcgggcgcgccagcggaggcgtgcagcggcacgcggcttcggtcctggtggaagacacgggagggagaaagaagaatgagaagaggatatgattga

SEQ ID NO: 1985 - DNA, 928 bp, Zea mays
  Peptide Sequence Number=SeqID_43764
gattttactcgcgtttctcaccgtactggagagagttggggaaagtttcgtatcatggttgccaatgtatagtgaagcaaagctcgcatttatcgtgtacttgtggtatccaaagacacgggggactgcctatgtatacgagtcattcttcaagccatacattgcaaaacatgaaactgagattgatcgaaatctgcttgagttgaggacaagggccggtgacatggcagttctttatttccagagggttacaaactatgctcagacaaggtcttatgaaatcttgcagtatattgcctcacagtcaccgactcaaagacagatgttattatcattttcactggccagtctaaacatttatgcaatcaaactgcctaaaattttcaagatattagccactaatctattaagagtttctgctgtggatgatgtaattcactcatttcatttgcacgagatatctctagcagtcatattgttgcatgggcatccagaattgccgcatgtggttatgcttattggtgtcttcgccatctcttcctttttgcaggcacatcagcagcagcaacgcccaccaccgccacggactcggcaggtcaaccctgcacctccacctattcccgcaccctccgcgcctccgatgccaccacagcctgcccaagcccaagttcctcccactccaccaaggcccctagttccagtggttcctcctggcgcagtgcctcctgccccgccaccaactgctcctgaagccaccgccaccaacggtcttcaggacaccgaaaccatgcaggtcgacccacctcgtgcttcactgagcggcccaccactaccacctgaggagacgctcatcgaggaggcgatccggctgacccggggccggctcaggaggcgcttggctgggggatctggaccaccgcaaaattag

SEQ ID NO: 1986 - DNA, 197 bp, Zea mays
  Peptide Sequence Number=SeqID_43765
atggtcttcgacggttctgcgcctgcctctaggctagcggctagcactaccgcgagcgggatcaagatgattggttcattcattaccggaatgctaacgcttgttctcggatacgcgtaccctgcatacgactgctacaagacagtggagctgaacaggcctgaggtcgagcagctgcggttctggtgtcagtactg

SEQ ID NO: 1987 - DNA, 1107 bp, Zea mays
  Peptide Sequence Number=SeqID_43766
atggaggcgtacaagctctgggtgcgcaggaacagggacctcgtccgatccctcgagtccctcgccaacgtactcccccgatcccgcttcccgctctgcttccgttccgtcataatcgtttcgtgctatccgttggttggtggtgggggccggggctcacatggatactccccgagcgcttcgccaactctgagatcgcaccggaagcagctcatcttctacctagctgtgagtcgtgagagtgagctgattgctcacctgtgcagggtgatcaagggccaacatattttgagtgtatatgcactactgggtattgtgagttctgtcaatcagcacataattgatgcgcccactgagaatcactcatttgcctccaaggaacaatctatcccatggggtcttgttgtctctgtactaaaggatgtggaggcggttgttgaggttgctgcccagcactttgttggcgatgatcgcaagtggagctttcttgctgttacagaagcagtgaaagcaggtgtcaggttagctgcttttcgggagagtggatacaagatgctcttacaaggaggggaggtggtaaatgaagaagaggtgaccgttcttgaaaatagttatggagtaaatggtaatggagtaccagccatctatccgatggatggacatgcagaaaatggtcacaaaactatggccaagggtctggatggtaaaaatggatttgtatctaagagtcttgagaaaagagcagtagctgctttgaacaaatttggtgagaacgcaaagatgatgtctgatcctatgtggattcggaggctccaacctactcctgagccaactgtgatggttgccgagaagccaactttggcaagtatttggtctgctaaaggcggtactgggcgcttgtttgttttaggggagttgaaaaggcgaaagatgatgtgggctctttatgtgatgagagatcctttctttgccagttacagcaagcgtcacctcctgaaggctgaacaggttctgaatccggtgccattgattggcttccttacagggaaacttgtagagctactggaggggattcagacgagatacacgtacacatcaggttcatag

SEQ ID NO: 1988 - DNA, 1064 bp, Zea mays
  Peptide Sequence Number=SeqID_43767
atggcgcctcctgttgacgtggcgggcctgtgccctaggcagggtgacgtgggggctcctccgaagccgaggctgagtctgtcttctgttgccgaggccgagtccgagccatggggtcgggcgaggcggaggtcgttcggccgaggccagggcggagtccgagccctggggtcgggcgaggcggagtttcgtcgtcttccgggtcttagcccgagtccgagccctggggtcgggcggagcggacccgagtccgagccctggggtcgggcggagcggagttccgtcgtcttccgggtcttagcccgagtccgagccctggggtcgggcggagcggagttcgccgtcttccgggtcttagcccgagtccgagccctggggtcgggcggagcggagttcgccgtggcgccttcggcaaggcctgactgcctggttgcttctgagcgaagccaaggcctcgggcgagccggtgatgtgtccgccgtaaaaaggggggcctcgggcgagacagaactttacgctgatgggggttaccagctgagaattaggcgtcttgaggcgcgggtgggagacttgtacgtctactacgactgggaggtctcctacgtctcgacgcccgcttttgcctgtgaatcagcctcagtgccacaccccgtcctcggtgccttccaacctccccttcgcgctcgacctgcccatcggcggaggttcggcgctcgggtccccatcctcgagcagtgctccttctcgctgctcccctccatcgttgccccccccaccaccagtgcctcgctcctccacgccttcgccactctcaccgtctccgacgggcgccacccgtttcacgatcgcgacggccacatgcaacacttccgctcgcgcctcatggggcggcacatatctatcacctttggcctggagggctactactccactagtccaccgtcgtccggagacctctgcatggtgggcaccgagtccaggagcacatctccgaccacctccgcccgtggagccgctacgcatagttctgggtctgcgtcgcggacatctacatcagctacgag

SEQ ID NO: 1989 - DNA, 534 bp, Zea mays
  Peptide Sequence Number=SeqID_43768
atggcaccgcgatggacatggaggttggccggcggcgaggctcttcaggtgctgccgtgctggcgagttgggcagttggcgactggcgagtcagcgagtggcgatggtcttcgggcgcgcgcacgggtgtgccgcgtgcggacctgcccggccgccccgtccgcgagtggcgatggtcttcgaagcgggagcagtggacgctggcagtctggcacgccgccgcctgccggtggccgcttgaccgagcgggagcagtggatcagtgccgagcgagagcagtggagcagtggatcagtgattcagtgccggagcgggacgggagcagtggatcagtggacgactggacatggtcagtggtcacgtggagtggaggcttggagcgccgtcgcgccgagcggcgagcacggagcgcccgaggcggcgtggcagccaccgtctagggtttgtcagtttgtggcggtctccggtctggcggatttgcgaattgggatttgggaatttggcgttgccgcgttgccttgcctctttgcgtaa

SEQ ID NO: 1990 - DNA, 801 bp, Zea mays
  Peptide Sequence Number=SeqID_43769
atgacagcaattggttggcaatcaataggtgttgcatgcaaattcattgccaatgtggcagaacagcctggtgggagtattgatagtaaatttatgttttataatggtctgcccatctttgtgtatggcggacagtgtcctggtaacttgtctgaagtagctgtataccgttttggtatttttctgagattcctctgcagatgcatttatgattgtgtccaggtgcaaaatgtgaagctaattcgtgacaagcatactggacaacttcagggctatggttttattgaattcataagccgcgctgctgctgaaagagttcttcagacttacaacgggacaatgatgccaaatgttgagttgccattccggttgaattgggctagtgctggtgaaaaacgtgatgacacccccgactatacaatatttgttggtgatttggctgctgatgttacagactatgtattacaagagacatttagggcacattacccttctgtgaagggtgcaaaagttgtaacagacaagctgacaatgcgcacaaagggttatggttttgtgaagtttggtgatcctaatgagcaagctcgtgcaatgactgagatgaatggcatgctatgttcttctaggcctatgcgtattgggcctgctgcaaacaagaaagctactgttgttcaggagaaagttaattttttggttgttggtttgttacttctacctgttccaaatgtattgaagcttggttcagtcgttgaagaagtcagtagctccacagcatttcgttcgttaatttggatcatttga

SEQ ID NO: 1991 - DNA, 489 bp, Zea mays
  Peptide Sequence Number=SeqID_43770
atggagatttttgttggtggtcttgaccccaatgtcactgaagatatgttgaaacaagttttcaccccttatggggacgtagtccatgttaagattcctgttggcaaaagatgtggttttgttcaatatgctaacagatcttcggcagaggaggcattggtaattctgcaaggcaccttggttggagggcagaatgtgaggctttcatggggtcgcagcccttcaaacaaacaagttcagcctcaacaggactccaaccagtgggccggggctaatgctggatattatggctacggtcaaggctatgaggcctatgggtacccccagtctcaggaccctaatatgtataattatggagctggagcttatgctggctatccaaattaccaacaacaaccagtagcacagcaaccgccgcagcaacagtttttggcgaccatggtaaagtggaacatcgaccttgtttctgctggatttttgtatctttga

SEQ ID NO: 1992 - DNA, 249 bp, Zea mays
  Peptide Sequence Number=SeqID_43771
atggcggacaacgtagcagaggctgtgcgaggggaagagatgaggaggtgggcgattctggcgtccgagggagagggaatggataaattgccgaactgcttacgaggcgtgggcgatcgcgtgagcgcgcaccacgcggggggagagagaatgtggggcgcgcgggctgatgctgcgtctgcacgacgcgcgcggcgtgtgggacgtggcgcggtctggcgcctgggcctcctggtgggcgcgcgctag

SEQ ID NO: 1993 - DNA, 357 bp, Zea mays
  Peptide Sequence Number=SeqID_43772
atgctgtggaaggtggggaggcgctctggaaggcgtgcgatggacgaggcgacgctgcgggaggttggcagagcttcgggaggcgtgtggtggggtggtcgtgccctggcagatggcgctacgggcggtggcggcttcgatggagcttcaggaggcgtatggtgggtggcaacgccccgacggatggcgctacgggcggcgacagcttcagctctggcggacgtggcatcgacgaacgagtgtgggtgcgacttctacatggcagtgagggcggcgacgatgaacagcttcggcggggcatggagccggggatgggccgagaaagggcgtcggtcacaggcgatggtggggcggtga

SEQ ID NO: 1994 - DNA, 2190 bp, Zea mays
  Peptide Sequence Number=SeqID_43773
atgcctccgaagaagcgcgccgccgccgccgcctcttcaaagaagccgcagccatcgcagccatcgcagcccgccaagttcggtatcctccacttcttcgagcgccagacccaggcctcccagaacgccaagcgccagaagcccgacccccctgcgcctccccctcctcctccgccgccgcccgagaaggagccctcggaggtctcgccggaggttaccaagacgctggcgccgaagcgtgtcagattttctcccggaatgttgattaagcagagccaggacgatggggtcgcggaggtggtgacttggaagatctcgccggtgaaccatcgccttggtacgacgaagtcgaagcaatttctggggatggcgccccatccgtactcaagcgagaaaaattcctcccttgatgctatgaagaagtggcattcatctccattgggcttgtcaaggtgtactactttgggaagtaattcaggagttcttggatctgctatagttggttgtgatggtgtgggggatactcagagtccatttcggaccccaccatcgctttcctatggctgcaacgaggtaaccttcttgttccttgagcagcaagtgagcagtggtgtaacttctgagggaggtgccgaaccatcgggagcagggcagcacaaaaaggcattacttgatcttctagaccaagtagaggatgcaatcatggaagaagaattgcctgctgatcctggaaataaaggagggcaaaccacgaatgaggatatcaccaacaatagccgttctcctgttgctgatactgacttaactatcccatccaagaaaactattcatgtcccacccttcaatagttttcttgtcttggaggtgtccgaaaaacataaagctgatgattcatcatgtgatcgctaccctgttaaggttctgcgtctgctgaatgaacactctggtacagaatgtgccgtgcatctgtgtgatgagtggttcgacagtattgttgggcctggtgatactgtaaatgtcattggagaatttagtaaccatggaaaatgtattgttgaccatgacaataatcttgttattgtccatccagagcaactcatttccgggacacgggctggattactcaatgatgctccttcatggcagtttttggaacaacaggcaaaggaagtacttctgaaaaatattgaaactttatatgcatgtggagtcaatgaaagcaacatgtactctacgctcattgaagctatccccaaaatgttgaattggttcaagtgtttcttaaagggttcaaaatgttctgatgttgattttggacataacgaagtgagaaagactgttggagtgactgaggtcatggatattgaggaaatggcatgggcaccaagatatggtatgaaaggggttatcgatgcttctgttagatcaagagttgagtcacacaatggtggttcatatgatagaataatgccactagagttcaaaactggcaaagcaactagtggccaggcagctatggaacactcagctcaggtgatgttatacacactgttgatgacagagagatacttgaatgaggatattgacttgggccttctgtattatcttcacacagaccagacattggcacacggaggcagtggtacaactagtgggcttggtgatctatttgacaaccttgtgaatcacttaacagtcacacatcataattttcttaaacattgggatagattgattgatcttgaagctagagcttctcaggtaaaaaagaacatcttgcagcctcataattcaaactatgggagtgggagttctgctgtaccttattttgttcttgacataaaaaatggacattcaatagattcttcaggaaaaagcaaaagatacatatataattttgttcagcaaaagatgcagcctgaaacagctgatcagttagatgctcaatttgacagcatagatttcagcctgaaagttggtgattttgtgaaggtaacgcactggaaaatctcaacatggtatttagagctatggttacaacaacactcatacgtagagagcagagggggcgcggccctgcgcctccccactgtcaacttcaccgtgccgacgaactccttcccgcacggcgcaacgacctcctctacccacgctgcccaggacgtgctgggtgtcgcgagccgtgtgtaa

SEQ ID NO: 1995 - DNA, 342 bp, Zea mays
  Peptide Sequence Number=SeqID_43774
atgccggacgcgccgccgccttgctgcagatgcgctgctcctgcttgctggtgctggtgccgggtgcgtgcgtgtggcgtgcgtgctggtgccgggtgcgtgcgtgcggtgtgcggcgtgcgtgctgatgctgcagcaagccgtgcggtgtgcggcgtgcgtgctggtgcagcaagccgtgctggtgccaggtgcggcgtgcgtgcggcgtgcagcgtgctggagcctggagcagagctgtggcgggaggcgggtggtggtggagagtctggagaagcgatgtgccgccgtccgtccgtcgtcgccgcaacctgtacctgtctgtctctcggtctctcctag

SEQ ID NO: 1996 - DNA, 201 bp, Zea mays
  Peptide Sequence Number=SeqID_43775
atgggcacaccggacagtccggtggtgcaccggacaagcactgttcactgtccgtcgaccgttggcgccaggttatcgttgctctgttggctcactggacatgtctggtgcacaccagacagtccgatgaattatagcagagcacgccctgagaaaacccgagagtggcctattgaaagtcgcctagaggggggtgaatag

SEQ ID NO: 1997 - DNA, 393 bp, Zea mays
  Peptide Sequence Number=SeqID_43776
atggctataaggattctttcactcactgcaagtgcctcgggatgtgaaaggaattggagttgctttgaagggaaaaaagctaaggccaacaataacaacaaagtagatcccctgttggcagctgatgctgtttctgctcaagggtggattgttgaaggtggagatgaagaaagctctaatgtcaacattgtgactggactaacatggcaacagatcgcagatgcatgggggcctaaggaggtcacaaaactgcggaagagtgctagattggctcagccaagagacatcgaagaagagcaactcccatctaaaaatgaagaagaagaacccataaatgaggaagaaatagaatttgaatctgaccaggatgaagtgatcacaactggttattag

SEQ ID NO: 1998 - DNA, 138 bp, Zea mays
  Peptide Sequence Number=SeqID_43777
atggacgcatttcggatagctctcgacgcgcgggtcgactatgtggaggtggatgtttcgaggtcctatgacggtgtgctctttgctctgcatgatagccattcagggtgcagtggttgggacaatcacatatcttag

SEQ ID NO: 1999 - DNA, 480 bp, Zea mays
  Peptide Sequence Number=SeqID_43778
atggtggtgatggagatggtggtcacggagccagcaactcatggccgggggagcacgtcaaggcaccgccgtagcccaaacccgagacggattacttcgccgagaaaagaaatctgcctcctaggcaagagaaaactggttactatgatagacagtgtgcagtgtgctggttcaagggtgaaggataattctgaacaaggacagggtaatggtctcgtgcgtgaggagcactggctcagctcacttcggctgcgccttcccctacgtcagggcctcctcttcggcgtaagtgcttgctttcaacgctgtagtcactgtcgccttggaaatgtagtttcaggcattgctattgtccgtctaactcactgtgaattgaagtgcgaggaacctcgagccgctgagggcgatagccacgcaggcgccccctaccgtgccacaatattcgagtggggagaagacaaagattggcatcaacggtga

SEQ ID NO: 2000 - DNA, 369 bp, Zea mays
  Peptide Sequence Number=SeqID_43779
atgaatgcactttcaaatgtgctcgagcccggagacatccccacgcttgttgagctcggtctcactactccaccaggcatggcacaggtgtccacatgcgcgtgttctgcctctagaaatctcggtctgcaaactctccatctcgcgccgaagctcgtgagcgggagtggccacggcaacagcgtggactggtgggccttcgacgtcttcctctacgagctcgtctacggccgcacgcccttcaagggccacaccaaggaggccaccctcaagaacatcctctccaagcaggccacttacctaggttttagtttgtgtagctttgctcgttattttgtacttgttcttctcacatatttgttcgcttag

SEQ ID NO: 2001 - DNA, 375 bp, Zea mays
  Peptide Sequence Number=SeqID_43780
atgccgatgcgtcgtgccgattcgtttgatctggccgacgcggactctggcggagaagaggttttgtttgggggaagccgctgggattttattccccctcgagttttcctcggtggctcgggcctcggtgtatatatctccgacgcgtacacggtaagtggcctgcttggagaggatgttcttgagggtggcctccttggtgtggcccttgaagggcgtgcggccgtagacgagctcgtagaggaagacgtcgaaggcccaccagtccacgctgttgccgtggccactcccgctcacgagcttcggcgcgagatggagagtttgcagaccgagatttctagaggcagaacacgcgcatgtggacacctacactga

SEQ ID NO: 2002 - DNA, 435 bp, Zea mays
  Peptide Sequence Number=SeqID_43781
atggaggacgtggacgtctcgcggcagctgaagcagatgacgaacttcatccgccaggaggccgtcgagaaggccgccgagatcgaggccgccgccgccgaggagttccaaatagaaaagttgcagctggtggaagctgaaaagaagaagatcaggcaggaatatgaccggaaagagaagcaagttggcatcaagaagaaaattgattactcgatgcagctcaatgcttccagaattaaagtccttcaagctcaggatgatttggtaacagatatgttggagtcagcaaggaaagagctactgtgcataagtagagatcaccccacttacaagaagctcctcaagacacttattgttcagtctgttagagttctcattgctggagataacaccaatccaaccaagctgaatattgctgaaaactggctgttttga

SEQ ID NO: 2003 - DNA, 1485 bp, Zea mays
  Peptide Sequence Number=SeqID_43782
atgacggccggcgctggcgagccccgccgtatagtcctcctcctagacctcgataccttcctccccacttccagctcaagcacccccgctgccgcctcctacctcgccgaagtcctgcccgccgccacctccctgctcgccgcctgccggtccccggcgtccctctccgcggggcgcctcttcttctcctccctctccccgatcctctcctcctccctcctccctaggccgctcccggccgcccccaccccgctctccttcgacctccacccggccaccctcgcgtccctcgccccgctccgctgcctggcgctccgggcgacccccgcgcacccgcgcgcccccgcctcctcgtcagtcgccaaatctctcctccagcttgagcacgactactcctgggaccacgacccccctcgccgccgtcgctgccgcggcttcgatccgccgcccaatctggtggctctcttcacgcccgtcacggaattcgatctgttcggggacgacgccagcttcgtcgagaaattccgcaaggttttcggtcctgtcagggaccgcctctcggcgattggtctacaggtgtgctgggtcgtcgtcccatccgcctccgtctccgcctctgccgccgccagtgaggggatcaggagggcggtcaccgagctgggctggtggttcactaccgccgatgcggtcgcgttggggtcggccgttgcaccgccggcgctcgtgtggggaggtgttggacttggcggcggggaaggtggacggcgaggggaggtggtgttggagatcgcggatgtggagggcaaaccacttgtctgcaagggctgtgaggtcgaggtggttggctcctcacggttgcagcaggccagcggcaatgccgtgtccaggatacatgtcaggtacatcaactccatggaggatgtgatcaagaagatctacagggagatggagtttgatttatttgatgacgacgacggagttgactactcagattctctacccagcagcagcaaccaggacgacggcaggtgccgcagccagcggggctccgacagcgcgagcgcctccgcgctccacctgctgcagcgggacgccaggagcagccggcagcgcgaggacgacgaccggcacgacaagctgacggcgagggcccgggagcggcgggaccggcagaggcggctctcctccttcaccagctgggtgcccgacctgcgccgcgtctgggcgctcaagcacccggggaaagagccgtgcgcgtgggtgccgcggtcccggtccaggtcgtgcgcgaagcggcggcgggccgcgtgcaccgatgtcgtcctcgagacgccggtgacctccggcaaaaggcacatgagcgggtcggagtccgacgacgccagacaggtggcggcgaggaggtccgccgcgctcggggccgtgtccaagaccttgtttgacgacgaggtggtcgagactgacgttagctcgagtagcacgtaa

SEQ ID NO: 2004 - DNA, 558 bp, Zea mays
  Peptide Sequence Number=SeqID_43783
atgtcggcaccggacccttgcctgagcaaggcctgggtattctctgccccagagtcccggaacccggctcgttaccaacttctccctagtaggctcgacgtgtcgaggctggataccagtatactcaagaaagaactggtgacccagcccacagaagtactcgccttaggaccggatctccggcctgaaattccctactatgcacgaaccgttggtggtagcgcctgggcgcctagacgccgggatgaccgaggcctaggcctggccaagccagagtgtcccatgctaagcaggcggtcgacgtcgtcacgccactacttcatggaccctggcgaggccgtggagctaggagggtggcacaacaactccctggccatagacaaagcgccaggcgtagcccttgacgccctggacgcctatgcaggggtgtgctgccgtgtagaacgcacagcagcagcaccaggcatagggcggctggaggcccgaagcgtggaagaggcagcttcctcctccaccggaaagtcctcggggatgaagtcgtggtgctcgatggtttga

SEQ ID NO: 2005 - DNA, 249 bp, Zea mays
  Peptide Sequence Number=SeqID_43784
atggccgctcaggaactaatcatggccatctctccctgtgctgtgctccacataatcaccgctagagctgaggatttcaagtgcgagttgcagtcgcagtcgcagtcgcagtcgcaagctgctttcaggagtcaggacacgggtggctgtggcggcaatggagccgagaatccgctatggtcaccagataccagtactggtctctggcaatgtgtttcagttcataacatcgaagatatacacttataa

SEQ ID NO: 2006 - DNA, 2397 bp, Zea mays
  Peptide Sequence Number=SeqID_43785
atgccgctgccgccgctcctgctctgcgtctgcctctacctcacccacctcccccgcctcgcctcctccgagcccgacgccgacaaggcggcgctgctggcgttcctcgccggcgtgggccgcggcgccaccgcccgcgcgcgcatcaactggcccaccaccccgctcgcctgcgccagccccggccacggccccggctggacgggggtcacctgcagccccgacggcgcgcgcgtcgtggcgctgcacctcccggggctgggcctctcgggcgccgtccagtccggcacgccgttcctggtcgcgtcgcatcaccacaggaatggcggatctcgccgctcaaccaccgtccagcagcgttcgtttcgttgctccacctccactcatcagatccatccacgcgagagaccgaggcaggcagccatgccgctgccgctgccgctgccgccgctcctgctctgcgtctgcgtctgcgtctgcctctgcctctacctcacccacctcccccgcctcgcctcctccgagcccgacgccgacaaggcggcgctgctggcgttcctcgccggcgtgggccgcggcgccaccgcgcgcgcgcgcatcaactggcccaccaccccgctcgcctgcgccggccccggaccgggctggacgggagtcacctgcagccccgacggcgcgcgcgtcgtggcgttgcacctcccggggctgggcctctcgggcgccgtgcaacccggcacgctcggccgcctcacggcgctgcagctgctcagcctgcgctccaacaacctgtcgggcccgctccccgccgacctcctgcgcctgcccgcgctcgcggggctccacctccaccgcaacgccttctccggcgcgctcccgcccgggctcgcggggctcgccgcgctccaggcgctcgacctctcctccaacggcttcggcggcggcatccccggcgcgctcaccagcctcacccgccttgtcgcgctcgacctctccaacaactcgctctccggccgcgtcccggacctcggcctccccgcgctccagttcctcaacctctccaacaaccgcctcgacgggcccgtgccaccgtccctcctccgcttcgccgacgccgcattcgcgggcaacgacctgacgcgcccgcccgcagcagctcctcccgccgccgccgcccccgccgcgcggacgcggcgggtcaggctcagcgaggcggccatcctcgccgtcgccgtcggcggctgcgtcctcgcgttcgccgtcgccgcggtgctgctcctcgcattctgcaacagggagggccgcgacgacgacgacgacgacacgggaggggccggcgggaagggcggggagaagaaggggagggagtcgccggagtccaaggccgtcatcggcaaggccggggagggcaaccggatggtcttcttcgagggcccggcgctggcgttcgacctggaggatctgctccgcgcctccgccgaggtcctcggcaagggcgcgttcgggacggcgtaccgggccgtgctggaggacgccaccacggtcgtcgtcaagcggctcagcaaggaggtgagcgccgggcgccgcgacttcgagcagcagatggagctggttggccggattcgccatcgcaacgtcgtcgagctccgcgcctactactactccaaggacgagaagctgcttgtgtacgattactacgccagcggaagtgtatccaacatgcttcatgggaagaggggagaggagcgaacgccattggactgggaaaccaggtggaagatcgctctgggtgcagcaagaggagtggcacacgtccacgccgagaacaacggcagatttgtccacggcaacatcaaggcctccaacgtgttcgtcaacagggacggatacggctgcatctcggacctcggcctggcacagctggcgaacccgatcgcggcgaggtcccgctccctcgggtactgcgcgccggaggtcgccgacacgaggaaggcgtcgcaggcttcagacgtgtacagcctcggcgtcctcgtgctggagctgctcacggggaggtcgcccgtccaggtatccggcgggcgcggcagcgaggtcgtccacctcgtgaggtgggtgcagtcggtcgtccgcgaggagtggaccgccgaggtgttcgacggcgcgctgctgcgggtccctgacatcgaggaggagatggtggagatgctccagatcgcgatggcgtgcgtgtccaggacccccgaccggcggcccaaggtggcggacgtggtcaggacggtcgaggaggtgcgccggagcggcaccggcacacggccgccctccccgccggccaccgccgcggatgcagaccagagtgagatggagagctcctcctcggcggcggcggcggcggcgcagtga

SEQ ID NO: 2007 - DNA, 543 bp, Zea mays
  Peptide Sequence Number=SeqID_43786
atgtccctcctgactccctgtgtggcatgtgggctagctgcagcgcgcattgccggtgacgcgcgggtgaggctgatcgtggagcacggggcggcaaccgtggtggtccccggcgtgatcccggtggggtgcgcgccgccggtgctcgccacgttcgccgaccccgacccggcaggctacgacccgcggacggggtgtctgagatcgatcaacgaggtggccacccgccacaacgctctgctccaggacggcctgcgcgagctccgggccaggcacgccgccgccaccgtcgtctacgccgacttcttcggccccgtcatcgacatggtgacgtcgcctgccaagttcgggttcgacgaagacgtgctgacgctttgctgcggaggacctgggcggttcaactacaacaggcacgttttctgcggcgaccccggcgccagcgagtgcaaggacccgtcggctcgtttgttctgggacggcgtccacctgacggaggcagcctaccgatacgtcgccgccggctggctgagcgccataacgtag

SEQ ID NO: 2008 - DNA, 1068 bp, Zea mays
  Peptide Sequence Number=SeqID_43787
atgagtgagtgtgaatccgcttgcttaagggattgtacctgtactgcctttgcttacaatgcaagttgcttgctatggttttcggagctgcggaatacaatagtgctcgactctggtctaaatggcatccgtataagcaaaccttacagtgctagaactgtgggtgaccatggaagtcttgtggtattctcgtttgcgcaaataaagaactccaccaaaagattctctgaaaaacttggcgaaggaggatttggctgcgttttcaaagggatgttgccaggctgcactcctgtggctgtcaagaagctaaaagaccacagacaggacgagaagcagtttcgagccgaggtgcggaccataggtatgattcagcacatcaatattgtccgtctgcttgggttttgcgccgaaggtagtgggaggttcctagtgtatgaatatatggcgaatggttctttgagcagccacctgttctccaagagttcctctaagctaagctgggagctgcattactcgatcgcgcttggaatcgcacggggcctggcttatctgcacgagggttgcgttgatgatttcggcatggcaaagcttcttggccgagattacagcagggtactgacaacagtgcgagggaccataggataccttgcgccggagtggatctcagggctaccgataacacacaaggccgatgtctacagctttggaatgattctcctggaaatcctatctgggcgaaggaattcggagaagattgaagaggggaggtttacttacttcccttcctatgtcgcggtcaagttgagcgaaggagacgatgtcatgtggctgctggatagtagtctggagagcaatgctgatgcagagcagctacagagagcctgcagagttgcatgctggtgcattcaggatgctgaagatcacaggccgatgatggggcaggctgtgcacatgctggaaggtgccatggatgctcaagtccctcctgttccaaggtcactgcaaaactatgtcggcgtggaggattctaccactgcagaattttacatctctgaaggctcgtgctag

SEQ ID NO: 2009 - DNA, 171 bp, Zea mays
  Peptide Sequence Number=SeqID_43788
atggccggcgatggttaccaggcccacgagacaagggagaatttcgaagagggcatcttacccggattgatgaagcgcaggaacatgaccacgaccggagacagatctgtggtggagttcgtctccgacgagaaatcgacgcaccaccggggattccgcccattgatttga

SEQ ID NO: 2010 - DNA, 162 bp, Zea mays
  Peptide Sequence Number=SeqID_43789
atggcagagaaggcgctggcgggtcttatcccacgacgcgacggactcggccagccggtggaaacttctcacaacccacgccccacccaattcggcggcagctgcacaggggagatgaccaggtcacacccgaggcttcacggcgtggagttcggctcgtag

SEQ ID NO: 2011 - DNA, 486 bp, Zea mays
  Peptide Sequence Number=SeqID_43790
atggcaacaaggaggcaccagctggactggaagctatacgagaaagatatcaacgaatgccttgaaaatgcgctgcgtgaccttgatgacgatggcgcaaagcacaagcaaccagagccagagctcgacgagccgccctccagtcggccggccgtccggcgatatatctccccgaccgtcgtgcctgtgcgagagttgacacctatatatagaggcatggagacggtggcggcgagttacggcggcggcggcgaaaagagggagctgcagcagcagaacaagcaggcgggcgggtgcgggcaccaccaccacttccagatgccgttgcactacccgaggtacaggcgggaggactacgagggcatgcccgagtggcagctcgaccgcctcctctccgagtacggcctgcccgtcgccggcggctccgtccagcagaagcgcgccttcgccatgggcgccttcctctgggacgccggcgacaactaa

SEQ ID NO: 2012 - DNA, 282 bp, Zea mays
  Peptide Sequence Number=SeqID_43791
atggagctcttagagctattagaagtgataatgggtccgagtttcaaaattcttcttttggtcaccaatgtgctgaaaaagttggaactagatgggttcttaaaaacaaacaaagtgaggatggtgtggttgttagaaacaaagttaggttggttgcttaagtttttagaaattatgagtaaggaacttaaaaatgagtatgataggagaattgacctatttttaggattgcaaatcaaacaaacaaataagggtaaaattattgctagagcatcaagttag

SEQ ID NO: 2013 - DNA, 114 bp, Zea mays
  Peptide Sequence Number=SeqID_43792
atggccacggctgcaggtctggccggcgacctggccgtcaggctgtgcaggtgttctcttagccttaggctgtcttacgtggatagtgtaaatcagacgccacactatagatga

SEQ ID NO: 2014 - DNA, 702 bp, Zea mays
  Peptide Sequence Number=SeqID_43793
agctgcgagtggacatacaacaatgtcgttatccgtcttctggagattctggaattgtgcatgtgccgtgactattcagctgctctgttagtacttgtgagccaacttggaaggtcatttgtcgatgatgttggttacgaggagagaagtgttagtaagctaaggaacaaattatcgttattgttaacaggggcacattttacaaaatcatggagtttaagtgttcagtttactgccattggtgcattggtcagcgtccttccactgccatttgataaaattgttgccactggaagtagacaattatcaggttccttcgatgtggaaatgaaacagatttctgaatgggaactctttaagtcgagccaaaaagaagcaaagaagtttggtataaaacaggagaagttggggcagactgggcacatcggacagtctggtgctagcctggtctccgggcccaaactagccgctgcacttgggaaagacgccgaggcacgctggtataaatcatcggacaatccgatagtctggtgcccacccgaaaaggaaggcggccaatcagacgattcggtggtgttgcggattgagtgtccgatgtgccaccggactgtccggtgcacccacagacagaaggcaaccactgccttccaaatggaggagcaacgactccttggcccttggggctataaaagaggcccctag

SEQ ID NO: 2015 - DNA, 1359 bp, Zea mays
  Peptide Sequence Number=SeqID_43794
atggcggcggaaccaagagagcccacatcctcgctggatgcccagctcgcggcctcttcctcctccgcagccggcgtaggcggccccaacccgtgctgcgcgacgcagtggaagaattgccagaaattggtgaggagccggacggcgctgcgggaggcggtgaagctcctgcaggctgagaacgagaagctgcggaaggagaactcggagctcagcaaagtgtgcaaggaggaacacctccgaggtgattcagcagaagcagctagggcaactgagtctgatgccagagatctattggaaaaggagataattgaattaaagacacagaacatgagtttgaagcaaacacaaaatacctgcaaaaataatgatgaacttttacgtatctctgaattagaggaagaaaatagaaagctcatacagattttaggagaagaaaggaagaagatcacttctgagaagaaaaaaattgaagaagaaaagtgcaaaactctagaaatgcaaaggatatggaagtcagaagcacagaagtctgaagagtatagaagagttgctgatactgaaagaaaagttgccaatgattggagagcatcatgtgaaaggttgaggagtgaagcaaatgaactcagagctcagttgactgctcaaattcagaaaacagaagaaatacttaaaagggctgaagcggagaagcagaaggtcgccagagaaaagaaacgtgctgattcagagaaatcattatctgaaaagaatagaacacttgttgaagttgagaagaaaaaagtaacagaagaaaagtgccgtgctgacaatttatttgctaagttagaggagcagaagaaactcaatgaacatttgcgaactagcatacaggttgaaacgaagaatgcaatagaagagaaaaaacgaggagaccatttgtttcagaaattagaagagatgagagaacagactgaatgtttacagagaaaggcaaatgaattctctgcaggtagagatgtaatttcttctggcaagtgtggccggcgacacattgatagaatttctgagaatgcaaacgttaagcttctcaaagagaaacttaagctgaaaaaagaacaactaaagcatgtcaagaatgtgtccaagctagataaagcaaaaactgctttaataagaagagagcttcaaagtttaaagcaagactggacacagctactgggtcggtttaacatgctggatgaccaccttgcacgtggtgttgaagatattcatgtcttaacacagccctcccaggctcccagcccctacacgcctccctacaggccagtccatctcgtgtgcacacaaccaagggaaccgaaaattcgggactcttag

SEQ ID NO: 2016 - DNA, 543 bp, Zea mays
  Peptide Sequence Number=SeqID_43795
atggcgctgagccccacgcccacggccgttgctgcaccgccgccggagccgggccccgagcccgcgccgtccgctgagctgccgctgccggacgccatcgcggccgcgctgccgccggacccgtacgagcagctggaggtggcgcgcaagatcacggccgtggccgtggcgtcccgggcctcgcgcctcgagctggaggccgcgcggctacggcagaggctggccgacagggaccgcctcgccgccgagctcgccgacagggccgccaagctcgagcaggcgctccgcgacgccgacgcgcggctccgcagcgcactcgacgacaacgccaagctggccaaggagcgggactcgctcgcgcagacgtccaagaagctggccagggacctcgccaagctggaaaccttcaagcggcacctgatgcagtcgctgggcgatgataattcccaagagaccctgaggaaggcggacgagatcttcggtgcagaaaacatggacctcttcaggtcgttccaagggctgcttagccgcagcctatcgtag

SEQ ID NO: 2017 - DNA, 2814 bp, Zea mays
  Peptide Sequence Number=SeqID_43796
atgtgtttctttctgtgcctgggtggcatctttaagatctatgaatatcagcacaatcttgggcttattttattggagcggaaggagttgacgtccaaatacgaacaactcaaagcttcttttgaagccactgagatcatactcaagcgagagcgagcttcgcagcagtctgctttatctgaaacaagaaagagggaagaaaacctaaaaaaaaatctagccattcagaaggagtgcatatcaaatcttgaaaaggcacttcatgatatgcgcggggaaacagctgaaataaaagtttcatatgaagcaaaactggctgaatcccttcaaatgatggagacggcacagaaaaagtttgatgaagcagaagagaaacttctcactgcaaaatcattagaagcagactgcattcgaactcgcaacacctctctgagaagactgcaagacattgaagatcgcgaagatcagctaagaagataccaaacatcttttgaacttgagaatgcatcgaaagagaaagagattaacctcctgaggaaatcgttggatgataccaaaaaaattttgcatgaaaaggagcaatgtttactgaaagaacaagtacttcttaatcagagggatgacagcatccttgagagacttgcgtacataactagctcagagaaaaggttggaggaggaaaagttaaatctcgaagatgaaagaaaggttcttttggaagagaaaaataagctggatctgaacatgcaggcaattatatccagggaggaagctataattcagaaggaatccatacttgacaaacgtgaaagtgaactattgattctccaagagaccattgcaagcaaagaaagggctgaaatagaaaggctccgtcaagaggaagaaattgccttggtgaggaggaggcaggaatttgacactgacatggaaattaagctcacttcttttgaggaagagattgatgcaaggaaagccttgctcgatcaaagggaaaccaccatcaatgagaaggaggatgcagtggcgcaaagggaacagaatctcaaccttaggtttgctgagttagcgaacaaggaagaatctttggtgaagaaatcagatgagttaagggaggaagagaaaaggctctcctctgagagagagacactgcacattgatctgcaaaaagaaaaggaggaaattcataacatgaaattggatttagagaaggaaaaatctttctttgaggaggagaagcgtgaagcgattcaagctcaggagaatctagcaataacccaaaatgagcgagaagatttacaaagtttgcaggtgaaacttaaagatgaaattgatagtctgagagcccaaaaggttgacctaatggctgatgcagaaaggctattatcagaaaaagaaaggtttgagattgaatgggagttgatcgatgagaagaaggaggaactacaaaaggaggcagccaggattgctgaagaacgaagagtaatagatgagcatctcaagagcgaatttgatattatcaaacaagaaaaggaagatctccgtgttcagttaaaaattagtacagaatcccttgctcatgaacatgctgaattcatgaataagatgcagcaagagcatgctagttggcttagcaggatacaattagaaagagaagatctgaagaaagatattgatatccagagaaccgagttactgaattctgcaaaggctaggcagatggaaatagattcatatttgagggaaaaagaagaggagtttgaacagaaaaaatccaaggaacttgaatacatcaattctgaaaaggaaactatcagctcaaaactagaacatgtcaggcttgaattgcaaaaacttgaggaggagaggaaaaggtctatgctggagcgagagagaagagaggaagagctgtctgaaacaaagaagactatagacgcgcttaatgagcaacgcgagaagttacaagagcaaagaaaactgcttcattcagaccgaaaatcaattacacagcaaatgcagctgcttaatgagttagaagagctgaagattgaatctgagaacaggcaactgtctttgagacagtgtgggaaatcaaagcatgctggtgtggaaaacctggaagacaacggtgttcacctgtctcctgatgaggatcaaaatgctagtccaaaacaaactactgtaaagaaattggaagtgtccccttcagtctccacaccaatttcttgggttaaaaaatgtgctcaggtgatattcaaacgctctccagagaagagtgctgatcccaacaatgatatacctccaaagttgggaaatgtcaatgactgtacctccttagctactgcctattcagatggattgtttgcttgtcacctggaaaatggtgctgagaaagtaccacaagctatcgacggtctgaaagttgggaaaaagaggcttaataatgcactctctcatggtgactccgaaatttcacagccaaaacgcaagcagcaaaagagcgctactcagattttgagagtgattggaggagaaattgattccaactgcagcccatcagttctagaagaaaaatgttcaaagaatgaacatgatgcagtcccagttggtttgtgtgggaagggaccacaaaatccccaagcagagcattcagaggatatttcagtgtctgcatctgaaccgtcgaacggacctggtgttgtggactctgaggacaaggatggagcagatgaggagtctgacgatgaaggcgaggacgaggaggaagagaagacgtcatcggcgaagaagctgtggcgtttcctcatcacatga

SEQ ID NO: 2018 - DNA, 849 bp, Zea mays
  Peptide Sequence Number=SeqID_43797
atggacattgcgcccgatgccacaaccacaagcccacagagacggacattgcggcgcgcgcctatatcttcgctttgcccatgccgtgcacgcccctcctcagcgctgccactgccaccgcgccgtctcccgtcccccgtccgcgcgcgcgcgcgcacgcacgccggccaggcccaggcccaggccctcatggaggtcggtccgacgcagcagcgcctcggcgacagcttctcccgcgggtggctggcgaagcgcggcgcgcgggcgccgtcactcgagcacctcgtcgccgacgccgacctcggccattccttcggcagctccaggtcgtcgttcatcgacatggaccccgccgcgctcttctccatgcggtggacggccacggccgcgccgccgccggagagcgacttcgagttcgggcttattattcccggtggcgtgggcgggggcagtgaccccccgtccccggcgctggtcagcgcgagccgccgggtcatccgcgacggccgcctcgtccccggcgacccgctgttctgctcggcccgcagcgcgccggcctccccgtccccgagcccgtgctgcggcgggagggccgccgccgccgggaggcgctcgtcgtggtggaagatgccgctgcagtacctccggttcctcctgccgctgtaccgcaaggtgagggccctgcggcgtctcccggcgccgaggcggcggccccgcgtggcgccggccagcccggcgcgcgcgtccgcgtccagcctcgactggtgccacggcaatgccgacaccgccgtccgcgacgccatcctctactgcaaaaagtgcagcgccgccggacaacaagacgcatag

SEQ ID NO: 2019 - DNA, 330 bp, Zea mays
  Peptide Sequence Number=SeqID_43798
atggagcaggaaaactgtgtcttaccattctcaaacatgctttgtaacccaaattttgccacaacaacccagttcctgactgaacagctcagccactatactaaacctttcgataaaaagggatgccggcatcagttcaatgtatgggcattcttggggccatatacacttgtcggtattatgatgccgagtgctttgagtaaagatataacctggtggggcgcccagtgttccacaaaaggattaccgggatgcgccatattcaaaggtatggtcggctcttacttatgtgcagctgctgtcaagtgctgggaacaagatctgtggtaa

SEQ ID NO: 2020 - DNA, 1438 bp, Zea mays
  Peptide Sequence Number=SeqID_43799
ctgtccttcaatcaaattatcaacccaacgccatttcggcgctcccgcttcccacaggagtcacagctcaacaaatccctacccaaatccacctccccgccccccaccgccatggctcccccaccaacctcgcgctgcctcgccctcgctctcatcctcatcggcgccctctgcgccgccgccgccgccgcgcggttcgccccggcggacaaccacctccttgcgtgcggcgcggcggcgcccgccgtcctccccgacggccgccgcttcgtgccggactctggctgcgcatccacccgcctccggtcatcctccccgtccctctcctccgcggcgccgcccggctccccgccgccgccgtcctcgctcctcgcctccgctcgggtcttctcctgccgcgcgtcctacgacctcgatgtccgccgccgcgggcaccacatcctccgcctccatttctaccccttcgtccccgccctcgccgcggcccgcttccacgtcggcgccggggggctcctcctcctccacaacttcacggcctcgtcccccgtcgtcaaggagttcatcctccccgtggactccgacgtcctcgtgctcaccttcgtccccgactccggctccactgccttcgtcaacgccatcgagctcgtctctgcgcccgaagagctcgttggcgacatcggcaccctagtcacgtccggcggcgccgctcagatacacgagctgtcgtctcaggtgtttgagactctctacaggatcaacgtcgcggggcgcaaggtcacgccattcaacgacacactgtggcggacatgggttaacgatgagaaattcctcatcgacaccgactcctccaactacatggtgtggtcgtccagtggccggattgcttatcccaagggtagcaagcagatgacaagagaagtggctcctgacaatgtctacaactctgcaagatccgtgaggccaggggtgaatgtgacttggggtttccctgtgcctgctagcagccggtacctttcaaggatttcgatctctcccagtgcaactggattcttggcctatccttattacattgactttatcgtcgatgtgaaggatgaggggatactgaaattggcgattggtggcttaaagaagagtcgatctgatgaagtaagtggtatccttaatgcactggagataatgaggatgaacaagaccagtggaggtatggatggagacttcccaattgatctacacatggaatatgtggtgagtaaggggattggagaatttgcccgctccctgctctgtggtttcatctttgttgggttgtttgtggctttggtcacgctgatggtgaggttgaggaccgagttgaggaataacggcacagcttggtcctggagacagatgaactccgatgaagggaaactggccagaacatatcagcttgtgccca

SEQ ID NO: 2021 - DNA, 141 bp, Zea mays
  Peptide Sequence Number=SeqID_43800
atggcggcggagctccagctgcacggtgaaaaggtcggtgagcgtggaccgggtgaaacagaggggctgggggcgaaccagagggtgtctcgtgttgttggcgaggaggcgaagcttgtaacacctctgaaccctggatag

SEQ ID NO: 2022 - DNA, 303 bp, Zea mays
  Peptide Sequence Number=SeqID_43801
atgggaaccggtaaagcctctttatcgagtgctatggtcctacaacaaaagtggggtgttgtggccgcaggagatgcagacgtcaatgaggacgttccttattccttaagagctcaactgccgtatctaattattgttttatcttccgccactgtgcggcaggcgtggctagaccgccggcggcgcagccgcaacgccaccaccatggtgaccgagtacagcgacatcgggtgtcgctcgcgccgtgccggtggcgcatcccagacccccaacgtgctaagatctcatggagtactacattga

SEQ ID NO: 2023 - DNA, 567 bp, Zea mays
  Peptide Sequence Number=SeqID_43802
atgtgcctgcccagcgtcaggtacgtggacctgcggttcaacgacctatgcgggccggtgccgccggcgctcttcgacaagccgctagacgccatcttcctcaacgacaaccgcttcgacctcgagctgccggacaacctgggcaactcgccggcgttcgtgctcgtgctggccaacctgcgcctgcgcggctgcatcccgcgcagcatgggccgcatggcgggcacgctggtcgagctgctccacgtggcgcgcaacgagctgtggggccacgtccccgagggcgtctgcgcgctgcccgcactctgcaacttcaccaactcgtacaactatttctgctccgagccaagccgctgcctcgatgtccgtcaggtcgacgaccgccagaactgcatcgccgccaggttcacgaggcgagtcggcgacactctagcatctgcctcaacagtcgtgccgccttcaccaggcccatctcgccggaagcggagaatacggatctgcggcgccgacgtgtggtctcagctcctccacggagccgggtggcgagaccggggagggggttgttga

SEQ ID NO: 2024 - DNA, 159 bp, Zea mays
  Peptide Sequence Number=SeqID_43803
atggcgcaaccagatcctgccaacgagttggtgagggccatcgcaaaaggaggcatgatgaagttcctatggtactcttaccaaggggcgctgatagtggcccctaatcctagtgcagtcatagagtttgtgagtgggcccaagtacatcaaacagtaa

SEQ ID NO: 2025 - DNA, 300 bp, Zea mays
  Peptide Sequence Number=SeqID_43804
atgaaccacccttcttatggtgttcatgatcttcctattcagatatatcttgcgaggcctagaggtgatttgcctcatgctactaggcctcaggcagacggaggtctggagaacacatggctcatggattttggctgttcgcacaacatgactaagagctctagatggttctccatcctcaatcttgtgatcggatctttgtctttgatttggaagtggcataggaggctaggtcatttgagcttcgaccttttgtgtcacttgagctcacttgaccttatcaaaggattgcccaattga

SEQ ID NO: 2026 - DNA, 564 bp, Zea mays
  Peptide Sequence Number=SeqID_43805
atggatcatcctctcggactttcaaaatattctgaacccatttacctgtttggtatattcaatcgacactggattgagtattactatgaggagcaggtggagagccttggagatgaagagttggcgcttgtggctagccagtttgtgcggttccacaacaaccaccaaaatcggtgggggaggttcaataaagaggcactcgagaataagtacctctacgggaaggtcaaggagcgcgccttcctcgcctccctgagcgacctcgaccatgactctaacaagtcagcctcgtccttgagcggcgaggagcccgagaggcgtgttgaggacaagctcaatgagctatgcttcatcaccaacactacaagaggcctttgcaccatggcccttagtcatgagacagtgggcgacgacgacaaggacatcgacgacgactctacttctgaggtatcacatttcattgatgatctcgtcgctgaggtagaagagctaaacactgctttggtgaatcaggacaagttgcttaggcttgctactcgtgagaggaaagagtctaaatcctag

SEQ ID NO: 2027 - DNA, 348 bp, Zea mays
  Peptide Sequence Number=SeqID_43806
atgaaatataatgagcttgttagatacatgtattcttgtttgaatctaaccatcaatgagcttaattctattggaattagtaagctaggtgatgcagacattgtgagaaagattatctccgtgctaccacaacataaatatgggagcatcatcaccattatttacaacatggaggacctgagcacaatgaccccaacgattatgattggaaagagtgcgacatttgaaatgttgagaaaaatgggtcaacaagagaagccaacttcttcaagaccatatgtttttccatgtgatgaaaagaagaaaggcaagaaaaaagctcccactcctagctactcaagtgaataa

SEQ ID NO: 2028 - DNA, 2802 bp, Zea mays
  Peptide Sequence Number=SeqID_43807
atggccccgacattcctgtctggaagatggaagctatctgtgcctgagacgctagacaccgacgcgccggtgccaccaaccgcctatgcaccgttctactgcttccatttgcgtcactactcactagcaccaccattggtcgggcctctttccatgggcactagagagggaagaagacttcagacaactggagacgggctagatgaaatcggagacgggctagatgcaatcgaagatgggaggagcgacgcttgcagggagatggcatggcgacagagaaaccctaggctgcagttttcgtccctctcctgtggccttcctttactcccgagtcccgacgacgacaggagcccttcaccggcgacgcacccttcgccgggcacttcaccgccgacgaccacgctcctgatgaaagaggaaatcatgtttgacaaccaaacaaagccatgcagatcgagggttgactccaaaagcaattcaagttctctgaaacctaagtttggatcatcatggggttcccaaattgtcaaagggtttacaacagacaagaaaaccaagaagacagcagcaaatgcaagcaaaaaaccacctcttccaagtgtcgaaaatgttaatcaggccaaccaacagattccgtatcactctagggtgaaaagatcccttattggggatttcccttgttcacctgctggtgctcaagtccacccccatgtctttgattgccacaatattaggtcccctgcatcccatgatctttttcttgagctggatcatctcagagagcagcttcgtgagtcgaaagaaagggaattgacattacagtcagagttgagacagtgcagagaaaacccaaaagtttcagaacttgagaaggagcttgattctatgagggatgaagttgacaggcttgcacgactgaaaatttcattagaagctgagaaaacaagcatatctgaacagttatcagctctatcttctatggaagaacatcatgaagaaaatgtaagattagatagccacggcaatcggatacttactgtagatggggacaatgcaccttcagaaaacttggagtttgaagttgttgaactacgccggttaaacaaagagctacagtttcagaaacgaaatcttgcaattaaactctcttcagctgaatccaaattggctggccttgagaagaatgaagagagtgatattgttgccaaagttcaagctgaggcatcgttgttgaggcatacaaatgcaaacctcagcaagcaagttgagggattgcaaatgagccgactaacagaggttgaggagcttgcttatctacggtggatcaattcttgtctacgccatgagctttgtaactcagatcaagcagctagagcaacgacggatatagattacaatggtggcatggcttttaatgaggatgataatagcgaaggtgatgcaaaaacttccgaggacagttctgatataaaattcagcattgcagaacgcatcaagcagtggtcccagaatgataagagctgccaagcatcgaaaaaggaatcccttcttgatagggcatggattgaagctgcagaagcacgaagcccgacacgtaggcactcactcggtggaccaaagggatgtgcacaagacttcaacatcattaaaagaaggcaatccgatacctttatcagcctcccggatgcgacagatgagtcatttgcctttaataaggatcctgcaatcagggagaagcgtgatcttcttgtagacaagtatgattttggtcgatctgaaagttcaagatttgttctcagcaagccagaagtatgcaaatcacagtgtctggatgttgaaaagcgtgcgttgcgcatccctaatcctccaccaagaccttctgtttctgtgtcaaattctggtccatcaaatggatcgactgtaaatccaccgcgaccaccgccgccgccgccgcctccaaagttttcctcaaaaagtactggggtcatgaagagggcacctcaggttgcagagctctaccattcacttatgagaagggactccaaaaaggatacttccggtggcggaatctgtgaagcagctaattctgcgaatgtgcggagtagcatgattggtgaaatcgagaaccggtcttcccatttgcaagctatcaaggcagatgttgagactcaaggtgaatttgtgaaatcattaatcaaggaggtgactagtgcagcctacaaagatatcgaagatgtggttgcatttgtgaagtggttagatgatgaacttggcttcctagtggatgagagagcagtgttgaagcattttgattggcctgagagaaaggcggacactctacgagaggcagcttttggctaccaggacctgaagaagctggagtcggaagtttcaaactacaaagatgatccacgcctgccctgtgaaatcgcactgaagaaaatggttgcattatctgaaaagaccgagagaggtgtctacagccttctaaggacaagagatgctatgatgaggcagtgcaaggagttcaatatccctacagactggatgcttgataacaatcttattagcaagataaagtttgcttctgtgaaattagcgaagatgtacatgaaaagggttgcaatggagcttcagtacatgggtcctctgaacaaggatccagctctggagtacatgctgcttcaggctgtgagatttgccttcaggatgcatcagtttgctggaggtttcgatccggagaccatggatgcattcgaggagctgaggaacctcgttcacgtcagaaacagcacccagtag

SEQ ID NO: 2029 - DNA, 855 bp, Zea mays
  Peptide Sequence Number=SeqID_43808
atggccaacgattggatcaccacctactgcatcaatgaagatggattccccaaggtgctttatgctgcaactgtccgtctgggtattccggagcgtccggaatacatgagccgcgagttcacagagcatggtaccgaaagctgcgaggtcaccgtccacattggcgcaagtgacaagtacttggagatgcaaccctggagcgtcaccgccactggaagccgtatgcaagacaccgtccaacttgtagctcggaaggcattgaagtacttgtgccagatgtttgagtggcacttgggctccacccctatgaagtacttccctccactggatcgtaaccgtcctgcttgggcggcaaggatccgtaacttggggagtaccacgaccgagaaagaccccactgttgttgctatgtctggctatctgcttagcctcgacgatttatgcgaccaactgcaccagcgtgtgaaggacctcatccaacgcgctgagaaagcggagacctgttggcataaggctaagcttgccttagctcaggcagatgcccgagcggctgaggcagaaagccgccttgctgtggccgaagaggaccttagggagcaggcaaaccgccatagtcagctcctcagaggtgtctacctagtggaccgtgccaagcgcaaggaacgccaacccaggaccgctgctgagtcaccaccactggagggaatccctttgtatcctttgtcccacccccgcaggaggatttgtgaatcagtgccacccacacctcccgcgtctcctcgtgaagccgaaggaagagaccccgaagaccgtgccatagggaccagtagccaaattgtttcggccgacccttaa

SEQ ID NO: 2030 - DNA, 384 bp, Zea mays
  Peptide Sequence Number=SeqID_43809
atggcagactcggtatacagtgattttcttagctttaaaactgaaacaacaggtacaggtgctgagactactttagaaaagcaacagtgtcatagcaaaactgcggacatggatggcaacgctagtgcctgtccgctttacatcagtctgcagttgtctcacctaacgctaccttgcgctagattgaatgcacatggtgatcatagaaggaacaggaagctggcccattccagtcccaggcttcgatccagatcctatcctggatcacggaggctttacttgccatctgcactcgtgctcaagcacatgctggaacagtgctggtttgattttgccgacgataagatcggccaagctagccagtcgacgtccagggcgatttga

SEQ ID NO: 2031 - DNA, 1875 bp, Zea mays
  Peptide Sequence Number=SeqID_43810
atggcgcaaggagcaggacgggacccggaggagctcttcgaggagctgtggcgcgcctgcgcggggccgctcgtggagttgccccagaccaacgaaagggtcttctacttcctccagggtcacctagaacagctgcaagagccgacggacccggcgctgctggctgagcagatcaagatgttccaggtgcccaacaagatcctctgcaaggccgagacagaaacggacgagatgtacgcccagatcactctgcagccggaaccagatcaagtggatctaccccaattacctgaaccgcccctgcaggagacgtcaaggcccgtggtgcactccttctgcaagatcctcacaccatccgacaccagtactcatggcggtttctccgttcttcggcgtcatgcaaacgaatgcctcccagcactggatatgtcgatgccgaccccgacccaagagctcatcacaaaggacctacatggatctgaatggaggttcaagcacatatacaggggccaaccccgtcggcaccttctgactactggatggagcacgtttgtcacatcaaagaagctgattgctggtgacgcgtttgtctacctgaggttaagccaaagccaatacatcgtcaggctgaacaagtacctggaatctagtaaaattggattcgatgtgggcatgaggtttaagatgagttttgaaggggatgacgtccctataaagaagttttctggaacagttgtcgataaaggagatctttctccacaatggcaaggttctgaatggaagacattgaaggtcaaatgggacgaagccacaaacttaaatggccctgagagggtttcctcctgggaaattgaaccattcgatgcatccgcacctgccatcaccatgcccgtgcaaccatcaatgaaaaacaaaaggcctagggagacagctgaaggcctggatattcatgcactggaacctgctcaagaattctggctctctggaaggcctgaacagcatgagaagacaagcgtaagctccagcgaacccaaacatcaagtcgcttggacaagtgaacgcgcaggatacagtgccatgagcagttcaatctgtcagaattctgcagtaactgggagctggttcaagggcttcaattcctccggctcacacccttccctgccagagatctcccagaaactgtttcaggtcaccagcaacgacgcgagggttcctccttggcctgggctctccgcttatcatgctgacgagccctcttccaagctgtcctgcaacactgctctgtgcagctaccagaccgaggaggtggctccaagattttccaatgccgtcgaagaggaaaagaaggagcccggcatgttccgtctgtttggcgtcaatttgattaaccatgctaggagtagtgctaccgctgacaagacgagtgtgggagcaggggaaacatcggcgcgagctgctggttcttttgaagactctgctcagctatcaagagtgacgaaggatcatacgcacatggtgaacggaagcccccgagaaatccaaagccaccagagttgcagtggaaggagtcgtatcaaggttcaaatgcatggaaatgacgtgtgcagagctgtggatttgggaaatctggatgggtacgagcagctgatgggtgaggttggagagatgtttgagatcaaagaccttggctccaaagagaaagaggaatggaaggttactttcattaacgacgagaatgagacaatggaagtcggagctgttccttggcaggagttttgccagatggtgaggaagatcgtgatccattccattggagacaggggccatatggaggcttgcccttgcctggggcaggatgggaagagggactattag

SEQ ID NO: 2032 - DNA, 1959 bp, Zea mays
  Peptide Sequence Number=SeqID_43811
atgaaggagtccgaccagctcgcgacttctttcatcacgcccttcggcatgtactgctatgtcaccatgttgttcggcttgaggaatgcgggtgcgacgtaccagcggtgcatgaaccacgtgttcggccaacacattggtcggacgatcgaggcctacgtcgatgacatcgtagtcaagacgaggaaagcctccgacctcctttccgaccttgaagtgacattccgatgtctcaaggcgaaaggcgtcaagctcaatcccgaaaagtgtgtctttggggtgccccgaggcatgctcttggggtttatcgtctccgagcgaggcatcgaagccaacccggagaagatcgcagccatcaccagcatggggcccatcaaggacttgaaaggcgtacagagggtcatgggatgtcttgcggctctgagccgcttcatctcacgcctcggcgaaagaggcctgcctctgtaccgcctcttaaggaaagccgagtgcttcacttggacccctgaggccgaggaagccctcgggaacctgaaggcgctcctcacgaaggcgcctatcttggtgcccccggctgccggagaagccctcttgatctacgtcgtcgtgaccacccaggtggttagcgccgcgattgtggtcgagaggcaagaagaggggcatgcattgcccgttcagaagccagtctactttgtcagcgaggtactgtctgaaaccaagatctgctacccacaagttcagaagctgctgtatgcggtgatcctgacacggcggaagttgcgacactacttcgagtcttatccggtaactgtggtgtcatccttccccctgggggagatcatccagtgccgagaggcctcgggtaggattgcaaaatgggcggtggaaatcatgggcgagacaatctcgttcgctcctcggaaggccatcaagtcccaggtcttggcggacttcgtggctgaatgggtcgacacccagctcccaatagctccgatccagccggagctctggaccatgttcttcaacgggtcgctgatgaagacaggagccggtgcaggcctactcttcatctcgcccctcgggaagcacatacgctatgtgctacgcctccatttcccggcgtccaacaatgtggccgagtatgaggctctggtcaacgggttgcggatcgccatcgagctaggggtccgacgcctcgacgctcgcggtgactcgcagctcgtcatcgaccaagtcatgaagaactcccactgccgcgacccgaagatggaggcctattgcgatgaggttcggcgcctggaagacaagttctacgggcttgagctcaaccacatcgctcggcgctacaacgagactgcggacgagctggctaaaatagcctcggggcggacaacggttcccccggacgtcttctcccgagacctgcatcaaccctccgtcaagatcgacgacacgcccgagcccgaggcaccctcggcccagcccgaggcaccctcggcccccgaggctcctcgagcccttgttggaaacgccttccgacaaggtttctactggccgacggcggtggccgacgctactagaattgtccgcacctgcgaagggtgtcagttctacgcgaggcagacccacctgcctgctcaggccctacagacgataaccatcacttggccttttgttgtgtggggtctggacctcgtcggccccttgcagaaggcacccgggggctacacgcacctgttggtcgccatcgacaaattctccaagtggatcgaggtccgacccctaaacagcatcaggtccgagcaggcggtggcgttcttcaccaacatcatccatcgtttcggggtcccgaactccatcatcaccgacaacggcacccagttcaccggcagaaagttcctagacttctgtgaggatcaccacatccggtggactgggccaccgtggctcatcccatga

SEQ ID NO: 2033 - DNA, 255 bp, Zea mays
  Peptide Sequence Number=SeqID_43812
atgacgggagaacacgccaagagggagatggtgaccggcgaaaatcccgaagcctcgggaaggaagaacgatgaaaggactccgttaaaggaggtcggcgacaagcacaaagaggagtctgctgactccatcaagtcacataggaagggtgacaagaagaaaaaaaataaaggaggtggtctactacgagaccgactcttcatcaccttccacctctggcgccgagtctaccacttcaaagcgccaagagagtaa

SEQ ID NO: 2034 - DNA, 456 bp, Zea mays
  Peptide Sequence Number=SeqID_43813
atgacggaaaatgattttagcaaaatcgtggtcgactcggccatcaccgacagaaaccggcttggacccgcccgcatgaaagccttgtgcggcttcagcttcaggtcgaagcgtatccctctgccctcccggctccctcaagcgctaatacggctggctgcgcgtcattctcttcctcttccggtgctcgtgctcgtgctcgtgctctccgccctccccctccgccacttcgcgcggaacggaacccaggccgccgccgacccagccaccgctaggcgtctaggcgaccgcgcggcatggccccgcccgcgcgatgatgcatccgctcccccatacatccacaaaccccaacacacacacacacaccaaggaggtggagacgatcgcgccatttctggggatgagctccagctccgattgcatattccccatgcctgccaggctgtcatgccatga

SEQ ID NO: 2035 - DNA, 255 bp, Zea mays
  Peptide Sequence Number=SeqID_43814
atgggcaaggttttcaagtcgataagtcgagtcgagtcgacaagagcaaatagaataaaatatgccaactcatgcagacaacaaccaaaaaaagaggtgagtgagatgtcaagtaggttgacttcggatactagaatctatgcagagaaggcgaaagatctcaatcgccaggcattgattcgtaaatatgcccccgttgctattgtgattgggatagtagtgatgctcttctgggtgaagaacaagatatggtga

SEQ ID NO: 2036 - DNA, 915 bp, Zea mays
  Peptide Sequence Number=SeqID_43815
atgcatcacctgcccacaggccgccgccgcgagccccccggcgccggggaacttaccaggcagcagccaccaccagcggggccggcgccggcgccggggcaccaccaccgcccaccaccagcggatcggggccgccccttcttcatgccgccgcccgcgccaccgggccgctcgcacagcaacgaagcatcgccagcggacccgcccatcgccagcgccagcagcagcagcagcaggctgccgccgccgcctcctcctcctcctcgtcctcggccgtcgccacacccacgcgtgtacggcgactacgaccccgccgagggcctccgccgtccccctctccctctgcctccgcctcggcgcccgccgtccccctgctcctccgcgctggcgtcctgcctggccgcgacggcgttcctgctgctgtcggcgggcggcgccggcgctgcgctgttcctgctgttccgcccgcggccgcccgacatctccgtggccggcgtgcgcctgccctccttctccgcgtccaacggcaccgtggccttcaccttcgagcagacggcggcggtgcgcaaccccaaccgctccccgctcgcgcacttcgacagctccctccgcgtcgcctacgcggggggcgacctcggcgccgtctacatccccgcggggctcatcgacggcggccgcaccaagcacgtgtccgcggtcttcgacgtcccggccatccccgtcgccgcgcagccgcagggggccgtcgaagccgcccagcaggctcagccgccggttatcgaggtccgctcgctgctggtggtcaagggcagggtcaacgtcctgcgcgtcctcacgcaccgcgtccaggccgccaagctctgccgcgtcggggtctcgccgctcgatggcacggtgctcggattccgctgctga

SEQ ID NO: 2037 - DNA, 1746 bp, Zea mays
  Peptide Sequence Number=SeqID_43816
atgggggaggtctgcatgtcaactagtgatgtggcgtttcatgtgattgatgctcatatgtgggggtttagagatgcctgtgtcgagcatcacctacagaggggacaaggagttcctggaaaggcgtttatctcacacaaaccttgcttttcaaaagatatccgcaagttctgtaagttggcatatccccttgtacactatgctcgcatgtttgggttggctggctgctttgcaatatgcttgcaaagttcttatactggaaatgatgactacatattagagtttttcttgccgcccgattgtagtgacgaagatgaccaaaatgccttactggagtctgtattaactctgatgaagaggtgtcttcggagcctaaaggtagttggtgacagagatttgagtggggtctctcttcaccttagcaatgtgctaaaacttgagaatgaagaattcaagacagatgcacagtttgataactctgatggttccctttgccaatcacctaacggtgatagacatggaggatcccatgagtttgatggtgggaacaagaaggttttggatgtgccagagggacaattgttgactgatgacttctctcaaggcaatggtacttctgctggcagaccaaatggtagcggtgcttctgattcttctgtgcttcacaaaaccaacaaaccccctgaaaggaaacgtgggaaagccgaaaagactatcagtttagaggttcttcagcaatatttttctggaagcttgaagaacgcagctaaaagccttggtgtttgtcctacaactatgaagcgcatttgccggcagcatgggatttctcgttggccatctcgaaaaatcaataaggtcaaccgatctctctcgaaactaaagcaggtaatcgagtctgttcaaggctccgatgcggcatttaatctcacatctatcacaggtcctctccctattcctgttggcccttcattggattctctcaatgtagagaaattaactcaaagtaaagtggcagaactttcaaatatcgctgttgatggtgacagagattctttgcaaaagtcacttggaaatgatggccattttggtatagtcatgccccagcaaggatctacagaccataacaatgacacacagcttgaagctgacaaggcgtctcactcgagaagttcgtctggagaaggcagcataaattcacgcacttcggaaggctcatgccagagaagtccagcgaaccagacatttgtttgcaagccaattgcttcaacattcgcagaacctcaacttaatccagaggagttcaataaagagcctttccaagaaccacaactaccactttccaggatgctcattgaagattctggtagctccaaagatttgaagaatctcttcacttcaacatctgaccaaccatttttggcccctcccaataatttggtgccaatgaagcattcagggtctgtaacgataaaggcgagttttaaagaagatattgtgaggttccgtttctcatgctcaggcagtgttattgtattgaaagaggaggtagcgaaaaggctaaggatggatgttggcacgtttgatatcaagtatctagatgatgaccatgaatgggtaaagttgacgtgtaattcagacttggaagaatgcatggagatctcacggctttcgggtagccatgtcatcaggttatctgttagcgatattgcgacacactttggcagttcttgtggaagctccggttga

SEQ ID NO: 2038 - DNA, 444 bp, Zea mays
  Peptide Sequence Number=SeqID_43817
atgggggcctcgctcgccgccctggccgccgccggtgtcgcgggcgtcgccgtagagctctggtggggcgtcgtagagcgccgcagccccggggagtatgactgggccggctacctcgagctcgccgccatggcccgacgccacggcctccgcgtgcgcgccatcctcgccttccaccagtgcggcgccggcccgcatgacctgccctggattcctttgccgcaatgggtgcttgaggagatggataagattccggacttgtcatataccaatagataccagaagagaaacaaagaatacatatcactgggatgtgatattcttcctgttctgaaaggaagatcacctatgcaagcttactccgacttcatgagaagcttccacaatacttttgaagattaccttggggacacaataacagtctgtattttccctgtttcttaa

SEQ ID NO: 2039 - DNA, 204 bp, Zea mays
  Peptide Sequence Number=SeqID_43818
atggacgacacatcattgagacctccgatttttgcagtccatggcatggcaccgaccaccacttctattggttccggtctggacctcagtttccaaaattgtggtattgtaaactacggtattgtcatgactaaagtatactgtagtatttcaaaaactgtggttttcaaaaactttgttcccaaacagggcctaatcgtctag

SEQ ID NO: 2040 - DNA, 336 bp, Zea mays
  Peptide Sequence Number=SeqID_43819
atggcggtggcgctaagccgtggcatacttggccagatccagatcctggtgctggcgacttgcctccgatcagatgtgacaagcgctgaatgggtggttggggccttgggggatggaagaggaagaagaggcaagttcttccttaaggagggtacaaataaggcatctttaagtaataccaacccatcatgtgatgatagagctggaagattgcatcatcatgacatcactgatgacgtcatccaatgcatcactaccgagtatggccctattgacaggatcgtcccacacccacgcaacggatttggtttcgagttagagctcttagccagctga

SEQ ID NO: 2041 - DNA, 393 bp, Zea mays
  Peptide Sequence Number=SeqID_43820
atgaattctcaggcgccaatgaactcggatggtgaccaaggaagctcgacctcgcgctggccgccatctcctgttgatgccacgctcgccagcgcccgctcccaggtggcgctcgtctggacccgcgcccctgcttcctccaacatgcctctgcaccagcacgtctccaagtcccagcacctttcgcccacgccgtcggttctccctcgcctccttgctcctgctcggctcctccatggtcgtgccctggtggatgcaccagccatggtgctcgccggccgcgactcccatcccatctccgttcttgaagtcgcccatgttagcaacattaatctcatgagctcgaaccaacaacaagagtatcaccgaccatatgattctggacaattttag

SEQ ID NO: 2042 - DNA, 654 bp, Zea mays
  Peptide Sequence Number=SeqID_43821
atgaatccaaagattttatcaaatcaggttgagtatgctttttttagcctcctttccccctccctcgatgcctcctgcccacgaggccaccacgttttcgtcgccacagttgccagctcagagctttccctcctctgcttcctcctcatcgtggtctaccttcacgtcactctgctcgagctcgccacccgcttggaaactcttgacgatcgcagtggaactccgtggccacgggcagttcgtggaggacgatggtggcgtggcctctggggacaggaaaaggagggagcagtaggacagtcgtcgccaagtaaggcgaggccgaggaggcggggcaccgcctccatgggaaaccagcccctggtgacggggaagatggaggggtacaatgataagagcaatacatgtaataagtacaaaagaacctacctagcaccttttataacaatagcgctctatgtttacatttttagaacattgaagataatagaggaacttctcttaattacattgcaatcagacaacagttgcaagatatgtgttgtggttttggagtccaactgggggacaataagatttgtgttcggtagagatgcaggtgaggactcactccgaatggtggatcacggagatccgagcaaactgagacactag

SEQ ID NO: 2043 - DNA, 462 bp, Zea mays
  Peptide Sequence Number=SeqID_43822
atgggcaagaacaacaagcgcaagcgtgaaccaactcctccatcggaggagtttggtgactcggagtactcagaggaggagttctcctctgagtctgaggggtctccggctcccatacccttgcgtgagtcgtctgacgactcagacgactcccaggggcttgcggcggaggtctggacgtacatccgggccgtcgagcgctccgggctcgagggctcggatgagtcggagtactcctcggatgaggaggactcagacggcgacggcgaggacgaggatgacgacgacgacgacgacgaaggcggtggcggcggtgacggtgacggcggcggcaggggcggcggtagcggcagcaagggcggtgacggcggtggcagcaggggcggcggcagcggtggcggcagcagcagaggcagcaccaggggcggcagcggcggcggcagcaacagggccagtggctag

SEQ ID NO: 2044 - DNA, 138 bp, Zea mays
  Peptide Sequence Number=SeqID_43823
atgggccagggcgagcgccagggccgagagctggagcgagcgctgaagagagagcgcatggccagccaaccacagggagcttgcagaggcgctcgtcggcttgatggggtcgagcaggatgcaaatagaccgaattag

SEQ ID NO: 2045 - DNA, 411 bp, Zea mays
  Peptide Sequence Number=SeqID_43824
atggaacgacgcgttgttggagatgttcagaatagactacgtcgggtcatccgcgtgcgtatagttattattgatagtgttactttccactttcgacaagattttgaagatctagcactgaggaccagagtgctaagtggattatcattgaagttaatgaagattgcaaagacatataacttggcagttgtcttgttgaaccaagtcactactaaatttacagaaggttcatttcaattgactcttgctctagagcagcaggaagttagcaccaagaatttccttgcttttgttatcaaggttgcctttctgttctggttctgggcacacgtttccagtgaccaagtcaaaatagctgaaatgcatatgggcaagcatttactaattgcagccaaaacttcggtaccgtga

SEQ ID NO: 2046 - DNA, 372 bp, Zea mays
  Peptide Sequence Number=SeqID_43825
atgaatacggccgcgcccacctcgcacggcggcggtcccgccgaggactcccatatcgcgcacccgaacccaaaaacggccacggtcggcccaaagcgtagcagggaaagaggcgaattcgttggaggttcttaccaagcgttcggtgtggccgagaactctggccacgacaaggtgctacccggcggcgccgagaccccggtgggaaattcctggcacccaggtccacgagcacccggattttatagcccagaggaagggataagtccgctagaggaggccgagaccgtcggcaggattggtgcgattctcctgcgcgagcgcaatccacggaggccgttggtcgttggggaagacgacccgacagtgtag

SEQ ID NO: 2047 - DNA, 915 bp, Zea mays
  Peptide Sequence Number=SeqID_43826
atggccgcaatggctccagctgccgtgtcgttcctggcgatggcgctgctgttgctcagtgacgcggaggccaagttcctgcccaacaacatcaccgtcgttggctccgtctactgcgacgcctgctccaacaataccttctccaagcacagcttcttcctgaaaggccagtgcagatgctatacaatttctgcgttgccattaacgatccttgcctcgtcctgcattgcttttttttttctccccaacaatggtgttacagtgccctttagttctcagcattgccacaagaatgttttcaaaatttgtgtatgtactgaggaggtaggggccagggtgctgatcaagtgcagcttcaaggtgaactcgacgtcgtccgaagagctgtccctggaagcggagcgcaccaccgaccagcacggcgtgtacaagctggacgtgccccccgtggacggcttcgagtgccgcgagggccacgagctccggtcggcgtgccgcgccacgctcgtccggagctcctccgccgcctgcaacgtcccgggcctcggggcctccacgcagcacatcgagctccgctcccgcgccaccagcgcctgcttcctcaacctcaacgcgctcaacttccgccccgccaaacgggacggcgcgctctgccacgcccaagggggcgacgacgcgttcggctcctcgcttttcttctggcccttcctgccgctcttctggccgccgttcagggtcccgggcggcggcgccggcgggacggtgtcgttcccgtggccgttcccggtgccggcctggctggtgccgttcctgcggccaccgttcttgccattcccgctctacgagccggcgccgtcaccaccgccgccgttctaccgtttcccgcctccccgagaagcggtttctcggccttga

SEQ ID NO: 2048 - DNA, 504 bp, Zea mays
  Peptide Sequence Number=SeqID_43827
atgttctcgcacggcctccgcgacggtgacacgaccgacgccacgagggcggtgggcatggggcctacgtctgcgaatatggccgacgggtacaagtgttcagtttgcgaaaaggtgttcacgtcctaccaagcgctgggcgggcacaaaacgagccaccggaagccgccggcagccgcagcgccaagtgacaaggcgtcgtccagcggcaccgcgcacgagaagctgcaccagtgctcgctctgcccccgtacgttctcgtcggggcaaatgcttggcgagcacatgacgagccaccggaagccgtcgccgccggtcatggtgcgggacttcgacctcaacatgccgtccgaggccgagcctgaggccgcgccgccggatgtcaagcgggcatgcacggacgacgatgttgctggcctctcccgctcgtgtttcgctgagcggcggcacggccaaaagagccatgtgttggtggagtggctctccgacaacggcccgacgtag

SEQ ID NO: 2049 - DNA, 1380 bp, Zea mays
  Peptide Sequence Number=SeqID_43828
atgggcgagacaatctcgttcgcccctcggaaggccatcaagtcccaggtcttggcggacttcgtggctgaatgggtcgacacccagctcccaacagttccgatccaaccagaactctggaccatgttcttcgacgggtcgttgatgaagacgggagccagcgcaggcctactcttcatctcacccctcggaaagcatctacgctacgtgctacgcctccatttcccggcgtccaacaatgtggctgagtacgaggctctggtcaacgggttgcggatcgccatcgagctaggggtccgacgcctcgacgctcgcggtgactcgcagctcgtcatcgaccaagtcatgaagaactctcactgccgcgacccgaagatggaggcctattgcgatgaggttcggcgcctggaagacaagttctacgggctcgagctcaaccacatcgcccggcgctacaacgagactgtggacgagctggctaaaatagcctcggggcgaacaacggttcccccggacgtcttctcccgagacctgcatcaaccctccgtcaagatcgacgacacgcccgagcccgaggcaccctcggcccagcccgagaaggcacccgggggctacacgcacctgttggtcgccatcgacaaattctccaagtggatcgaggcggtggcgttcttcaccaacatcatccatcgttttggggtcccgaactccatcatcaccgacaacggcacccagttgaccggcagaaagttcctggacttctgcgaggatcaccacatccgggtggactgggccgtcgtggctcaccccatgacgaatgggcaagtagagcgtgccaacggcatgattctacaaggactcaagcctcggatctacaacgacctcaacaagttcggtaagcgatggatgaaggaactcccctcggtggtctggagcctgaggacaacaccgagccgagccacgggcttcacgccgttctttctagtctatggggccgaggccatcttgcccacagacttagaatacggttccctgaggacgagggcctatgccgaccaaagcaaccaagctagtcgagaagactcgctggaccagctggaagaggctcgggacatggccttactgcactcggcacggtaccagcagtccctgcgacgctaccacgcccgaggggtctggtcccgagacctccaggtgggcgacctggtgcttcggctgcgacaggacgcccgagggcggcacaaacttacgcctccctgggaagggccattcgtcatcgccaaagttctgaagcccggaacgtacaagctggccaacagtcaaggcgaggtctacagcaacgcttggaacatccaacagctacgtcgcttctacccttaa

SEQ ID NO: 2050 - DNA, 393 bp, Zea mays
  Peptide Sequence Number=SeqID_43829
atggcggctctcagcccccttacggaagcaagaggacgtcagcaaggactcgacatccccaacagctgtccttccgccaggctccagcgctcctccgacggccacgacaccacacgaaccgggtgccaaaacctctccggctgccacgacggcatgaaggaccagggccctcttacagggggttggccgcgcggggaagaggacgggacaggcgctcgcgtgaggccgctcgctccctctcccgcgtggacgcttgtaaccccctactgcaagcgcacccgacctgggcgcgggacaaacacgaaggccgcgggatttccacctccctctctctccggctgccttttccccccttcgcgctccgtctctgaaagtagcctagagggggggtga

SEQ ID NO: 2051 - DNA, 1470 bp, Zea mays
  Peptide Sequence Number=SeqID_43830
atggcgtctctgattcctccctgcctctccgtccccaccgccccgggacgcgcgcgccttgctgctccgggggcgccgcggcggaggaggatggcggtggtgagggcgaagattcgggagatattcatgccggcgctgagctcaacgatgatggagggcaagatcgtctcctggacggccgccgagggggaccgcgtgggcaagggcgacccagtggtggtcgtggagtccgacaaggccgatatggatgtggagacgttccacgatggcatagtcgcagtcgtcctcgtcccggccggtgggaccgcccccgtaggcgcccctatcgccctcctcgctgaatcagaggaggaggtcgcgctggcgcgggcgcgcgctcaggccctctcgcagggacaaagccaggcaccctctcctccccatgccgccgccgccctggggccacctcctccagcgcctgtggcgcctccagcgacaaagggcatcgcgacaccttacgccaagaaactcgcgaagcagcacagggtggacatcgccggggttgtcggcaccgggccacacggccgcgtcacggcggctgacgtcgaggcagctgctggcatcaagcacaagcgaccccctccacctccaccccctgcttctgttgacgctgcgccactagtgcccgcaagtgcggtgctgccaccagtacccggtggcacggtggtgccgttcacgacaatgcaggcggcggtgagcaagaacatggtggagagcttgagggtaccgacattccgggttagctactccatgatcactgacaagcttgacgcactctatgagaaggttaagtcaaagggggttacaaagacagtgctgctggtgaaggcggcagctgtggcgctcacccaacaccctgtagtaaatgctagctgcagagatggaaagagcttctcctacaacaatgatgtcaacattggagtggctgttgcactcgagggtggccttcttactccagtattagaggatgctgataagggggctatcatggctgttggagcgtcaagacctactgtagtggctgataaggatggtttctttagtatcaagagtgaaatgctgctaaaccttaaagcccaaataatctgtgatccgtctgcttgttccctagaacatgtgaatgttactgctgatcacaggattatctatggtgctgatttggcagcattcctgcaaacatttgcaaagattgttgaggatcctgaatgcctcacattgaaattcaacagatcattttttcctgttttgagtaaagttaaagcaaacgagcatagcctctctggtcgcatcagatggacttttagaacggtacctagattttttttctggttacttcaacaagccttcacagttacagaacaaaatgatgcaggattcctaaattacaagaaggtaaaagatgccaggcaggcatatggttacgtcctctga

SEQ ID NO: 2052 - DNA, 3912 bp, Zea mays
  Peptide Sequence Number=SeqID_43831
atggcgtcgcgccgagccagcaacggccgctctcccctcgtgcggaaacagagtcagatcaccgcctttttctcctcccctaccccctctccgtccccctcgggcccgagccccggcgcatccaagccctctccatcgccgctgaaccctagtgcgaggacgaggtccccacttgccgcggtatccccctcctctcccaagctgccacagccgcagcagaaacagaaggaggtaaagaaggttaaggaggagcatgatgccgccttggtgcctgcgcccgcggccgcggaggtggtggggaggtgtttgcgggtgtactggccgctggacgacgcgtggtacaagggcaaggtggaggcctacgacgcggcctcccgcaggcaccgcgtgaagtatgacgacggcgacgaggaggaggtcgatctcaggaaggagaagttcgagtgggccgccgtcgttgaggagtcgaccttgctgccggcgaggaagctgcggcgtctccggcggatgtctgatatctcggtggcaaaatcaccggctgaggcagaggatggcgcaggggattccactgaggacgaggactggaagagggatactgttgtggaggatgcttctgaggaggtggagctggatgaggaagacgaggaggaagttgttgcagtgcgatcacgaaagagaaatccaaagaattccttgatgtcaggttcaacaccatcgacattgggttctggtttgacatcagaatcggagccaagaatttcgaagaggaggaaaaacgtggatgtggcctcattggattttgctaaaaggttcaccttcgaagcagttaataccaatagaaaagttgacccagaagtgccaatgagctgtggccagaaggggcaaactacggggaatgactacactgctcctactggggatgcagctgagcgctttgggcagcgggatgctgagaagtttaaattccttggagaagggcgcaaagacgcaaaaggcagacgtcctggaaacccgggctttgatccgagaacacttttattgccacctcagttcttgaagaatttgacaggagggcagaggcaatggtgggaattcaaatcacagcacatggataaggttctgtttttcaagggtgaacagccccactgtggattcccagagaagaatttatcagtgaatttggagaagttagctgagaagggttatcgagttctggttgtcgagcaaactgaaacacctgaccagcttgaacttcggcgtaaggagatgggtataaaggacaaggttgtcagacgtgaaatatgtgcagtagtcacaaaaggaacactaatagaaggagagcacctactggcaaacccagatccttcatacctcctgtccgtgactgaaagttaccaacgaagtccaaataagagccaagacacatgtaccattggtgttagcatagttgatgtttctacaagcaaatttattgtaggacagttccaagatgatccagagcgccatggattgtgttcaattttgtctgaaatgaggcctgtggaaattataaagcctagtaaaatgctgagtccagaaactgagaaggcattaaacaacaacacaaggaagcctttaataaatgagctggttccgtccacagaattctgggacgcagaaaagactattgatgagataaaacagtactacagctcagccaataaacagaaaaaagccgatgatatacaagactgtgtggactgtctgcctaacttattacgcgagttaattggagcaggtgataaaacatatgcactttcagctctaggaggttccttattttatttaaggcaaacccttctggatgagaaaatacttccatgtgctgagtttgagccacttgcatgctcggggttcatcaacaatatccgaaaacatatgatacttgatacagcagcattggagaatctagaacttttggaaaatacaagaactggtggcctctcagggaccctgtatgcacaactgaatcattgtgttactggatttggaaagagattgctcaaacggtggatcgcaaagccattgtatgatcgcagagaaatacttcggcgtcaaagtgctgttgctactttcaagggagttggccaagattgtgctgcacagttccgtaaggatttgtctaggctccctgacatggaacgcctgcttgcacgtcttttctcaagctgtgatgaaaacaagagaagttcatcagttgttctttatgaagatgcatcaaagaaactgcttcaacagtttacttctgcgctttgtggatgccagcagatgttccatgcatgttcttctattagtacattgatatgctcagagggatctcaacttattgatttgctgtcaccaggcaaaggcctatcaaatatttcatctattttagaccgattcagagatgcatttgattggtcagaagcagaccgcaatggtcggatcattccttctgaaggttgtgatcctgaatatgatgccacttgcaatgcaatagaagagatcaaatccagtctaaaagagtacttgaaggagcaacgaaagcttttgagacctgcatcggttaattatgttaatgttggaaaagatatgtacctaattgaagtgcctgagagtttgggaggttcagttcccagaaactatgagttgcagtctacaaaaaagggtttctatcggtactggacgccagaactgaaagagctaatattagaactttcaaaggctgagtcagagaaagaatcaaaattgaaagccattcttcagaatctgattcagctatttgttgagcatcacactgagtggaggcagctggtttctgttgttgctgagcttgatgtattgacaagtcttgctattgcaagtggttattttgagggaccaagttgctgtccaactataaaagaatcaaatggcacagacgatactcctactttccatgctagaaatcttggacatcccattctacgaagtgattccttaggcaagggttcatttgtaccgaatgacgttaagataggtggtccagggaatgccagttttattgttcttactggtccaaatatgggtggtaaatcaactctcttgcgccaagtttgtcttaccattatactggctcagattggagcagatgttcctgcagaaaaacttgagctttctcttgttgaccgtatcttcgttcgaatgggagcaagggatcatattatggctggccaaagtacattcttggtggagctcgaggagactgcctcagtgctttcatcagctaccaagaattctcttgtggtgttagatgagcttggacggggtacatcaacttctgatggacaagctatcgcgttagcaatggaacacaacgataccaaggtatcgctgtgccatatggcgtgcgaggtggtcgagggagtaggaggtctggaagaagtgactttcctttatagattaacacctggtgcttgccctaaaagttatggtgtaaatgttgctcgattggcaggaattcctactaaattgcttcaaagagcgaatgaaaagtcgagtgaatttgaggccaattacgggaagcgacacaagatgaccaacgataagcacgtcagtgcacagagcgatgataagttttctgccataagggatctgtttcgaattgtgaagacatggcctcgtcctgaagatcaggaagcgagtataagcatgctccgtaaattgcagaagcgtgccaagctttactatcccttccaacaattttgtgccctcactaattctcctaccaggccaggagccccaagatctgagcatagaccttctgatccaacgaacttgctcgaaaaaaaactgattaatgcaaatctgattaatgcgatgtatgggtatatgctagtgtttgaccagtaa

SEQ ID NO: 2053 - DNA, 174 bp, Zea mays
  Peptide Sequence Number=SeqID_43832
atggatgatctgggcatcgaagcaaaggaggctgcggcgcgcgaggtggtcacagaacccaagttctaccccaccgacgatgtcaagcctcgtgttcacagcattcgcaagcctaagcccaccaaactcaaggaaataggtttacaccttttcctaattgattttggtggttga

SEQ ID NO: 2054 - DNA, 216 bp, Zea mays
  Peptide Sequence Number=SeqID_43833
atgcctcggacggtgctgatcctcctcgtggggcgcttcatggtgaagagagtggtgttcctcaagcagctcaagtccggcctgctcctaagactaggagtgattgcaacacaaggtatactgaagcacgaggtagagtacgagataagagaggtggaggcatatgtgttcttgctgcctgcaggagtttttgtcgcaattatgccaaagttgtga

SEQ ID NO: 2055 - DNA, 801 bp, Zea mays
  Peptide Sequence Number=SeqID_43834
atggcatcgtcgagggtgatgccgtcctcctcgccgtcgcacacggcctctgatctcgcgcgcctagcgcaggccgccagcaggcccggcggcgggggcagcgggctgggctccatgaacgtggaggagctcctccgcggcatctacagcgacatgcccaccccggcgccgcccgcgtcggagcccgaacgcccgaggtcgccggccccggcgccggaggtcgccacgcggaggacggcggaggaggtgtggaaggagatcaccggcggaggtggcagtggggaacccgtgccccccgtggcggctcaggctgccgtccccgctggtggtggtggcgccggcggcccggagatgacgctggaggacttcctggccagggaggagggcgcggtgaaggaggatggggttagggtttcgggcccctctgcgccggccatggggttcctgggcggagcggagggcgtgggtgtgcctggcggcggaggcgggaggggaaggaagcggcagctcatggatccagtggatcgcgccgcgatgcagcgacagaaacgaatgatcaaaaaccgcgagtctgctgcccggtcacgggagaggaagcaggcttatatcgccgagctagaatcgctggtaacgcacctcgaggaggagaatgccgagttgttgagagaacaggaagagcggcaccagaagcggcttaaagagaatattgtaacaattagtatttatcatcataaaattgtgattgctcttggaacgggtgacgccagtcattctgaggaaaaaaccatcaggagatcttag

SEQ ID NO: 2056 - DNA, 768 bp, Zea mays
  Peptide Sequence Number=SeqID_43835
atggtggcggcccaggcgccaccaggccgaggcggcccacgcggccagcctctaggccggggcggcccacgcggccagccaccaaaccgggacggcccaggcgccagccaaaacaggcggcccacaggccaagctaggcggcccacgagccgaccagagccagcgcgcccaaagggagaggcggaaaccctagccgccccatgctgtttggctgccgccgtcagggcagttgcccagccgccgcctcggtccctaggcgcgagcccctgcgctgtggccatgccgagcagatccggtcgcgtcctcgtcgcgccaggagaaggaactcgcgctgggagcccacacgacgccggagtagatggccggcgagcagagccgatggcggggctgttgcacccgtgggccggccgcgcccgaggaggaacgccggggctcaccgaggcccgcgctgccatggccaggggccgccgtgcgaccgcggtcggagccgcctccgcggccaggccccaccgcgctccccgcgcctggtcggagccaccgaggtccgcgccggcgagccgagccaccggcaccgaggggcccgcccgcccctgccggggtcgaggccggtcgtgctgccgccaggccgccgagcaccccgtggggccgcaccgagcccgcccttgcgccgaagcgccagcagtgctcgcgcccgcgccaggaggccgagcaaagctctcgtccgcgccatggccgcggtggccgtcgccgcgccaggaggccgaatag

SEQ ID NO: 2057 - DNA, 204 bp, Zea mays
  Peptide Sequence Number=SeqID_43836
atggctgcggcggaggaggagatcgcggtgaaggagccgctggatctgatacgcctcagcctcgacgagcgcatctacgtcaagctccgatccgaccgcgagctgcgcggcaagctccattttggtgtagagaggattggactagctgtggtactggtgtcggcctggttcgtccctgccgttagtagggaactacagatttaa

SEQ ID NO: 2058 - DNA, 300 bp, Zea mays
  Peptide Sequence Number=SeqID_43837
atgtcgggtgccgccggtgtggtcgccgctaaggagccatcgggcaccgccgctttgggtgaccaagtgaggaagaagtatagatactgtccgatcttgaataaatggctcagactagaagagggtaccgggcctatattgcataccgattcgataagggctaggcctaatccggactgccagatcgtgatcggatggctgagaaacaaacgtaccctttcgaccagctggttttgcataagagcccctgctcgacttatcaacccgccgtccaatccaagtaagggcttgttcggttag

SEQ ID NO: 2059 - DNA, 384 bp, Zea mays
  Peptide Sequence Number=SeqID_43838
atgcccttgaagccatcaacatcaagactgcaaaaactccacgcgtgtgtggtggcgtcagatggtcgggcgtccggtcaatactggagtacacaaacaaactcttatgggggggtcctccatgtcagtagcgagaatcgtgaggagtgtctcctcgacattttagaccgtatccgtgccgcggtggaaggtggtgttcactgcggtgtcgctgtcaccctggctatcgcgcagcttcgctcaggccacaatctttgccacatcgttagccttccagagggcatgtcgaggggccttgatgacctagtgaatgacctcaacgaggttgtagacatcatagtcgacgaggtgccggtagaggatataatctgtggggcactctag

SEQ ID NO: 2060 - DNA, 336 bp, Zea mays
  Peptide Sequence Number=SeqID_43839
atggatcagagccggcgggcggtggagtcgtactggcgatcgcggatggtggacggtgtcacggccgacgacgacaaggtcgcgcccgtctacaagctcgaggagatctgcgagctcctgcgcgcctccgacgccagcatcgtcaaggaggtcgccgatttcgtcctcaagcgccttgacaacaagagccccctcgtcaagcagaagacgtgcggtattgcggttgtagctgaggttgtttcatgtggagaatccgactcgtgtacattagaaacagaattagattttggtgatgctgtggttgatacctttatcctagttcttctggacacgtag

SEQ ID NO: 2061 - DNA, 279 bp, Zea mays
  Peptide Sequence Number=SeqID_43840
atggagtgcgtgctggttgtggggctttggtgcacccagcaagacccgaccctgaggccgtccatcaggcaggccgttagcgcgctgcgagatgaggccccgctgccgacgataatagtaagcaaggcgccgctgctggttggacgattgggctcccttctgtcgtcttttgttcctgatgatggcagagtgacagtagaaagtgctacagctagtatcggttctttaaatttcgggtttaatgggtacttcgggtaccgcggggtaaaacccgattag

SEQ ID NO: 2062 - DNA, 1536 bp, Zea mays
  Peptide Sequence Number=SeqID_43841
atgggaggaggaacccggcgcagcgggccccgtggacgacgccgaggactacgacggcggcccgccctcgcgacagccatcagcgtcggtgtcgcaccgcacgcagccgcggccaaggccgagggccgggtccagagggagcagcaggaggatgacgacgagaggaggaccaaatggaggttgacctcgtcggcgtccttgcagcaggggagctcctcgtcgtggcacacgacgggcgccgtgtcgtgtggagccgcgcagcagcagaagcgccagcggtgccagggttcttccagcgatcaagctggttccagctcaagtagttctctgcaaatatcagaaccagaaccccaacaaatccaagaagaagaggattactatatggaggatgattgtgatgatgattttgatggctacgacgaagatgattatgacttcgatgaagctgactttaaccagcaccttgctgataaatttgatgatttggatcttcctccaggcgtggaggccaccgtaccttggttgcagaaaactacacccaaggaagatgtcaaagagccacctaaatcaaatactgcagatgagaatgcaaataaatatacgcagttcaagcagtttgatactgttcagaatttctctgaccattactacgctaagaattctcatggagagccaaacagagcctggtcaaagagagttcaacatgactggaaacttctggagaaggatctaccagcgtatatttttgtccgggttgctgaagatagaatggaccttcttagggctgcgattattgggcccaagggaacaccttaccatgatgggcttttcttctttgatattcacattccctctgcttatccttgtgctcccccgctggtatattaccactctggaggacttcggattaatccaaacttgtataacaatgggaaagtgtgtcttagcctgttgggtacctgggatggtagaggttgtgagaagtggaatccagctcaatcgacaatgctgcaagttcttgtctccattcaagctctgattttgaatgacaagccatattacaacgagccaggatatgagtcctatgccaacactccgaatggagagcggttggctttggactataatgacaacacctttctgcactcatgcaagactatgttatactcacttcggaggcctccagagcactttgcagatcttgtcgctggccactttcgggtgcatgggcacacgattctcgcggcatgcaagcactacatggcgggtaatgatattgggtcagtggtgccagaggaggaggaggaggaggaggaggaagagtcatcagaacacaagagcggtgatgctggagcatcgggtagtgcaccagagctaggagtgatcaaggcaatccctacgaagagacgcagctcattcaatccaagcttgaaggtgctgtacgaagatctgctgatggaattcaatgtgaagggtgccgacacaaggaaattcatcgatgagaagttgaagaagaacaaacctgcagccgcctga

SEQ ID NO: 2063 - DNA, 543 bp, Zea mays
  Peptide Sequence Number=SeqID_43842
atggcgcgatctaattggttagatcgatttgttaatggtggaaaagaagtgcctatggtgctggttggttatctattaggcggtaagtgtcaagcctatcacgcgggaaagaccactgacctgccactaacttaccttccaatcaagcccttcaatcacacgttgttgttggacatctcggttattgacggtgaaccggagatccgatcgacgaaccggaagcgcggggacgaagctctagttccccggttctattggtcgactgtgtgcgctatggagttccccgacggcggcttccctctctcgatgttgattatagcgagatgctctcaggttctcgagtccctactgtcatggggtgaatgggatgcctgcttatatgctcccggatcgataggggcgaccaaatccaatccagattttcgggcaacagaattctgttggagaatcgtgcgcggcatcgggaaggaagaaaagagaagctgttgttcaagtggctccactgatcagcgtcccatgaaaaaaatgatgacatcaccatga

SEQ ID NO: 2064 - DNA, 720 bp, Zea mays
  Peptide Sequence Number=SeqID_43843
atgtcgctcaagttctactgccaatataccgaactgtggacctgttacaatcttggactaaaagccgcaacaaaggcacagaagtatgacaagatatgtgagaaaaagatatcgactcctatcgagcgacctgactatgcatttgtgaagcgacttttccgtgacttgtttatcagccaagattatgagtttgattatgtcttcgactggacagttttgaaatacaaacaaggccacaaacaaaagcaaagtcctggggcacctattgctcgacctattcaagcacatggaccgaaacaagcaggtgtaaatggtgttattaatcataacgaagcccaggagcatgtagagacaagtcgtccaacagggcaagctgcatggtcgcaagacaaacaggcaaccaacaatgatcggaatcctgacgtgcggcataccgtgaaccttagacaagacatggctgctggaaaagcacagctgacaacatctgtggctcttcctagttcccagtggaaaaattatactcatctaacagttggcttcctacattccagcacaatgccccaggaaaatgacagacttgatgtctcatgtattgttactgaggtggctcctgaagcactgatgcatttgatgatactattagctgataatatggaagatgttttagcattagataccgcagatacccagccgaacagaagcagaatatgccattgttaa

SEQ ID NO: 2065 - DNA, 1236 bp, Zea mays
  Peptide Sequence Number=SeqID_43844
atggagcaatgcgccgacgaccacggtgggcaggtcccgaggcttgagggcatcgaggaagaaggcagcccagccgataagtgggctccgacgactgtccggccaccggagacaccgacggagacgatggagttcctggcaaggtcctggagcctctcggcggcagagatctccaaggccctcagggcgctcagctgcggcaatgccgcctccgattctcctcccgctgtcgtcgccacgtccacggcggagcggccgccgcttggcagtgatcatcgccgcctgtctctgccgcagaaggcagacgcggcggctggggctggtggtgaagccggcggaggcacgagccagcccatctctcccagggtgcacctgggcgacgtgaagctgcttcgcgccgcggggagagggaagacggtgggcgcgtggatcaaggagcagagggagaagaagcgcgccgaggcccggtcccgcaacgcgcaggcgtacgcggccacgtccgtggcgggcgtcgcggcggcggtggcggcgctggtggccggcgcggtgttctcgtcgtcctcggcggcgccggagcagcggccggccaagggcgacggcggcggcgccaagaccgcggcggccgtggcgtccgcggcggcgctggtggcgtcgcactgcgtggagatggcgcaggcgatcggcgccagccacgaccagatcctggccgccatccactcggccgtgaacgcgcagagcagcggcgacgtcatggcgctcaccgcaggcgcggccacggctctgcgcggcgccgccatgctgagggcgaggctccacaaggagatccaggcgactgcgttgccaggcgacggcagggagccggagagggacatctcgccgctggtcttcgtctcccggggcggcgagcttctgaagcgcaccaggcagggcgccctccactggaagctcgtcaccgtgtacataaactccggcttcgaggtggttctcaagatgcagagtgcacatatggccggcaccttcatcaaaaccaaaaagtgtgtggttctggacgtgtgctcggagataccggcatgggcaggcagggaggtgggcaggaggggatacttggggatcaggacggtggagagggtgatcgagttcgaggtcaggagcaggcgcgagcagcgcaagtgggtgcagggcatcacggggatgctgcttcgccgcgacagcatcaacaatgccgcctgcttgtaa

SEQ ID NO: 2066 - DNA, 1452 bp, Zea mays
  Peptide Sequence Number=SeqID_43845
atgtcgtccgcggtgcccagccacggccggctcggggtggaggtgccgctgccgcccgtgcagctcggcggcggctgctccccgtgggtgcagtcgccgctgcacggccgttcccgcttcccgccgtcgcccgcggccatctaccactgcctggccgcgctgcaccggttggagggcgacgtgcacgcgctggccgtggcgcggggcgtgctgttcacggcgtccgacagcggccgcgtccgcgcgtgggcggcccccggctgcttcaaccgcggctacctcgacgtgggccgtggccgcgtcccggcgctagccgcctgcgggggcacgctcgtcacctcccacgcccgcgaccaccgtgtgcgggtctggaccgtctgtgccgccgctgtgtgcgaccacgtccgcgccaagaaggcagccacgctgccggccaagccgtcgctcctcctccaccccttcggcaagcggcggccgcagcagcatcgggacaccgtctcctgcctcgtgctccacgctgtggcggggctgctctacacggcctcctacgaccacaccgtcaaggcgtggcggctctccgacggttcctgcgtcgactccttcgcggcgcacgacgggcccgtcaacgccatggtggtgaacgaggcggacgggtgcgtcttcacggggtccgccgacggcaccgtcaagatgtggcggcgcgtgtacggcggcacggcgcacgcgctcatcatcgtgctccgctccgagctgtctcctgtgaacgcgctggcgctgtgccacgcggtgggagggagcggcggcggcgcaacaaggcggtgctgcttcctctacgcggggtgttcggacggctacgtgaacgtgtgggagaaggaggccaccgtggggcggccgacgcacgccggatacctcaagggccaccgcctggcggtgttctgcctcgcgtccgggtgcggcgggcgggtggtagtgagcgggtcggaggacgcaacgatgcgcgtgtggaggcgggaggggatcagcaaaggcggcggcggggcggtgcacacgtgcctggccgtgattgaggggcaccgggggcccgtgcggtgcctggccgtgggcggcggcgaggccggggaggtggaaggcagcatggtggtgtacagctccggtctagataagagcgtgaaggtgtggaggatacgtgtggtggggaaggaggaggaagaggacgatgacgaggagctagacgaggacggcgtcgaggacaacgatcaccccgaggcagcggtggcgggggagatatttatggaaggagggaagggtgatggcctcgacgcgcatgcgatccccgtcgcgatggacgacgtggtggatggcacggaggacgaggaggccgagttcgtgggctcgacgccggtgctgtcgccggtgtgggtggagaagcggcggcacacgagccgtgggtga

SEQ ID NO: 2067 - DNA, 410 bp, Zea mays
  Peptide Sequence Number=SeqID_43846
attttggcattgacaagtcaatatttatcaaacccgaaacgtttcacctgacggttcttatgttgaagttgtggaacaaggaacgtatagataaggcctcggatgtgctccagtcagtatctacccaagtaaatgaagctttggaaaatcgacctatttccatacagcttaggggtctgttgcacgcgaccgtaatgaacgtgcggcacaggaagagcagcagaaataaacggaacacatggacggattcgtttgatgcccggggcatattcgggagatttgggaaggcggagtggggtgcatatcccatccatgagatccacctttctcagaggttcaagtttgacagaagtgggtactactattgctgctcgtcgatccccttgcctgcggagatgcacacggagtga

SEQ ID NO: 2068 - DNA, 699 bp, Zea mays
  Peptide Sequence Number=SeqID_43847
atggaaggggcgcaaggatcaagcattgtgacaaaacacaataaaaggcagtctcctgtgcagagatggaggccagtttcaacagaagcagttccccagcatcaccaagatgacattattgagacatcaaattctggaagcaagaaaattatagaggattgcatagcttctagtgagaatttgccaccagatggaacaaccaatgttgttgaagttaccgccaatgatgcttcatcgtcaaaaaataatttaagttttgggtacagttcaactaaagtagttatagaagaccatgcggagttatctggcttcaataaggatctagctgggtccaatgtcttcgggacacattcctcctctgttgaggcggttcaaagtcgacagcttgactactctcatttcatatcacttccattggctttacacccagatcttgtcaacaaactgaactacttccagagttcgatccttggggaagaaaacagtaacaaagatgggagccaaagtgaaggttctattggtgaaatggactatgaccacaagcaagcggaagcaaaaatgggtgccaaaggctcccaatcacgtctgaaagctttgctggtttgcataagtgctttgcgtcccttgatgactattcctaggtcgataccatcaatttacttatggaataaaataccttgtctccacgattctacctaa

SEQ ID NO: 2069 - DNA, 780 bp, Zea mays
  Peptide Sequence Number=SeqID_43848
atggggagcacggggcgcgagccggaggtgacccgcgccgacttccccgacggcttcgtcttcggcgtcgctacctccgcgtaccagattgaaggagcgagaagggagggaggcaaaggagacagcatatgggatgtatttacagatgacaaagaacatgtcttagacagaagcaatggagaaattgcagttgatcactaccatcgatacaaggaagacattgagctcatggcaagtctaggttttagcgcatacagattttctatatcttgggcgcgtatatttcctgatggcttggggggaaatgtcaatgatcaaggagtcgccttctataatgacctcatcaattttatgatttcgaaagaagcttgctttgcaaattttggagacagggtaaagcattggataacgatcaatgaacctctccaaactgcaatcaatggttatgggattggaatttttgcacctggaggatgccaaggcatggatgaagaggacgatcaatccgcaacgcttgaccaggtcctaaacgacacgacgagggtcggttacttcaaagggtacctcaattcagttgcgcaagcgatcaaggacggagctgatgtccgcgggtactttgcgtggtcgttcctggacaacttcgagtgggcaatgggctacaccaagaggttcggcatagtctacgtggactacaagaacgggctgtccaggcacccgaaagcatcggcgctgtggttctcgcgcttgctcaggggcgaggctggcactggcacaagctga

SEQ ID NO: 2070 - DNA, 921 bp, Zea mays
  Peptide Sequence Number=SeqID_43849
atggaggcctactgcgatgaggttcggcgcctggaagacaagttctacgggctcgagcttaaccacatcgctcggcgttacagcaagacggcggatgagctggcgaaaatagcctcggggcgaacaacggttcccccggacgtcttctcccgggatctgcatcaaccgtccgtcaagatcgacgactcgcccgagcctgaggcgacctcggtccagcccgagataccctcggcacagcccgaggcaccctcagctcggcccgagacgccctcggttcagcccgagaaggcgcccgggggctacacgcacctgctggtcgccatcgacaaattctccaagtggatcaaggcagtggcgttcttcaccaacatcatccatcgcttcggggtcccgaactccatcatcaccgacaacggtacccagttcaccgacagaaaattcttggacttctgtgaggatcaccacatccgggtggactgggccgccgtggctcatcccatgttgaatgggcaagtagagcgtgccaacgacatgattctacaagggctcaagccgcggatttacaacgacctcaacaagttcggcaagcgatggatgaaggaactcccctcggtggtctggagcctgaggacaacgccgagccgagcctcgggtttcacgccgttcttcctggtctacggggccgaggccgtcttgcccactgacctggaatacggctccccgaggacgagggcctacagcgatcaaagcaaccaagttagccgagaagactcgctggaccagctggaagaagctcgggacaaggccttactacactcggcgcggtaccagcagtccctgcgacgctaccacgcccgaggggtccggccccgagacatccaggtgggcgacctggtgcttcggatgcggcaagacgcctga

SEQ ID NO: 2071 - DNA, 438 bp, Zea mays
  Peptide Sequence Number=SeqID_43850
atggccactgcgcacgctgtgacagcagaatctactagtgatacatctccgtgccagcctttgcatgcagacggcacggcagacccggcctttgcattggctctgctgtctgcagaagaacctggcattacggatacagcgaaaaccaccgtcagatccagtagcatcgttctcctgcctgcatacgaggcacagtcgttcgtcagatccaggagtggcaggaacagccgcacgggcaaccctgccaccgcccgagctgtttgttcttggggggtgacatacgacgaccgtgcgatgcgacacaggaacgctgtcgatgacggcagcttgttcctgtcctcctcatcagatgagcaccgcagcatgcttttcccagtccgactgactaacccagatccagcatggagaaatggttcacaagaaaggtcagtccaataa

SEQ ID NO: 2072 - DNA, 519 bp, Zea mays
  Peptide Sequence Number=SeqID_43851
atgtccggtgcacaccggacagtccggtgcatctttccgaccgttggctcggccacgtgtcgcgcgccgatcgcgcggccgaccgttggcccggccgaccgttggctcaccggacagtccggtgcacaccggacagtccgaaatggcccaagggcacatttccctttcacaagggcgctcgacgcggaccgatcccaggcgctggcgcgacggccatggaagccaggcgaccgagccatcccggcctcggagcgggtgcggggaagacccgaagtgcccgcgcgctcgacgctggcgagagccgccacggcgggcctgctggccactcctcctggcgaaggcccggcggcgaacggcttgggcggctccccgcccggcggctggcggtgctcgggcgggccccacgagggcgcgctgcacaaggcgcgcgcagctttcggcgaggcgcgccagccagccggcctcaggcccaggcggcggtggcctggaggccacaacatagatagcggcggcggctga

SEQ ID NO: 2073 - DNA, 459 bp, Zea mays
  Peptide Sequence Number=SeqID_43852
atggtcgggcgggggagggggtgggggcagggccacgaagcgcgcacgggcgcggatcggccactgcactggcatgtatcgcacagtggctccgagcagacacacggggcccggacaacggcctgcgtaccggcgcccgaacgcatcggcctggcgtggtgcagtgggctcgcggcggcgttggcttgcccgcctgcttggcacgactgcggcctcaacgaaggcccacggccctcggcgaccggacgaacaggcgcggccccctggcgctcggcgcgggcatggctcccgaccaagcgcccggccaggcggctggcagagcgcgagcccggcgcggcccgacaacggcgctcgccacggcctccacggcggctggctcggtgcggctccccaccaggcgcgcgcgcggctccgcgggccggcaaggtgagagcacctagagggggggggggtgaatag

SEQ ID NO: 2074 - DNA, 312 bp, Zea mays
  Peptide Sequence Number=SeqID_43853
atggcgccccgcgtgctccatgacgacggcggctctcagccccttacggaagcaaggagacgtcagcaaggattcgacagccccgacaggaaggtccagggctctcgtacgaggaggttggccgcgcgggagaacgggccggcgcataaggctctcgctctctctctctcccacgcggacgcttgtaacccctacttcaagcgtatccatccgccctgggcgcaagacaacacgaaggccacagtttccccttactgttctcccccctttgtgtcccgtctcgcgccgacccatctgggctgtgacacgtag

SEQ ID NO: 2075 - DNA, 294 bp, Zea mays
  Peptide Sequence Number=SeqID_43854
atggggaagtcggaaaattcggtggccaatttccgcctctgtctatgcccgccgcaatcgctgctcggtgcgcctgtctgctgctcgcggtctggctcagttgctgcgacgtcgagctcaagcagccgtggggggattcaccatcgcacgccaagcgggcgtaccgtacacacgaagaaccgacgtggttggctcctcaccaggcgtggtcctggggcgggtgcagcgtcaccactcggcaagtctgaggtagaagaaaacgccgtgaccgtagatgagcgcggacgactgtga

SEQ ID NO: 2076 - DNA, 786 bp, Zea mays
  Peptide Sequence Number=SeqID_43855
atggctgagcgcgcaaccggatctccctttgccgcgcccgacctgctcctcttcatggccgcgcgcccagatgctctgctcgaccgcgcccctgctgcgcgcgctcatgcgctctgcgctttgctcaccgttgcaggcagcggcgcccctgcttctccccaaccacggcgtcctctgttccctctgctgaccggaactccctgctcggattccgctcgcggagctcccttcccccagcgtcgcttgccgtcctggtgcaagctcctgctgccgcgcccgactggctttctgcgcgcactccctgctccctgccgagtagctctagctcccgcgcccctggtctctgcgtcctcccagcatcgcgaccctagctccctttctcctccagctcgaccgactgttcttgctcgcctctgtgtcgcgcgccactttcccggtccggttatgacgccttgtcgcgcgccctggttctttcccctgcgcgcaactgtaccctctgctcggattcctgttggccgcgcaccctgttcctccgggccggtcaagttctttccgaccaaatacaaagcgtcgggtgaagacgaagctagccgagtgatattccccaaacgctcgacaaattgcctaaatcagaaaatcactaccgatctcgcggattcgagtcagctattgaaacggtgctcgataacgtgcgtgagtcatggaactctcgccgacttcgcggttcttgcgattatcgagccagattcagttatagcgagttatgtcgctattccagtcaattag

SEQ ID NO: 2077 - DNA, 150 bp, Zea mays
  Peptide Sequence Number=SeqID_43856
atggcgagagtagcgtgtaccctccgtggcaagaggctggacggtggttttaactttgtgttgctgttgatggtgttaagtgccggtgggctcggccttcttataagtctaagtaactcttctatacttcttatgaggatggtcacttga

SEQ ID NO: 2078 - DNA, 393 bp, Zea mays
  Peptide Sequence Number=SeqID_43857
atggcgtccctccttgctccactcgggtcctccttggtccggccatggggcttcccagccatggctgagcgcccaaccggatctccctttgtcgcgcccgacctgctcctcttcatggccgcgcgcccagatgctctgctcgaccgtgcccctgctgcgcgcgctcgtgcgctcgtgcgctctgcgctttgctcgccgtcacaggcagcggcgcccctgcttctccccaaccacggcgtcctctgttccctctgccgaccggaactccctgctcggattccgcttgcggagctcccttcccccagcgtcgcttgcagtcctggtgcaagctcctactgccgcgcccgactggcttcctgcgcgcgctccctgctccctaccgagtggctctag

SEQ ID NO: 2079 - DNA, 159 bp, Zea mays
  Peptide Sequence Number=SeqID_43858
atgacgagcggattcacggcgcagaagggacttcggtctgaaatcaatttgatcggtgacagattggacgtctggctagttgaggcagatggctctcagctggacatcaccctgctctgtgcttcaatgcttctattgattagacttgctcttcagtag

SEQ ID NO: 2080 - DNA, 345 bp, Zea mays
  Peptide Sequence Number=SeqID_43859
atggtccgagcgtacttgcgctccatcgagcgtgccgggctcggtggttcggatgactcagaggaggattcctcggaagaggtggactcctccgactcctccgaggagtggagcggcggtgatggtgacagcagcagcggcgacgatgacagcgagggtggcgacgacgaggccgacgacgacggcaagagcaacagcaacggcgacggtgagggtgacgtcgggaagggtgatggcgacggcagcgagggtgacggcgacggcggcaagggcaacggcgacgacgacgacaacaatggcgacggcggcagcgacaaggccagtggcataatgccgctgatttaa

SEQ ID NO: 2081 - DNA, 255 bp, Zea mays
  Peptide Sequence Number=SeqID_43860
atgcccgccgccatcgctgctcggtgcgcctgtctgctgctcgtggtccggctcagttgctgcgacgtcgagctcaagcagccgcggggggattcaccatcgcacgccaagcgggcgtaccgtacacacgaagaaccgacgtggttggctcctcaccaggtcggagctccatcgtcaatcagtgctgctgccagaacctctggatcggtagacaggaaggcgtggtcggctttgaaccgtaggatagagatctga

SEQ ID NO: 2082 - DNA, 681 bp, Zea mays
  Peptide Sequence Number=SeqID_43861
aatttcgtctcccgcacgattgttcatcgacggcttctatcgttcaaccgctttccatctctggatgcttctacatggttcacgttcccttctccgctgcagtttgtcgactgctccgccattcagccaggcggcgcctggtaccagcagaacaacctgtcggcgctcgcgtcctacgcctaccgactactaccagaggatggccagcaccgccgccacctgctccttcaacggcaccgccaccacgaccaccaacgacccaacgcgcgttgcggttgcttgcagctccaactcagcgtgccggtgggagcgagcccgccgaccaacctctccccttcgacgggcttcacgcctccagtcggctccagccctccgtcgtcgtcggagttcgccccaccagtggccggcaccaccccgccgtctggaagcgaccttggaccgggattcggcaccccgtcgggctccttcaatggcaccgggtcgttcaggcccagcggcacgctcaacccttacaacggcgtgtcccgtgggttgccgcgcgtgggcttgttcacggctttgtccgccgctgcggtcgccgttcttctcgtgtccatggatgccatcctcccccgtcgccaccgttgtcgtgcaaacgcaaccactactatgtttcgtccgagctgcgcttgcggaagctag

SEQ ID NO: 2083 - DNA, 453 bp, Zea mays
  Peptide Sequence Number=SeqID_43862
atggctgactactgcagggtgccgtgcgagtacaagcacagaaacctgtcggtgagggtggaggagaggagccacgctgcggccccggcccccggcgacctcgccatcaggttcctctaccagggcgggcagaccgacatcgtcgccgtagacgtcgcgcaggtacggagcctgctttcttttgaggagtgcatgcaggtgggttcgtccaactggaggttcatgacgcgcgacgacgggccggcgtggagcacgaggcaggcgccgccgggcccgctccagctcagggtggtggtgacgggcgggtacgacggcaagtgggtgtgggccgaccgcgaggtgctgccgcggtggcggcgcgccggcgaggtctacgacacgggcgtccagatcacggacgtcgcccaggagggctgcttcccgtgtgacacgcacgagtgggaggaggagtga

SEQ ID NO: 2084 - DNA, 339 bp, Zea mays
  Peptide Sequence Number=SeqID_43863
atgcgcgtggggacaaaggccggggacacggggctcggaggtcggacagccgggacaaaacggaaggggccaccggctccacctccgctccgctccgcccgtgcaacaacaacaaacatgcgcggtggaaaggcgcggcgaggcgtcagcgcagcggaccactgcgccagcccgtacccgttggccgcttgcaggccgggacggccgacggcgggacatcaaactcaaaacggctttcgtcgacctctgaacgatggtggtgcggggggcaatggccagcttttgcagatccagcagagacttccgttttggaacaagattttggagatagtcagatag

SEQ ID NO: 2085 - DNA, 1908 bp, Zea mays
  Peptide Sequence Number=SeqID_43864
atggcggcccggccggacgcgcgcagcggctactgcgccgcgacgcgcaccttccgtagcaagcgcgcggacgtcccgctccccgccgacgcggacctggacgtcgtcaggttcctcgcgtcccgccgccacgcgggcgtcgtcgcgctcgtcgacgccgccacgggccaccgggtcacgttccaggaactctggcgcgcggtggaaggggcggccaccgcgctcgccgcgccgccgctgtcgctccgcaagggccaggtcgcgctcatcctctccccgaactccgtccacttccccgttgccgccctcgcagccatgtccctcggcgccgtcctcaccaccgccaacccgctcaacacgcccgccgagatcgccaagcaggtcgccgacgcgcgccccgtcgtcgccttcaccacccgcgacctcctccccaagctcccgcgcgccggcgccggcgccggcatccgcgtcgtcctcctcgagcccgaccgcctcccctccgaccctagccccgtcgtcgccaccatcggggagatctccgccacgccgcccgaccccacgcgccgccgggaccgcgtcacacaggacgacccggccacgctgctctactcctcgggcaccacggggcccagcaagggcgtcgtcgccacgcaccggagcctcatctccatggtgcagatcatcatgtcgcgcttccgcctcgaggcctccaacaggaccgagaccttcctctgcacggtgcccatgttccacgtctacggcctcgtcgccttcgccacggggctgctcggctgcggcgccaccatcgtcgtgctctccaagtacgagctccccgagatgctgcgcgccatcaacgaatacggggtcacctacctcccactcgtgccgcccatcctcgtcgccatgctggcgcaccccaaccgcctgccgctcgggggcctgcgcaaggtgctctccggcggagcgccgctcagcaaggagctgatcgaggggtttaaggagaaatacccgcaggtggagatccttcaggggtacgggctgacggagagcacggctatcggcgcgtccacggactctgccgaggagagcagccggtacggtacggctgggctgctgtcgccaagcaccgaggctaagatcgtcgacccagagaccggcgaggcgctgccggtgaaccgcaccggcgagctctggatccgggggccatacgtcatgaaagctgtgttgaactgtgatggcatattggtgtcacctggaactggaagccttttacagtctcatatttttaagcctagctcaggaattggctccaacagtttcagtacagtagcacacagtatgctgaggtgctcagggtttagctttctgaaaaagcagaagcataagttagacagcaaggcagttacagaacagcttgaaaagaattctatagtacaagttggtagatttcatcttactactttcagaacagggtatttcaagaacgcggaggcaacacaatcaacattgacacctgatggatggctcaagactggggatctctgctacatagatgaggatggttatctcttcgttgtggatcgtctgaaggagttgatcaaatacaaagggtaccaggtgcctccggcggagttggaagctcttttgctaacacatccagaaatcgaagatgtcgccgttataccgtttcccgaccgtgaggtcggccagttcccaatggcctacgtagtgaggaagaaagggagcaatttgtcagagcgcgaggtgatggagttcgtggcgaaacaggtagcgccttacaagaaggttagaaaggtggcgtttgtggcggagattcccaagaacgcgtccggcaagattctgaggaaggatctcatcaagctcgccacatccaaatccaaactatga

SEQ ID NO: 2086 - DNA, 441 bp, Zea mays
  Peptide Sequence Number=SeqID_43865
atggccgaggcggcgacttcgccggcgtacttcccccgtctgcaccgcaggccgccaatcccaaagtctaaccgcgcaaaacagagactagcacacggtagattgaatggtacccgccatacctctaatcgcggtgaagaatcccctggccgcggcgtacggcggacccgagactccggtgagcgattggcaggcgctcagtcagcgtttccgcacgccagcgccacagacagtttccccaagggtccgcgcaaggctccagtcaagcccagggttccggcgacggcgagggggtggattccgcggcagcgcggagtggagtcaaggcgaggtcgtggctatctccctccttactggcttaggttccgattcgtgcgcaaggccgaagcaaggacgcggcgcggcgtttatagtcgcgggggtgtgaagattgtaacctga

SEQ ID NO: 2087 - DNA, 213 bp, Zea mays
  Peptide Sequence Number=SeqID_43866
atggaggtcggcggcgacctgcagtccctcctagaggcgatcaaatcctccgaggtgcgacatcgtatccctcgcattgtccgggcgtcgatttcggggtcccgttccgtgcccgttcgttattcccctctccctagggtttggtgcttgaagatagaattgggctcatcaaccgactcgagagttcctttgagtattctgcggatgatctga

SEQ ID NO: 2088 - DNA, 2763 bp, Zea mays
  Peptide Sequence Number=SeqID_43867
atggtgtatgaccttaacggcaattttaggtatcttgggatgattctggatgttcaggttgctctaaaatgttcatatatagaaacaactggttgtctaggccaatttcttgcacttggtgcaaagattcttccttctgcggcaaaatgtgttactgtagatatggtgcataatattggtgattttatctcagagttgctaagtcttatggaaagctcaatagttgacaatgacaagaaaattcatggagctgctctggatatcactaaggctgcacctgtttttctagatgaaacaactaagctgtgccgggcatactctgaggccacaaaagtagacaactgcacaatgagtataactgatgaagatgctactgtgaaacacaacaaacaaggtcttgctagtgatgtcatcaggattacatcatccactattcagactatgtgtagattgggaacctatgcagcatccagtggtggaagccaggtgattttactgaatgtatcatggaagggtgtagtctcattactccaaagcggtaaagggatgattgaaggaaaagtaaatgtcagagaaataattgtaacccttctatctctgtccatagaatctctaagagttgctgctgaaacatggtgtgcaccgttactagaaacccttggtgctactgaagccagaagggcgttcctaccaatcaagtttttcttaataaatgctgtaaggatttgttcaacatatccatctgaagcaatgattatatacaagaacataatcaattgtgcagtagtgatcacatcctcaagcattctatttagcaagaagccacagttgaaggcagcaaatgagacccttgttgaattgttggagcctactttatttgttttactagatacacttatgaaatcatctgacttaacaccagaatccaaatgccagcttgcacatcatttttttgaaaacgaagaagataagagtccagatcttatgggacaagctaatcagagagagataaatttggcctcactggattgcattttctctatggattcagatgtggatcatagaaatagagcacttttacctgctgagttgcttgtgtttttgcactttctcaatgcttcatcatggttgacagaaatggtggtcatcacattatctaaaaagctacagactcttcttaatatattgacatcagaagacatctactcctatgtccttggcttccaaatccctgccttaaatggcgcagaccagtctcctgcagttgtttggcaacctgtgtatacttctatcatacaagcattgaaggcttttatgatttctactgttgcttcaagtgctgcttggaacgagttagaggctttcttacttgaaaatattttccatccccatttcctttgcttggaaattattacagagctgtggtgtttcttcattcgttatgctgaaactgagacttcaattaatctagttaatcaagtctcccttctactaaagactgttgcatcaccagaggatgttctttcacctctcagtgctttgcggaaagttgcacgatcattgtgcatcatcttgagctatgcatcttctgcaactgttgatcaaatatatacttgtgtgctgaatggtgaaaactcttccaagtcttcaatcttacacttagcattgctgatggaaggatttcctttggattcattgtctgatggtacaaaggaacttgctatgaagaaaatgtttacctcttttgctggctatctggagagctactccaagaaccaccgagtaatcaatgtgccaacttgtaaattgggtgttgtaggacttcctatacatgctctagcctctgcattgcagcatagtactttttttggcagtgtaataaatgttgatagtattgtagatgagaatagcatcactgctatgtttaagttcaccatctctctcataaagatgtttagaattgcgccagatagtagtaaggataaccttgccaagcacattagttccatgttggttattatctcaaacacgaggcatctttgtgcattcagtgagatggagaagttgactctgcagttgcgcacgctgttcgtttccacttctgataaatcaaatgctgtgctgtctcagtgcaaaccgtcaatggcttcctttatgtcaactctcggtcacttgaacgttaccgaagacgatgctaacgaactttgttctgcaatatgggatctgtatcatctcctgctgaaggaacggcactgggcgctcattcacctcgcaatggattcctttggctacttcgccgcccgcacatcctttacgcagctctggagatttgttcccagagatgctgccctttcgtacaatgcaagcacagggacgagcatagatgaaaacggattcatgctggagttgagggcttatcttcagaaagaggtcgccttgcacaccgataaatggtctgaagagcagattcggctcctggtttctgaggggagagcgctgaagaagctggttgaagcttgttgtgaaattccggttgttgctgagcctgagaaggcgccggttgcgaaggatgccagcacgaagaagaggaagatgccagatgggatctgtgaaggcatggcgatgctgcagaacggtctcaaggtcatgcgaggcgcctttggtgaaggggacttcgctgatctgaaggataggtttgctgcacacttgtctcgcctcgaggatgcagtttcccagtttgctagtttatccgacgaaatttga

SEQ ID NO: 2089 - DNA, 285 bp, Zea mays
  Peptide Sequence Number=SeqID_43868
atgtcgggcttaggcacgatgaaacgtgccgggcctcgggccggcccgactgacccggcccatctagccatctctacgctagcaagtgctgtgccttccgggcggaggctccagcttcatccggccggcaggccggccgagccttgcatgcgcgagctgcggccattgaaacgtaaaaagggccccgcaaaccgtgactacggaacgggagcttacgtaggctgtctccagcagagcgagcgtgtatatgaacatgcaatttcagtctacggacgagaattatag

SEQ ID NO: 2090 - DNA, 1449 bp, Zea mays
  Peptide Sequence Number=SeqID_43869
gaggagtggtcgagcggagcaagtggcggcgtccggcagagccaagcgtcgcggcagccaaggaactcctgcatctgcatgggttggccggtgcgcgtgcggagcccctcggtgctgcagtccaagctgctgtgcctgtccctgctctacctcctcaccacgctgccgctcgcgctctacgtctccttcaccgactccggccgccgccgccgctgcctccagcccgtcccctccccgcccaagccgctcttccagtacccggccgggtacggcgagcacaggcacgccctgcccacctcgcgcgcgctctgctccaaccccgtcgccttcgcagactacaagactgctttggaagagatccatggcctctgccgcgacacctcggcgtcccctgcgttgcggtaccagagcggcaggagggccacgtttgcagggaacttgtcgacccaggaacggagatccttcttcaaccacactgatgaccaagtggcggttccctgtgggttcttccgtgaatttcccgtcccagaacctgacagactggccatggagaagtgcaggggcgtggtggtggcgtcggcgatcatgaacgaccacgacaaggtccgtcagcccaggggcctgggcgccgagacgctacgcgcggcgtgcttcttcctgttcatcgacgacgccacccgcgcggccctcgcgcggcagggcgtcctgccggcgcgcggcggcggcggccacaccacggtcggcgcgtggcgcgtggtgacggtgggtcgtcgtcgcgccggcggcggcgggctcccctacgaggaccccgcgatgaacggcgtcgtggccaagcacctgctgcaccggctgttcccgggcgccaggttcagcgtgtgggtggacggcaaggtgcagctcacggtggacccggtgctgctggtgcacgcgctcctggtccgcgagcgcgccgacgtggccgtgtccaggcaccccttcaaccggcacaccatggaggaggccatcgcgacggcgcggtggcgcaagtgccgcgacgtggacgccgtcagggcgcagatggagacatactgcggcaacggcctgcgcccatggtcccccagcaagcttccctatccgtcggatgtgccggacacggcggtcatcatccggaggcacggcgtggccagcgacctcttctcctgcctgctgttcaatgagctggaggcgttcagcccgcgggaccagctcgccttcgcctacgtcagggaccagatgagccccaagctgagcatcaacatgttcgaggtcgaggtgttcgagcagatcgccgtcgagtaccggcacaacctcaagcctggccgagggaagcggcagcaggggggcactaggatggcgtcctcgagagacatcgccgggagcagctgcgaagagtaccttcaccagatgtggggggagtctgctgctgagtaa

SEQ ID NO: 2091 - DNA, 978 bp, Zea mays
  Peptide Sequence Number=SeqID_43870
atggataaaagcaaaagatggaaaaagaagcggagaagagaagatcgcccgccatctgaccaactccagacctcagacagacagacagagctgaacgatccagccaagcgcatggaaccgtctctgtgcacgccgcacgccacggtgaccgcagcaaatgccgccccgctatccgtgcgcgcccaccgcggcgcgcgcagggctcgtgccgccgtgcgcgcccacagccaccaccagggggcgggggcgcgggagccggagccggagccggccgacccccagggcgcggtccctgccaagggacgaggcccgccggcgctgcccaacgccgcgctgcgggtgggcgccggcgtggcgctggcgctcgcgctgggaggcgtgtcgtggacggcgcgcggcgggagcgccggcgccgggcccgggcccgtcacgcagccggccatggtgtgcgccctcaacgccgtgaccgacgccgcggtccgcgcctccgcggagcagcgcggctcggcgaccatgaagacgagcgtggacgcgctctcggactcgctgttccggcgggaggactcgcccagggaccgcgccacgctcatggacctcgtcttcgagcaggtcaccaaagagcatatcaccgaccgggggaagctgacgagcctgctgcagaaggagttctcggcctcccgcgactcggaaaggaagcttgacctcggactgctgctcaccgacgttctgatcaaccagagagactggcagagggcgaaggaagtttgccagcagatcacaggccgctaccagcgtgactcgaggccgtaccttcacttggctgtgatcaacatgatgatagcggtggaagccatgctgtcccctgacaccgccaccaccgacgacatcgagaagatgaccaagaccgccgtggacgcctggaaggagttcaagaacaagagcgagctagccaaggggtcggcagattccaccgcctga

SEQ ID NO: 2092 - DNA, 906 bp, Zea mays
  Peptide Sequence Number=SeqID_43871
atgaccgccatcacggccatctactgcgtgatggcgctggtgctgagcatgatgcagccgtacacggccatcgaccgcagcgccgcctactcggtggcgttcgccagcgtggggatgcggtgggcgcagtacgtggtggcgctgggcgcgctcaaggggatgaccacggtgctgctggtgggcgcgctggggcaggcgcgctacaccacgcacatcgcgcgcagccacatcatcccgcccgtgttcgcgctcgtgcaccccaggaccggcacccccgtgcacgccaccgcgctcatcgccgtctgcagcgcctgcatcgcgctcttctccagcctcgacgtcctcgccagcctgctctccgtcagcacgctcttcatcttcatgatgatggccacggcgctcctcgtccggcgctactacgtgcggggcgtgacgagccggacgcacgcgctgcggctcacggcgctgctgctgctcatcatcgcctcgtccatcggcatcgccgcgtgctggggcacgtcgccggagcggtggcagggctacgtggtgctggtgccggcgtgggcggccggcacgctgggcatccagctgctggtgcccgcggcgcgggcgcccaaggtgtggggcgtgccgctcgtgccgtggctgccctcgctgtccatcgccaccaacctcttcctcatgggctcgctcggcaaggacgccttcatccgcttcggcgtctgcaccgccgtcatgctcgtctactacgtcctcgtcggcctccacgccacctacgacgtcgcgcacggggcgtgcggttgggaggaagaagacgacggggacgcggccgccgccgatgaagacaagaaggttgttgccgcggcagacgtggagaaggctgatgcggcaggcggtacccgttaa

SEQ ID NO: 2093 - DNA, 957 bp, Zea mays
  Peptide Sequence Number=SeqID_43872
atggcgcctatcccaatccatcaagctattacgacccgccacaccaaatcgaactatttgttatggcgggctcagctcctgccatatctacgcagctccaagttgatcggattcctcgatggatccaatccggcgtccaagcagttcatctctacggcgaccaccactggcgagatcgaagaggcccttaatccggcctacgacacctggtatgaccaggatcagcagttgctcagcggactgctctccttgatgaccgaagaggtccttcgagatgtcatggcgaccacatcttctcgtgaggtctggacctccctccaccgcaagtttgcatcttccacagaggcacggacagtgcaactccgtgtcgatcttgcgacgtccaagaaacaagatctctcggcggcagatttttaccgcaaaatcaccgggctcgcttccaagcttgctgctattgacgctcctcttcgagatgaagagatactcgcctatttgtttgcagggcttcccgtcgagtacgatcccttcgtcaccgccatgaccaccaaaactgaagctctgtcgctcgacaatgtcttcgcccaccttgtctcgtttgaagaccgtctacttcgccatcaagccgaactccagcaatctttcgaggcatctgctaactacgcgggccgcggtggtggccgcggtggacgcgaccgtgggcatggtgaccacgggcgcggcgcgcgcgagcgtggcggcggtgcgcccaaccgtggcggcggcgcccaacatggaggatattcgcgcaacggatctccgcgtcctcaatgccaaatctgcgaaaaattcggccatactgccctcagatgctggtaccgcatggatgaatcgtaccaggaagagggcccttcggccaatgtcgcctccaactcctataaggttaatgccgactggtacaacgacacggggggccactga

SEQ ID NO: 2094 - DNA, 1251 bp, Zea mays
  Peptide Sequence Number=SeqID_43873
atggggtcgcaggccatcgaggcgcaccgcgcgggcgcggaggtgtaccgcggcgcggcgctgtgcgcggagaagtcgacggagctgctggcagaggcgcacctcccgctgggcctgctgccgctggccgacatggaggaggtcggctacaaccgcgccacgggcttcgtgtggctgcgccagaggaagtcgctcacgcacacgttccgcccgatcgcgcgccaggtctcgtacgccgccgaggtcaccgccttcgtggaggaccggcggatgaggcgcatgaccggggtcaagaccaaggagctcctcatctgggtcaccctctccgacatgttcgtcgacagggacgacccctccaagatcaccttcaagacgcccaccgggctcggcaggacctaccccgtctccgccttcgctaaggaaggcgccggtgacgacggcgcggcggccaagcacaaggatgatgcccccgccccgaccgccgccgctaacctcacgccggcggactctagcaagagcacgaacgagggccaagcgctcgaaacccagcgacgtggaagcgcctgcgccgcgagcatccttccagagcgcggggccaaggccaagcagagcctgctcctcgccgcggcgctgctcgtcgccgtcgctgccgcggcggtgccgccgacgtgcgagcgcatcgagtgcccggcgtacgaggtggtggacagcgccaacgggttcgagatccggcggtacacggacgccatgtggatcaccacggcgcccatcgaggacatctccttcgtcgccgccacgcgcaccggcttcctacagctgttcgactacatccagggcaagaacgcgtacaaccagacgatcgagatgacggcgccggtgctgacgcgggtgtcgcccagcgacgggcccttctgcgcctccgccttcgccgtgagcttctacgtgccggccaagaaccaggcggacccgccgccggccgagggcctgcgcgtggaccgctgggccggggccaggtacgcggccgtgcgccgcttcgggggcttcgtggcggacgccgacgtcggggagcaggcggcgcggctcgaggccagcctccagggcacccggtgggccgccgccgtcaacgacgcgcgcagggccgacccggcctcgccctacaccgtcgcgcagtacaactcgcccttcgagttcaccggcagggtcaacgagatctggatgctcttcgacgcggacgacgacgccagtatgtga

SEQ ID NO: 2095 - DNA, 1551 bp, Zea mays
  Peptide Sequence Number=SeqID_43874
atggcggcgcagtctctgtccgtgcccgtgcccatgcccagctccttggacctccgcgcggcggcgccgttcctggttgccgcggtggctttgtacttcctgatggagcaggtgtcctaccaccggaagaaggggcccctgcccgggccggcgctcgtggtgccgttcctcggcagcgtagcgcacatgatccgcgacccgacggggttctgggacgcgcaggcggcgcgcgccaagcggtccggcgcgggcctcgccgccgacttcctggtggggcggttcgtggtgttcatccgcgactcggagctgtcccaccgcgtgttcgccaacgtccgccccgacgcgttccacctcatcggccaccccttcggcaagaagctgttcggcgaccacaacctcatctacatgttcggcgaggaccacaaggacctgcggcggcggatcgcgcccaacttcaccccgcgcgcgctgtccacctacgccgcgctccagcagcgcgtcatcctggcgcacctccggcggtggctcgaccggagcggcggcggcggtggcggggcgttccccatccgcgtgccctgccgcgacatgaacctggagacctcgcagacggtgttcgtggggccgtacctcgccggggaggcccggcggcggttcgagcgggactacaacctcttcaacgtcgggctcatggcgctgcccatcgacctgccctgcttcgcgttccggcgcgccagggagggcgtggcgcggctggtgcgcacgctgggcgagtgcgcgcggcagagcaaggcgcggatgcgcgccggcggcgagcccgagtgcctggtggacttctggatgcaggacacgctgcgggagatggacgaggcggcggcggcggggcgcccgccccccgcgcacaccgacgacgaggagatcggcgggttcatgttcgacttcctgttcgcggcgcaggacgcgtccacctcgtccctctgctgggcggtgtcggcgctggactcccacccggaggtgctggcccgcgtgcgcgccgaggtgtcggccgcctggtcgccggactccggcgagccgatgacggcggagacgatccaggggatgcggtacacgcaggcggtggcgcgcgaggtggtccggcaccggccccccgcgacgctggtgccgcacatcgcgggcgaggcgttccagctgacggagtggtacacggtgcccaagggcgccatcgtgttcccgtccgtgtacgagtcgtcgttccaggggttcccggacgcggaggcgttcgacccggagcgcttcttctcggaggcgcggcgggaggacgtggcgtacaggcgcaacttcctggcattcggcgccgggccgcaccagtgcgtggggcagcggtacgcgctgaaccacctcgtcctgttcatggcgctgttcgtgtcggtggtggacttccggcgggagaggacgcccgggtgcgacgacccggtgtacatgcccaccatcgtgcccaaggacggctgctccgtgtacctcaagcagcgatgcgccaagttgccgtcgttctga

SEQ ID NO: 2096 - DNA, 1602 bp, Zea mays
  Peptide Sequence Number=SeqID_43875
atggcatctcccgcgcaccgggcgcctcaccgcttccggcggcctcttcgcgcgccgctgccgccgccgccgccgcggctgcctactccctctttatactcccgccgtccctccgcgcaccaggtgaagtcccagatctctcgccaccttcttcctccccacggcagagttctcctcgtgattgtcgccttcctggctttcatggaggtatcccaattaagaaccatcgtgccaagaccttcaaggaggcgtcatgccattcaagttgtcacggcatttgatgatgatcctggggatttctcgctggtgcacgatgacggggacgagcagtttggtgttcctcagtattcaagcgagagtgaatggagcgatgatgatgtcatattgacggcattcacagatgttgagttaccgatggcagtcaagagccgggccgagggtgcactaactatagctgcccataggttcgccacgattgacaaagggcataagaagagcagaactcaacaagggctgatgaataatgttggactggttgctttcttagtgatgttacttttctttgtcgactggtgttcttggaagattgttagactaccactggactctttttacttgacacgtccttttttaacatcggcagttttatcagcacttgctggattcctttttgcaccagtcgctgatagtctgaagatccaccatttccggaggagaggaaagtctgtttctccatcaagtagaaagccaacccctggaatgggaggattattctttgttcctgttggtatttttgttgcaaaaagagaggttggttccaactcgaatggagttaatggagcagctatgattaccctcatatttgcgatggttgggttgcttgatgatatttctagtctagcagtagatcacaattataaaataccgcgatggataaggttcttggttcaaattgttgctggcatttacttctctaactggttgggttctacagatatttcaacaccatatagcatgaaatatctggttcctctgccgcctcctttcggccttgcactcattggaaaagtatatatggttctggctgctgcatgttcactttccatgggtccggcagtaacactcgttgatggtcttgatggtttggctggtggtattgctgctttggcactcatagcactatctgttgcagctctcccgatttgctctgaattcagtgtttttggagcatcaatgtcaggtgcttgcattgggtttctttttcacaacagatacagggcctccgtggttatgagccgggttggttctttcgcactcggaggagcagttgccacaattgcatcatgcagtggaatgtttcttccaatgttaatagcatgcagtctcttctttgttgagctactgtttgcaatattgcaggttccttttcacatggctaaaaactctttccgcggaacaagcagacatcccctgaaaatccgcccctcgcattactacctcagacttctagggataaaggaaccttatatcgtggcgggcgcatacatgatatcatgcttcctaactctgttggcaggataccttggccttgtctcagcgtag

SEQ ID NO: 2097 - DNA, 357 bp, Zea mays
  Peptide Sequence Number=SeqID_43876
atggactggaagggaaacgaacgaaggttggagcgggaatctgaggtcaaaggctggctgctgggaaagggaaagggaaattgcaagggaaaaaggaggtggtcttttcgcctggctggcacggccgtggcggattggctgatggccgcggcccgccccggggtggaagaaatgaggccgaggaggacgacggagccgcacggggctctatctaggtctaggtctaggtctaggctttcacggaatgaacaagtggggaggggggcggaggagggatcgggatccccatcccgcatcgcatcccagtcgcaggttatgacacggtcacagggtggaatggaacggctgaccgcctag

SEQ ID NO: 2098 - DNA, 303 bp, Zea mays
  Peptide Sequence Number=SeqID_43877
atgggggtggcgcggagggaggagcaccgggcggccgccgccgcgttcctgtacgcgctgacggttcttggggtgttggcgggcggcgccggcgtccgcgctttcgaggacggcactgcggtgtacattgtcaccatgaagcaggcgccggtttcccacaggcgacttaacttggagaagttcgggagcagcaaggctgctactgccgtcggccgcggcggcagcggaggaggaggaggaggagacaccccgaccaccagcgtcctcaggaagccgaggttgttctttgtcgaactttactga

SEQ ID NO: 2099 - DNA, 222 bp, Zea mays
  Peptide Sequence Number=SeqID_43878
atgacgagcgctaacaatgtctattcagatggatccaagtttcgtctagttcaaaaacttgagcctgacccatcaaatgcctataagtctcctttgcgtcggaatgcggttgccatgacgagcgctaacaatgggcgtgtttggttcggcttttttctgaatagcttttctgaaaagctggctgtggagaaaagctggctgttgggaaaagctggtggttag

SEQ ID NO: 2100 - DNA, 183 bp, Zea mays
  Peptide Sequence Number=SeqID_43879
atggcctgcgggccagcggttgttatctccgctgctgcaccgatgagcgggcggcagatgatagcagatgggcagggctggtggcggggacaaagtcacaaagcttcgacgtcctccctcagattccaagtaggggatatggcggactggagtggcggagcaaataatagtacatgcaactga

SEQ ID NO: 2101 - DNA, 1566 bp, Zea mays
  Peptide Sequence Number=SeqID_43880
atggcgtcctgctacaacccgtggcgcctattcccaggcatgtcgacggcggtccctgccgggcccgtcacggcgccggctcattctcgcacctgcaagtcctcgaaagtgttcagtgctttgcctcaccggaggggtctgctgttcctgggcacgcggcgtgccaggatcaagtgcgtcaaggacgactctctccatttcgacccgtcgaagatagaaccgccaccgtactccagctacttcgactccacatccggtcagctcgagccggcgtcgggcgctcgggcaagcatacccgggaaggagtactggccagagggcacggcggcccgcgtccgtgccgcgcgagcgcctgctccggttggggagtcagctgggatgccatcatttggcacgaagcccgggagcaggaggagagggtataaggagcaggtgacgtcggcgtcaggaacggagggtgcacagactgatgacagaaaggatggtgatgaacctgatgtggctattataggctctggggacgatgcattggaggagataaaggattcggtggatgagtatgtcatttatgagacaccagaggaagaggagctgagtgagtatgacatggacaaaatgatggggcggccacacccgttcattgatccagcaaaggcaatgtcactaggggagccgaaaaccagtgaagagctctggtggcactggaggaggaagtctcaggaggaggaaatgtggtcaagatggcagaggaggcgtccagatgttgacacggtttttgcaaaggcaatggcggagactgggcaaattaaaatttttggggaccatccttcacggacagaagctgctcttgcaaagacaagaagacatttgtacaaagaggaaaggttagaagcagagcaaaggagactagaagaaatagggccaatagcgtactactcagaatgggttgaagcttataaaaacaaggatacatcacgtgaggccatacagaagcactttgaggaaactggcgaagatgagaatgttcaacttataaaaatgtttcaacaccaaactgctggggaatatcgtatcatgatgggcaccgatgatcctgatgaagtgattgactacagaggtcctgaatttcatgagcctacccctgaagttgtaccttacctgatggagcatgggataatgatcacaaaggaagagctatatgcacgtctgaatgaagagagagaggacgtcaatcaagacataacgtatattcctgaagctaaagatcctatggctaccgccattgatataggagagcattcttacaatgaagacagtgatgatgaggatgaggatgtcgataaagctgctgcacagcctcaatcactagaggatgaggaagacgatagggatgatgttgcagaagtagaagagaaagtgaaccagaattggagtgctctaaagtctactggacaggctgaaaagcccaaggaaaaatcaaagaaagatgaaatgacactaaaagaagctattgacgattctgagaacctaactgactttcttatggactttgaggaaaccgagtaa

SEQ ID NO: 2102 - DNA, 216 bp, Zea mays
  Peptide Sequence Number=SeqID_43881
atggcacatatcgttgaattgcaaataaaatatgaactcttgacaaaggccctaaccgtgaacttccaaagttatgttaacactatgatggtaaatctagcagtggatgacgcacaatttccagattctcataagctgctggatgactttgttgaatccctcaggctaattagagctgcagcttcaagccttgggaagaatcaaagaaatgattaa

SEQ ID NO: 2103 - DNA, 2400 bp, Zea mays
  Peptide Sequence Number=SeqID_43882
atgacggtgtctgcgagcggctccattaccgcgctcgccgcccacgtggtgcggtccgtgaacatgcccgccgccgccacagcctactctgtctcgtgggagggccccggcaggccgttcgccatctccggctcgtcgaacatgtcgctgttcgtcgtcggctgtggcgtcttggccgcgctgctggacggcggcaccggagctgttgtcgggaattgctccgtgatctgcgccggggaggaggtcgtcatggagaggctgccggacgggctgtgcggcggcgtggggtgctgccgcatcgacgtgcgcgtgcccctcagggcgttcgtcctcaacctctcgcgcacgggcgagggtgtcaccagagacagggtgacgttcctggtgaccggcccagacgggtacacgttccgggcgagcgacctggagcaaggcattgttgcaggcgaggccgccccagctctgctggactgggccatccctgaccccgcggactgcgcgctggctgcggcggacggggctagctatgcctgtgtcagcaacaacagcgagtgccagaactcgtcgattggtggctacgtctgccactgctccccgggtttcgtcggcaacgcctacgtcgtcggtggctgcgtgccaaaccaagcgtggtcgtctaacattgcttccgcgcctccaacagtctacggttcaagacagcccaaggcggattgtccgacgacgtgcgggaacgtggacatcccgttccccttcggcatggagctgggttgctttgcaaggatccatctctacctggcatgcaacccggggccaactcctcccatcctccagatgactgagcattcggcggtcactgacatttccatcgaccaaggcatcttgagaatccagagactctctgacccaggcggcttcctggacggcggggacagcgcgttctacctctacgtcctctctggagagtccggtgtggccaagtgggctgtggataattcgacttgcagagatgcaatggcgaacaagcaccagtacatgtgcgtcagcactcacagcgactgcctagaagtcacggacaacagaacgagcggccatgtcggatacagatgtagatgctcctctggcttccaagggaacccttacctcgaagatgggtgcacaggtatcaccgtcggaatcagttctggtggcggccttctattccttgcagcgatcgctgtccttctcaaccggagatggaagagaggagtccaaaagcagctccggaggcggtacttccgcaagaacaagggcatcctcctcgagcagctcatctcctctgaccagaacgcgagcgacggcacgaagatattctccctggccgagctagagaaggcaacaaacaacttcgaccaggcccgcgtcgttggccgcggcggccacggcacggtctacaagggcatcctgacggaccagcgcgtggtcgccatcaagaggtcgaagcaggtggccaccgtcgagatagaggagttcatcaacgaggtcgccatcctctcgcggatcaaccacaggaacgtggtgaagctccacgggtgctgcctcgagtccgaggtccccctgctcgtctacgagttcatctccaacggcaccctgtacgacctcctgcacagcggccgccggcgagacggcggcggcttgttgtcgtcgccgctgccgtgggaggaacgcctgcggatcgccagcgaggtagccggcgcgctcacgtatctccactcggctgcttccatgtcggtgctccacagagacgtcaagtccatgaacgtgctcctgaacgacagctacactgccaaggtgtcggacttcggggcgtcgaggctgatcccgattgaccagacgcacctcgtcaccgccgtgcagggcaccttcggctacctggacccggagtattaccatacggggcagctgactgacaagagcgacgtctacagcttcggagtgatactcgctgagctcctgacgaggaacaagccgatcatcgagaaggggaacggcgagaaggagaacctgtccaactacctgtgggaggccaatgagaaacctctcgaggagatagtggacggtcaggtctgggaggaagcgagcaaggaagcggtcgtgtgctttgctcgcctggcgctggagtgtctggatctgaggcgagaggcgaggccaaccatgaaagacgtggaggtgaggctgcagctcctcaaggccaaggcacgtgcttatgcttcgggaccgagagcggacggcgagttccgtcctcccggtgaaacagggcgacgcgctaggcgctacggcgtggttccggtgactgctcaggatgggacgcgtcggtacagcctagagcaggagatcgcgtcgtccctgcgcataccacgctga

SEQ ID NO: 2104 - DNA, 463 bp, Zea mays
  Peptide Sequence Number=SeqID_43883
atggatgccactgcttttcgggttgtcatgagtgacgcctgtgtttggatgcatagcagctgctgcaatggcgtcaccgtcactgtcactgtagcagcagctactttttcctccctccgccgctacgtccggcttccggggaccgcggcagccgcaccgccgcacgccattgacttggcggcttgcaccgatttgggagacccatttatggttgctgcgcctacgcgtcgcgctgttgcctgttgcagttgcagagttgcacgacgtgagagcctgctgcctgcgcgagcgctgcagcgcctgcctctgctggcatggacggatcttggagcgggcgagttccgaggaaaatcttccgtgctcactgtcactgccccatgtggctcccatgatgacatcatgcaggaggctcaaaagaaatgctggacaagtattactacttcccttggtgtaggacctgtag

SEQ ID NO: 2105 - DNA, 492 bp, Zea mays
  Peptide Sequence Number=SeqID_43884
atgggtcggcgcgaggccgagcacgaaggggggagaaaggtggccggagacgggcgtgagagaggtggaaatcccgcggccttcgtgttcgtcccgcgcccaagtcggcccgagtccgagccctgggtcgggcggagcggagttcgctgtcttccggggctgagcctaagtccgagccctgggtcgggcggagcggagttcgtcgtcttccggggcttagcccgagtccgagccctgggtcaggcggagcggagttcgtcgtcttccggggctgagcccgagtccgagccctgggtcgggcggagcggagttcgccgtcttcagaggctgagcccaagtccgagccctgggtcgggtggagcggagcttcctatggcgcctgaggtcgggcctgactgcctgtcagcctcactctgtcaggtggcactgcagtcggtgcggcgcaggcggcgctgtccttctgtcaggtcggtcagtggagcagagaagtga

SEQ ID NO: 2106 - DNA, 384 bp, Zea mays
  Peptide Sequence Number=SeqID_43885
atggcccttgtcttaggaggtggtacttcctcagggtgcaaggacaactacttcaactatggagaccccaatcatttcatcgccaactaccccaagatgaagggacaaccaaaagttagcaagcacgactaccactttagttacaataagggcaagcgcgacaacctctacaatgactttgataatacttcttcttcctcgagtaatgacaaccttgaggtacgggtcaacaacaacatgaatagactttgcttcttcgccaataccgcgggaggattctatgccattgcacttggtgaggatgcggaaaagttgcttgggcttgcgatgcgagagaggaaagagtacaagaacaagtacaaagccatgattaaggggctttga

SEQ ID NO: 2107 - DNA, 366 bp, Zea mays
  Peptide Sequence Number=SeqID_43886
atggtggccgccagatttgctcccatatcgattcacgtcagcgacgggctctcgggtgtcggctcgaaacctcaccaggtcactggggaggcgctcggggccgtgccaagtcaagaggattgccgtggccctgggaactcgccctcactgcctgtttgtgccatggccagggctctgtgctgcacgaatcaaggtaagaataaatccatagtgatcgccatggcgtgcccatcgtgttactccgttcaattggacaatggtgctcgggggaggctaatgggtgtctcgcccgcattctccaccgcgtgggcatggtggcggcgccgcggcttgggtcagtggggaagagaaggcgtggagcgttga

SEQ ID NO: 2108 - DNA, 453 bp, Zea mays
  Peptide Sequence Number=SeqID_43887
atgggtaaagccaacagcctggtgtacctgcacgctgccctatgcgagtccctgaggctgtacccacctgttccgttcgagcgcaagaccgcggtcgacgccgacgtgctgccgagcgggaaggagttgatgcccggcgacagtgtgctcatctccaactactgcatgggcaggatggagggcgtgtggggcaaggactgcatggagttccgcccggagagatggttcaacgacgaagggggcctacgctacgagccgtcctacaagttcatctccaacgccgggccgcggacgtgccttggcaaggagattgcgttcgtgcagatgaagaccgtggcggcggccctgctgtggaacttcgccgtcgaggtgcgttggcaccacttcaaattggtgctctgccatgggcaggggcctgtgcttgatggcggctgcaattggttggtgaattag

SEQ ID NO: 2109 - DNA, 987 bp, Zea mays
  Peptide Sequence Number=SeqID_43888
atggatccagtgttgctgcttctagagttcttcactagtctctgctttctcgccctgtactaccgccgcctgcaatctaagaaaacgagccctttggagccgacggagtggccaatagtcgggcagctccctggcttggccgccaacctccaccacttccacgactgggccaccgccctcctcgccggcacgggctacaacctggaagccaaaaggcgtccccggccagcggtacttcgccacctgcgagtctgcgaccccgccaacgtgcgccacatcttcacgtccaacttcgccaactaccctaaaggccacgagttcgccgagatcttcgacgttctcggcgctggcatcttgaactccgacggggagtcgtggcggcgccagcggcgtcgacactgggtgcctggcgtccgggctgccggaggttcccttcatgcgcgccacggacgctgcgctggagacgattttcctccgccacgtcatccccatggcgtgctggaagctgatgagaaggctgaatgttgggcccgagagaaagttggctgcagacgccgcaccatcgacggcttcgtctcggagatgattgcacgggcgcgacgccgggcagacagagtggacgaaggtgccagcttgctttcatccgttctctgtcacggtaacaccgctgctgacgaggagagcaccgacaagttcttacgtgacacgacggtgaacctcctattcgccggccgtgacggccccgccactgggctctcgtggttcttctacctcgtgtccaagaacccgcgcgtggagcagaagctcctaggcgagttgtccgctgccgttgcttcctccagggatggtgcaggctacgccgcgggcaccagcggcagtggcatggtgactgttgagcacacttttgaacctgaggccggacggtccgcggtccgcacagtctgcgcctgtgggctggacggtccgcgcttgcgcagagcagtttag

SEQ ID NO: 2110 - DNA, 654 bp, Zea mays
  Peptide Sequence Number=SeqID_43889
atgacctcgtcaaaaaaggtgtgccacgtcgttcgatttcgtatccttttcctcttcctctctcttacaacagggaccgggaaaggggatattccgaaaggggtccttctccgtgaaggaagcgggccccgagcccccctactgatcagaggttcgaaggctggcccctcggaagggttcgacagccacctcagagcactcgggctccgcgcccattactggctggcccccgaagggttcgacagccgcctcagacgcagagcgagcgatgacccacggtacgttcgatacataacgaaggctcgggctacgctcccgagcgccgcctgcgtcgctgcgactgctgtaccactcgacagagtgaggctgacagcagccaagtccggcctcgggcgccataggaagctccgcctcgctcgacccaagggctcggactcggcctcggccccggaagacgacgaactccgcctcgcccgaccccagggctcggactcgacctcggccccggaagacgacgaactccgcctcgcccgaccccagggctcggactcggcctcggccccagaagacgacgaactccgcctcgcccgaccccagggctcggactcggcctcggcaccggaagacgacgaactccgcctcgcccgaccctag

SEQ ID NO: 2111 - DNA, 576 bp, Zea mays
  Peptide Sequence Number=SeqID_43890
atggagcagtggcgcagaggcggctggcgcactggcctgtggagcactggagcggcggtgacgcactggcctgtgaagcaatggagtggcagcgcactgccctatgggcggagggaagagggaggagggagcgcactgccctatgggcaaatataccatcctttgaaattcctgcatttcaatccatacattgatatgctggtagaacatagaagatgctcacacacatgcttgaaacaggtacacattgggaattcaccaacctatagacttgaaaggaagcttggaaagggaggatttggacaagtatacgttggtcgacgtatttcagctcctcgtctcagtgaccgtaaccctggttcaaatgctttagaggttgcactgaaatttgaacaccaatccagcaaaggttgcaactttggagctccttatgagtggcaagtttacaacactcttagtgggaaccatggtgtcccacgggtacactacaaaggaaagcagggagagttttacatcatggtttgggcaatgaaccttcttatatttgtttcacttgttatgcacatgttaatatag

SEQ ID NO: 2112 - DNA, 277 bp, Zea mays
  Peptide Sequence Number=SeqID_43891
atggacgagtttgacagcggcgggcggagcggggacagggcgggcgccgccgccgccgccgccgcaggagacgacggggccactcctccgttgccccagacggctcgcgccctagcccagtttagtgtattgcttggggactgtgttacagctgagactctagtgctgaggtcccccatgactggggttgatcggccccacaaggcagtggggatgcgcctgagatcgtacgcggcggcatacaatcatgttggtcgtgacctctcggcgcccttcg

SEQ ID NO: 2113 - DNA, 915 bp, Zea mays
  Peptide Sequence Number=SeqID_43892
cctgagaacttcttgcttggtcctcctggtaccccagaggagaagaagctttttcttgttgaccttggattggcaactaaatggaaggatgctggtacggggcaccatgttgaatatgatcagagacctgatatttttaggggaactgttcgctatgctagcgtgcatgcccacttgggaagaactgggagtaggagagatgatcttgaatccctcgcatacactcttatttttcttctccgtggccgcctcccttggcaaggataccaaggagagaacaaaggttttcttgtctgcaagaaaaagatggcgacatctccggagtctctgtgtggaatctgtccacaacctttccggaattttgttgagtatgtcgtgaacttgaaatttgatgaagaaccaaattatgctaggtgcatctctctttttgatggtattgttggcccaaatccagacataagaccgataaacactgatggtgcccaaaagctagtatatcaggttgggcagaagagaggtcgcttaatagtggacgaaaatgatgatgagcaacctaagaaaaagatcagaatggggatgccggcaactcagtggattagtgtctacaatgcccgtcgacctatgaaacagaggtaccactacaacgtagccgataatagattggtgcagcatattcaaaaggggaacgaagatggcttgtttattagttcagttgcctccagctcaaacctgtgggctttaattatggatgctggcactggttttacatctcaagtatacgaactttctagttactttcttcacaaggaatggataatggaacagtgggagagaaatttctatatcactgcactggctggtgcgaataatggaagctctttggtgattatgtcaagagcatcgcttaagcgatga

SEQ ID NO: 2114 - DNA, 1200 bp, Zea mays
  Peptide Sequence Number=SeqID_43893
atggagctggacgccccaacctcccgccgccgccgccgcggcgattcctcccgccggcagcgacaaggtgagcgggtggcccagatctggcacaaggacggggaagggggagacgctgtgacgggccatatcatctccaccaccatcggcgggaagaacggcgagcccaagcggaccatcagttacatggcagaacgtgtcgtgggcacaggctcatttgggatcgtcttccaggctaagtgtctggaaacaggagagaccttcgccatcaagaaggtgctgcaagatcggcgttacaagaaccgggagctgcaacttatgcgtgccatggagcaccccaacgtcatctgcctgaagcactgcttcttctcgacaacgagcagggacgaattgtttttaaaccttgtcatggaattcgtccctgagactctataccgagtcctgaagcactacagcaatgcgaaccagaggatgcctcttatctacgtcaagctctacatgtatcagctttttagaggcctagcttatattcataatgtaccaggagtctgccatagggatgtgaagccacaaaacgttttggttgatcctctcacccaccaggtcaagctctgtgactttggtagtgcaaaagttctgattcctggtgaaccgaacatatcttacatatgctctcgttactatcgtgcccctgagctcatatttggtgcgacggagtatacaagttcaatagacatatggtcagctggttgtgttctagctgagttgcttcttggacagccactatttccaggagagagcgctgttgatcagttggtagagatcatcaaggttcttggtactccaacccgtgaggagatacggtgcatgaatcccaactatactgagttcaggtttcctcagataaaggctcatccatggcacaagattttccacaagagaatgcctcctgaagccatagaccttgcttctcgtctccttcagtattcaccaagtcttcgctgctctgctcttgacgcatgtgctcatcccttcttcgatgagctgcggacaccgaacgcacgcctaccaaacggccgcccgttccctccgctctttaacttcaagcacgaactagcaaatgcctctccggacctcgtcagcaggcttgtgccggagcacattagacggcagatcggtgtcaacttcgggagcagctag

SEQ ID NO: 2115 - DNA, 1941 bp, Zea mays
  Peptide Sequence Number=SeqID_43894
atgggtgcgcggcggcggcttcgccagggctctggacggctccagctgctgttttccttcctcgtgctgctgctccaggcacaggccagcgtcggcgcggcttcgatcaacggtgaaggattggcgttgctggaactgaaggtgagggtggaagctgatccccatggcgtattccaggattgggaccccatggacagcagcccatgcagctggtctggcgtgcgatgctttgacgataaagtagagattctgaacttaacaggccggcaattggctggaactctcgcacccgagatcgggagcctccgaggtctaaaatcccttttacttccaaagaacaacttccgcgggcaaatccccagagaatttggagggctgtctgctctagaagtgctagatctgagcagcaacaacctggatggaacagttccagaagaactatgggctatgccactgctcaaacaactgtctttgctgtacaagtgggactttaaggattggatctctctcggtggtctccgagagaaagataacaccaatgtaccaaatttcagtgaggcagacgtaatgcataatttgcagtcatttgcaagtgtcatgcgccgcaggcttcttagtgaaaatgacaacctggctgctcttttgggaaatgatgacaaatcttctgatctgcaaaacctaaaagaaattcagagatctgttgacgtgaattctgtaggaagtggctcgttctctgcatttccgggaatatatggccaagctctggcacctttgcttcctgaagatattgatgctaccacagttcagcagctgtctacagatgtgacccagaccactaatgtagagatgtctggtacaacgtacagcaagtgggcatatattatcacaattcctgctgcaatattgctcattagtctcatagttctgattttggttttgcggaagcgagggcgtgcaccagtagccccttggaaaacagggctaagtggccctattcagaaggccctcgtaacaggtgcccaaaaactgaacagagctgaactcgaagttgcctgtgaagattttagcaacatcatcaatacttttcctacctgtactgtattcaagggcatattgtcaagcggggttgagattggtgttgtctccactaccatatcgtcgagcaaagactggtccaggagtgcggaatcatgcttcaagaaaaagatagatagactgtcaagggtcaaccacaagaacttcatcaacctccttggctattgcctagaaaatgagcctttcacgagaatgatggtgtttgagttcgctccacatggtagtctctcacagcaccttcacgtcaaagagtttgagcatctggactgggctgcgaggatgagggtcatcatgggcgtcgcatactgccttcaatacatgcaccatgagctcagtccacctatggcgatccacgacgtgcggtctgacacaaccttcatttcagatgattatgctgccaagattgcagatgttggtgtatggaacgagcttgctgccaaagcgaaggctggaaaggaggacggcagcagccgtgctgaagctcctccggatctcccaagcaacgcctactgcttcggcgcgctcatgatcgagaccatatccgggagggttcctgacccgtatgatcacaaacccatatgcagctgggcttctgagcatctgaaagacaagaactacggcaagctcgtggacgcgtcgctgaaggagcacaaggaaagcgagctggaggccgtctgcgaggtgatccaagagtgcatcgaccctgacccgacgcggcggccgtcgatgagagacgtcgtgggcaagctgcgagacgctctcggcatctcgcccgaggcggcggcgccgcggctgtcgccgctctggtgggcggagctggagctgctgtcggtgaagtcaacctag

SEQ ID NO: 2116 - DNA, 261 bp, Zea mays
  Peptide Sequence Number=SeqID_43895
atggaggcggcagcggggtgctatcacggtgccgctgcggggatacttcgcctctgcttcgaccggactatcgaggtactctctgagccttcccaaggattgatagaagaactattcgcatgggaattgagtgcactggtgtgccggggcgtggtctccggcgaactccgccgccgcgggctggtgggtgccgtcaggggtggtcatgagattggtgatggctcagggactgtcgatccggacttcaacggctgggattag

SEQ ID NO: 2117 - DNA, 597 bp, Zea mays
  Peptide Sequence Number=SeqID_43896
atggcaaaaccaactacaccccaagtttatccaattaatcagctaagggcatcccattccaccctcatggttgtattgttttccccggtggtcatccagcgaacaggtccttacggagagggtcctgggcgcaagaaacaggactgcaggttctatttccaagaaaccgaggggctctttaacaaaaaaaccacgcgaaggggtacagggtgttctcggccatccgatcacatatcaacggacaagatcatatctgagcgagagcgcgcacgggggcgcgggagagcgctgataagcgggccagggcggtcagcggctcggggggaaggcgggctgactggttgggcccagcgccagggggcgcaagcaaccgatgggtgggacccaggggtagtggtgcacgctctaagcggtatctggagatctacaccgttagattgggagcagacagttaggatcgggcgtcaggggggtaacgacacggtgaccggcgctgttcctatccacggcggtggagtcgccggagaaggggcaggcgtggcctccgggggtctggggtcaccggaattggccagggccggtgagggggcccggtga

SEQ ID NO: 2118 - DNA, 564 bp, Zea mays
  Peptide Sequence Number=SeqID_43897
atggtcgggtccgaggggccaggggcgcgcacatgggagataggagctcgacagcttgcggctagcagggaggagctcgcgggaaaggggcttcggctgggcgcggctgccaggacaagcgcagcagggagccgggacgagaccgtggccgagcgagctctggccggcacaggcgtgacgaccagggagctcggcactgtgccgcagccggaggccgagcgggcagagagcgccatgggagataacagggagagcgcgcgacacagaggcgagcagggtgtgaactgggtagagttgagccagggagcttcagcgaacgagaagccgtatgccgaccatgggaagcgggcggtcgagctggaggagcaagggaggggagccgcggcgctgggcgcgtgcaggagagatgcagggaggagagaagcaagggaaggagcgcgcgcgctcaggagatgggcacacggcgcgaccacggagaagaaaatggccagggcgcgcgccaggaagaagcagataaggacgtctgggaaaaaatctggggagaagaagagcggcgtgggatag

SEQ ID NO: 2119 - DNA, 207 bp, Zea mays
  Peptide Sequence Number=SeqID_43898
atggacggatatgcatgggtcctgctgtctgtcgtcctcctagtcgccagggacgctggccggccgccggccgaggtgcagtgcaaggctggaacggcggacgacgctgctgcagtgcggagagaaaacccagccgagcagagcacgcgctcaagctcaagtaacaccgcctccgagcaccagcttgcaaacagaatcggacagtga

SEQ ID NO: 2120 - DNA, 210 bp, Zea mays
  Peptide Sequence Number=SeqID_43899
atggtggacggatggggagggagagaaaaaaaggggctcacctttttccctgagaactcacctgtcaacttcgtgctcgggttcctggaatccacccagcaggctctgccgaatctgtgtgttgaagagcagctcggaggccactactctgatgcagagactagtatgcactcaagctttctccgaggcacgccgctgtctctaccttaa

SEQ ID NO: 2121 - DNA, 339 bp, Zea mays
  Peptide Sequence Number=SeqID_43900
atggactacttcagctcctgctggggcccgcgatcgggcgccgggcaccggggcaagggctccgacgccgccggccggcaggacggtctcctctggtacaaggacgccggccagctcgtcactggggagttctccatggccgtggtgcaggccaaccagctcctcgaggaccagagccaagtagagtccggatcgctctccctggctgacccgggcccacagggcaccttcgtcggcgtctatgatggccatggcggcccggagacgtcccggttcatcaatgaccacctcttcaaccatctcagaagtaaggactcgatatgtcaaagttaccgctga

SEQ ID NO: 2122 - DNA, 243 bp, Zea mays
  Peptide Sequence Number=SeqID_43901
atggggtctacctcttctcgtggccgacacatggcagcgccactcgcagtcctcgtcaggcaccacactgccatgtggacgttgttggtcctctcctatgcgccaacgtcgggcctgctcccctccttcctcatcagctcatcgccgctctgccgctgccgtcaagcgcgaggtcgcaactgcgaggggggcttgttggggtcgtcgcttcgtcgggttgccgtctgcatggttcttaaagtt

SEQ ID NO: 2123 - DNA, 897 bp, Zea mays
  Peptide Sequence Number=SeqID_43902
atgaagatctatctccccgagggcggcatgagggcaacaaaagccggagggtttgcaactgagcacaagtttatgtcagcggacgtgatccggaaagctttccaagcaactgaggagggctttctttctctagtcagcaaggaatggtctttgaagcctcagattgcttcagtgggctcctgctgccttgttggtgtaatctgtgctgggactctctatgttgcaaacgtgggcgactcacgtgcagttcttggaaggcttgttaaggcaactggagaggttgtggccatgcagttgtcatcggagcacaatgcgtgctatgaggaagttagacaagaactgcagtcatcacatcctgacgatccacatattgtggttctcaaacacaatgtttggcgagtgaagggtctcatccagatctcaagatctattggagatgtatatctaaagaaaccagagtacaacagagaaccacttcacagcaagtttcggcttcgagaaaccttccagaggccgatccttagttctgaacctcaaattactgaacatcgaatacagccgaacgatcaatttgttatatttgcttctgatggtctatgggagcacctcagcaataaggaagcagttgaccttgtccaaagtagtccccgaaatggaatcgctcggaggctagtgaaagccgcgatgcaagaagctgccaagaagagggagatgagatactcagacctcaagaagatcgaccgtggtgtgagaaggcatttccacgacgatataactgtcgtcgtgtccatcatatcccgcttttttcgtgttgatatgaagggtggcagcatcaccgctcgagataatgtttgcggggcgcatgatttgaccagttccgatcaaagctattggtga

SEQ ID NO: 2124 - DNA, 846 bp, Zea mays
  Peptide Sequence Number=SeqID_43903
atggcagctgactccaccatggggtttcatcaggggatcaccgcctcgctgtacaaccatcacatgctctcgttccagtccaacaacgacgtcggcatcggcggcggcgacgacgctaccggtggcatggtcatggccccggggagtgtgagtgggggcagtggcaacgccgggttgttcctctccccaaacacaggggtcgtcagcaacgcaccgggggttgcctcgtcaaggaactcgtcgggggatgcgttctgtggcattgggacgcccaagtataagtatgtcactggttcttcttccgattggagtgaccgtgagaccgcccctgcctccgcccgcccgaccttcggaaaccccgccacgattccaaccgcaatccgcccgcctcagcaaacctccgcgagagtcatatccatcgtaaacccagcctcattcacgccctctcccgccgacttcggctcgcagatccaatacgatggcctcgagagtggcgcgcccgcgtccgtcggccgcgctgacgacgactggtcgcacggcaagaagccgctgccatcaggcccgtcgcgctacccgagcctcggctccgcgggcggtgactttcgcgactcgcccatctcgaccaactcctctgaccgctggtctcgtgccacgccaagcaatgacgagcgtgagaggcctcgcatcgtgcttgatccacccaaacgtgacgccttggccacccctacccctcctgctgaggtgggacgtagccgatcgagcccatttggagccgcgaggccacgggaggacgtgctggccgataaggggatggactggaagaagatggaaactgagattgattag

SEQ ID NO: 2125 - DNA, 408 bp, Zea mays
  Peptide Sequence Number=SeqID_43904
atgagggtgccgctgactgcagctgctaccgagctatggcaagccggcatcaccctcggccatggcctccgaccaccagccccacttcagttcgtcactccctcccccgccagtgtggtggccctcgccggtgctaacgccaagaacgtctcctcgccgccggtggcggcggcatggccagggggaggaggggcgaaggaggccgtggcggggggcaaggaggagtggcagctcacgccgcttgacatgggccttggcgccggtgaggggtgggacgccgcggtgccgccggggctcgccccgaccacaccttcctcaggtggatcatcgacggcggggacgcgtctgcggccatggggtctgtcatggacccgccggtccttgagctggaccacgcgccgtccatga

SEQ ID NO: 2126 - DNA, 183 bp, Zea mays
  Peptide Sequence Number=SeqID_43905
atgtctgtgaagatgcggactacctgcacctggacagaaagaccctatgaagctttactgttccctgggattggctttgggcttttcctctcgcggatacatataattcggaagaatagggttctagcaattgatatcctttcgcaaataattgaaatgcaatttcgtgatctggatctttaa

SEQ ID NO: 2127 - DNA, 1149 bp, Zea mays
  Peptide Sequence Number=SeqID_43906
atggcgacgcgcaaccggacgccgctctaccgcaagtaccgcgacgcgctgcggcacgtccgcgcgccgcccggggcgccgtcgtcgtccggcggcggcggcggcgggggagggccggtaatcgagatggcctcactcctgcgctccgaccgcccctacgcgcccctcagcaccgacgacccctccgcctccaggtgccaccacctccaactctccacagccctcctcacatctcgtctggtctctcggacgtttgggaatatcagtgaagatcgagcaaatgtaaggcttgccatagcatgtcggtcgacggtgatcagtggcttaggcagtaaagctgtagtgctctgttctgatttgcaaacgcaaagtagaggcgctgcgacggtcgggctacccccagcctgggtggatgtctctgaagagatatccgcaaacatgcagcgggcaaggacgaaaatggcggagctggctaaggcgcatgccaaagccttgatgccgtcctttggtgatggcagagacgaccaacgagccattgaggttctcacgcacgaggtaacggacttgctaaagaggtcggagaagaggctgcagaagctgtccatgaaagattcgtcagaggactcaaatgtccggaagaatgtccagcgttctcttgctacagacctgcaaaacctgtcaatggagttccggaaaaagcagtcgtcgtatctaaagcagcttcgtcaacaaaaagagggtcaggacggtgttgatttggaaatgaatataaacggagcaaagtctacatttgaagatgatgagtttgacgatgtgggtttcactgaggttcagatgtcaaaacttaagaaaagcgaagccttcactagagaaagggagagagaaattgagcaggttgttgaatcagtcaacgaacttgcacagatcatgaaggatctttcagttctcgtgattgatcagggaaccatcatcgatcggatagactacaacatacagaatgttgcagcttcagttgaggagggttacaaacaattgcaaaaggctgagaggacccagaagaaagggggcatggtgatgtgtgccactgtccttgtcattctaatcttcatcatgatagtccttctgattttgaaggagatcattttctga

SEQ ID NO: 2128 - DNA, 360 bp, Zea mays
  Peptide Sequence Number=SeqID_43907
atggagccgccgcacgccgtcgccgctgtagcagcaggaggagagggtggcactgcaagcccgggcaccggcctcgaagggccggtgcttaggcgggggctggacggcggtggggaaggggaggacggggagctgggggcagggcaggaggcggacgcacggataccggagcggcctagcgaggcggactgtggctactacctctgcacgggcgcctgcggcttcagggaccgctgccgttacaaccatccccgcgatcgtggtggcactgagaacttatatgtcgtcgtcgccatcagtgattgctcgaacagacaattgaaaaagagaattgatctttttttatgggcgaagtgttga

SEQ ID NO: 2129 - DNA, 299 bp, Zea mays
  Peptide Sequence Number=SeqID_43908
atgggcagaagcgcgctgcgcccgcgcccgcggtggaaacttagcaggaaggcccttggagttttatctaactggaagtgggttcaatcactgtttctcagggttactgacagcttacgaaaagggccttaccagagagggctggccacggtgaagttgtgctttgcggtggcggagaccaatttgggggaaaagggaaattctctagctatggcggccggagataaggaagaataccggcgcagtgaatacgtgttcaacgccgtggcagctattccggtgagcaacggggagctaaa

SEQ ID NO: 2130 - DNA, 372 bp, Zea mays
  Peptide Sequence Number=SeqID_43909
atgggcagaagcgcgctgcgcccgcgcccgcggtggaaacttagcaggaaggcccttggagttttatctaactggaagtgggttcaatcactgtttctcagggttactgacagcttacgaaaagggccttaccagagagggctggccacggtgaagttgtgctttgcggtggcggagaccaatttgggggaaaagggaaattctctagctatggcggccggagataaggaagaataccggcgcagtgaatacgtgttcaacgccgtggcagctattccggtgagcaacggggagctaaactcatcggcggcaaagatcctttaccccgcgacgttatccttctaccccacacgtgaatcctggcgccggtga

SEQ ID NO: 2131 - DNA, 522 bp, Zea mays
  Peptide Sequence Number=SeqID_43910
atggaaattccaaatgctagagcggttctccgtgtgagatgcccgaggtgccactgcgttctcgaggaggccggcgcccctgtgtaccagtgcggtggatgcggtgctagccttcaagagatctgggatgctctgagggttgccgcagagtccgatctagcccttgcccaaaccatcgtggacagtgctggaatcatcgtctcgaaccctgacatgacgctctgctacgacgagagagggtggacggagggcgtccaccaccgcaccgtgcccccgcccgcgactttgacccccgcgcgcgtcttcctcctgcccgcgaatcacacccgctcgcgtcgccctcgccgccgggtatcccgcccgcgccaggcacccctcccccggcgcgccgtgatgcccgccgtcgggtatcccgccctcgtcagcgcacccctcgccctcacccccgtcttcgaagagccctgcttccatcctcagcgccgccagctcgccggcatcctcctaatccttgctcgatgctag

SEQ ID NO: 2132 - DNA, 2457 bp, Zea mays
  Peptide Sequence Number=SeqID_43911
atggcccatttaaaggaactttgtgctgataagtccaactatcaaaaagaacaagtcaagtctcataagcaaacatctgcaaaagttcagttgggacagtcagaaccaaaagatccaaatagcattcgtgtgattcaacggaagcttgtctatattgttggtatgccaactgagttcgccagcgagaagttgctgagacagaagagtttccttggacaatatggaaagatagaaaacattatcattgataatgttggagctaaccaacaggttcctgactctggacgtgtatatgttacatttgcaaaagaagtagaagctatcagatgcatacaggcagttgatggttattccttggatggtcgacctttgaaagcaacctttggtgtgacaagatattgtcatatatggctcagcaataaggactgctacaagccaaactgttcgtatgtgcattataaagccccagcagaagaaatttgtacaaaagatgatgtttctgtggtgtgtgcaaggtcctccttctgcgcggtggccatggccgccgccgtctctaatcgccttgtcgttgcaatcgcgaggaaggcggatgagacaggagagggttttgaagtggtcaggctgcagcactccatgggaatgagtaccaagtgtctccaacatcgttcgggacgtactttgccccctccatgtgactgcagttcaagaaatacaactgccagtggaatctccaaagatatttgcatcaatgatgacagattactacccaatggtgctatcaagtatactagtttaccatcagtcaccactccacgggactcaagcctttcttctggcagtcctccatcgccggcaagtattgttcttcatcaaaggaatgaccatgagagattacacaataatcagcaaaatttgtctgacctcaaacctcaaaggtacataccacctggagggcgtaactgttcaagtgaaatgactacatcagtaaagcatatgcagcctattgagggtgcttggttgcacagctcatcaaatgagcatttgggctccaataacgacaaatctcaagcatcttcacagttaggaaacgataattcaaatcccaagcaaattacttcagcagaaaatggaacatctgacaccgtgcagcaaaagccacagtatgctgatgtagtttctcaaggacaagttgcaccagtgcggcgtcttactgtacttaacaggccgtcaattgcttctagcgatactaggcctaaagcaacaggacaagttgtcaatggtacttcaacaagcttcacaaaacttactttggttcaaaaggcacaagggagctgcattacaattcctagaaaccatccagttccccagatcccagaggaacctgcgcatctgttcgcttcagctagtgttaaatctcatgctggagtagagataatgaatgaatgctcagatatcaaagaaaagatagttcttggaggttataagcaactaccagagagcactgtgtcacacagattgactgcatcacagaatatgagcagcggaactcttcccagtaatctttctgcatcttatgccaaaactcaaggatctgctggatcacacaatctttcagatttgaacatgaagcttgtagcaaagaatcgatcacagctggtaaatcaacaaaatgcaccagtttcagtttctaatacaggtatagcaagagcaagtttctgctgcagcactcttaataagaatgcatcgttgtctgatggtgatagctcgcacaataggcgctgggacacaattcggtctggtcatattgtttcctctcattcttcagatagcactatgctatcaagaccagccagtgcagtatcatccactgatgtggcatctctgcatagaaaggaaaggagacaagcttgtcctcctggatttgagaagcctcatctgtactccggttcaggcaaagcttgctctggacattgctctgcacctgatgccctggtacaagattgtggtattccagatcaacaagactttactagcttgactacagattgcctgaaagatgatggagatgtcacacaaaatctaagcatgaacatctcttcaccacccagtttgaccgataccaaccggaactggagtcagagtcacagacagtttccaggcaccctctttggttggtcaaatgaccctcagtattcattttaccctggtggctcgtcacatccacgtcaagaggctgaaaattgggatggaacttccactagttacatggctactgctactgggggatacaaagtattttcccagggaacaacttcagacatgaggggtggtatggcaggcacattgctccaacagccaataatgtcaactcatgatagatggactgatggaagcagcgattctggaaggaactgccctcaggttgacatttcgtaccgcatgtacagcctattctag

SEQ ID NO: 2133 - DNA, 346 bp, Zea mays
  Peptide Sequence Number=SeqID_43912
atggaggcccaggccctcgcgtcatgcaaccggcgcgccgaatgcttcgtgcatgcaactacaccgccacttgcgccaccatcgcgcctcctcgactgtgcgggcagaagcagcggtcatgtcgccagccaagcctacgtcccatctgggggcaacgagagaaccctctctcacggcgtgaagacaacgcgcccgtgttccgttcctcgaacggctcgcgcacgcgcaacggccgccccgccaaccactcgccccgtcgcattaactccgcggcgggacaggcggcgcctctggcatgagaagcgggcgacgcttcgccttcgccataaagaccgcgtcagtaaag

SEQ ID NO: 2134 - DNA, 168 bp, Zea mays
  Peptide Sequence Number=SeqID_43913
atgaccgacgccgacgccctacgcctggtgccaggttccgttgagttcttcgccggcgaggggcatccaccattgccgttgaagggagggcttacgccgcacctagccgcgctccgtcgtcagccgacttgtttccatcgaaggggacccggttggatcagggcatag

SEQ ID NO: 2135 - DNA, 237 bp, Zea mays
  Peptide Sequence Number=SeqID_43914
atgaggatcatgatcaagggaggcgtgtggaagaacacggaggacgagatcctcaaggcggccgtgatgaagtacggcaagaaccagtgggcgcgcatctcgtcgctgctcgtccgcaagtccgccaagcagtgcaaggcccgctggtatgagtggctcgatccgtccatcaagaagatgactctaagtgttatcagccgttatcctttcacaaacattcgaactggcaaactttag

SEQ ID NO: 2136 - DNA, 169 bp, Zea mays
  Peptide Sequence Number=SeqID_43915
atggaggagctcggcaggacgacgcagctgcgctcgcacccgtccttctccagctcgctcgagagggacgaccgcgtgtcgttgcaggaaccccataagagtcactccacctcctcctgttcctccgattctgacaccgacgacggccggaagcgccacgacgacgacg

SEQ ID NO: 2137 - DNA, 300 bp, Zea mays
  Peptide Sequence Number=SeqID_43916
atgggtcatgaaaatgaatcttttgaggacttcgtgaaagcacatgatgcatgccaagacgaccttatgttttttcctaccagcaatagctatggtttagctagtgtggctggaaatgctgataagatttctgctttgcaaaatgagtttgaaactgtgaagaagcgaatggatgatgaagctaagaaggcttctcggcttgagcagaagattaagcttctgacacaaggatatcagcttctgcctgtcagaagctgtcgcggactgccaaatgcccaacttttcagcccgtttttgtga

SEQ ID NO: 2138 - DNA, 1530 bp, Zea mays
  Peptide Sequence Number=SeqID_43917
atgaccggcggacgaggcgcgctcgagcagcgggaggggggagttgcactgcagagccgcagcaacgcgaggagcctgtcgccgcggtccgccatgggatgggagaggtgtcggcgctccccaccagcgcgcgccatgggagccgtgggcagagacaggaagaacgagacagagaaggattccgtggctctactcgtcctcgcgcacgcccagccatccgccgagaagcggatccagtggcggtacaagaagatggatgtccccagggtggtgctagtttgccactcgttgttctggctgctccttccggcggtcgtcctcggtgccactgcggaggagacgatgcagacctacatcgtgcagctgcacccgcaccacgacggcggcagcggcgaggccacgctgcccgcctccaactccaaggtcgactggcacctctccttcctcgagaggtccgtggcgtgggagcaggagaagcgccccgcctcgcgcctcctctactcctaccataccgtgttcgacggcttcgcggcgcagctctcggacggcgaggccgcggcgctgcgcgcgctgcctggcgtcgcgtccgtgcgcgccgaccggcgggtggagctgcacaccacctactcgtaccgcttcctggggctcggcttctgccccaccggcgcgtgggcgcggtccgggtacggccgcggcaccatcatcggcgtgctcgacacgggcgtgtggcccgagagccctagcttcgacgaccgcgggatgccgcccgcgccggtgcgctggtccggcgcgtgccagggcggggagcacttcaacgcctccaactgcaaccggaagctcatcggcgcgcgcttctactccaagggccaccgcgccaactacccgaccaacccctcggaggcggcggctctgctggagtacgtgtcgccgcgggacgcgcacgggcacggcacgcacacggcgtccaccgcggcgggcgcggccgtcgccggggccagcgtcctgggcgccggcctcggggaggcgcgcggcgtcgccccgggcgcgcacgtcgccgcctacaaggtctgctggttcaacggctgctacagctccgacatcctcgccgggatggacgacgcggtgcgcgacggcgtcgacgtcctgtccctctccctcggtgggttccccatcccgctcttcgaggacagcatcgccatcggcagcttccgcgccacggcgcgtggcgtctccgtcgtgtgcgccgctgggaacaacggcccggcgcggagctccgtcgccaacgaggcgccgtgggtgctgactgtcggcgcggccaccatggaccgccgcttcccggcgtacgtccggctcggtgacggacgtgtcctgtacggcgagtccatgtccatgtaccccggggaaaccggtttgaaaaaaggcgggaaggacctggagctggagctagtgtacgccgttggtgggacccgggaatccgagtactgcctcaaggggtcccttgataaagccgccgtcgccggaaagatggtg

SEQ ID NO: 2139 - DNA, 198 bp, Zea mays
  Peptide Sequence Number=SeqID_43918
atgaacttttgtgtgctcactcttgcgataaaactttcccccacatgtgaagagaaggtggccccggaggaagacaaatacgaggagttcgacgagaaatttgataggtttccaacatccggattcaccaaaacggtggatctcaagtctagatttaccattttggtggagctcctaaaagattgctccacaaactaa

SEQ ID NO: 2140 - DNA, 1398 bp, Zea mays
  Peptide Sequence Number=SeqID_43919
atgaccaacagaattgtccataacttttcatttcatcccaataatggaattaccaattcagtcttacccagcatgcctggctccatagcccacgacgcctgcatggtccgtgatcttttggatagcacatataggcgccaccagaccgagggagcccaggcgccaccaggccgaggtggcctatgcggccagcctcaaggccggggcgacccaggtgtgcctgccaggccggggcggcccaacaaccagccaaacgccccacgagccggccagagcccatgtgcggccattaaaggggaggcggtaaccctaaccgcccccattcccagcagccgccgccctctcggttctcgcgccaggagctcgcacttgccgaagccgtcgaaccgagccgagcgcccgcagccggcgaggccgagccgcgtctgcgccagggccgcacgtttcggcgacgtccgcgccgtgcgccggccgcaaccgggcagcgcccgctgccggcatggtcagggccgcacgcccgcccgcgagccgccgaggcccgcgctcccggagctgccgagaagcgcgccgaggagccaacatggccggcgtggccgagagccaggagctccatccgccagcgccctaggctgcctggccgagggcctggccgactgcgcccaccggcgggaccggtctgcaggggccgcgccacccgcagggagcgcgccagggccaaccggccgccgtgccgagcctccgtgctcaggaggccgagcgcccctgcccgccaggtcttccgagcgcctgcgcgccgccagggcgcggatccagcccacgtcgggtcgctcccagcgcttgcgtgccgctagggcgaagtggatccgactgtgccgaggacccgcacttggggtcgcgctcgaggccagcagccccgcggccggtcgggcatcccgctgtcgttgcgcgggtgcagtacgggcgagggctcgcggccccagcgagggcgcggttggcacgcagcccctagcgcgtgggcgcggcagccagaccccgacgagccatggccaggacgaagaagcattaaggcttctggttccaacgcttctttggcagcacttggtgttggtgatgaacaatggagacgtgcagaacaaagcttctacaaccagcgacaaggcggccttcttgcgcgccactggccactggagaaagcgcggcaagagcgtccccgcctccccattcgtgtcggcgctcatgcatgcatgcatgcatgcatcaccagcaccctgtgctcagtgggctagtgcgtcgtcgactcgtcgtagccccatttgccccagccaggcttttagattagctaggcactgcgaagtcgtctcgtctgcgctgacaatgctgctggccggggcgtcctaa

SEQ ID NO: 2141 - DNA, 369 bp, Zea mays
  Peptide Sequence Number=SeqID_43920
atggctgtagcaaacttcatctactctgaccaacagttcaaagtacgtcagaaaggaggattgtattggccacaaggagcaacaacaatagagagcgttagagctgttctcaaactgcctcaccttcagcttgatctagcgaccagaggacgcatacgggattccctgtaccggttggccaacaggcttgaacaaacgcattgcgttgccagtacaagcggaagaatgggatcatcgggttcaaataggttcgaatcggacgggtggggcgaaacgcaggcgacgagccccatggatcagttagtcgcgcagctccttctgcagaaaccctctcaccggaagactgccccgccgcaccgcgtgacgtag

SEQ ID NO: 2142 - DNA, 873 bp, Zea mays
  Peptide Sequence Number=SeqID_43921
atggcgctcagcttccacacgacaaccgccccgctgttcggacaccgcatccccgccccggacatgagcttcctccatgacgactttcactccgaggtcaccgacgcgctgctcggcttcgtgtacgacccgctggacgcctccaacgccgcgctcgacgacctcctcggcctccctcccagcgacgacgcggccttcctcgccccgatcgacggcgccaccgaggccaagtggcaatgcggcaagaggcagcgcattggcggtggcaaccagcaggtgccggcgctggcggcggctccgatgatcgacgagttcgtcctgccactgccagtgccactgccactgccacagccgcccccgcccgcggcgcccctgctccctgtcccggtcccggtcccgacgcaggttccggagcccgtcgtgttcgtgcgaggcgcggacggcaacaaggccggcggagcgtgccagtccgtgcagaactcggcggcgaggcagcgccgcaagcggatcagcgagaagacggccgagctggcgcggctcatccccggagcaaacaagctcaacaccgccgagatgctggaggaggccagtcgccacgtgaagctcctgcaggcgcaggtcggcatgctcgccctcatgcgcgccgccggctcaagcgaggacgataagatgccgtcggccatcacggcgcaggagcggatgcacgcgctgctggcgtgcggcagcgtgcaggagcggctggccgccgagggcaggtgcctggtgccgacgagtctggtggacgccgtggccaaggactacgccgtcgtcaagggcaacccggtggtgcgcagggacctcggccggttcgtggcgtcgctgcagggccagtga

SEQ ID NO: 2143 - DNA, 796 bp, Zea mays
  Peptide Sequence Number=SeqID_43922
tggcagtaacgaccggagcatcgaatcctgggtgctcatcaagaagccgtgcatcgtagtgcccggcgacgacgctggctccccatcgtgggattcgtcgggggcgtcgcctgcgacgaatcagttgccggagatagaagcctggttcttgaacaagaacgtgatggtgagaatccattgcgaggatggcaagggtgtggtcgtgagggtgctcgccgagttggaggagctccccctcagcatcgtccacgccaatgtcatccaccaccgtgaggtccttgatgtatcggcgccacaacgaggacctcgacgtattgccaccgtcgctttggagaaagcagaggtagatggcaacatcgtggcgctgaagaactacctcaagacgtactacatccttactccttacattcctgttgtgataacaatctgcaaaaacaacatgcttgtgcgtagccaaagggcaaggaagaagctcgtggcaatgctgcggcagatgatcgctgaccggaggtcctctggctgcacccgagacgacatgctggacgcgctgctcagcggcaacgagggtaccagggcgaagctcagcgacgaccaaatcatcgaccttctcatcaccctcatatactctgggtacgagactgtgtcgaccacctcgatgatggcggtgaagtacctgtccgacaaccccaaagctctcggacagataaggaaagagcaccttgacatcaggaaggctaagtcgccagaggatccccttgactggaacgattacaagtccatgaccttcaccaaagct

SEQ ID NO: 2144 - DNA, 876 bp, Zea mays
  Peptide Sequence Number=SeqID_43923
atggaagagttggaaacacatgatggcgtgagcaaagggaagtataccattgggcttgggcaggaaagtatggcattttgcactgaagttgaggatgttatttcgatgagatattggctcagcttgacagtggtgaagtccctcctgaaaaattataacattgacccaatgtgcattggacgtttggaagttggcagtgaaacagtaatagacaagagcaagtctataaagacatggctgatgcagatatttgaggaatctggcaatactgatattgaaggagttgactcctcgaatgcatgttatggtggaacagctgcattgtttaattgtgttaactgggttgaaagcaagtcatgggatggtcgctatggacttgttgtttgcacagacagtgcggtttacgctgaaggtccggctcgccctactggtggtgcggctgctattgcaatgctgattggaccaaatgctcctatttgttttgaaagtaaatatagaggatctcatatggcccatgtatacgacttttacaagcccgatcttgcgagtgaatatccggtggttgatgggaagctatcacaaacatgctacctcatggcattggactcctgctacaatgtattttgcaaaaagtatgaaaaacatgaggggaagcagttttcaatttctgatgcagattatgttgtgttccattctccatacaacaagatttcccgtccatatcaagcagcacggttgatggagagtcaagggaaaaattggcaccctatgcaggcttgtcatctgaagaaagctaccagagtcgcgaccttgaaaagtctgctaaacatcgcaaacatactggatatttccaagaagctgaaggcaaggcacgtg

SEQ ID NO: 2145 - DNA, 2058 bp, Zea mays
  Peptide Sequence Number=SeqID_43924
atgctcgccgccagcgctcgccccgaccgcttcaccttccccgtcgtcgtcaagtgctgcacgcgcgccggcgcgctgggcgagggccgcgccgcgcacgcggccgtgatcaagctgggcctaggcgccgacatgtacaccgccaactcgctcgtcgcgctctacgccaagctcggcctcgtcggggacgccgagcgggtgttcgacggaatgccggcgcgggacatcgtctcgtggaacacgatggtggacgggtacgtgtccaacgggatgggagcgctggcgctggcgtgcttccgggatatgaacgacgcgctgcgagtgcggcatgacggcgttggggtaatcgcggcactcgcggcctgctgcctggagtcggcgctggcgcaggggcgggagatacacggctatgccatcaggcacgggctcgagcaggatgtgaaggtggggacttctcttgttgacatgtactgcaaatgtggcaatgttttgtacgctgagaatgtctttgcaacgatgctgctgaggaccgtggtgacgtggaattgtctgataggtggctatgcgctgaacgagcggcctgtggatgcgtttgattgcttcatgcaaatgagagcggaggggttccaggtggaagccgtcactgctatcaatttgcttgccgcctgtggtcaaactgaaagctcactgtacggaaggagtgttcatgcttatgtggttcggagacattttcttccccacgtagtgcttgagactgctctcctggagatgtatggcaatgttggcaaagtggaatcatctgaaaagatatttggtcagatgacagagaaaactgtggtaacatggaataatatgatcgctgcctacatctacatggaaatgtaccaggaagccatcgcattgttcctggagctactgaatcaacctctttatcctgattatttcaccatgacaacagtagtaccggcgttcgtcttgctaggctcactaagacagtgcaggcaaatgcacagctacattatcaagttaggctatggagacagcactctgattatgaacgcagttatgcatatgtatgcaaggtgtggtgatattgtggcctcaagggagatctttgacaaaatgccaggcaaggatgtgatctcctggaatacaatcattataggatatgcaattcacggacaaggaaagactgcattggaaatgtttgatgagatgaagtgtaacggtattgaaccaaatgagagcacctttgtctctgtgctgactgcatgcagtgtttctggcctggagactgagggctggaaggagttcaattcaatgcaacatgagtatggtatggttccacagattgagcactatggatgcatgactgatcttctgggccgtgcaggtgacctcagggaggtgctgcggtttattgaaaacatgccgatagctccaacatccaggatttggggttccttgctgacagcgagcagaaataagaatgatatcgatatagcagaatatgcagcagagaggatattccaactggaacacaacaacacaggctgttatgtcgttctgtcttccatgtatgctgatgccgggagatgggaggatgtggagaggataagatctctgatgaaggagaagggactccgaaggacggaggcaagaagccttgtggagcttaatgctgaagagtgcagttttgtcaatggggacatgtcgcaccctcagagcgagaaaattcatgaattgtctgatatcctatcacgaaatattggagaagatttagatagcccaactaatctccgtgattcagatccttttgcctcagggaaaactgtacttcccaataagcatagtgtaaggctggctgttgcctttggtctgatttcatctgagcctgggaccccaattcttgtcaagaagaatgtgcgtgtatgcaaccactgccatcgtgcactgaagttgatatcaaaatattcaagacggaagattgtagttggtgacacaaagatatatcacatattttcagatggctcttgttgctgtggtgactactggtga

SEQ ID NO: 2146 - DNA, 384 bp, Zea mays
  Peptide Sequence Number=SeqID_43925
aaacagacaattacgagtagcacaccttcaccaaatggtgccaaggggcaaaagagagctcaaaggagaaaccagaccaaaaaaaggaatcaaagaaaaatccttggagatgctgaccttgcatgccagcctggagtgagaaaaagctcaagaacacgctcaaggcctttggagtattggcttggtgaaagattactatatgggcctatacatgacaatttgcatggagctattggcatcaaagcatactcccctggccaagatggcaagagatcattgaaagtgaaatctttcgtgcctgaacagtattcagatcttgttgctaaatctgcaagtgttatggctcatgccgtcaaggtatcatgtggtgtgatagtatcttga

SEQ ID NO: 2147 - DNA, 1566 bp, Zea mays
  Peptide Sequence Number=SeqID_43926
atggacgctaccgaccccctctgcgccatctcctcgactgcgcgactccttccgcggacccttggccccgcccccgccatcgggccttccccctcgaaggcccgcgacgcgctcctcgaggccatcgcactcgcccggtctctgaaagggtctgaggagctggttaagcaggctacaatggtgccgaaggaacacggggacatccaggctctctaccatgatgatggagtgaaaggcaggcctcctgcaaatggcagcaaagagcaacagggaagaaggccagcactggatcgtaaacgggctcgcaaaccggtgcctgttgtggatcaatctaagttatcaaatatttcagatccaatcacattcttcatgaccttggatcggcttgaagaagccgaggaggagatcaaacggctaaacggagaggcagaaaaacgcacattgaattttgatcctgtagatgaacccattagacagcctggtttacgtgggagaaaatcagtccgcagtttcaaggtaattgaggatgttggtactcaagatcccattgaggcaccggcttcccaaacagcaactatgacaggatctcagttgtcacaggatgttatgcatgctgttgcgggcaaaaatggacgatctgtttcctcaagatctagtgaagctatttcagagaaagaagttacagtttcattagctgagaaggatggccgtgacgatttgacttatatactgacctcaatccaagatttagatgaatctgaagaggaagagtttatccggaagaccttagggattaaagaaacaaggaaggaaagagttggtcttcgtaactccattcttggagttaggtccctaagaagcaatactgaacaaaaaggttcaatgaaggtccaccctccagaaagtcatttgcctcagactcgccaagatcgaatttcagagttagagaaacatttgtttcctggaggtgcagcaaatgctaaatgcacagatgatgaatctaaagggtcaccagatattgtgatgggtgaaccatcattggtgcattattcttctgatgttctgatgactgatgagaactttactgcaagtgacgttgacagggagaccccaaatctgggtgccagagcagcagaccctgttcttgatcctgaaccaaacttgcctgatcatgcatatgaaaggcaacctggaggttcctcacttggtttgtacagagacacagaagttggagttgccaaagaaaatgagacatgtagcaggagcattatatctgtggaggaagatgatgtgccaatagactatataactattggcaggtctactgatgaaacagaagtttcttcttctcatcctttggagggtagctcgacagaagaattggtcactaaaccagttagacatgcggctccagatggtatctgtaggacttcacatgcagctgaggatagcattcaacatctagttcttgcttcatggcacgggaagcggtcaaagagggtggtgtcctacaaggtacatagcttttgctatgcacctggatatacgattatacgctgtatctag

SEQ ID NO: 2148 - DNA, 249 bp, Zea mays
  Peptide Sequence Number=SeqID_43927
atggagccacagttcccttttccccccactcagataacaatcttacagctcacaaatcctctccaccatgttaaccagagcatagactatggagaggcggtgttgctctccgtgcaagcgcgagaggtggtgttggttgatgtcgctgaagcggagctcgcgcggggccacactgggcagcggcagctggagcactgcgaattggctggtggctgcttcactgcgcactggctggttgctggcggctag

SEQ ID NO: 2149 - DNA, 390 bp, Zea mays
  Peptide Sequence Number=SeqID_43928
atgccggaccacgctatcaacaaagccggcatcaccctcggccatggcctccgaccaccagccccacttcagttcgtcactccctcccccgccagtgtggtggccctcgccggtgctaacgccaagaacgtctcctcgccgccggtggcggcggcatggccagggggaggaggggcgaaggaggccgtggcggggggcaaggaggagtggcagctcacgccgcttgacatgggccttggcgccggtgaggggtgggacgccgcggtgccgccggggctcgccccgaccacaccttcctcaggtggatcatcgacggcggggacgcgtctgcggccatggggtctgtcatggacccgccggtccttgagctggaccacgcgccgtccatga

SEQ ID NO: 2150 - DNA, 3435 bp, Zea mays
  Peptide Sequence Number=SeqID_43929
atgcctcccctcacaagctccctcctctcccgctccaccaccggcggctcctctacccgcgccgcggcagcggtcgcagcgatctccaggcccgccgcaccttcctcctcgtccccgcccgcccgctcgaccccgaggccgcgctccagcccggcgtcgcccttcgcatccggcctcgcgagccgcctcttcggcggccaccgcgccgtcgcccgctccgcgtcgtctgcagccgccgtcttcgagcgccggtttgcctcagcggcgaccaggaactcgtacgatgaaatcctgacgggcctcgctaagccaggaggcggagaggagttcggcaagtactacagcctgcctgcgctctccgatccgcggattgatcggctcccatattctataaggattcttctcgaatcggcaatcaggaactgcgatgacttccaggtcaccggaaaggatgttgagaagatcctggattgggagaaaagtgcaccgaagcaagttgaaatcccgttcaagcccgctcgtgtcctcctccaggattttactggtgtcccagctgttgttgatcttgcttgcatgagggatgctatgagtaaacttggcagtgacccgaacaaaattaatcctctggtacctgtagaccttgttattgatcattcagtacaagttgatgtggcaagatcagcaaatgctgctcaggcaaatatggagcttgagttccatcgtaacaaggaaaggtttgggttcttgaaatgggggtcctctgcattccgtaacatgcttgttgtccctcctggatctggcattgtccaccaggtgaatcttgaatatctggccagggttgtgtttaacaatggtgggatcctttaccctgacagcgttgtaggcaccgactctcacacaactatggtagatggtcttggagttgctgggtggggagttggtggtatagaggcggaagctgcaatgcttggccagccaatgagcatggtcttaccaggtgttgttggctttaagttatcaggcaagctgaggaacggagttacagccacagacttggttctaacagtaactcaaatgcttcggaaacatggtgttgttgggaaatttgttgagttttatgggcaaggcatgagtgagttgtcacttgctgatcgggcgaccatcgcaaatatgtctccggaatatggtgcaactatgggattcttcccagttgatggaaagacgctggactatttgaagcttactggccgaagtgatgatacagtggccatggttgagtcctacctgcgtgcgaataagatgttcgttgatcacagccaggttgacgctgaaagggtatactcttcctatctagaacttaacttggaagaggtagaaccatgtctatcaggaccaaaacggcctcatgatcgagtgacattgaagaatatgaagtctgattggctttcttgcttggacagcgatgtaggattcaagggttttgctgtccccaaagaatcacagggcaaagttgcagaattttcgttccatgggactcctgcaaagataaagcatggtgatgttgtaattgcagcaattaccagttgcacaaacacatcaaatcctaatgtaatgctgggagctgctttggttgccaagaaggcttgtgagttgggcctggaggtaaagccatggattaagacgagccttgcacctggttccggtgttgtgaagaagtacttggataagagtggtttgcagaaatatctcgaccagcttggctttcatattgttggctatggttgcacaacctgcattggaaattctggagagcttgatgaatctgtgtctgctgcaattactgagaatgatattgttgctgctgctgtgttgtctggaaacagaaattttgaaggacgtgtgcatcctttaaccagagcaaattaccttgcttcccctcctttagttgtggcttatgcattggctggcacactaacaccatcaatatcgtcgtctctttatagcattgatcctaaatacctaaagcactacatcgtctggaaaaagcatacatcaaggaatattctttgtatgtcctttgtaattgggaagtcatcaaggcaaaaagatcggtaccaatatacttctccactcatcaggtgttggctaccaacacgtcaaaagctaccgcaaagtctaaggctcctccctcatgattctaagtttctaactaccatatccaaaacctccataaaccgccttgaaacccgcactcgttgtgcctatatgtccattgacgtctcctatgaaaagcttctcactaatagttgtctctgtgtaccaaagcttgaagctggtatcacccacctcgtttgcatttcagactttttacatttagtctcttggacatataagatatttacccgtcttccagtcgttgtttcaactaactcccttaacttatctgttaatattgattttgagaaagaacctattggcatctcgaaagatggaaaagaggtttacttccgggatgtttggccatccacagaagagatagccgaggttgtcaagtcaagtgtgctccctgacatgttcaagagcacatatgagtcaatcaccaaaggaaatcctatgtggaatgagctgccagtctcaacaagcactctctacccctgggatccatcatctacatacatccatgagccaccttacttcaaggatatgaaaatgagtcctcctggcccgcggcctgtgaaggatgcatattgccttttgaattttggtgacagcatcacaaccgatcacatctcacctgccggaaacattcacccagacagcccagctgcaaaatatctgaaggagcgtggcgttgaaaggaaggacttcaactcatatggtagccgaagaggaaatgatgagatcatggctaggggaacctttgccaacattcgtcttgtgaataagttcttgaagggtgaggttggacccaagacaatccatgttccatctggggagaagcttgcagtttttgatgctgctatgaaatacaagaatgaagggcatgacactattatcctggctggtgccgagtacgggagtggaagctctcgggattgggctgcaaagggcccaatgctgcagggagtgaaggctgtgatagcaaagagcttcgagaggattcaccgcagcaatcttgctggcatgggaatcatccctctatgctacaaagcaggggaggatgcagacaccctgggcctaaccggccatgagcgctacacggtccaccttccaaccaatgtgagtgagatcaagcctggccaagatgttaccgtgacaactgataatggaaagtcgttcacttgcacactcagattcgacactgaggtggagcttgcttactacgatcatggtggcattctaccatatgtcgctagaaagatagcggaacaatag

SEQ ID NO: 2151 - DNA, 1113 bp, Zea mays
  Peptide Sequence Number=SeqID_43930
atggtgacttcgggcgaggcggggatttgcctgaggttggagaccctcggggagatgcctcgggttaggaggtatctgagctgcttccctttggagtccgacgaggcacgtcaagaatttggctcaccaggaagagacggccagacggctctcgtcgtgccccaactcggcaactccccatcagctcaccccgatctagggtttgtgcaccctccgcttacgcgcctccccaccaagcaactacccatggcggctacagggcaggagggggatgacgtcgaccactacgaggtactctgcctcccgtcgggggaggaaggcgcggcgctgaccatcgagcatatcgagaaggcctaccggacgcagtcgcggctgcgccaccccgataagcgccccgacgaccccaacgccaccgccgacttccagctcctctcgagttcctacaaactcctccgcgacgagtcccttcgccgccagttcgacgcgcgcctccgcggccgccgcgaggccgcagcccgcgccgccgccacgggcgttaagcgccggaaggccgtctccgacctcgaggagcgcgagcgcgccgccgccgcgggccaccccgccgatcccgaggagctcgccaagcgcgaggcccagcggatggccgccgacattgagcgcgagctcgcagcgttccgcgccgccaagcaggcttctgcatttggtgccacatcgacttcggcacatggagataagaagggtggaaccccacaggatggggtgaaaacggacaagggaaaaatcttgaaggtttcatgggatgggagtgctgattcgtacagtgcggcaaagttggaggagatcttccagaaatttggcaaagttgaagacattgttatcaagacaaggaaatcaaggagtaagggctcagcaattgtagtaatgggctccaaagaagctgcattattagcaatacagaaccatttctctctgtttccgttaaatgttgctcctgttcaagaatctggtggattatcaacaagaccaacagaaacatatgaatcaaggacaaacaatactgatggaactggatttaacgatttggaagcgtcggtgttccgtaaacttcgagag

SEQ ID NO: 2152 - DNA, 1899 bp, Zea mays
  Peptide Sequence Number=SeqID_43931
atggcgaagacccgcaagcctccggcccctccttctccgccgccgccccccgcagaaacgccatccccgcagcggcggcgcaagaagaagggccgcccgtccctcctcgacctccagcgccgcagcctccgcctgcaggcccaaaaccctagccccgccgcctcgcccacccgccgggaccccaatccctccgacgacgatgaggacgggaccgggagcgggcggcggcggcagaagcgcctcaagagcgtcctctccggcgtcgtcaaggaggagcagggggaggggaagaaggatgcagcgaaagcgacggggaaagaggacgctgcgtcggatggtgggcccacggggactcccctcccagacaaaaagttgctactcttcatcctcgataggctccagaagaaggatacttatggagttttctcggagcctgtcgatgcagaggagcttccagattactttgacattattgaccatccaatggacttctcaacaatccgtgagaagctgttgaatgactcgtattctaagttggagcagtttgaggatgatgtgtttctactcacatcaaatgccatgtcttacaattcagctgatacaatctacttccgacaggcacggtctattgaagctcttgccaaaaaggattttgagaacctgaggcaacccagtgatgaagaggaacccaaaccaccagctcgaaggggtaggccaccgaagaatcccaagacagagggtgatgtgtcaccagacctatctaatgtgaaagcaaataaacctgaagacaatgtcgatacattcagaaaaaggtcaactggagacagaactcgaaatacaaataccccaatgaaagatctgtccagttttcacgatacgtttggttcttttagtgcaaaaagaacagataaaattggtgattattctggttcatcgaagtggggaaagaaacctgttagtctagatgacgaccgcaggagtacatatgatcagcactattcacgtaatagctctctgtttgctgccctggatgatgagaggaaactactggtgccagtaggggttcagcagccacatgcatatgctaggagcttggcacgatttgcatcaaaattgggcccagttggctgggatgtggcagcaaatcgtatcagaagggcactcccccctgggacaagtttcggcccaggatgggttgtagatggtgaaccacctcaaaactctcagtgggctcctgcagcatcgactaatccctcctctgagcccactgctccacccaatatgccatccaagaatgatgtactcgatcacaagtctggaccgtcttctaatggggatgttactggtgaggagcatttaactagaactcaaacagtggcttctacatcaacaagctttgataagagctctgacatttccagtaaagtaaccaagcttgagaacggagttaccgagtcatgtggtggtacggacaatacgggatcagcagcgcctccaatgcagcaacacagccacagtcgagaaatccactctaacatcaatggctttactgctatgtcaaacgccatgagtcagtacgcggggcaagggttatttggatcaggcattcatatgacgcacgcccaagtgcttgggatgttttctggcatgaatggcaaagtcaatggctatatccataggcacccagtaactgctgatagtcttaaaacagcaggacagaacggagatgttggaaaggcaactgtgaaccccgtgcaaagcgcaggccaggatccaaagaccgcgaccgaaaatagctctgctcacccaggcttgaattccagagcccagtcatcaggttcctcgcctaggggaaagctgacaaatccgaagcaccctgatctggctttgcagctatga

SEQ ID NO: 2153 - DNA, 250 bp, Zea mays
  Peptide Sequence Number=SeqID_43932
atggacactgaagcggcagtcgtcaaccagccactaacgatgctatggtctatgggacttggaagggacacggagcacagcgtaggaaggcaacaaggccagaaggggtggtcaacattggagagttggagccggctggtgcaccctgcggcagcaccacacggcagacggtgcctggttgccttgagggttctggccgagcgccctacagtcatctccaaagggccgcctttggctttccgtcaagtcg

SEQ ID NO: 2154 - DNA, 138 bp, Zea mays
  Peptide Sequence Number=SeqID_43933
atgtcggcgccgccgctaacgtcgggggagccgttccgcgtgttcgtggggtacgacccgcgggagcacgaggcgtacgagaaatggggaaaggtctcgcgagagttaaagcttatgcccgagacgcactacgggtaa

SEQ ID NO: 2155 - DNA, 378 bp, Zea mays
  Peptide Sequence Number=SeqID_43934
atggaatatcgtcgcatcgagtttgtccatcctaacaaatgttttcactttgcaggcaagtctgactttgaaaggatcttcaaggaagtcttcgaggactgtcagacaagaacacggggatcctggacatcaactcccgccacgtcgctaccctcatggtttacaagtttcaatgtcgagaaagttcaatacaagaatgtgatgtttactgtttgggatgttggtggccaagaaaagttgaggcccttgtggaggcactacttcaacaatactgatggcttgatctatgtagttgattcattggatcgggagaggattggaaaagctaaagctgaatttcatgtctgtagattgtcggtcagagctgcttatcgctga

SEQ ID NO: 2156 - DNA, 661 bp, Zea mays
  Peptide Sequence Number=SeqID_43935
gaggaagtacctggtcccgtcgggcccgttcctgctcccgctggtgctgcttgcgctcgccagggggcagcgggtgaacgccgtgttcccgctggcgcagctcgggccggcattgctgctgctgctgcaggcgtcggcgctggcgttccggaacgaggccgacggcgacgtccggcgtccacggtgtccggcgtgctgcacgccagccctgtacctggacgccgtcgtgctgccctactacacggggctggaggcgctccggtggtcccgcttctccggggagtgcgcgtcgtgcctgtgccggatggagccgctgctcgtgggcggctcggcggtgcggtaccgcggcctctccaagacggcgctggcggtcatcttcgcgctctgctcgcggatggtgtgccgcatctacggcgaggagcgcctcagcgcgtggacgcggtccgcgctggaggccgcgggctgggtgctcgtggccgccgacgccgtgtacctcgtcggctgggtcgccgcggagggcggcggcgtcggcgtcgcggcctacagcctggtcgccgggctcgtgttcctcagcgtcttcggcaaggcgtaccggttcctggcgtgggtggaggccaggcaatcgcagtggaagtccagcctctgccatagcgccgtttga

SEQ ID NO: 2157 - DNA, 261 bp, Zea mays
  Peptide Sequence Number=SeqID_43936
atgtcgcttgccaagcctgctgcttgtcgtcttgagactggagcatgcgcgttccatggtcccgccccgcgaggagcccgagcatcgcagccgctacctcagcgcgctcttgtgtcgcaccaagctcgccagcccaccctagctagagccggagagcagggccacatcagaggcacgtcgcgccgaaagcgcccgtgccaggagtcgacgcggcccgcatgcggagctggcggcactctttgcacagtgaaaccgttgtga

SEQ ID NO: 2158 - DNA, 2196 bp, Zea mays
  Peptide Sequence Number=SeqID_43937
atggaaagcttcaagctctcgttgctccccatccttttccttgcagtcgccgccgcggtgtccggcgatgagctccgtacgttcatcgttcacgtgcagccgcacaagagccacgtgttcggtacgaccgacgaccgaacggcatggtacaagacgttccttccagaggatgagcggctcgtccattcgtaccaccacgtcgcgagcggctttgccgctcggctgacggagcaggagctcgacgcgctgtctgccatgcccgggttcgtcacggcggtgccgaaccaggtgtacaagctgctgactacgcacactccgaagttcctcgggctggagttgccgcagagcgggaggaactacacctccgggttcggcgagggcgtcatcatcggcgtgctcgacagcggcgtgtatcccttccacccctccttcagcggagacggcatgccgccgccgccggccaagtggaagggccgctgcgacttcaacgcctcggcgtgcaacaacaagctcatcggcgcacgttctttcgagtcggacccgtccccgctcgacaaggacgggcacggcacgcacacgtcgagcaccgcggcgggagccgtcgtgccgggcgcccaggtgctcggccagggcgccggcactgcttcgggcatggcgccacgcgcgcacgtcgccatgtacaaggtgtgcggcgaggagtgcaccagtgccgacatcctcgccggcatcgacgcggccgtcggcgatggctgtgacgttatctccatgtcccttggcggccctacgctgccgttctacagagacagcatcgccatcggcacgtttggggccgttgagaagggcgtctttgtcagtttggcggccggcaacgccggcccagaggatagcacgttgtcaaacgacgcgccgtggatgctcaccgtcgcggcgggcaccatggaccgtctgatctctgcccaggtgcgcctcgggaacggctcgacgttcgacggcgaatcggttttccagcccaatatctcgacgaccgtcacctacccgttggtctacgcgggcgccagctcaacgcccgacgccaatttctgcggcaacggctcgctggatggcttcgacgtcaaggacaagatcgtgctctgcgaccgtggcaaccgcgtcgacaggctcgacaaaggtgccgaggtgaagagagccggtgggttcggcatgattctggccaaccagatcgcggacggatacagcaccatcgccgacgcgcacgtgctccctgcctcgcacgtcagctacgtcaccggcgttgccatcaaggagtacatcaactcaacggcgaacccggtggcgcaaatcatcttcaagggcaccgtgctcggcacgtcgccggcaccggctatcacttcgttctcctcgcgcgggcccagcatccagaaccccggcatcctgaagcccgacatcacaggccccggcgtgagcgtgctcgcggcgtggccattccaggtcgggcctccgtcccctggaccgacgttcaatttcgaatccggcacgtccatgtccacgccgcacctcagcggcatcgccgcgctgatcaagagcaagtacccggactggtcgccggcggcgatcaagtccgccatcatgacaaccgctgaccccgacgacagatccgggaaaccaataatgaacgagcagtacgtgccggccaacttgttcgccacaggagctgggcaagtgaaccccgacaaggccctcgatcccggcctggtctacgacattgcgcccgccgagtacatcggcttcctctgcagcctgtacacgagccaggaggtgtccgtgatcgcgcgccgctcgatcgactgctcgaccatcacggtgatcccagaccgcattctcaactacccatccatcacggtcacgctcccgtcgacgacgaaccccacggctccggtcgtggtgagccgcacggtgaagaatgttggggaggcgccggcggtgtactacccccatgtcgacctgccaggttctgtgcaggtgaaggtcactccgagctcgctgcagttcgccgaggcgaaccaggctcagaacttcacggtctccgtgtggcgggggcagagcactgacgtgaagattgtggagggttcactccggtgggtgtctgaaaatgacaagtacaccgtgaggagccctgtctccatctccttcgtctga

SEQ ID NO: 2159 - DNA, 234 bp, Zea mays
  Peptide Sequence Number=SeqID_43938
atgaccgatgaaatcgatacggagattgcgtctgcactacaacaccaaagggatgatgatttgcccagccaagagttattagtactcgccatatcgcgcgcgttctacgactactatatcaaggactgtggcatcatctcggcgtcagaggtgacgcagaggaggactgacagtaatgatcagttcgtcatcctcgccaccgacgaggtagcttttgtgccagtctgcctttaa

SEQ ID NO: 2160 - DNA, 2286 bp, Zea mays
  Peptide Sequence Number=SeqID_43939
atgcaaagcttcaacttctccatgctgacaacacttgtgccattccttcttctcgcggccgttgccgtggtcgccagagatgagctcaccacgttcatcgtccacgtgcagcccctgcaggagaaccggatgctcgctaccgacgacgaccggaatgcgtggtacaggtcgttcctcccggaggacggccggctcgtccacgggtaccaccacgtcgccagcggcttcgcggcccgcctcacgcggcaggaggtcgacgctctgtcgtcgatgcctggcttcgtgacggcggccccggagcagatatacgagctgcacacgacgcacacgcctcagttcctcgggctggacgcccgggaggccaggaagtcctaccccgtcgctgaacgcggcgctggggtcatcatcggcgtgctcgacaccggcgtcgtgccgtcgcacccctccttcagcggcgacggcatgccgccgccgccgcccaggtggaaggggcgctgcgacttcaatggccgcgcggtgtgcaacaacaagctcatcggcgcccgatctttcgtgcccagccctaacgccacgagcaactccacttccaacgactggcgggcgccgccggtcgacgacaacgggcacggcacacacactgccagcacggctgcgggagcgagcgtgccaggcgctcaggtgcttggccaggccatgggtaccgccaccgggatagcgccccgagctcacatcgccgtgtacaaggtctgcaccgagacgggatgccccgactctgccatactcgccggcgtggacgcagccgtgggtgacggctgcgacatcgtctccatgtctatcggtggagtttctaagccgttctaccaagacagcatcgccatcgcgacgttcggcgcgatcgagaagggagtctttgttaccatgtcggctggcaactctggcccgaacgtcagctctgtgacaaacgaggcgccgtggatgctcaccgtcgccgcaagcacaatggaccgttccattcgttcgacggtccgcctggggaacggcttcgtcttccacggcgagtcgctctaccaaccgcatgcctggacccccaccttctaccctttggtctacgctggcgctagcgggaggccgtacgccgagctctgcggcaatggctcgctggacggcttggacgtcaggggcaagatagtgctatgcgaactaggaggcgggccgggacgcaacatcacgagggtactgaaaggcgcggtcgtccaaagtgccggcggcgccggcatggtattgctcaacagatttgcccaaggctacagcacgccagccgacgcacacgtcctgccggcgtcgcacgtcgactacgccgccgcctcagccatcaagtcctacgtcaactccacgtcgaaccccacggcgcagatcctgtttgagggtacaatcctcggcggcacggcgccacctgctccatcgatcgtcttcttctcctctcgtgggccaagcctcgagaaccccggcattctgaagcccgacatcacgggcccaggcgtcaacgtgctcgccgcgtggccgttccaggttggcccgccgtcgtcggcacctctcctccctggaccgaccttcaacgtcatctccggcacgtccatgtcggcgcctcacctcagcggcgtcgcggcgctcatcaagagcaagcaccctcgctggtcacctgccgccatcaagtcggccatcatgaccaccgcggatgccaccgaccgtgccggcaatcccatcctcgacgaacagcgcgtggcggcagactggttcgccactggcgctggccatgtcaaccctgagaaggccgcggaccccggcctggtctacgatatcgcggccagcgactacgtcggctacctctgcagcatgtacaacagccagaacgtgtcggtgatcgcgagaaggccggtggactgctcggccgtcacgctgatcccggagagcatgctgaactacccgtcgatctctgtcgcgttccagcagacgtggaaccggagcgcgcccgcggtcgttgagcgcacggtgaagaacgtcggggaggcaccgtcggtgtactacgcggcggttgacatatttgacgatgatgtgaccgtcgccgtgtacccgcgcgagctggtgttcacccaggtgaaccaggagcgaagcttcaaggtggtcgtgtggccgaggcagaacggcgctccactagtgcaaggcgcgctccggtgggtgtcagacacgtacaccgtcaggagccccctctccatttccttcgcttga

SEQ ID NO: 2161 - DNA, 252 bp, Zea mays
  Peptide Sequence Number=SeqID_43940
atggcagggatcgcggagcagatgggtaggagagcgttgatggcggcagcgcacctcctacccacgccctcaacacgcgagcatcgcgacgggatgagggcggaggatggaaggagcgcggctgcaggatgcggggctgccgcggatgatggaaggagctcggctgcgggatgcggggctgccggcgggatgcgggggagggttcggccgcgggcgtacgcggccgcgggcggatacggcctgcggggcggg

SEQ ID NO: 2162 - DNA, 111 bp, Zea mays
  Peptide Sequence Number=SeqID_43941
atggaggctggagtggcgagcgggttttcgcacgccaaatactatgtaacagtttccatcaaggaggcactcggcaaaggctccgtctttgccgagagccagctgaattag

SEQ ID NO: 2163 - DNA, 1078 bp, Zea mays
  Peptide Sequence Number=SeqID_43942
atgtctaatagagaaagcttggtcaaagacatatcacaaagacgagaaaatcggtacaggcacggacgtcactcctgcctgtccgtgaggctcaagctcaaggccagccagccacacgggaccaggggttttgaacgcccaaggccgcgccggccgcgccctgatcccctcacccgatgcgccatccccgccgcctccccctcctccgctgccacgccgccgccggatccgttcccgcccggccaccctgcgctctcggcggcgacggcttggcttgcggtcgcgcggtcccgaggagctccacggaagcttgatttgtcaggtgggggggtttcgaggcagagacgccgatctgcggctgccggcgccgcggcattgcgccgcttcctaagtccccgagtgtccggagcctccgattcggctggtctgggagctgggctgcgacgggtgctgccttcagctcctcttcggcatcactgtaagcgtttcagggttctcgcttctggctggggctacctgatattggagggaaacatgtcggagaacattgatctggtgctcgagttcctgcggaagaaccggttcgccaaggcagaggcagctctccgtggggagctcaccggacgcgctgattcgaacgacatggccacgcagaggcgcgttgctgagctgaaagaaggcgaggagcagcaggagggcttggtgggttccaatgtagggcccaagggtgctgcggcagcgaggagtgcggactcgtcgagggagttcatcgtgaaggagattgatgttggagccctgccgaatggttcggatgggaagaaggggtccgggattggccagcctcaggataacgtgggggatctgtatccttggaccttcagcattgcaaacagcactgcagaacagctagctgagctgctggtgtcggaggaggtgccaagacataggcgtggtgcggtgctggcagagaagagggatcgaggtgttgggaccgagcaacctggcccggtgctggagcaaaaagtctcttttggaagagggaaaggaaaagttgatgctgctgggaggactgagaaca

SEQ ID NO: 2164 - DNA, 2409 bp, Zea mays
  Peptide Sequence Number=SeqID_43943
atgaactgggaggaaaagatcaatcaccatggatctggggccaagcaatctagtgctgatcatgcttttatgattgggtcttatctcgatgttcccattgggcaagagataacatcttcaggtggaagacgtacaatcggcagtagttggttgtctgtcagtcaaggtattgcagaagatacctccgatctggtatctggttttgcaacacttgctgacgattcacttgaatatccaattggtgaatactgggattctgatgagtatgacgacgacgacgatgttggctacacccggcaaccaattgaggatgaaacctggtttttagcacatgagattgattatcctagcgacaatgagaaggcgactggccacacaagagggaacgatcgtcatgatcgccctacaaaggatgaagatgatgaccagtcatttgttgaggaagattcctacatatctggtgagcaatattttcatggaaagaatattgcacaaataggtacttctgagggcccaatggtccatgggattcctgataatgatatgatagctcagtatgatggccaacttttagattctgaagagcttaatttgatgcattctgaaccagcctggcagggctttgtatcacagaacagtgagctaggtatgctaggcaatgggaaattccttaatgattccgaacgacctcatcctgatgacctttttgtggaggatgatcagcatggctctgttaggtcaattggtgttgggataagcagtgatgctgctgacattggcagtgaggtgcgagaaagtctgattggaggtagcagtgaaggggatattgaatacttcaatgagagcagcttgagcgttagtggaaaaagacatcctcatcaggatactgaaaagaagagagtaggtgctaaaggagtaaaacatgaccaaatcatttacgctgctgatatccagaagggcaatctaccaccaggagcggctgatgtaggattttcttttcctccacctttgcattctgggaaaaatcatgagtctgatgctaaatctttgtggtcaaagaaggatgaaatgtattgcattaatgatcctgatgactgtcaaaatggcatggtatcagatgatatgcttgccacatggaggaaaaagaacagtgagtcttctctaaggagctctagagatgaaatgacgtctgatgttgttagatcaagaaattcaagtgcatcctatgacgaaacagaggacacatcgaatgctcggcaccacaaactagatgacgcacaagaagaagacactggaaccaacttggatgatgaggaagcagcagcgttgcaagagcaagtcaggcagataaaggcgcaggaggaagagtttgaaacgttcaatcttaagattgtgcatagaaaaaacagaactggctttgaagaagacaaaaacttccatgttgttctcaattctgtcattgctgggcgttatcatgtatcagagtatttgggttcagctgcattcagcaaagccatccaagcacatgatttacatacaggaatggatgtatgcgttaaaattataaaaaataacaaagattttttcgatcaaagtcttgatgagatcaagcttctgaagtatgttaacaagcatgatccagctgacaaataccaccttttgcgtctgtatgattacttctactatcgggaacatttgctgatagtctgtgaacttctgaaggcaaatctgtatgagtttcagaaattcaacagagaatcagggggtgaggtttacttcacaatgccaagactccagtcaatagctattcagtgtctggaggcgctgcagtttctgcatggtctcggtctaatccactgtgatttaaagccagaaaacatattggtaaagagctacagcagatgtgaaataaaagtaattgatcttgggagcagctgctttgagacagatcatctatgttcatatgtgcaatcacgatcttaccgtgcacctgaggttatactgggcttgccttatgacaaaaagatagatgtatggtcacttggttgtatattagcagagctttgcaccggaaatgtccttttccaaaatgattctcctgcaacattacttgctcgcgtgatgggcatcattggctccatagaacaagctatgcttgcacagggacgcgacacctacaaatatttcacaaagaaccacatgttgtacgaaagaaatcaggaaagtaacaggcttgagtacttgattccgaaaaagacatccttgcggcaccgattgcccatggctgatcaagggtttatcgagtttgttgcgtaccttctggaggtgaacccaaagaagcgcccaagcgcctcagaagcattgaaacatccatggctttcttttccttacgagccaatatcttcatga

SEQ ID NO: 2165 - DNA, 2436 bp, Zea mays
  Peptide Sequence Number=SeqID_43944
atgcgggacttcatgaccgcatgtgactactgcctctccgactgttccgacggaagccacagccttgacgacgaggactgcggcccaagccgcgaatgtttccacgtcgagctaggggatccctccgaaggcaatcatcttggcatgccggaggacggtgattttcctaggccggtgcctcgcgccgacatctcacgggagctagctgtggtccccgttctggcggggggtcacgacccacagctcgagcaagtccgcggggcgcaggccaggctcgacgagggaacaggggcgcttgagacgatccaccgggacgttgggcaggtatgggcgggccaacccccggccggagaaatacgtcacctgccccaaggtctccagcaccgcgtcgccaacgatgtcaggctcaggccgccgcccgcatccagcggggttggtcagaacctggcagccgcagcgatgctcctccgcacgatgccggagccatcaaccaccgagggtcggcgaatccagggagagctcaagaatctcctggaaggcgctgcggcccgacgggccgagagcaatgcctcccgaaggcagggatacccctcggagcctcacgtcacgacttcccgatttatgcgggaagcctcggtctacaccgggcgcacgcgcaacaccgcgcctgcggccccgggccacctcggcaacgagcaccatcgacgcgaccgtcgggcccacctcgacgaaagggtgggccgaggctaccaccccaggcgtggggggcgctacgacagcggggaggatcggagtccctcgcccgaaccgcccggtccgcaggccttcagtcgggccatccgacgggcgccgttctcgacccggttccgacccccgactactatcacaaagtactcgggggaaacgaggccggaactgtggctcgcggactaccgcctggcctgccaactgggtggaacggacgacgacaacctcatcatccgcaaccttcccctgttcctctccgacactgctcgcgcctggttggagcacctgcctccgaggcagatctccaactgggacgacttggtccaagccttcgccggcaatttccagggcacgtacgtgcgccccggaaattcctgggaccttcggagctgccggcaacagccgggagagtcgctccgggactacatccggcgattctcgaagcagcgcaccgagctgcccaacatcaccgactcggatgtcatcggcgcgttccttgccggcaccacctgccgcgacctggtgagtaagttgggtcgcaagacccccaccagggcgagcgagctgatggacatcgccaccaagtttgcctctggccaggaggcggttgaggctatcttccgaaaggacaagcagccccagggccgcccatcggaagaggctcccgaggcgtctactctgcgcggcgccaagaagaagggcaagaagaagtcgcaatcgaaacgcgacgccgctgacgcggaccttgtcgccgccgccgagtacaagaaccctcggaagccccccggaggtgctaacctcttcgacaagatgctcaaggagccgtgcccctaccatcaggggcccgtcaagcacactctcgaggagtgcgtcatgcttcggcgccacttccacagggccgggccacccgcggagggtggcagggcccacgacgacgacaagaaagaagatcaccaagcaggagagttccccgaggtccgcgactgcttcatgatctacggtgggcatgcggcgaatacctcggctcggcatcgcaagcaagagcgccgggaggtctgctcggtgaaggtggcggcgccagtctacctagactggtccgacaagcccatcaccttcgaccaggctgaccaccccgaccatgtgccgagcccggggaaatacccgctcgtcgtcgaccccatcgtcggcaacgtcaggctcaccaaggcgctgcgcccttccacgggatcatccctgggaagcgcgtccagcccctcggtcgactcgacctccccgtctgcttcggaacgcccccccaacttccgaagggagaccttgacgttcgaggtggtcgggttccgaggaacctaccacgcggtactgggaaggccatgctacgcgaagttcatggccgtccccaactacacctacctgaagctcaagatgccgggccccaacggggtcatcaccgtcggccccacgtacaaacacgcgttcgaatgcgacgtggagtgcgtggagtacgccgaggccctcgccgagtccaaggccctcatcgccgacctggagaacctctccaaagaggtgccagacgtgaagcgtcatgccagcaacttcgagccagcggagacggttaaggccgtccctctcgacccctgtggcgacacctccaagcagatccggattggttccgagctcgaccccaaatag

SEQ ID NO: 2166 - DNA, 828 bp, Zea mays
  Peptide Sequence Number=SeqID_43945
atggcggagaggtccctcccgcccgcggtgccggcgtcgcccgagccagcctcctcctccgcggtctccaccacgttcagctcgccgctcgagcccgtctccgcgccggcggcggcgacacccgtgcacagcacgtacgtggtgcaggtgcagaaggaccagatataccgcgtcccgccccccgagaacgcctacttcgccgagcgctaccggaacgagcgcggcggcgggggcaagaagaagaagcgcgggagcagcgagtggtcggccgcgtgctccccgtgcgtcctgcgcacgctcggcgcgctgctcgcggccgccgcgctggtgggcgccgccgtgctcatctcgctcgtcgtgctgcggccgggcgtcccgggcttctccgtcgagaggatcgccgtgatcaactcgacgcggcagcagcgcgtggactacgacttgttcctcacggccgtgaaccccaacaagatgacagcgctgtggtacaggagcggcagggcgaggctcacgcaccacgggacgaccctcgccaagggcgacgtcgggcagcccgcggacggcggcgaggacgccaccgacttcagcgtgctgctgcaggggcagaagcacaacggacgcacgcccagggcggtggagaaggggttcagcgggtccaaggaccacctcgcgctccagctggccgtggaggtcaccgtgcaggtgcacgtcggcgcgttcgggttcgggcagaggaggctggccgtggactgcgggatcaccgccgccgggcttagcaaggacgtccacattgcgtcgcagaattgcaggagcagcttccggaactga

SEQ ID NO: 2167 - DNA, 246 bp, Zea mays
  Peptide Sequence Number=SeqID_43946
atgttgaataatctccagacgaaagacaggcagtcattcttgaacacgtcaaagtggatcgaggaagtaaacacgcaaagaggtggagacgtgctcatcttcctcgttggaaataaaactgaccttgtcgacaagaggaaagtgtccaccgacgaaggagaagccaaagcacaggagcatggtgctatgttcatggagaccagtgcaaaagctgggttcaacgtcaaggtcccgactctttattaa

SEQ ID NO: 2168 - DNA, 369 bp, Zea mays
  Peptide Sequence Number=SeqID_43947
aaaattccttatgcaaatgcacgcttggcatctctgtttgaaggaaagtatatatatctctcaaagcagaaggtgagcagcaatgtggtgcagagatgcattgagttcttcccagacgatgccaaagctgtcatagtgcatgaattcctcttgctcagagggtctcatttcgaacaactggtgacagatccttacgcaaactatgtcattaacaccgcccttaacaacaccagggtatgcaatatcatctatttaaaccattcgggccatctgctcaatgcccttgttgaagcgatccgccctcatgaggatgccatccgaacccacccctgctgtaagaggatctgcaggttcctgtccaggtggtga

SEQ ID NO: 2169 - DNA, 1557 bp, Zea mays
  Peptide Sequence Number=SeqID_43948
atgaggaccgcgaaggcggcggcggagtggacggaggacagagagctggatttgcttctcggcgagatcccccaggtcacctccccgcaggggcggcagcgcggggtgggcgtcatcggcgacggcaacggcgtgcatggcgcctcggggtgcgacgggtacgcttcaccaatgcgcctggggggccgacgggtacactgccccccggggggcgacggctacgatgcgcagcgccacgccaaggacgcttactacgacatggtcctgaaccgtcgcgaaaatggtgctccactccgcggcggcggcggcggcggggatgcagagggcgtgggcttccccgcgccgtcaccggttccaggaccattcatcggtagcgtggtgccgccgccgcttgcgctgggggtggactacccggagcagcagctggtcgtgaaccagctccaaagcctgcgcatcggggacgcgcaggccgcgctcctgcgccagggcccagcgccagtcatgagcacgaccccgatcgaggtccccgcagcgcacggcgcctaccacgggtacaacttcgcggcgtcaggttcttccatccgccatgaacacgtgttccttgatcaggccaaagctgacgggtacgttgcagcacggccgcatcgcctcgtgtcggacgttggcctggataactttggtgtttttcccagaaccctggacaccagcactggcattggttggggccaaggtttcgtgcagcctgatttcgcccagtcctacctgctttccagtcaggctggtaatgcatatggtggtgtccctgtggcagacaacgggtttgtgagaggcagaaatcagtttgaggcattccatcctgacagcagtcccactgaggcgggtgcggagtttttcagctcgaatcccgctgcccttgatttccgaggtggaccaaagcgacactatgcatatggtgctattcctgtagcagaggcgtaccattgcgagaacagtctaatgtttggtgggaagaacatgaacttcctggaacgtgagaggaagaggagtttccggcgtgttaataacagagcaccggagcttgggaatttgaggactttgaggtttgacgatgtggttcgtgtcaaggaaggatccatctactaccacatggccaaggataaaaatgggtgccggtatttgcaggacaagtttttggaagggaagcatcatgtggatgcgatctttgaaggaatcattaaccacattgcagaccttatgatcagcagtgctggcaactatcttgtacaggagatggtggaagtgtgtgatgaagggcaaagactgaggatcatcttagcgctgacgcaggaccctgtgaagatgattgccatctctctaaacacacatgggacaagggtagtacagagattaatagagaaagttacgagcagagagctgattatactcattatttcagccctacagccaggtttcatgctacttgtcaatgaccccaatggtactcatgtaatacagaaatgtctggcaaactttggagctgaggataacaaggagtag

SEQ ID NO: 2170 - DNA, 1651 bp, Zea mays
  Peptide Sequence Number=SeqID_43949
atggctgacgcctcggctccctgccccggcgcctcggctccctgccctggcgcggcgccctccacctcggaattccaacccgcctgttcagcttccatcccatctcccctccccaccagcccctcgccggccatctctccggtaccggcgactaccaccctgtttcccacctcctcggcgtctgcgtcctggtcgtcccggcggctgagcccccaggaagggcggtccaaggcccagcgctggcgcggcgacgcttcagctggaggttcctctccatcttctcgttcctttaaagctgcactcctctccagctcggtttgcgccgctggtctctcccccttggctagccatgtctcgccctccccctccccttctgcgctagctgctcctgttttccccgccaaggtgtcgtctgaggtgacccttccggctgttgaaggtggctggcaggtggttgatcgtagacagaggaatcgtggtgtgcacctccctcgtcgagggtcccgtgtggatctccgaggtcggtgttacaactgcctctctacttctcaccgggctgctacctgccggcgtccaacaaggtgttttcggtgtctctgctttggacatcgggtggcagactgctcatctctgccggccgactctcagaagcagccagtgtggcagcgcctgggcatcgtcaagcggtgtctttcgggcagtcaggattcctcccagcgggccttggtgaggccgaggactccggtgcggcctccggtgtggcagaggttatctggcatggacaaggttcattctctggggggcgcgcgcaagacctcggtctggagacgtcttgcttcgtcgcatgatcgtgccgcgatggagcctgtcatggatcttgagaagcagccgtccttacagcccaagcggaaaagaagacgttcaagacgcgggaaaggggctgcggtggtggggaacagtcagtctccccctgctgacttggttcctctcacgtcgaacttgccctcttgtgttttggaactttcaacggacatggcaagagaagaagctgcgctccgtcgagcattatttgtcactgttactggtaccagacccgctgttctcggctcggaggtgttggaggaagtgggccgtcgttactgcatcaatattgacgatatgtctattcaccagtccaagccagaagacttcctgctgtttttgccggatgaggaagtggcgactagagtgcttaatgaaggaaagccattcagaggccctttgttctcgctcgtgttcaagcaatggacaagatttgcacatgcctcagctacgtctttctctcacttgatggatattgagatcagggggatcccagcgcacgcgtggggcctgaacacagccaagacacttcttcgtggctcctgtcacatcttggagttgcaccccgcctctgcgtgcaagacagatctctcctcactcaagcttcgggcatggtgtctggatccgaagaagctttgcagggagatggatctccacatcattgagcgagagccatttattcaggaggcgagatgtctgacctacaagattagcattgctgctagtccggctccccttcagttaccctcggacagcagtctctctccttcagatgagaatgcgtttcatg

SEQ ID NO: 2171 - DNA, 264 bp, Zea mays
  Peptide Sequence Number=SeqID_43950
atgctggcgtcctccttcgaggtggagatccttccgcccgtgtcgccgtctgaggctgggccaggttccgccaagggtggaaacgtcgccgagggggaggtccacgacggcgttgcgcgcaaccgaactccggtgagcacctgtaccggccgattggggcaacgactaggtgaccgtgagcataacggctataccgtcgtgttcccggcgaccagaggacttctagtgcaattgcgtgggtcggtgaacatcacagagttatga

SEQ ID NO: 2172 - DNA, 171 bp, Zea mays
  Peptide Sequence Number=SeqID_43951
atggctagcagtctagcaccagctgatcgtagccagtgccagtcacggcaagatactagtatgggaaaatgcacaaaaaatgaggtcatgttcatgttaggcatagcccgctgtatctcatttagggcttgtttgggtaatcttggattgcagtggattgaggtggtataa

SEQ ID NO: 2173 - DNA, 141 bp, Zea mays
  Peptide Sequence Number=SeqID_43952
atgacgtcgaggggcctaacaaagatagccatgctaaaatcgaggcaccatcatgccagttctgatgtccaatgtggagatgctgcagcagtccgaacaactacaacagttacagctccatctgaggcagcagaggtctag

SEQ ID NO: 2174 - DNA, 243 bp, Zea mays
  Peptide Sequence Number=SeqID_43953
atggagcgcgaacgcggatcgagggcggtggcggcgatccggggcagaggggtacccaatccacgtgtggcctcgccttccatggagactatggacgccacaatgcggacacggatcgagggcgggggcgacgatccggggcagaggggtacctgtcgcggacgcagattgagggccgacgcggcgaagggggaggaaggtgccgacggtgtggggcttgaggtggtccaagacgacagctag

SEQ ID NO: 2175 - DNA, 1767 bp, Zea mays
  Peptide Sequence Number=SeqID_43954
atgcgtcccctcctggcccttgccgccgcgtgcgccctcctcgtggccgccggcgccgcggcggcggagcaggcgaagaactccaccaacaagttccggcagcgcgaggccagcgacgacatgctcgcctacccccacttagatgaagatgctttattgaaaaccaaatgtccgaagcatgtggagctgagatggcagactgaagttagttccagcatttatgcaactcctttgatcgctgatatcaacagtgatggaaaattggaagtagtggtgccatcatttgttcattacttagaagttcttgaaggcactgatggagacaaactgccaggatggcctgcatttcatcagtcaaatgttcattcaagtcctcttctgtatgacattgacaaggatggtgtacgggaaatagctttggctacttacaacggtgttgtaaatttctttagggtgtcaggttatatgatgatggacaagcttgaggtacctcgtagaaaagtacgtaaagattggtatgttgggctaaatccagatccagttgaccgctcccatccagatgttaatgacagttcaattgccaaagtggctacttctaatgaaactcccctaatagatcagaataaatcaggaagtatgaagggaggtgaggccctgaaaaattcatccgagcaacactcagctgaaacaaaacttaattctacgcaagtgcaagagaatgtacagttgccaaacaatgtaaacgacactcattctgagagcatctctagtgtcactactaaagcagagaatacatcgcaaacacatactcagagacgcttgcttgaaacagccgacaagagtgatgatcaaacaggaagctcagaaactcatgaaagtgattcgggggcaaaagcagcagccactgttgaaaatagtgaacccctagacgaagatgcagatgcatcatttgacttgtttcgggacccagaagatcttcctgatgagtacaattatgattatgatgactatgttgatgatcgcttgtggggagatgaggattggaaagagcaagaacatgagaaagaggaagattatgtgagcatagatgcccacatcttgtccaccccagtaattgcagatattgacaaagatggtgtacaagaaatggtgattgctgtatcatacttctttgatcatgaatattatcgtgattcagatcatgcgaaagaactagaaggaattgacatgggaaaatatgtcgcgagcagtatagttgtttttaaccttgacacccggcaagttaaatgggctgcagatcttgatttgagcacggatgctgtaaatttccgtgctcatgtgttttcctctccaactgtggttgatttggatggtgatggatatttggacatccttattgggactgcttatggcttgttttatgttattgatcatcgtggtaaggttaggaacaaattcccccttgagatggctgagattcacgcaccagtcattgctgcggacatcaatgatgatggcaaaatcgagatggttaccactgattcccatggaaatgtagcagcatggactgcagagggagaagaaatctgggaagtgcatctaaagagtctgattccacaggcaagtttcatgtattttttttgtaagatgttgattgatggttgcttagttagctcattatctatctgtatggcaaggcgctacattccgtgtgattatctatgcactgcaattgatgcatgtgctgaagttgcattcttagtttag

SEQ ID NO: 2176 - DNA, 1437 bp, Zea mays
  Peptide Sequence Number=SeqID_43955
atggccgccggcgacgccgtccacgtcgggcgacgccggcacgtgctcttgttcccgctcccgtaccagggccacatcaaccccatgttccggctcgccggcctcctccacgcccgcggattcgccgtcaccgtgttccacacccagttaaacgccccggacccggcgcgccacccggagtaccgcttcgtccccgtccccaacggcagccccgtgccggtcgccatcgaggacgtcgtcgctcatatcctggagctgggccgcgcgtgcgaggccgccttccgcgaccgcctggcctctgtcctggaggagtactccagggacaccgtcgcgtgcctcgtcgccgacgcccacctgctgccgattttcgaggcggccgcgaggctctccgtgcccacgctggcgctgcgcaccggcagcgccgcctgctgtgcgtgcttcctcgcgtacccgatgctcttccagaaaggctacctccccgtgcaaggcaaggcagcatgcatgcgcgtgtgctctctgctcctgtgcccagtgtccacataccaccacacacagtcgcagcgtgacatgccggtgctggagctgccgccgtaccgggtgcgcgacctgctagtcatcggcgaggacggcggcggcctggcgcgcgagcttatcacccgtgccacggctgcggtgaagacctcctcgggcctcatactcaacacgttcgacgcgctggagcgccgcgagctggagggcctccggcgcgacctcgccgtgcctgtgttcgacatcggcccgctccacaagttctcccccgccggcgacagcagcctgctgctcccggaccggagctgtctggagtggctggacgcgtggccgcccgagtcggtgctctacgtgagcttcggcagcgtggcctgcatgagcgcgcgggacctggtggagacggcgtggggcatcgccggcagcggcgtgccgttcctctgggtggtccggccgggcatggtctccgggcccgcggaccaccgccagcagcagctccccgaggggttcggggctgcgacgcacgggcgcgggatggtggtgacgtgggcgccgcaagaggacgtgcttggccaccgcgccgtgggcgggttctggacgcacgctgggtggaactcgacggtggagagcatctgcgacggggtgccgatgctgtgcagcccctacttcggcgaccagatggggaacacgaggtacgtggagcatgcgtggagggtgggcatcgaggtgggcggcaacatcgagagaggcagcgtcgaggcggccatcttccggctcatgactcacgaggacggcgcacagatgaggacgagagccggcgagctgaagaaggcggcagcggagtgcaccgccgagggcgggtcgtcgtgtcttgccgttgacaagctcttcacgcacatgatgtcactctaa

SEQ ID NO: 2177 - DNA, 441 bp, Zea mays
  Peptide Sequence Number=SeqID_43956
atggctcgagcaccaggcggcgcccgccgtcgggaaggaggcagcgataggagggacgagggcgaggcggtgcagaaggggcactggaatacagaggacggcgctgtgctgctagagcacaacgggaagagtaagatggtggacctctgtgtccccaagaactgctcggccacaaataggatcatcactaccaaggaccattgctctgtccagatcaacattggccacttggatgtcaataggatatatgatggtcacttcaccattgtccaacataagtgcttaagtgttaaactataccaaatggtgggcaaagtgcaaatcaagtgtaaagccaagactctgcgcagtctgggtgcaccggactgtccggttgcaccgaacagtgtccggtgcgccaggctggcgtatgccaactggctgctctcgggaagcaattaa

SEQ ID NO: 2178 - DNA, 1362 bp, Zea mays
  Peptide Sequence Number=SeqID_43957
atggagggagacgatcggagggccccgctgctggcggccggcggcggccgtcccccgtctctgcggcgccgtgactcggcgcggtcgctgcgcagcagcttcctgtcgcggctgcccgacaaggtgcgcgccgggctcgacccggagcacctcgccgacgtcgacctctcccgcgccaaaggcatgtccagaggtgtgagacagtactacgagaagcagctcgcgaccctgaagaccttcgagcaggtggaggcgcgctgcatgcccggcgaattcgattcggatgtcgaggcctccgactcggaggacgcggagcagaagcagagcgagttcgccatgaagatctccaactacgccaatattgtgctgctggtcttcaaggtgtatgcgacgatcaggacggggtccatggcgattgcggcgtccacgctcgactcgttgctggatttcatggccgggggtatcctctggttcacgcacctttccatgaagagggtcaacatctacaagtacccaattgggaagctgcgcgtccagcccgtcgggatcatcgtcttcgccgccatcatggcaactctaggtgtgccctctgtcaagaaacgcgtaacctttgctgtctgtcagacagatgcaaagcggaaagtgtctgtacagatgagatgcaatgtggaattgtctatagaaatgaataacatgagttccttcgcctacgttttaggtttccaggtcttggtccaggccgtcgaacagctggtggagaacaaacctggcgagaagatgacatcggagcagctgatatggttgtactccatcatgctttcggcaaccgccgtgaaactggctctctggctctactgcaagagttcagggaacagtattgttcgggcttatgcgaaggaccactacttcgatgtgataaccaatgtcgtcggtctggtggctgctgttcttggggacaaattcctgtggtggattgaccccgcgggggctgtcatacttgctgtatataccatcgtcaactggtccaaaactgtattagaaaatgcagctaccctagtgggccaatgtgctcctccagatatgctgcagttgctaacgtacctcgccatgaagcacgacacacgagtgaggcgggttgacactgttagagcttacagctttggagctctctactttgtagaggttgacatcgaactagcggaagatatgcggctgagagaggcgcacgccatcggtgaatcgctgcaggagagaatcgagaagttgcctcaagtcgagcgggcgtttgttcatatcgatttcgagagcacgcataagcctgagcacaaagtcaggagcagactgccgtctactgatccctga

SEQ ID NO: 2179 - DNA, 321 bp, Zea mays
  Peptide Sequence Number=SeqID_43958
atgaggctggagctaactgtcgtcgtcttgcgttcatcaaagaagctaaggttgactttcttggtctcttcaactggtcacatagtagtggctggggttgcttctgtcgccgatgttaaggggtcgtcccctgacgaagcgttggtgttcgccaccagttgttggggtaccgtagaggggtcaacggtgagggtcgtctatatggccccccaattgcactctctgccccttggaagtcggtccggacggtgtggacgccattggtctaggcttcttgatcaccgtgtacgggtagtgagggatggccatgaatttggctag

SEQ ID NO: 2180 - DNA, 360 bp, Zea mays
  Peptide Sequence Number=SeqID_43959
atggaagcaagcgagatacttcaccacaaaccgagagctggagaacccctgttccggctcgacgctgcgactgccctgcgttcttccgcgccgccaccttgggtgctcggtcgccggaaccgtgtggtcgaacaagccgccgtggaggagagagatgcaagaagagagaaaatagagcagggcttcggctacgcgattgctcgattgctggtaagggcacctctagtgaactcatatcttcttccactttgcgtaacacctttcggatttagggatgaatgcctgttgggcgggttggctgttcaccggcgtgtttgccgccggtcaggccaggactccgccgtgcccaccgttaggtag

SEQ ID NO: 2181 - DNA, 498 bp, Zea mays
  Peptide Sequence Number=SeqID_43960
atgttgtctagaggtgtcttgggtggcctgttgattccaagacaaaccctaggatctctcctccctgacggggtccctcccgcgggcaagatccaggtgacgtttggtgaacgcttccaccctacgcacgcgcggaccgtccagccaccaggtgtggaccattcggctcgcgcgcagggaaccctgctcctgctatccaggttgtggaccttccgcgccaccgcagagagcccaacgagtgaaaaattcccaatatttggtgtccggattggcgccaacacactttttggcaattatgttttggaaactgagattggatttaccagatcgacccatatggccggtctaaaggataacttcaatgtctcccctagcaacatcatcaagtcaactatggataacctgtcggttgaagaatatcagaggctggaagacgccgggacaaagatgcaggcagaactcgatgagctgttcttggttgatttcaaggttgactga

SEQ ID NO: 2182 - DNA, 738 bp, Zea mays
  Peptide Sequence Number=SeqID_43961
atgtcagcgtcgccggagaacgtcgtcgcaggcggcagtggcccgccggtcgcgtggtggagcgcggcctcgccggtgggcggcgacgtcgtcctctgcagcgtagccctcctcttcgtcgccctggccttggcgttcgtcctgtaccactactccacggccacggtcagtcgccgcggcggcggcgcgggggtgggggcggcgccaacgagcgcccagcagcaccagcagcacggcacgctgggacgaggacgcgacgccaccggcggccttgacccgtcggtgctccgggcgctgccggtgacggtttacgaggcgaaggacgaccaccgggcaggcgaggcgctggagtgcgccgtgtgcctcgccgagctcgccgacggcgagcccgccaggttcctgcccaggtgcgcgcacggcttccacgccgagtgcatcgaccagtggctgcgcggccactccacgtgcccgctctgccgcgtcgacgtcggcctgctccctgcgccggcgccggcgccgccgtcctcggccctccctccggcgctcccggcgcccgccacctaccccacggacctgccgacgaacgtcctgttctggggatcccagggcgcggtcaccgtggcgagggcggcgctattaatcatggtgctcaccgagtacgagcaacacaatctcgagcgtctccgcgccgcagaggctgcccgcaccattcgtgcagctggcgatgccgacgagtag

SEQ ID NO: 2183 - DNA, 339 bp, Zea mays
  Peptide Sequence Number=SeqID_43962
atgacctacactgattcatgtggagcaacattaggtgatgatggtcaagagaatgcaggacacaacaacaagagtagagcacggcacggcattgctacaggcgaacctgatggcctcggtgcagctcgacgtgtcgctgatgttacggaagtgggtggtgtcgtggccgcggcacgacgcgtgagtagggaaagcgcggtcggcggcggaggtggtaggtcgacgagcggacgatgtgggctatattgtggtgtggccatgtcgcagagcgagcgcacagcgaggtcgtgcgggcaggggggcacgaagcgcccatggagcggcataggcggcgtttga

SEQ ID NO: 2184 - DNA, 318 bp, Zea mays
  Peptide Sequence Number=SeqID_43963
atgggattgtatatttgtttgtttttttggtgcatggaagcaaaccttgtgcaaggttataaaaatacaagtttggccctgttttataccttcaaaattaactgtcatggcctcgcagccttgcgtacatgcccccaaaccattctatctagctcattcttggactttcctgcggctgaggacgaagacggcgaagctgaggatgacgagcttgacgcagacgcagaagacaaggagaacatcgaaagcaaggcaggatcttccctgccaaataagaggaaaaggaataacgaggatgatgccaatggatacaagtaa

SEQ ID NO: 2185 - DNA, 840 bp, Zea mays
  Peptide Sequence Number=SeqID_43964
gaagctccgcctcgcccgaccccagggctcggactcaacctcgacctcggaagacggactccgcctcgcccgaccccagggctcggactctaccttgacctccggaagacggactccgcctcgcccgatcccagggctcggactcaacctcgacctcggaagacggactccgcctcgcccgacccccagggctcggactcgacctcgacctcggacgacggtctccgcctcgcccgacccctggggctcagactctacctcgacctcggacgacggactccgcctcgcccgacccccagggctcgtactctacctcgacctcggacgacggtctccgcctcgcccgaccccagggctcggactctacctcgacctcggaagacggactccgcctcgcctgaccccagggctcggactcaacctcgacctcgaaagacagactccgcctcgcccgacccccagggctcggactctacctcgacctcggacgacggtctccgcctcgcccgacccccggggctcggactctacctcgacctcggacgacggactccgcctcgcccgacccccagggctcgtactctacctcgacctcggacgacggtctccgcctcgcccgacccccagggctcggactctacctcgacctcggacgacggtctccgcctcgcccgacccccagagctcggactctacctcgacctcggacgacagtctctgcctcgcccgacccccgggcccggacttagcttcgacctcgaaggagcctccgcctcacccgacctcgggctcggaccgaccacgtcacatgggggccatcattaccctacccctagctag

SEQ ID NO: 2186 - DNA, 162 bp, Zea mays
  Peptide Sequence Number=SeqID_43965
atgttgattgtgaggggttcgcgcctacctcgccggagcggcaaagggttcgagacggctcttgacgagtccgtcaagaactgcaaggcgcttgccgaggcggttgagcagaaggaggccgaccgtgtggccatgtccgaggctatctcggccttttgctag

SEQ ID NO: 2187 - DNA, 546 bp, Zea mays
  Peptide Sequence Number=SeqID_43966
atggtgatgtccaaactacatctcctcaattcagcttatgtgatccttctggcaaaaaagatagaggctcttgaagtaaaatatttttgtccgatcagcctgatccatagttttgcaaaacttgttaccaaaatattggctaataggcttgctgccaggcttcctgagttagtgtcgccaaatcagaacgcctttgtgaaagggagaagtattcatgacaatttcctactggtgcagcaaatagccaaagccatctacaagcaaaagctatccggaatcctcctcaaacttgatattggcaaggccttcaattctgtttcgtggccttttctacttgaagttctcgggcacctaggttttggccctatctggtgtaacatcatctcaaagctcttgtgttcttcatctactagggtgttgatgaatggaatgcccggagagcttatttcccaccagcgtggtttgagacagggggatgctctttcaccaatgctgttcatacatagtcatggatgtgttgcactctctgttcttgaaagccaatga

SEQ ID NO: 2188 - DNA, 207 bp, Zea mays
  Peptide Sequence Number=SeqID_43967
atggagggggtgcagctacgattcaagcagagggccgctgaaacacaacatggcggcaggagaggagggtggcggcaatggagaaggggcgatgacactagagaagggggtggggcgctagagaatggtgcacgtgcgactgtgcgctacgtaatgcgtgtaccgtattggtacagtcgctctagtcgagtcaaagaccctaattga

SEQ ID NO: 2189 - DNA, 540 bp, Zea mays
  Peptide Sequence Number=SeqID_43968
atgtcattgactcatgtggacccacatgtcaggataaatgacttagcccaccattttaaacattgtgtggcgctcgtgaaggagatgtggtcgtccgacgaggctgtccgcgttcggagccgcttcctctgcctcatccatgtcgtacagaggattgtgttacggcgaattgagctctgtggcgaagttgagctgctgagcatcctgcagtacgtcaaaaggtgcctcacctttgcaggcctagcaccggccctcggcggttgcttcgtcgaggtaggcgccgggacggcgacctcggaagcgagctgtagcgacgtcttcagagagggtctaggcgcttcttctgtacgattaatgcgcgtcgcaagacgccagggaaggcaccgcagattcagctgcctaaccgtcctcagttttctcttttttctcggtacaggacagatcggcacaagacgtgtttggttgtgggatttattcgggagtggacatggagaaaggcacgaacgatcagcagcagttgccgctaatagcagcgattga

SEQ ID NO: 2190 - DNA, 186 bp, Zea mays
  Peptide Sequence Number=SeqID_43969
atggcgacgcgggtggcgctgcctgggacgtcacagcagcctctcgcctcggggaagaggctcgcggaggtataccgcgccggattatttgtgccgtggtttatcacgtacatagtattatggagtaaagtagatatagcagatgttgtttcccagcagcagcaaatttacccggctgaaagctag

SEQ ID NO: 2191 - DNA, 897 bp, Zea mays
  Peptide Sequence Number=SeqID_43970
atggccgtcgaagcgcatcgcctcctcttggcaggaggacacaggcagcagcaacagcagcagcagctcgccagcgcggggtggccttgggccggcgccgacgaagataggtgcgcgacgacggcgagaccgagccaacatcatcaccatcaacaacaacagccgcagcaggagttgaggctccacaacgcctcgtgcgtgggcgtcctggctccacgggtctcgacgatcgctgccggcggacagatgttcctgggcgacgcggcggagagcgacgtcacgttcggaggaggaggagctgcggcgcggcaggaggtgacggcagtggcgccggcgcccaagaggcggaagcgcgccgagcagcagcagacgccgccggtgttccagaccgccaacatgtgggcggcgctcacggagctgcggcggcggcaggcccgccaggtcgtggccgccgtggaggcagcggcggcgacgcggctgcgcgccagggaggaggaggtccagcggacggcgcgcatcaacggcacgctcgaggagcgggccaggagcctctacgtggaggcgcagctgtggcgtgacctggcgcgggccaacgaggccacggccaacgagctccgcgccgagctgcagcaggcgctcgacgaccagcggacgcgcggcgcacctggcgccggcgccgacgccgacgacgccgggtcgtgctgccgcgggggggaggacggcgggacgggtacgtcgttggcgaggacgtgcgcggtgtgcggcctgagcgcggccgacgtgctgctgctcccgtgccggcacctgtgcgcgtgcgcgccgtgcgccggtgcggccagggcgtgccccgcgtgcgggtgcgccaagaacggcagcgtctgcgtcaacttttcgtga

SEQ ID NO: 2192 - DNA, 477 bp, Zea mays
  Peptide Sequence Number=SeqID_43971
atggcggcagagaacatggacatgcgtgtctatgtttatgtagtaggaccacgcaaagcggaggatgagagggcaaggagttggaatgttgataatgaaaaggaagttggaatgttgataatgaaagggaagttggaatgtgatagccgtttatacggcctgctggagatggagatggcctcagaggagtcaggcctgggcgtcctcgcaaatgccaaaaagcctactgttccattccatcccatcccatcccacacggacacggccccgtgtcgcgcggagtgccgctgccgccgaaagaaggtgccggacgggcgggtgcagtcggtgcgccaggatctggatgccgccactgctgcttgccgttggcgtcagggtcaggctctccagtcatatggatggaccacaaacgcgtctctctttccctggatctatgcggcggcccttccatcccacccaccatcagcgtctctctaa

SEQ ID NO: 2193 - DNA, 957 bp, Zea mays
  Peptide Sequence Number=SeqID_43972
atggaggactcgagcttattcatgcagtgggcgatggacacgctgcagcacgagaacaaccctgcgcctgccagcgccgccgccgtccacggcggcttcagcgaggctactttcccctcgctcaaagcgctccgcgaggcctcgcatgcagccgaaatggtccaggagttgatcgcggacgccgacgtcgtccgccatgcgccaaacagctggaactccggcgacaacaccaccgcgaactacaacgtgcccgcgggctggggcttcggcggtgccactgcagcctccgcgctgccaggcagccacggcatgatggaggccccgcctgccatggccacacgcggtcggccgccgccgggtctggtgtacaggcttccgccgacgaggagagccggcctaaagagcttgggctccatggcggcggcgtacgcgaaggaccacatcatcgcagagcggaaacggcgagagaagatcaaccagcgcttcatcgagctctccactgttatcccaggcctcaagaagatggacaaggcgaccatccttctggacgcgacaaggtacctgaaggagctccaagagaagctgaaggatctggagcagcggaaggaggccggcggcgggagcatcgagaccctggtgctcgtcaagaagccatgcctccatgccgcggctgcgcgggatgacgacggtggctcctcgctgccggcgtcgccgccggcaggcacaccaacagaggggaaacggctgccggagatcgaggtccagttctcggagttggagaagaccgtggcggtgagggtgcactgcgagaacaggaagggggtggtcgtccacgtgctcgccgagcttgaagatctccacctcagtaacatccacgccaatgttatgccgttcacggcttgcactcggatcataaccatcacggcaaaggctagttttccttgcccggccttttaa

SEQ ID NO: 2194 - DNA, 426 bp, Zea mays
  Peptide Sequence Number=SeqID_43973
atgacattgcaaatctggcaaccacgctttttctatgttactgcaggacagaagacaatcaggtcttactggagaaactactttgagcagactgatggattagtttgggttgttgatagttcagacataaggaggcttgatgattgccgtgctgaactccacaatctcttgaaagaagagagactagttggagcttcattgttggtttttgcaaataagcaagacatacagggagctctaaaaccagatgaaattgcgaaggccgactcaccttccatcttttttcaggttctgaatctggaagtgatggacagaagcaggcactggaagattgtgggctgcagcgcttacacgggagaggggcttctcgagggcttcgactggctggtccaggacgtcgcttctcggatctacgtcctagactga

SEQ ID NO: 2195 - DNA, 1707 bp, Zea mays
  Peptide Sequence Number=SeqID_43974
atggcggcgagcagggagatgggcctcgacagtagtggtggcatggggagggaagaccacatggcacatgtcgtgtgtggacacgtaggggccgtggagccagcggcggcgcgaccaggcagagcgcgtgtcagagtgtctgcacctgcaggagatggagaggaggagcacgagagaggagcagaaactcgtgggcagatccgagcagggagaacagtagcggcggcggcgcgcacgatgagggcgagaatggaggcggcactaggtgcagagtcgcggggaagaagaacgatggttgaaggcggagtttgttgcggcgtcgcggaaagcaagacaccgaggtacatggcttacatcatggacacaaatgaggaagaaagggttaagggaaagactgttgaagttggtagagcccactttgagacagaacacacaagattcactatcttggatgcaccgggtcacaaaagttatgttccaaatatgatcagtggtgcatctcaagctgacattggtgttctggtcatatctgctcggaaaggggaattcgaaacaggttatgaaagaggaggacagacccgtgaacatgtactacttgcaaaaactttgggtgttgctaagctggtagttgtaataaataagatggatgaacctactgttaaatggtctaaggaaaggtatgatgagattgaagcaaaaatggttccattccttaaatcttcagggtacaatgttaagaaaggatgcccatggctcgccaggttcaatttttttcaaccagagccaacgcaatctaagagcccaactcatcttttgcaggaaacttctgatgattttgtcaattgctttgatagcccaagaaggaagttctcctgcgcgttcgagaaaaaaaatgaacggttggaggtgctgtttaccaagctttttcaagatgtacaattcttgccaatttctggtcttgtgggaaccaatatgaagaccaggatggataaaagcatttgtagttggtgggatggaccttgtctttttgaagttctggaccgtattgaaattcctttacgcgaccccaaaggtccagtaaggatgccgattattgataaatataaggatatgggcactgttgtaatgggcaaaatagaggctggcactatcagagagggtgacagtttattgattatgccaaacaagtctcatgtgaaagtcattggtttgaacttggacgagagcaaagtacgtcgtgctggacctgctgagaatgttcgtgtcaaattgtccggagttgaggaggaggatgtaatgtctggttttgtactttcaagtgtcgctaatcctgttggtgccgttaatgaattcatcgctcagttacagattttagagttgcttgacaatgctattttcacggctggctacaaagctgtgttgcatatccactctgttgtcgaagagtgtgagattgttgaactcatagaggaaattgacatgaagaaaaagaaaggagatccgaagaagaaaaaaccaaagaggaagcctctttttgtgaagaatggtgcaattgttgtttgccgcattcaggtgaataacttgatatgcatagagaagttctctgatttcccacagcttggaaggtttacacttagaactgaagggaagacggtagccgtaggcaaggttgttgatgttccgcctgctggcagcccaacattctga

SEQ ID NO: 2196 - DNA, 426 bp, Zea mays
  Peptide Sequence Number=SeqID_43975
atgtgcaagccaatgcccccgcgtcaaagtgcctatcccagtggtgcatcgcagtgcgaggaccgatgggaagctcatggggataaccataccaggaatgaagatgttggtaccgcgggtcacaacgagctgcggttcttccgtcgaggattgattccggcgagcgattcgcaccgacacagcgccaatccccgacccggaatgcagcggacaccttccaccaccagcaacgcttcacctattcgtgtttctggtggtcgaacgacggtggtgacaccctgcgcgcggtacggcagcgaggaacgacgacgagcaattacgacgatgttgagctccctcgcgcagttccgcaaccttgaacacggacccagacatggggcggtcaccctagatcacaaggcgcgattcgttcgaccatgggggtga

SEQ ID NO: 2197 - DNA, 1239 bp, Zea mays
  Peptide Sequence Number=SeqID_43976
atggttatcccgtttgaaaccatgttttcgggcttcgaattttccatacccttctcgggcttgttttccttcccattctcaggcgaggtcgagcaacagaggacgctggcaacaattaacttgccctccggagcggagggcgaggaggccaagaagaggaaggagagcatggagctgttcccacggagcgccggcgtcaaggatgatgctgcccctagagagcaagaagataaagagaagcctaagcagctcacaatcttctatggcgggaaggcgctggtatttgacgatttctccacagacaaggcaaaggatctgatgcagctggccagcaagggtagcccagtagtacagaacgctgttttgcctcaaccctctgcaactgctgctgtcactactgacaaggccgtgctggacccagtcatcagcttggctgctgctaagaagcctactcacacagatacttctgcctcggtgcaaagaccatatcaaactgctccttcagatgtagcaccagtcaaggagaccgagagccagccatggctcggattaggaccgaatgctgtgaagtccaacctgaatctgagctgtgattctgaaatatttgcaaacagttttctccttcatcatcttcagatagttgtgcccatctgcgcgccgaccccaggccgcgccatctccctgcgcaccatcacccggccgccgcctcctctggccatggctccttcagatctgccaccgccacatgccgtcgacgacaccgctgcgctgaccacagctgaccacgaagctcgcctccaggcctccgcccggcgcgatgccgcccttgcccaggctctccaggcggagcaggaggcggccagcgctgcccaggagcgcaacgtggctgccgaacgcgttcgcgccactctcgcacgcgcggcccatgctcgcgccctcgctgctcaggttgccactaatgacatccccaatgacgacgctcagtcccacatctctgagacagcgggtgatgctaacaagggtcttcacgatgtcatcctcctccacgaggccgctgccatcgtcaacgttcactcccaggtcgttgttgtccagaacatgcggagtctcgtccacgtcgtgctcgacctcgccaccaactactcttgttggcgcgatgagattctcctcgtcgtcggcaagtactccctggacagccacatcctcgacgatgctcccgcgcctaccttccccgactag

SEQ ID NO: 2198 - DNA, 333 bp, Zea mays
  Peptide Sequence Number=SeqID_43977
atgggggcgatgaacgatgggatcaatgaaggagtggtgggaagcagccccggactgttgctctccacggcggtcaggagcctactggccagttgtggcggcggccagttgaacggctgcagaaaagggtcgggcaccgaactcgcaggcaagacatgcggcgtagagaagacctctgggatgactggaaccgacgctggaagggctcgaatgcccccgcaccatggtaggccatactatagcaggggtggcgcagagggcaacgatcgtctcacaacggctgccaagggcagggagggcaccgcagcgggcgcgatggggatgcccccatag

SEQ ID NO: 2199 - DNA, 363 bp, Zea mays
  Peptide Sequence Number=SeqID_43978
atgaaggagtcctacgacacgggagcagtgggcgacatgctggtggcggctgccccggaggtcgccgagatgaagaaaggataccagaccagtggcaccacctaccacttaggagaaagtgttagagtggacacgctaaccagttcaacccaaaagcttaagccgttaggagaaggcctcgagccaccggcgtccagtgctccattcaccggcgactgctcctgctccaagtgctccggcgtctgccaccggcggctgctcctgctccaatcccccttccctctattaccactggtagcacctgcagacctgctccccaacaggttttacacttttactgaattactgctagtctactactaa

SEQ ID NO: 2200 - DNA, 168 bp, Zea mays
  Peptide Sequence Number=SeqID_43979
atggcggagaaggctgatgctgctgactgctcacgtctaaaatgggggagaaggctggatgtatctgaagggattgggcgtcctttggcctcccccagacagcatttaagcctaaaatggcttttggactaccaggcctatcggctgatcgcccaacacggcgattaa

SEQ ID NO: 2201 - DNA, 546 bp, Zea mays
  Peptide Sequence Number=SeqID_43980
atgggagcggagtgccggtacgaggtggcgcaggcggcgtacatcaagctggcgctgcacgcactgaagcacccggcgaccgccgtcaacggcctcctcgtcggtcgcctcgtcgagccttcgtcctcaccggccgtcgtctcggtcattgacgccgtgccgctttctcaccacccgcaccatctgccgctgctccccacgctcgagctcgcgctcaccctcgtcgaggaccacttcgcaacccagggcgaaggcctcgccgtcgtcgggtactatcacgccaacccgcgctgcgacgacaccgagctcccgccagtcgccaagcgcgtcggagaccacatcttccgatacttcccccgctccgcggtgttgttggtcgataacaagaagcttgaggaggccgtcaaggggaagttttctgatgcggtgattcagactgatggaccacaggcatgtccccattttccatcgaaaccaactttatggctgttaacacttggcaagccctccaaaaatagagacttgcatggagtaatgttgatttga

SEQ ID NO: 2202 - DNA, 417 bp, Zea mays
  Peptide Sequence Number=SeqID_43981
atggatgccatcgcatatgatgggatcggtgatggtgacgccggcatggatagcatgagaaaatcctgcatggctgccattgaccgggacagatcgtggaccgctgtggccacagattccagcgtgagtattggcgtaggtgtggtggaaactggtggagagatggtggtggacggccctggaacagtggaaggcgatggtggcggtgggtggctggtgaatggaggatcgctggacatagctgataccaggttgataggattcctattcctaccagggacctccctcaagctgtactggtgtactgctggaggttggcgggggactgggcgagagggacgccgggacgccgtgttcacggcgtgggaaaacaggctagctcaggttccggcttccacagggaagacggctaggtaa

SEQ ID NO: 2203 - DNA, 699 bp, Zea mays
  Peptide Sequence Number=SeqID_43982
atggcgaaggcgtggtcaccatccgtgcgcacccgtgaacatccccggaccatgccccgcaaccaaacgccggtgaatcgtgatcacggcgacggcggcagatctccccggttccaagcgaggcgcacacggtggctgggttcctggtgcatatgtagaatggaggtgtgcaaggtgatgcccgaggggtcgctacctcgacatttatacaccgacgtgggggtcatgagtgtccagactcgggcagcttcacaggagcgtgggccacgcaggaggctgacccagccgtcccacatggcagaggcagtggggagcggcccgcaacaagaaagcaggggaacatggagttcggctggcgcgagcgctgggctacgcgtgataggagttaattgggccagctcgtggaaattggcccaggtggctgaaactgaattgtatctagttcactgtaaactgaaattcagcacaagggtgtctggtttggagctctatgttttggactgttgtatggcctgtgagcagccaaagatcaggactgaagtcaaaaagatctcaagaaaagatatcttcccactatccactagctatttctgggatgttatggataagaagggttgctgcttggagagcaggttgttgggggtctccttctctaccgaaggtcctcaggatgaagaaaccatttgtgattcatcttga

SEQ ID NO: 2204 - DNA, 408 bp, Zea mays
  Peptide Sequence Number=SeqID_43983
atgaaccggaagcgcggtgacgaagttgtcatcgagctggtcacgatgatgttctgggttaccccggaagatgaacgaacgatgagaaattactcaccgaagttgtcgctagagttgggagacacccgaacttcgacgagctggctggttgatggtcgcagctatggcactaggtatgatcagcgtgggatctcgtcgaggctcaggttagctcctaatcgatggataaaacatgtcacgggcttcggcttttatacacccgatgggcagagtccgattgccagggagctcagacggttctgtttagccgattcgaagtttgcgacgaagataactgcttcgacgcgaacaatacccggcgtgcggctagcaattgatttaatggatgacatcgacatgaagtggtag

SEQ ID NO: 2205 - DNA, 339 bp, Zea mays
  Peptide Sequence Number=SeqID_43984
atgtcagagctcgaagcactaaacttagaaaaagatgagcgccttgttgcacttgaggctgaaatgaagcagctaaaggaaaactctgaagctgaaaccgataaaataagaggggtagctgctgaagcggtcattaatttcaaacttgaaaaatgtgcccgaagcactgctttggcacttctaagagttggctacggctacatgaaggcatgtctggaccctgacttcaaactgcctgtagagaacgttagaagatcaactgtggaggctttagagtggggaaaaattctatctgacatatggtcgaaaggtgggaaagagattgcccttgaagagtaa

SEQ ID NO: 2206 - DNA, 438 bp, Zea mays
  Peptide Sequence Number=SeqID_43985
atgccggaaccgcttggccgcgcgtcggccagagccgcgcctcgtccttgccggctcgcctgcccacgcgtcggccagagctacgccctgtccacgccggatccacaagacttgtgcgcttgcatgtcgaccatcgtcgtcgtggtccgcccaagttggatcaccccgcccacgcgtgttggtttcttcgtcgcgcaaccgtcgcagccaccgcagccccatggcgccccgaggaaccgtgagattggacgcgcgcggacgggaccagcagcgacaacaggttcctgcacgaccaacacgccggcagggcagctgtcgcgcgctcagttagcgacgccctcactggattcgccaacccgcaagggcaaggcagccgttgcgcgctcggccaacgctgcccgcgctggatccaccagcccgcaaccgctgccgcgctga

SEQ ID NO: 2207 - DNA, 306 bp, Zea mays
  Peptide Sequence Number=SeqID_43986
atggcaatacagggatatatatcccatcaggtcaaagtcatcaacaacatccatagaatgaagggaattgtgcctcagtttctctgcatccttttgattgctaccacctctagctctagtactgctctggcgaggaagctggccgagaaccaacgtggactgcaggcaggccaagtgcaagcggaaccagcaattaacgtcgacggaaggccctctactggctatggtgaccatgtctgcccccgaaacatgtttcctaactgcaataggttggatcaggcctcttccaacaataatcttggctag

SEQ ID NO: 2208 - DNA, 408 bp, Zea mays
  Peptide Sequence Number=SeqID_43987
atgggctggccgtgtgcgcaggcggtcgggctcaccggcgatgcacgctccggcctgctcacggcggtagagtcaaatgaaagcgctcggggatcttcaggggaggtcagcgatggtgtgggtgcaaggaatcgaaaaatgactcaccgagtgactcggtccacgcgaggtggcggtcggccaaagtccggtgaggtcgtgcttgcttctccggtgaggaaatgccttggctcaagcttgggaaagcttctccgccgctcgaggaagttgtccaggggcaagggcgaggctaggggtcgtcgggaagagctggccacggcggccgagcgctcgggtggcttggcgggcggtgcagagctcgcaagagctaaggactgggctggggcagtgagggcaagcgcgcagtga

SEQ ID NO: 2209 - DNA, 468 bp, Zea mays
  Peptide Sequence Number=SeqID_43988
atgatggttctcgcctcagttgccaccacctcgtttgccatcctgcttcttttctctctcccctcttgcctctgcctccacgccaccccattctcgatagagggcatgggagcaggcgcctcctccccgtattcgtccgacaccagccccgacaccgacccgcgcagtggctattgcacgcccatgaggacgtttcacaacatatgtgcaccatcattttcgtcattgtcagatgtcttgtttgtcttctcggcctttgccctattcttcctccccaacctgctacccccgcccacggtcgcagccacaagccgaccgacgctcgtcgacacaggtccagggctgagaaggcactcaaattctctcgcccttcgcggactgacacctggtgcgggtacctctcagttcagagctgctttggctgggcttctttctctgcttgcgtgctctctcactatatgtatctag

SEQ ID NO: 2210 - DNA, 396 bp, Zea mays
  Peptide Sequence Number=SeqID_43989
atggcgaggagatctggggaggagtgggcgagatcaaggtggtggcgctcgtgccccttcggtctcgctttgggctggttcgagggcggctgcagggatttgcggtgtgcgggcgggaggacggttcgccttggtcacggcggggtttgcaggtttgcggcgtgcgggtacctccatggggagagcaaaatggttggccagaggctcgccagcggcaagggaaagcgaggggacgcggaccatgagcttgctgaccccagacgcgacgcagtaaacaagtggcagtattgtcagaacaactttgggcggacgattttggcgtcttctgcttggattcggatcttggtcagtgcagaagatatgttccttggtatatactctacaaatcttgtatag

SEQ ID NO: 2211 - DNA, 219 bp, Zea mays
  Peptide Sequence Number=SeqID_43990
atggccgacgaccacgaaaaccccaccccgaagcccaaacttctatgcgtagggtacatcacgaagcgcatgactaggcgttcaagtttacgggacctacaccgcagatcaagccctcaatcgcaccgacgacggcgcagggcagaggtgtggaaaacgcccaacttcgatgagaaatctgacctcccccgcgacccaaacccggtttctaatgtctaa

SEQ ID NO: 2212 - DNA, 222 bp, Zea mays
  Peptide Sequence Number=SeqID_43991
atgcgggtggcgtccatcctgtccttcaccttccgggaggccgtggaggacgtggagtaccaagggtacctgatccccaagggctggaaggtgttgcccctgttccggaacagccaccacaaccccgaccacttcccctgcccggacaagttcgacccttcccgattcgaggttgctcccaagcccaacacgttcatgccgttcatgccaaaatgcttctga

SEQ ID NO: 2213 - DNA, 339 bp, Zea mays
  Peptide Sequence Number=SeqID_43992
atggcgggttggttatataaaaacaaaggggccaaaatgcaaatccgcgcccacgaaggggtacggggcaatattggccgttggattagatacgggcgtgccagattagattcattacccagcgaaccggcgcgcggaaggtcgtggcgccgcaaccaccccgcgaggatggcacgcggccacccgccgagctcggtcaggccgttgggaggagatgctgacaaggccgacccacgtgacagtgagacaaccagtatgcgagggattaccgcagggctgacacaggggtcccgcccttcagcgattgagtacggccgcgtgatggttaaacatggctga

SEQ ID NO: 2214 - DNA, 417 bp, Zea mays
  Peptide Sequence Number=SeqID_43993
atggcctcctcgagctgtccggatgatgtcgaagtgaaactcgggccacggtcgagcgctaagcctgcggtgcgaggtcgtccgtctgcgaggcacgcgaggtggagggtggcagtctcggggagagggcaatctctgagggacagtggtggagtagcggcgcgcggtcgagaaggtgtacgtgggagccggcggagggacagcgcagcgagcggtatagcagcgtcggggtcggtgtccgacggagcttcgcgctgcgatgacgggaaggagaggcagtttgttaaggcacgatcgtgcgggcacatggagcgcggtgtcgttgcctgtggcgatgctcctgttgccacgcccatgccaccgaggtggaggctagcgtgggacctatcgcatagggcgaggagactggatgagtag

SEQ ID NO: 2215 - DNA, 375 bp, Zea mays
  Peptide Sequence Number=SeqID_43994
atggcctgggccggcgctgccgcggcgactagcgcgctcctcaatccccacgccgccattgaccccgactctgagctcgagttcgatatgcccgatgtcttgcgtgtgtacaagatcgactatgtcaagcgctttgacggcaccgagaccgtcccgtcgccccccaatggcaattccaccaacggcgccgcgtccaaagacttcgctacaggcatgtcctcccgcctctacctacccgtgggagtggatcccaggaagcagctccccatcattgtgttcttccacgatggcgcattcatggtccacagcgcctccttcccggtgtaccacatctacgccgcctccgtcgatgtcgcggtgcccgctagccactaa

SEQ ID NO: 2216 - DNA, 546 bp, Zea mays
  Peptide Sequence Number=SeqID_43995
atggccgtgatggattcaacattggaaaagatgtacctctgccagtggaaatctaaaacagataaaaaaacaaaaaggaaaacttacctgggccatgaccctcacttttggcccatccttacttcgctcactgctctagcccaactggccgcccccttcactggatgcgggtcccgctgcccagccgtgtgggagggaacgccgacttgtgggacccacctgcaggcgtcttcctcaacaaagctgcttatccccacggatggcgcggcgttgaactcggaacaatatgatccacgctgcgtcagcattttggctactgcgcggagcaatggtgcttcgtcgtggtgcctgggacttgggcatggcggtgttgggctgcagggaatcgctcaccggaaatttcttgaagccgctaggaaggtgtctccatgggtcgcgctcaccgccacttctgtcaccggtaggatatactccatcatgctcgatcgggcggccaggacctctcgataccccttcggccgtgactttttactaaagagaccctga

SEQ ID NO: 2217 - DNA, 459 bp, Zea mays
  Peptide Sequence Number=SeqID_43996
atgggcaagagcaagaagggcggaagttcctcacaccactccggcgacaagaggaagcgcgagccgagtcccccctcagaggacttcggcgactccgagtactcagaggaggagttctcctccgagtccaaggggtcaccggtctacgcctctcctccggtgtcattcgatgactcagacgattcccaggggatcgccgctgaggtgtggacgtacattcgggtcgtcgagcgctccgggcttgagggctcggatgagttggagatctcctcggacgaggaggactcctcggctcatccaaggaggggagaggtggcgacggcgatgacgagggcgacggcgacggtggcaagggcgacggcgacgacggcgacggcggcagcggcaagggcgacggcgacggcggcagcggcaagggcagcagcggcagcggtagggccagtggcaaagcgccactga

SEQ ID NO: 2218 - DNA, 303 bp, Zea mays
  Peptide Sequence Number=SeqID_43997
atggtgctcggcggcggcatggaggtggtcgtcgtagttggggacaacaccgttgtgatgctgctaggcgccgccgagtgcgacgatatcaccgtcactgtcaactgccccaaccagaatgacctggctgcgacctctgccacaccatctcgagttcggtctccccatcactcgcggcagtacgtcctgttcccccttgcttcttctgatggaactcagatcaattcaatcgagtcacccctttcacgatccatctctgcaagaaaacgatttgtttgtcctgcctttccttcaaggctgtaa

SEQ ID NO: 2219 - DNA, 261 bp, Zea mays
  Peptide Sequence Number=SeqID_43998
atgtccggtgcaccaggaccgtacagagtccaactagtcactctcgggtttcttcaggcgcactccgctataattcaccagactgtctgggtagaggatgcactaagagattcggattgggtgctggctatgcaagaggagctcaacaacttcacgaggaatgaggcttatgctttggagatcagccttctgttctctggggttcaggattcattgggtgcaccggaggtgcacccaatgggtgtagcccccgagctttga

SEQ ID NO: 2220 - DNA, 2127 bp, Zea mays
  Peptide Sequence Number=SeqID_43999
atggggaagaggccgaggacaactctgcggcgcacgccagcacggggccttccaaagtccaagcgggccgacgagctgccatcgatgcctgattctgacaacgacgaaattgatgcatttcacaagcagcgggacatgatccctttcgacgccaatgatgtaagggagtcggaggatgatgatgtggagcagcccgtgtttgacctcaagttggcaatcggagccctgctggatcgattaggccctgtgttggccaataagctctggccgggactaggctcttggcctacgcgtgaggcagcacggacacgggaaaagcggcggcaaggcaatcttgcactagagtgggtgaactggaagaaaaaagagcacgtgcacagcacatcagagggcaggagtgtggagcagagggtgggtgtggatgggcagataaatatctggtggcgatgttacaagagaagcaaagtgccattgctccttgcattgctgtcagctgcgagcacgcgtgagtcagctaggtgtggtggggctgttgagccttggggagtcagtgatagcagttcatgtgccccctcgtgtggaaactggtggatggagcacgcctttgcaggtgtttctgatagcgaaagtgatgacagcaaaggagaattgtccggtgacatggctgaagctgattatgaaggatgggacaaagggtatatttcgaaattaaaaagagcacagagggctgtcaaacaaattgctggaggtgatgatagcatggatgagcaggaggatgaaacacaagaaaatgtttggggcagaggtaaaaatgcatactatgctcctggtgaacaatctggtgatgatgaggtggattacgaggaggcacaaaggatacaaaaaaataaggaaaaaaggctgtctatgaaggattttggattagaagatggtgaaagtgatgaagagggtaatgcaacaaaggtatccaaccatgaatccaaaatgaaagaagactttgctgtcttatcaggcgatgagaaaatggatgtgctatacagcttgttgtctgagttgaaggatgcccatgaagaacttagggccataggacagctaacaagtgaggtcacgtcttgtctaggcaaagataaaatgcaaccttttgaagtgaagaaagcttgtttgcttgctcattgtcaagctattaccttctatctccttatgaaatctgaggggttgtccgtacaggatcatcctgtaatttctcgcttgatagagaccaagaatatggtagagaagggtgctgaagtctctgaatcaagaaagagtgagccttgtaataacgattatcatgaagttaatgaacagaagaacaaggatgaacgaatgggcttgcatagccttgaaatgttgaaggtaagagcaaaccttgaggaaaggttaaagaaaaaagggctctataatttgacacgctcgaagccagagaagtcgtcaaaaaccaggacaactagtgataaaagtggcctgcagacattggatgattttgatgatgaagtgctgaagaataaccaaatgatgaagcctagcaagcttgttgcagcagctgctaaatcaaataaaagcatgtttgtttctggtgatgatgaccttccgaagagagataatatcggagaaagacggagaaaacatgagcttcgcgtcctatcaagagtaggggctaactcagcagaggatcatgagctgccagatggtgacgcttctgaagaggaggaccaccatgagttgccagaaggtggtgatgaatctgaagacgacatccatcgggatgtcaaaagaaagaggactgaaaagctatcaaccaagaatgctctgtactcgccaactccgggcgttgaacatctggaggaagaaacagaaggcgatggcaagaggacgatttcgtatcagatcttgaagaacagggggttgactcgttccaggaataagaagaagaagaacccgcggaagaactacagggataagcacaagaacaagcttgtcaagcggaaaggccaagtgcgtgatatcaagaagcagtctggtccgtatggaggtgaaacgtctggcatcaacccgaatgtcagccgcagtgttcggttcaagagttga

SEQ ID NO: 2221 - DNA, 780 bp, Zea mays
  Peptide Sequence Number=SeqID_44000
atgccgcgcgggggctgcggtaagagcttgacgtcgagtgggcctccatggagacgacacccagatccgaccattgagtccctcgacgtcgctgcttactcctacatcgccgcggggaagaagccagtggccgggagacaacagaccagcgcgaggcagcgacagtacgaggcatgccacctagcccgcaaagagggtcatctgcacacgaatagggtctgcgacaatgtctggaccttcattctaatagatgcaaccttcaagagcgctgagattcaagaaacactaagcaaggtgaacagatgggtctcaatgccgtggtggccgcctgctacgtctttccagtacttgtctctgtgctcacagtccgcttcttctacgtactgtggcacagtggccaaccagagtcaaggttgtgcgccactagattgtgttgtctcattgtccttggctccgaaaaggtccaaattaccagctccgggtgatgctgatgagctatatgtcattgaagaccaaattgcatggatagttcacataattgcatccattgtcaagaagagcccgcatagaggtcgaggagcagcactggctgtttctctgacgttgatcaaggcgagcacatcaaggggtctcgggcacctccctctcattcgtgtcatcgttgaaccagttatgatacattggtatggctgcaaattgagggagaaagacatggaaacagtgatgcaacatgttcacacgaagatggcaacaatggtaacatttgcattggtcctgtaa

SEQ ID NO: 2222 - DNA, 180 bp, Zea mays
  Peptide Sequence Number=SeqID_44001
atggcactcgacaaagacaccacctttgtcgagtgcctcggcaatgacactcggcaaagcaaggttctaaggggcctaggagatagcatgatcactatacgacagttcatttacagcgacttacggttggttgctaaaagcaccttcagcgacctacggttggtcgctaaagacctttag

SEQ ID NO: 2223 - DNA, 147 bp, Zea mays
  Peptide Sequence Number=SeqID_44002
atgcccaagtacatcggcgatgaactcgtcgctctcgggaaatcgccaaggacgctgcggctaaaattcatcggactgtctggtggttcactggactgtccgcgtaaggtcaccggcgtcgagatgcactcggcgcggttcgtctag

SEQ ID NO: 2224 - DNA, 2154 bp, Zea mays
  Peptide Sequence Number=SeqID_44003
atgggtgattccactagtacgggcttcgcggcggccctggagctgtggcaagaacaccagctgagcatcctcgtcgtcgcgagcctcgccatccagtggttcctcttcgtcttcgccccgcttcgacagcatcggatcccaggtctgctcaggctctccatctggctggcctacctgggcagcgacgccgtggccatctacgccctcgccaccctcttcaactcccaccggtgcgacaccgacaccggccgccccggcgtggagctgctgtgggcgccaatcctgctggtgcacctgggcggccaggacagcatcacggcctacaacatcgaagacaacgagctatggcggcggcatgtcgtaacagcggtgtctcaggtcgccgctgcgatctatgtgttcgtcaaggcgtggccgaaatccctggtgactactgctcaccaagcagttaaccaagccacccttgacaaggtaaatgccatccaggcccataacgaagagatggaggcttacgggagaatcttcacaccagcacttcttctgttcttctgcgggatcaccaaatgcgtgttcaagccctgggacctcaagagagtcagcgtcaacagcctcgtcgactcttcatcgggctcggaagagaagggcggcgagagtgagatgaattcgcttcaggggtacgtgggagctgcgacacggtatttcgagtcccgcggccatggcagaggagcaggactgcaggaggatgacggcgacgacgacacttgtaaagcaggggaagtttggaagccctacaacctatgcgtggacctggcgcccccttactccggccggctgagctgcctgaaacacctggcgcgcagcccagcggacgaagcccatcgcctggtgaaatccagcctctccgcgacgttccaccagctctacaccaaggaatcgctgaagctgcacgacatctcgcatttcgtcttcacgaacaacgccgccttgaaccgctggaaggtgctcacctcggctcgagggctccggacggtagccgcggccacgctgctcggtgcgatcgcggtgttccactacggcggcggcgccgccgaccaggtcaaggccgacgtcaccgtcacgtacgcgctgctgtggtctgcgtttgtgatggagtacgtcttgcccaccgtgatccaccatacgttcggcagggtacagcggctgttcaccgggcaccggacgtggccggaccaggtcgcgcagtacaacctcatggggtacgtggcacgcagaaggaagcactcgtggctcatggaggtggtaggctggctcggctgcagggacctggtcgaccagctatggaccatggacccgtgcaagggcgcttcgtccagggagatcaccggccttgtccacggccacgtcgccggagggtggatggagggtcacatagccggcgcggactcgttccgggcgttcaacgactaccggggacagtggactctcaacaacagcagcgtgccatccatggtactgatgagcgtgtcgaggccgttcgacgagagcgtcctcgtctggcacctcgccaccgacttctgcttccacctcctccaggaggacccgtccccctccagcgccaccgcccgccgttgcagggagatgtccaactacatggcgtacctcctcttcgtcaagccggagatgctgatgcccggtgcccgacgcagcctgttcagggacacctgcggcgagctcgtgggcctgctcggggaggaccgtcctggcgcgccgcgggcacggggaaagagaggcctcgcgcacaaggtcgtccagctgctcaagagggacgacggcggcggcgtcctgggctcagcaggcgtcggcgtcgttcgccgggcttggtgcgtagccgaggatctcatggactcgcacaggggcagcgaggagaagatgtgggccgtgatccagggcgtgtgggtggagatgctctgcttctcggccagcaggtgcaaaggctacctgcacgccaaaggcttgggaacgggcggggagtacctgtcctacgtatggctcctgctcttgtacatggggatggagaccttggcggagaagatgcagaggacggagctgtatgagggccccactgcagcagcgtcgtccatcagtggccacaat

SEQ ID NO: 2225 - DNA, 201 bp, Zea mays
  Peptide Sequence Number=SeqID_44004
atggaggcttacgggagaatcttcacaccagcacttcttctgttcttctgcgggatcaccaaatgcgtgttcaagccctgggacctcaagagagtcagcgtcaacagcctcgtcgactcttcatcgggctcggaagagaagggcggcgagagtgagatgaattcgcttcaggggtacggggagcaagggcgaattcgttaa

SEQ ID NO: 2226 - DNA, 375 bp, Zea mays
  Peptide Sequence Number=SeqID_44005
atggctagtggtacccttgctttcgaactgagcaatgcattagaggacatttaccataccgcgaccgcggtactatgtgagaacagtagaaacaaggcagccttgatgtcagggggctcaaggcttcctatatcagcaagtggtccgcgaagattcgccagtttccccgtggaagtgtcgctatcttggaccgatcagctgcgccgtaccaacggagagaaacacggcttgccgatacggttcaacagtgtcgccgactttctggtggttctgtacgtgtcacgctcgctcaacctaggcgaaaacctcagcaatgtcaatgctgacttgacaaagcatgaacagccgaaacggtcaaaacgtctaaatacataa

SEQ ID NO: 2227 - DNA, 2685 bp, Zea mays
  Peptide Sequence Number=SeqID_44006
atgaccaacctcgtaggcgtgctgtatgcagtgatcctgcttgttttgtgcgctggctacgtggatgtcgcgaggggacagacaactgaccctactgaagtgaacgctctcaaggcaatcaaagccagcctggttgatccttctaataagcttaaaaattggggcagtggggatccatgcacatccaattggacaggaatcttctgtgacaagataccaagtgattcatatcttcatgtaacagaaatacagttgtttaagatgaatctttccggaactttggcaccggagattggtctcctaccccagttgaaaacattggacttcatgtggaacaatttgactggtaacatcccaaaagaagttggaaatatcacaacattgaagctcataactttgaatggtaacctgttatctggttctttgcctgatgagatcggttacctgatgaacttaaacagattacaaatagatgagaacaacatatcaggccccatacctaaatcttttgctaacttaacaagcattaaacatcttcacatgaataataactcattaagtgggcaaatcccatctgagttgtccagcttacctgcactccttcatctccttgttgataacaataatttatctgggcctcttccaccagaattagcagatacacgtagtttggaaatacttcaggctgataataacaacttcagtggaagctccatccctgctgaatacagcaacatacgaacacttctaaagctgagtctaagaaactgcagtttgcaaggagctgttccagatttgagtgtcgtacctaaatttggctacttggatcttagctggaaccagttgaaaggatctataccgactaataggcttgcttcaaatattactacaattgatttatcacacaactttcttcaaggaactgttccatcaaacttctcagggctacctaatattcagtacttgtcagtcaatggcaacctcctaaacggttctgttccaccgacaatttggagtaacattactttcacgggaaatagagcccttgttttggacttccaaaacaactcccttgacactattccacctgtatttgagcctccacaaaatgtcacggttctactttatggaaaccctgtatgtacggcatctaatgcagcaagagctgctaatctttgtcaacctacttctgtaactgatgccccatctggagagggaaagcaactgtacattgaacgctacatatgggaggctggcccaaggctgaatacacatttaaagttattcccaaataatacaaatttattcgatatggctgaggttgtgcggcttagggaagtacttgctggatggcagatcactctattagatgtttttggtccatatgagcttctcaatttcacacttggtttctatgcagatgaatttcgtactgcggcgtcgccaggtttaaaaggcggtgcacttgctgggattttggtggggacaattgttgctgccattgcagtatctgtgttttctacagtttttataatgaaaaggcgcagaaaacaacgaacaatttcaagacggtcattactttcaaggttttctgtcaaggttgatggtgtgaaatgcttcacatttgacgaaatggctgtggcaacaagggattttgatatttcagctcaagttggtcaagggggttatggaaaagtttacagaggaaatttagctgatggaacaacagtggcaatcaaacgtgcacatgaagattctctgcaaggttcaaaggagttctgcacagaaatagaattgctgtcaagattacatcatcgcaatttggtttctcttgttggctattgtgatgaagaagacgagcagtacgttcccctcatagagaattgtgttctgcagatgctggtttatgagttcatgcccaatggtaccctacgtgatcatctttctgctaagactgaaagacctctgagctttggtcagagggtccatattgcgcttggtgctgcgaaaggacttctatatctacataccgaggcaaatcctcctatatttcatcgtgatgttaaggccagcaatattcttctagattccaagtttgtagcaaaggtggctgactttggtctttcgaggcttgctccagtgcctgatattgaagggactttgccagctcatatctctactgttgttaagggcaccccaggctatctcgatccagaatatttcctgacccataaactgacggaaagaagtgacgtgtatagcctaggtgttgtttttcttgaactattgactggtatgaagccaatccagcatggtaaaaacattgttagagaggtaaacatcgcttaccagtcaggcgacgtttccgggatcatagacagccggatgtcctcataccctccggaatgcgtaaagaggttcctctccctcgcaataaggtgctgccgggacgacaccgaagagaggccctacatggccgacattgtcagagagctggagaccatccggagcatgctgcccgagggagaggacgtcctgtcctcgacctcggggtcgggcttgctggcgaagtccatgtcatcatcatcgaccaccaccaccggggccctctacgtgtcgtcgcatatttctggcagtggtcaggcggacagtggcatcccctccgggatggtggctcctcggtag

SEQ ID NO: 2228 - DNA, 229 bp, Zea mays
  Peptide Sequence Number=SeqID_44007
atgggcgcatctgttcactcccccccacacaggctgctgacagggctgtcttattatgcctacggcaccttcccgatcgagttccagcagcaggcgcaggcgcgcagcgatcaatcagcgagcaggacgagcggcaggggagaagcactcgagtcgagagcaggcgagcaaacggcggacgcccgcgctggttcctttccttcgccctcggcgcccgtggcggggactg

SEQ ID NO: 2229 - DNA, 690 bp, Zea mays
  Peptide Sequence Number=SeqID_44008
atgcagctgcagatcttggagaacatctttgaccaaggcaatggaacaccaagcaagcagaggataaaggagataacggcagagctctcgcaccatggccaaatctcggagacaaatgtgtacaactggttccagaacagacgggcacggtcaaagcggaagcaggccgcttctttaccgaacaatgctgaatctgaagctgaggtggacgaggagtctctcaccgataagaagccgaagtcagatcggtcgctccaggacaacaaggctatgggcgctcacaacgctgacaggatatctgggatgcatcacttggacactgatcatgaccaaatcggtggcatgatgtatggatgcaatgacaacggcttgagatcgtctggcagttctggccagatgtccttctacgggaacatcatgccgaatccaagaatcgatcatttcccggggaaggtggagagctcccggagcttctcccatctccaacacggggaaggctttgacatacgcgggcgcgaagctgcctctgcctgcttcggtgactgccgcctgacctctcccatcccatggcggcatcgccctcctggtcctggcagctcgagttcgccagtcggcagtcgccaccccaacctcggctccgaccgtgctcccatcagctcgaccaaactggccagcccttccggcgcttga

SEQ ID NO: 2230 - DNA, 498 bp, Zea mays
  Peptide Sequence Number=SeqID_44009
atggctccaattggtgcacgttctatttcaactcaagttgtgaggaaccggatgaagagtatcaaaaacatccagaagatcacaaaggctatgaagatggttgcagcatcaaagcttcgggctgttcagacgaggactgaaaattcacgcggcttgtggcagccgttcaccgcccttcttggggacactcctagtgttgacgtcaagaagaatgtgattgtggccattacctctgataagggactctgtggtggtatcaattcaacctcggtgaaagttagcagggcccttcacaaactgacatctggtccagaaaaagaaagcaagtatgttatattaggagaaaaaggcaaagttcagctgttgcgtgactcgaagaacagcattgaaatgaccgcaagtgaactacagaagaaccctatcaactatacacaggcccaaatgaaattgtctgccgttacaatcatgaccacaaatgaccagacaacttatggatga

SEQ ID NO: 2231 - DNA, 414 bp, Zea mays
  Peptide Sequence Number=SeqID_44010
atggaacatagcccccaaagaaaatgttcaattgcattagcagagtttgcaaaagaaaggaggagggatacgacatcctgggcataccaaattctcaattctctgcttctcatcctcctgggaggcccgatggtcagaggtgagcacctctgccttccctgctcggctgagcaccacatgatagtctccaatattggagacgaccagtctaccctttcagagaagggctatgacgcagcacgtgcccccgctctcgcccctcttgaggaactcctcgtccgtcttgaggaaaaaatatttgtaagaaagtacctagacttgtcagcgatctattcaatcccaggcccacttgtaaacaacttctttgtagcctttttgaagagaagagataagagaagacaggttgatcattag

SEQ ID NO: 2232 - DNA, 123 bp, Zea mays
  Peptide Sequence Number=SeqID_44011
atgggggaaacatcatctaagcaccgatataatgctcgtctgagatcaatcctcatgccaaggccgcaagatcgcgtgtgcagcgccaccaccgtcaccaacccggttgcattaagctcataa

SEQ ID NO: 2233 - DNA, 222 bp, Zea mays
  Peptide Sequence Number=SeqID_44012
atgaagccgtggaaggagacttccaggagttccaagactacgacgagttctaggtgtgggttagcggcaacccccagtcggctgcctgtgaaggccgcggttatctacgtttcttttccgcactttgatttattagctattagtagcctctcagaagttattaatttcctacagtttgttataaaagttatgatagtagtgaatctaaaagtaaaaatgtaa

SEQ ID NO: 2234 - DNA, 537 bp, Zea mays
  Peptide Sequence Number=SeqID_44013
atggatgatcctgatcttgatcggttgtttgctttgcgtggttgcagaaggaaggtcctgatcggcgtcgcggccgtgatgctggtcctcgtgcatgttggcttcgcgttctcgttgaccgggaagaagtcgcttgtgtccaccgtgataggagacacctgcgtggcgatagatgagtgggtggcccagccacaggggcagagccacaccgcgctggacgacatcctcctttgggctgacgcagcggtgacggtggaggcgctgtggtggagcaaggtcaactaccagctcgtcaccaagctcaaccagctgctcatcggggcaggatgcggccggcggcgcgggcgcgtcggggtaggggtgcggcggccgagcgtcggggcgagccagggagcagccggcgggtcgggcgagttggggcggggtgcggccggcgaggtgcggcgtccgggtggcagggccggggtggccggcggcccacagggcgggcgcgttcgagagggagcggagaggttgaatgacgggatggaaaggtga

SEQ ID NO: 2235 - DNA, 822 bp, Zea mays
  Peptide Sequence Number=SeqID_44014
atggatgatgctcgggtggttactggggccgcgaggaccacgagagtgcagctatgctattcgccgtttgctctgccaccacgcatcaacgtcccagcacctcgcagccgcattgaagctcttgatctgaactcccagtcccagggtaccgattttccatatctctcttcctaccaagatgttctccagtcaggtgatggtggatccgacctaggtttgcctcctcttggtcgttgtagatcagcgcgcacactatttcaatccaccagatccattttggctcctatttctcatgcccgaggtgcaattccaggttgctgtggagttagggggagaggcactagtagtcgtggtggaggtcaatctgctatttctgcacctattgaccctgtcctcattgaagattttggtgatgaaccaaccaatgaaatggattctcgagctctagtgaaaagaaaagagtgcaggaagtttcaacatgcgattcctacatacatggaacaattagcagaaatgttccatggaattattgttgatgggtctagttcttgtatccctggtgatctatcaaggaatgcatacactgatgtttttaaccaactaaaaactatccaagaaaacataagtttacaagccattgatcagttcaatccttgtctagacttggcagtagaaactggagctgacaaggacttagatcagtactttgtggcaaccaaactattcaaggatgagtacaacagagctattttcaatcgctttgatactgcagcacaaaggatgaagtggctacaaaggttttgcaaggaatattttggttga

SEQ ID NO: 2236 - DNA, 585 bp, Zea mays
  Peptide Sequence Number=SeqID_44015
atggtggcttttgtgagcgaagttgaggtagaggctgtcaagattgttggaaagttatcgtcgaagactgagctatcgaagagcttggaaatctgtgatagtaacactcgtcttaatagggtcttcaagttgaatgaattggagtatgggctgtatcctaaggatgcggaggatgaagaagattcaagcgctaatgtgaaagggaaggttgctgttactgaagatgatgatggcaaggctgctagtgaagacttcgtcagtttaaatgttgtgatgtctaggtttggagaagaactagcagatgttgcgagtgaagtcacgtcgcccctgtctcttgtatcaatgcatgtgagggcggccacaatcattggggctaaatatattcctaatgctgctgcgctcttggagaaggaccggaagacaaagtccaggaagcggaaggatgtcattcgcatcatggacccgcagaagtcgaaagcgcaagccatgaaggaggtagtggtgaagagtagccccgcaacggctgtgaagatagagatgccgagggttgaggtgcaacagcctcttcagaacgttagtcgctag

SEQ ID NO: 2237 - DNA, 489 bp, Zea mays
  Peptide Sequence Number=SeqID_44016
atgcatttgtttctggcaacgtttttacgggaccccggtcggttcttgtttttggacccgatttggtccgagaagctccgtgccagcagggcgggtgttcttctccgcgccacgcaccagggcgctggccacggcgaccccagcgcgccggtcgacgtccagcgcctcctcgccgtcgctgtccgccgcagtggagtactgtgccataccgtggagcgaggtggcgcgcacaggcaggggcccaacctgcacgacctcttcggtcgtcagtcaggcaccaccctcggctatgcctactccacgaccaacaagaacatggtcgtcgtctgggaggagggcaccctgtacgactacctcttcaaccccaagaagtacattccaggcacaaagatggtcttcccggggctcaagaagcccaaggagcgaaccgatctcatcgcctacttgacctatcgacgcaacaggggatactcacactgtcatccttag

SEQ ID NO: 2238 - DNA, 2451 bp, Zea mays
  Peptide Sequence Number=SeqID_44017
atgccgtcatgtgcccgcatctcctccgccgtctccaccgccgccgcatcctcctcctcgccgccgccgcatcctcctcgctgcagccgccgcatcctcgccgccgccacggcgcgcgtgcgggaggggacgctccgccctgaggaggcacacgacctgctcgacgagttgcagcgtcgaggcacgcccgttctcgatcgagatctgaacggcttcctcgcggcgctcgcgcgtgcgccgtcctccgccgcctgcgggagtggccctgccctcgccgtcgcgctcttcaaccgcgcggcgtctcgggctcaaggaccgcgggtgctgtcccccacatcctacacctacgccatcctcatggactgctgcacccgcgcgcaccgcccagagctagcgctggccttcttcggccagctcctcaggacaggcttgcgcgtcgatgccatcatcgctagccaccttctcaagggcttttgtgaagcgaagcggacagacgaggctttggacatccttctccacagaacgcctgagttgggctgtgtgcccgatgttttctcgtacaacatacttctgaagagcctctgcaaccaaggaaagagtggccaggcagatgatttgctacggatgatggctgaagggggaactgtctgctcgcccgacgtggttgcctacaatacagtaatcgacggcttttttaaggagggtgatgttaataaagcatgtgatctattcaaagaaatggtacagcggggcattccacctgatttagtgacttatagctctgtggtccatgccctgtgtaaggcaagagcaatggacaaggcagaggctttccttcgacaaatggtcaataaaggtgttctgccagataactggacatataataacttgatatatggatactcctccacaggacagtggaaggaggcagttagggtatttaaagaaatgagaagacagagcatcttaccagatgttgttgctttgaacacgttgatgggttccctttgcaagtatggaaaaatcaaggaagctagagatgtttttgacacaatggcaatgaagggccaaaatcctgatgttttctcgtacacaattatgctcaacgggtacgctactaaaggatgtctagttgatatgacagatctcttcgatttgatgctaggtgacggtattgcacctgacatttatacttttaatgtgctgatcaaggcatatgcaaactgtggaatgctagataaggctatgatcatcttcaatgaaatgagagaccatggagtgaaacctcatgtggtgacctatatgacagtgattgctgccctctgcagaatcggtaagatggatgatgctatggaaaaatttaatcagatgattgatcaaggagtagtacctgataaatatgcataccattgcctgattcaaggtttttgtactcatggtagtttactgaaagccaaggaattgatttcggaaataatgaataatggcatgcgtcttgatattgttttcttcggttcgataattaacaacctttgcaaactgggaagggtaatggacgcacaaaatatatttgacttaactgtaaatgttggtctgcatcctgatgctgtggtgtataatatgctgatggatgggtactgtcttgttggcaagatggagaaagcattaagagtatttgatgctatggtgtcagctggcattgaaccaaatgttgtagggtatggtacacttgttaatggctattgtaaaattggaaggattgatgaaggattgagtcttttcagagaaatgctgcaaaagggaataaagccttcaactattttatacaacatcataattgatgggttatttgaggccgggagaacagttcctgcaaaggtgaaattccatgaaatgacagaaagtggtattgctatgaacaaatgtacatacagcatagtacttcgtggactttttaaaaatagatgctttgatgaagcaatctttcttttcaaagaattacgtgcaatgaatgtaaagatcgatatcataactctcaataccatgatagctggaatgtttcaaaccaggagagttgaagaagctaaggatctgtttgcttctatctcgagaagtgggctggtgccttgtgctgtgacttacagtataatgatcacaaatcttctaaaagaaggattggtggaagaggcagaagatatgttttcatccatgcagaatgctggctgtgagcccgattctcgattgctgaatcatgtagtcagggaattactaaagaaaaatgaaatagtcagggctggagcttacctgtccaagattgacgagaggaatttctcacttgaacatttaaccgcaatgttgctggtcgatctcttctcaagcaaaggaacttgtagggaacaaataagatttctccctgcaaagtatcattttcttgcagaggccagtccgtga

SEQ ID NO: 2239 - DNA, 240 bp, Zea mays
  Peptide Sequence Number=SeqID_44018
atgggtcaggaccactcgccggtgcgtgtgggtgctcattggggcttcggcgggctaggagcgctcgctgggggtggtggaattcctcgccggagagggagttgcgccgcgggaccgcctgctaccgtggccatgacaacctgtgccacaatccgcgacgagcaaaccactgtggattctgaggttcaacaagtagagatagctgagcaggagctcactgaaggcaagttgtgcccttga

SEQ ID NO: 2240 - DNA, 363 bp, Zea mays
  Peptide Sequence Number=SeqID_44019
atggagttccaagtaacacttgaggagtccgcggatcctaggcgcactcgatgttctaggattttgattcgtggtcatttgtttgtgagctgtggtgatatccattccgttatagggacatggtcaaattctggtgttggtttcttatggcaccttcatatgctctgtttctgtgttatggaaactaatctatactgcatttcagattctgaagaattccagctagttgtgcctgttgtgaaagccgagccacttaaaaatcagtgggctgatgaagatgttgaagaagatgatgtaaaagaatcatgggaagaagaggaggaggagtgtaggtctgatttcttgttcacactaccattctaa

SEQ ID NO: 2241 - DNA, 615 bp, Zea mays
  Peptide Sequence Number=SeqID_44020
atgggctcgggcgaggcggaaacgacaatttcgtggagaggggacctcgggtgggacgagaatttccccgagtatgtccctggcgcgttcgcggcagcggcgaggaggaggaggagcatggccgggaagggaggagggaagtcgctggtcgccgcgaagatagcggctggcatggacaaggacaagaagtcaccgctccgcttcgtccccccttccctgtcgcgacgagggctcgtttcgttcttgggcgtgacgtacgcgcgcgtgctgctttctgtgcgttctttagcatacgggttccctgtgggactcatccaccgccacctgaaggatagcgcacaggtcgacgagcgggtgggggcgacagcggccgtgtacgcagcggccgtcctagagtacctgacggtggagatcatggagctggccgggaacacgtgcagggacctcaaggtgaagcgcatcaccccgcggcacctccagctagcggtccgcgggggacgaggagctggacaccctgatcaaggccaccatcgccggcggcggcgtcatcccccacatccacagggagctcatcgacaaggctgcctaggaatgacgaaggagcaagcagtctga

SEQ ID NO: 2242 - DNA, 2802 bp, Zea mays
  Peptide Sequence Number=SeqID_44021
atggactgcaacgccacccatctgccattggaggagccttccgccggtagccaccacctcccacatcctctggctatcacaggaagcttgcagctgcagaaccggaccaagtcgcgggacctcatatatttcatactcgaatactctaaatatgtgagtataagagatcccccgcgtccagatgagttcggtgtggtggaggtatataaccacctgatatggacggaggaaagggatgggaacccggacgccccaaaaaatccccccacacccccagcgcggccaatgccgtcatgtgcccgcatctcctccgccgtctccaccgcccgccgcatcctcctcctcgcccgcccgccgcatcctcctcctcgctgccgccgccgcatcctcgccgccgccacggcgcgcgtgcgggaggggacgctccgccctgaggaggcacacgacctgctcgacgagttgcagcgtcgaggcacgcccgttctcgagcgcgatctgaacggcttcctcgcggcgctcgcgcgtgcgccgtcctccgccgcctgcaggagtggccctgccctcgccgtcgcgctcttcaaccgcgcggcgtctcgggctcaaggaccgcgggtgctgtcccccacatcccacacctacgccatcctcatggactgctgcacccgcgcgcaccgcccagagctagcgctggcgttcttcggccagctcctcaggacaggcttgcgcgtcaatatcatcatcgctaaccaccttctcgagggcttttgtgaagcgaagcggacagacgaggctttggacatccttctccacagaacgcctgagttgggctgtgtgcccgatgttttctcgtacagcatacttctgaagagcctctgcgaccaaggaaagagtggccaggcagatgatttgctacggatgatggctgaagggggagctgtctgctcgcccaacgtggttgcctacaatacagtaatcgacggcttttttaaggagggtgacgtaaataaagcatgtgatctattcaaagaaatggtacagcggggcattccacctgatttagtgacttataactctgtggtccatgccctgtgtaaggcaagagcaatggacaaggcagaggctttccttcgacaaatggtcaataaacgtgttctgccaaataactggacatataataacttgatatatggatactcctccacaggacagtggaaggaggcggttagggtatttaaagaaatgagaagacacagcatcttaccagatgttgttactttgagcatgttgatgggttccctttgcaagtatggaaaaatcaaggaagctagagatgtttttgacacaatggcaatgaagggccaaaatcctgatgttttctcctacaatattatgctcaacgggtacgctactaaaggatgtttagttgatatgacagatctcttcgatttgatgctaggtgacggtattgcacctgacttttatacttttaatgtgctgatcaaggcatatgcaaactgtggaatgctagataaggctatgatcatcttcaatgaaatgagagaccatggagtgaaacctgatgtggtaacctataggacagtgattgctgccctctgcagaatcggtaagatggatgatgctatggaaaaatttaatcagatgattgatcaaggagtagcacctgacaaatatgcatacaattgcctgattcaaggtttttgtactcatggtagtttactgaaagccaaggaattgatttcggaaataatgaataatggcatgcatcttgacattgttttcttcagttcgataattaacaacctttgcaaactgggaagggtaatggacgcacaaaatatatttgacttaactgtaaatgttggtctgcatcctgatgctgtggtgtatagtatgctgatggatgggtactgtcttgttggcaagatggagaaagcattaagagtatttgatgctatggtgtcagctggcattgaaccaaacgttgtagtgtattgtacacttgttaatggctattgtaaaattggaaggattgatgaaggattgagtcttttcagagaaatgctgcaaaggggaataaagccttcaactattttatacagcatcataattgatgggttatttcaggccgggagaacagttcctgcaaagatgaaattccatgaaatgacagaaagtggtatcgctatggacatatgtacatacaacatagttcttcgtggactttttaaaaatagatgctttgatgaagcaatctttcttttcaaagaattacgtgcaatgaatgtaaagatcaatatcataactctcaataccatgatagatggaatgtttcaaaccaggagagttgaagaagctaaggatctgtttgcttctatctcgagaagtcggctggtgcctaatgttgtgacttacagtataatgatcacaaatcttataaaagaaggattggtggaagaggcagaagatatgttttcatccatgcagaatgctggctgtgagcccaattctcgattgctgaatcatgtagtcagggaattactaaagaaaaatgaaatagtcagggctggagcttacctgtccaagattgacgagaggaatttctcacttgaacatttaactgcaatgttgctgattgacaacgcaacaagagcgaagccacaagaggtttcaggccttgtcgatgagctcctgtggatgcgggggatgacgccgccgccgctggcggcgatggtagccttgatcagggtttccagctcgtcgttcccgtggatcgccagctga

SEQ ID NO: 2243 - DNA, 807 bp, Zea mays
  Peptide Sequence Number=SeqID_44022
atggaggtcgccgccgccacttgtacgctccttgctgccgtcgccctaccagtttcgtcctcagcagcagcagcacgctctgcgacgaaacagagctactcgaggaggaagacgacggccgtgcgagccgtcatggcgaggccgcatcaggtgccgccgcctgccactgccaccgccaccgccaccacgtaccgcgacaactggttcgacaagctggccatcgggtacctgtcccggaaccttcaagaagcttctgggatgaagaacggaaaggacggctacgagggcctgatagaggcggccctggccatctccgcgctgttcaggatcaaggtgatgatgccaccctctcgattctcgcgggagtatttcgccgccttcaccacggtgttcttcccttggctcgtcggaccatgtgaggttgtgcgagtaatcattgtgtcaccgaacatttgcaaggtcagggaatcccaagtggatggaagggaagagaggaacgtggtctacatacccaaatgcagatgtcccatcacaaatactgaattagctgctgtgtgtgagatcgacagatttctggaaagcaccaactgtgtcggaatgtgcacgaacctctgcaaaatcccatgccagaggttcatccaggattcacttggcacggctgtctacatgtctcccaattttgaggacatgagctgcgagatgatctttggacagcaaccacctgaagatgatccagcactgaagcagccctgcttccggacaaaatgcatcgcaaagcagaatcatcaagtgaattgctctatttga

SEQ ID NO: 2244 - DNA, 204 bp, Zea mays
  Peptide Sequence Number=SeqID_44023
atggataagtgggccgcgcatatggcttcccctagtgggccaaaatgtggtaagccggcccaggattctgacccaaaactgggaaaacacctcgtcacctgccgctaccaggccctcgaggaatcccccgcacgccgccttctccacgcgctcgccacactcgcctccacggtctgcgcgcgcgcaccccggacctcggcctag

SEQ ID NO: 2245 - DNA, 1218 bp, Zea mays
  Peptide Sequence Number=SeqID_44024
atgggtcttatgcgtcggctaatgggaaagcctaaacgaaaagatgagcattatatttccctccatgatgtacgagaagcgacaaacaatttcaatgacgaaaatgtcattggaagtggagggtttgggaaggtttatcgaggatatttgaaagatgggaccgaggtggctgtgaagcgaagggacaaggattcacgtcaaggagcagaagaattcgaattcgagaaggagctgctgttcaggctggaacaccccaatttggtttctctgatcaagtactgcgacgaaaagggtgagatgatcttggtttatgagtacatgaaagaaggtactctacagagccatctgtatggctccaataagcctccactcagctgggagcagcggttggaggcttcgacgggagcagcgaaggggctgaactatctgcattccaatggcattatccaccgtgatgtcaagtctttaaacatcttgctggatgagaacctctgcgccaagatgggtgacctgggcatgtcaaaggcaggtcccgagttggacaaaactcatgtcagcactcgagtgataggcaccattggctatcttgatttacaatattggatgacggggcatctgtcagtcaagtctgatgttggctcttttggagccgtcctgctagaggtgctatgtggcagggcagtgattgaccacagactttcagcggagaaggtgaacttggtatgctggggaaagaaaatgctggaggaagggaatgtggccgaaatcgtcgacgagaagattcgagacacaacccacccgcataatctggccatgtttggcagcattgtgttaaggtgcctggcagaagagaacgcggagcggccaacgatggaagaggtgctcagagacctggagtgggagctgggcatggttcgtgctggaaacccaccagatgagtctgtccatggcagcgccagtgtggctgctgaaaactcgggtgagtctggtcatgccgccgtctcttctcaggagaagaaagtcaaagctttggaacggtcccaaggtaaaacttacgagagaagtccaagcgtatctcatgaactctccgccacatccacgagccgtgcggcccgcctgtccggaagtcgattcctgcagggtcgcaatggcaatgccatgaagatgaaaggtcctgtcgagctcgagagcatcagtgaagacgagaactgtttctga

SEQ ID NO: 2246 - DNA, 978 bp, Zea mays
  Peptide Sequence Number=SeqID_44025
atgggcaggtgctacaccgagctggcgacaattaggaacaatctggaggccgaaccaaccgacaatccgactccagagcgccctgagaaggtctccgatcacctccgacggacacgcagggaggcgaatgcggctgtcgacagtgatggtggatctctcgtgctctgccccctcccctttctctcagctggctaccgaggtgggtttaaggctatggcgacggacccaccgggtcttataggcgcacggcacggggtactcgatccgcagattacgacgctgatcggcgaggcttccgcggcgatcccgcgcgacgcacgcggagttcgttgcgcgccggtcccatgcccgcctcacctatttccagcacacgtggttgttgagtgtggcatcggcctgttgcagacgcagggtctcgtagaacttcctgataagggcatcgaaggtggagtcggtgcaggcgtcgatgccctccgacgggtcgagtgggaagagcgagtaggtgacgtgcatcaggcgggcctcagtgggtctacgcccaaggctgagcgcgggcgtggctctggcggctgtcgactgtgccaggtgattgtaggcgtagacatgcatagtctcgagcgcgcgcgtcacctgggccaaattgagctcgtcgccgcacctagcattggtgtgtggcggccacggattctaaaggggagcagcacgaatctagggcctggacgcgcggcgacgtggcgaaaggagctggacagtgtggtggtgcagctgaattccacgtcccaggaggtggaggtccatcaagaggcacttgttgtagaggccctagcgcaacttttggtagacagtgcggagcatagtcatgaggcgcttctcgagcctaggctccatgttgccactactacagccgcgcggcaggctggaccgcacgtgacatacccaagtgcctttatttcgcttcgcttgaagggggagcgttag

SEQ ID NO: 2247 - DNA, 765 bp, Zea mays
  Peptide Sequence Number=SeqID_44026
atgacggggcatctgtcagtcaagtctgatgttggctcttttggagccgtcctgctagaggtgctatgtggcagggcagtgattgaccacagactttcagcggagaaggtgaacttggtatgctggggaaagaaaatgctggaggaagggaatgtggccgaaatcgtcgacgagaagattcgagacacaacccacccgcataatctggccatgtttggcagcattgtgttaaggtgcctggcagaagagaacgcggagcggccaacgatggaagaggtgctcagagacctggagtgggagctgggcatggttcgtgctggaaacccaccagatgagtctgtccatggcagcgccagtgtggctgctgaaaactcgggtgagtctggtcatgccgccgtctcttctcaggagaagaaagtcaaagctttggaacggtcccaagcgaaccaggaccgtcgtgagctcacgtccgcctctccacgcctctgcccactcgtcctccacatcacccgccccactcgtcctccatctcatatgtccctaccgcgcgaggggcgcctccccttcccagatcccccaacggcgtcctctgccttgccctccttcgtgtcccgcatgccggttaagtgggagccgccgtcgtcgcagatgctggagtatagccccaacaacgaggacatgtgggagccagatctgaggggtggcggcggtaggggcgagaggcgggcgcgcgctggagcaggtgctggggaacgtggcatatag

SEQ ID NO: 2248 - DNA, 294 bp, Zea mays
  Peptide Sequence Number=SeqID_44027
atgcccccaaaatctgatccgagaggtgctttacaacaagggcacgaaggagaaatgaaggggaggggtctcaccaagcatgggcggtgcagagggctccgcccacgtcgcagggcgtgcgcggttcacatgagaccgttcaagtatgcgggcgtggacgaagaagatgacaagtggggcccaagtgacagcgtctttatggttgacgagcgccaggctggtggccctccgatggggcctagtgcagaggcaaatgagcccaattggcccaggccgagtgcggggggaaaatga

SEQ ID NO: 2249 - DNA, 393 bp, Zea mays
  Peptide Sequence Number=SeqID_44028
atggatccatggggatgcgtggtctacgagatgaaattgaaatatggattaacgtgcagatacatgtgtcaagcgtttgaacgcattaagcacatgccgagaaatatggtaaatcggttctctggaggatatggttgctggagtgacttggccatctaccttgccaccggaaaaacggaaaaggttgaaggggagggagtaactaaaattccaattcgggatgaagtacccctggctagcatggagccgaagggacttattctgagtaaatctttgaaggcccagaaggacgccgaggacgaaattgaaatatcgaagcgtgaaataaccgaagctgaacatgacagagttcagaagaatgttgatgagcttcgggaatcgaaggaacaatga

SEQ ID NO: 2250 - DNA, 216 bp, Zea mays
  Peptide Sequence Number=SeqID_44029
atgaggagaccgtcgtgtaggtgtcgtcgtgctgaggcgtgggggaatatcggtggttcgctcacgcgcgagggatcacattcgttgtgcttccaagtcacgggagatcggggtcgcaagatgcgtgggagccctgtgccgcagccgatgctcggccggattgaagggaggggtgaggatgactcatgggccatagatcatgaaataagcgactaa

SEQ ID NO: 2251 - DNA, 1290 bp, Zea mays
  Peptide Sequence Number=SeqID_44030
atggacaagatggttctgaagcagaacatggccccgggacgaagggcgatcttgcacttggaggttatcatcatgggtcttatgcgtcggctaatgggaaagcctaaacgaaaagatgagcattatatttccctccatgatgtacgagaagcgacaaacaatttcaatgacgaaaatgtcattggaagtggagggtttgggaaggtttatcgaggatatttgaaagatgggaccgaggtggctgtgaagcgaagggacaaggattcacgtcaaggagcagaagaattcgaattcgagaaggagctgctgttcaggctggaacaccccaatttggtttctctgatcaagtactgcgacgaaaagggtgagatgatcttggtttatgagtacatgaaagaaggtactctacagagccatctgtatggctccaataagcctccactcagctgggagcagcggttggaggcttcgacgggagcagcgaaggggctgaactatctgcattccaatggcattatccaccgtgatgtcaagtctttaaacatcttgctggatgagaacctctgcgccaagatgggtgacctgggcatgtcaaaggcaggtcccgagttggacaaaactcatgtcagcactcgagtgataggcaccattggctatcttgatttacaatattggatgacggggcatctgtcagtcaagtctgatgttggctcttttggagccgtcctgctagaggtgctatgtggcagggcagtgattgaccacagactttcagcggagaaggtgaacttggtatgctggggaaagaaaatgctggaggaagggaatgtggccgaaatcgtcgacgagaagattcgagacacaacccacccgcataatctggccatgtttggcagcattgtgttaaggtgcctggcagaagagaacgcggagcggccaacgatggaagaggtgctcagagacctggagtgggagctgggcatggttcgtgctggaaacccaccagatgagtctgtccatggcagcgccagtgtggctgctgaaaactcgggtgagtctggtcatgccgccgtctcttctcaggagaagaaagtcaaagctttggaacggtcccaaggtaaaacttacgagagaagtccaagcgtatctcatgaactctccgccacatccacgagccgtgcggcccgcctgtccggaagtcgattcctgcagggtcgcaatggcaatgccatgaagatgaaaggtcctgtcgagctcgagagcatcagtgaagacgagaactgtttctga

SEQ ID NO: 2252 - DNA, 294 bp, Zea mays
  Peptide Sequence Number=SeqID_44031
atggctttgcctttggctgttgcttcgcttctcggcgcctgttcgtctcagccacggctttgcctttggctgttgcttcgctactcgacgcctggtatgctggtggaggtggggtttttcaacgtgaagtcggagctgctatgtcaggggatgtggctcgacaacaataacatgaggcgaacctcccttattcgtggtccagaatgttttgaaggtcgggcaaaaccggaggcagggcggagggccaagattggaagtcggagctgctctgtgccttgtgcccggcaacgatga

SEQ ID NO: 2253 - DNA, 504 bp, Zea mays
  Peptide Sequence Number=SeqID_44032
atgagcggttaccgtggaacaccggcgctgcgcaaggatgcagagtggcggcacaccggcgggcgggagtggggctccttcttcgtcgccggcagcggcacaacggtgatgtacccggagcacgcagtggtgccacacttggagagagcaccggtgacggttgtggacgcggagtgcggcacacttggagagaggaaggggcatatgtggtgtgtagaggtagggagagaggagggggagcaatggggggaaggcagccgcgagacttcatggatgagatctttgagggagaggatgggaagaaagagggcgcggagggagcggctgccatggatggaagggggcggaaggagcgcggctgccatgaagggggagcggggcgcgactgatgggcgatttgcggcggatctctggctcgatttgtgggcggggacagaagccagcggggtgcggctagtgggcgatttgcgggaatctctggtgcttttttctatgaagctctag

SEQ ID NO: 2254 - DNA, 219 bp, Zea mays
  Peptide Sequence Number=SeqID_44033
atggcgaaggaggaaaaaagtgttggctggactaaagagcatgctcagcttcttaaaagctttggtgttcaacatcttgttgtcgcagtcaacaggatggatgttgttgcttatgcaaaagaaaggtttgatttcatcaaacgacaacttggtggtttccaatcactcccaatattcgttgttacaaagaaggcccttgcaagtacattggccatctga

SEQ ID NO: 2255 - DNA, 288 bp, Zea mays
  Peptide Sequence Number=SeqID_44034
atgtccccgaccaacaccaaccggccacaagtccgcaacatcctcgccaagcacccacctgctctggtcatgacaccagtggagtgcccggctcggcgagcacaatctcgagacacccttacagtagagttccaaccaagtatgcggagagcatcaaggactcaccaagttctcggtgcgtgcactaaaccgctcggggaagatacaggttggtcggtcgatggtgaagttgtccacggcgctggcctgccgcggcgcgacgatgttctggactccacgccatggtag

SEQ ID NO: 2256 - DNA, 321 bp, Zea mays
  Peptide Sequence Number=SeqID_44035
atgagccgcgaccacgatcaagtctggggccccgaccacgcaaagcccgacgatccactgtttggaagcgatcccgaccaccgttcgggccagcctgaccccggcgatcagccagtctccaaacagagggatgtccgccctcaattgcagcttcgccaacaccagccgtcagcacctgagcgaaagatcgcttgggagctacggagtatggggaaggcggcgcaaggagatcaggctgtgcaagaatctgtggccgaatattgtgtctggttctacaaaagagacgctgagaaagcgatcttagacctgcgattcgattaa

SEQ ID NO: 2257 - DNA, 1902 bp, Zea mays
  Peptide Sequence Number=SeqID_44036
atgaaaaagcaccacaagtttctctttttcttccaccgctatatccatcgccgaacatccaagccctacacctcggcagctcaccgcgccgtccccatatccttcccctccagccccgcctcctccaccggccttcgcgaactcgacctccttcacgcgggcgagctcgcgccgaccccgcgcttatatcactccatcatcgctgcttgcgcacagttcaagaacctcgccggtgctcgtgccatccacgcgcacctgtcccgctcctgcctcgcgggcgatgctttcctcctcaactcgctcatacacatgtattgcaaatgcggcgccgtgtcggacgcgcgccacgtgttcgacaaaatgcccagccgggacgtggtctcatggacctacctcatcgcgggctatgcacagaactacatgccggcagaggccattgggcttctacccgacatgctcagggcgcggttcaggcccaacgggttcacgttcaccagcctcctcaaggccaccggcgcctgcggtggctgtagcattggggagcagatgcatgctctggctgtgaagtacaactgggatgaggatgtctatgtggggagtgcacttctggacatgtatgcacggtgtgaacaaatggacatggccattatggtgtttgaccgtctggtctcgaagaacgaggtgtcttggaatgccctgattgctgggtttgcaaggaaggccgatggagagaccacgttgatgaagtttgcagagatgcagaggaatggatttggggcgacacactttacgtactcgagcatgttctctgcatttgctcgtataggtgctcttgagcagggcagatgggtgcatgcacatttgattaagtctgggcagaaactaactgcctttgtggggaacactatgcttggcatgtatgcaaagtccgggagcatggttgatgctagaaaggtgtttgatcgtatggataagagggatctagttacttggaacacaatgctcactgcacttgcacagtatggtcttggaaaggaagcagtcgctcattttgaggaaattagaaaatgtggcatccagcttaatcagatcaccttcctttctgtcttgacagcctgtagtcatggaggcctggtgaaggagggcaagcactactttgacatgatgaaagactataatgtgcagcctgagatcgatcattatgtaagctttgttgatcttcttggtcgagctggcttattgaaagaagctctgatctttgtgtttaaaatgcccatggaaccaacagctgctgtttggggagccttgcttggggcttgcagaatgcataagaatgctaaaatggggcaatatgcagctgatcatgtctttgaacttgatccagatgatactggtccacctgtgctgttgtataacatatacgcttctacaggtaaatggaatgatgctgctagagtgaggaagatgatgaaggcaactggtgtaaagaaggagcctgcatgcagttgggttcagatcgagaattcggtgcatatgtttgtggcagatgacgatacccatccgaaatcaggagacatatataggatgtgggaggagataaacatgagaattaaaaaagcaggatatgtccccaatacagctcatgtgcttctgcatataaatgagcaagagagggagacaaagttgaagtaccatagcgagaagattgcacttgcatttgcgttgatcaacatgcctgcaggggcatcaattcggatcatgaagaatattaggatatgtggggattgccattctgcattcaaatatgtctccaaagtattcaaaagagagattgttgtgagggacactaacaggttccaccatttcagcgaaggctcttgttcctgtggagattattggtga

SEQ ID NO: 2258 - DNA, 1428 bp, Zea mays
  Peptide Sequence Number=SeqID_44037
atggctaacgacgtgggggtgtccacgccggatgtagggcacgaagcggcggcgctgagcggcgggacgggggatgaggagccattggtgtccaccgggacggaggagccgccggcaacggaggatggggtgccggcggaaatcgaggaagaggggaagggaccggcggcgccattggaggggtcaccggcggtgatcaccgtggaaggagaggaggaggtgaagtggctggggcattactcctctgcgcagaccattctcatcgtcggcgacggagacttctccttctctctggcgctggccaccgcattcgactccggtgccaacctcgtcgcgacgtccctcgacacctatgaggtcctgaagcgtaagtacagcaaagcggaggcaaatatagtgattctgaaaagattgggcgccacggttttgcatggtgttgatgcgaaacgaatgaggtttcacactgacttgaagaacagacggtttgatcgtattgtctttaattttcctcatggtggattcaaaggaaaagagaatgacttgcgtatgatcaacttgcacaaggagttggtgtgggtttttttccgcaatgcacgccaccttgttcggcaacttggtgaagtccatgttacccacaagtctggggaaccatacgacagctgggatcttgagcacctggcctctgagtcttcttttgctatgtttgacaaagttccttttcgaagggaagactatccaggttataatcaaaagagaggagatggtaagaggtgcgacaaaccttttgatcttggtgcatgttgcacattcaagttccaaatcagaaacttgaagaagcagaagcaaatgaataggaggtctcgtttaatcccaaaccttgtaggcagcaactttcatccaggccattcggtaactgacaggggggtatttcatccagttgcacctgttgaagcaaggtcttggcaccatttttctccgccagctcacacagagagcatgctgatgtctccacagccttacacagttaatcaatggcaacggtcaggttttccactgaactctgatggcattgtggctggaccttatttgcataaacaggagagttgccacccggtggtgagcatgccaggcccatggctgaatgatttgcccgctcaaggtggcattcctccacctctaccaatgagcagaatcccatctcctgatctccttgcacctcgggagcagccttggtatcagcagagaactattcttgatcacccaggagtcgatgactacttctttgcccgggaacaccaaatgagtctacagagggagtatgaaatgaagaggcaagtcattccattggaacatcgccgtagggacagggagtctgttgagaagctagagtggctgcacaggatgatcgcattgtatggtaggaagtga

SEQ ID NO: 2259 - DNA, 690 bp, Zea mays
  Peptide Sequence Number=SeqID_44038
atgcgccatggcccatggcccaacaaggagcggaacacgggccacggagactgtaattcgtcgggctcatccgccttgtgggggcccctcaaccgagtcgtccaagagaaggttttgaatgcactgcgacgcttggactccgactctccgtgcatcgtccactaccagtctaccactctacccacaagagttcatggcgttcggggcagcctcaccacttcaccagcggtagggcacgactcggcgccggcggcgaacggcggcggatcgagggagggagcggggcctgcagaggaaggggtgttgggaatgcgggtagtggagggggcaccggaagctgacgaggaggaagagaagtggctagggcaatactcttctacgcagagcatactgctcgtcggcgacggggatttttcgttctcactggcgctggccacagggtttggctccggggccaacctcgtcgccacgtcgctcgacacctacgaggcactgggcaacaaattctgcagagcgaagtctaatataacagccctgaaaagtttgggagctactgttttgcatggcattgacgtgaagacaatgaagttgcagattgacctgaaaaacagacggtttgatcggattatctataactttcctcattctggcttcaaaggaaaagaacatgaggtgcacatgatcaagtaa

SEQ ID NO: 2260 - DNA, 582 bp, Zea mays
  Peptide Sequence Number=SeqID_44039
atgtccggtgcgccagccacgtcaccaaagccgttgggattcgaccgttggagttctgacttctgggcccgcctggatgtccggtggcgcaccggacactctacatgtccgattcccgaggctgccaagttccagagccgcgtcctcttggagcaccggacactgtccggttatgactcaaatacaaaggcgtatagagtcttcaacaaatcatcgggtttggttgaagtctctagcgacattgtatttgatgagactaatggctctccaagagagcaagttgttgattgtgatgatgtagatgaagaagaagttccaatggccgcaatacgcaccatggcgattggagatgtgtggccacaggaacaagatgtgcgagatcaaccttcttcctcaacaatggtgcatcccccaactcaagacgatgaacaggttcatcaagaggaggcgagtgatcaagggggagcacaagatgatcatgtgatggaggaagaagcacaaccggcacctccaacccaagttcgagcgatgattcaaagggatcatcccgtcgaccagattttgggtgatattagcacatag

SEQ ID NO: 2261 - DNA, 1956 bp, Zea mays
  Peptide Sequence Number=SeqID_44040
atgggcccggcgccgcccgggtggcggggaatctgccaggaccagcaggcctctgacgacgcgcaggttcgctgcaacaggaagctgatcggcgcgcggttcttcaacaaggggtacctggcgacggtggggcggcggcagcagcagcaggaggtgaacccggcgagcacgcgggacacggacgggcacggcacgcacacgctgtccacggcggcggggcggctcgtcccgggggccaacctcttcggctacggcaacggcacggccaagggcggggccccagcggcgcacgccgccgcgtacaaggtgtgctggcgccccgtgaacggcagcgagtgcttcgacgccgacatcatcgcggcgttcgacgccgccatccacgacggggtgcacgtgctctccgtgtccctgggcggctcgcccgccgactacttccgcgacggcctcgccatcgggtcgttccacgccgccaggcacggcgtcaccgtcgtctgctcggccggcaactccgggcccggcgccggcaccgtgtccaacaccgcgccgtggctgctcaccgtgggcgcgagcaccatggacagggagttccccgcgtacctggtcctcgacaacaacaagcggatcaaaggacaaagtctctcgcggacccgccttcctgccaacaagtactaccagctgatcagctcagaagaagcaaagggagccaatgcaacagtaacgcaagcgaagttgtgcatcggggggtcactggacaaggcgaaggtcaaagggaagatagtcgtgtgcgtccgtgggaagaacgcacgagtggagaaaggtgaggcggttcaccgggctggcggagctggcatggtgctggcgaacgatgaggctagcgggaacgaggtcatcgccgacgcacacgttctccctgccacgcacatcacctacgctgatggagttacgcttttggcctacctgaaagctacaaggctaatgcccgagcccctttttgatggcccatttgctcattttggcttaatgttggcatccggctacatcaccgtcccgtacaccgcgctggacgcgaagcctgcgccgttcatggccgccttctcgtcgcagggccccaacaccgtcacgcctgagatcctcaagcctgatatcaccgcgccaggggtcagtatcctggcggcgttcaccggggaggcgggaccgaccgggctcgccttcgacgaccgccgtgtcctctttaacgccgagtccggcacctccatgtcgtgcccgcacgtcgccggcatcgccggactcctcaaggccgtccatcctgactggagccctgccgcgatcaagtcggcgatcatgacaaccgccagggtgcaggacaacatgaggaagccgatgagcaactcgtccttcctccgcgcgacgccgttcggctacggcgcggggcacgtgcagcccaaccgcgccgccgacccgggccttgtctacgacgccaacaccacggactacctcagcttcctctgcgcgctgggctacaactcctcggtgatcgccacgttcatggccggcgccggcgacggccacgaggtccacgcctgcccagcccgcctgaggccggaggacctcaactacccgtcagtcgcagtgccgcacctgtcccccaccggcggcgcgcacaccgtgacgaggagggtgaggaacgtcggccccggtggcgccacgtacgacgcgaaggtccacgagccgcgaggcgtggcggtggacgtgcggccaaggcggctcgagttcgccgcggcgggggaggagaagcagttcaccgtcacgttcagggccagggaagggttcttcctgccgggggagtacgtgtttggccggctggtgtggtcggacggacgcggcaggcaccgcgtgaggagccccttggtggcgagggtcgtgaacaccaagaagaagcacatttccatagcttga

SEQ ID NO: 2262 - DNA, 174 bp, Zea mays
  Peptide Sequence Number=SeqID_44041
atggctacttgctccacaccgattgacacccctaataagcccgtccgctaccacagagccacaatagaggcgccaatacatctcccactcatggcctacgagcctctcgggccgcagcacatttatggctcgcatgtcccctcctacgacgcactcatgacctatcaggactag

SEQ ID NO: 2263 - DNA, 420 bp, Zea mays
  Peptide Sequence Number=SeqID_44042
atggccctcacttcgactggcgataggaaccagtggatccctcggtggtgtatgcaagtggtggtggaaaagcgcatggatgatacacactcttcgacggattcattgactcgttgtcgggattggggactcaacagttcaacacccctccgactcatatacctgcacctagagatagggttacgcccgaagcaggtggtagtgggtctgatcccacaaaaggggtgttacaagcgacactccgggacatacgcgatcctcaagagcgaggtggaccatctcttggcggcggtcgcgatgttgaagaaatggggtctctctggggcgcggctagggattgggcccccggtgcgctaccctctgcccctcctagaggtcgttttcgccaataaggatcaaaagaggaaacgaggtgcatga

SEQ ID NO: 2264 - DNA, 462 bp, Zea mays
  Peptide Sequence Number=SeqID_44043
atggtccttaaagctaatgctcgctttttgaaatcacaagaagaattgagaaggtcagatgatgggtcaactacaattggtgatgcaaaggaagaggttgttgcagcaatcattgttgtcaagtcgtctactctatttcagtctatcatacgtggtaatttgcaatatgcttctctaagtgcactaagaaggctttcacttgatcctgcaggctatgaagtgctataccatggagaggattttgatcttctcaacatgttaaagaaggaagaagaaatgcttctagctgtaaaggaaagtaaggcaaatagaacgtcgaaggagctcgttgaatatggcgagcaattgcttgggatattccgtgaggagcttgcaggctatgaagtgctataccatgcagaggttggcagaaactttgagtcaccacaaataatgactgaaataggtagtttgaaactttaa

SEQ ID NO: 2265 - DNA, 366 bp, Zea mays
  Peptide Sequence Number=SeqID_44044
atgtcgaaggtgaagaacaataatggctatcttggagtcactgagccaatctcgctaagtcgacagactgagaaggaccttatgcagatagctgaggttaaaaaggagtacctaatattggattttatctgtatcctaccacaactttcttggaaaaagatggaaggtccgccacctcctcccgcgccgtcaatggaaggaaagcctaatctcctcgcccgcagtcctaggaaggtccaccacctcaccacctgccgcgccgcaacgtcaatggaagaattagagaactgttgggtgctatgtgttactaatacattgggaattagggaactgttgggtgcttgtgttactgatgtgcttttgtag

SEQ ID NO: 2266 - DNA, 339 bp, Zea mays
  Peptide Sequence Number=SeqID_44045
atggtgcggctgcttttccagtcacatgccgagacgaaacgcgctggtgacaacaggaacgccgccgccgccgtggattcaggaatcgttcttggatctgagcaggagggggacaagctaacggcgggacgtgtggagctatcacgtgtgcccgacgtgcagagtgtggcagaacaacgctgtcttggagaggctgtcacgtggacccacatgtggatggggcgggttgagggcgcggctagcatgatagtgtggcgatcgacgatccagattgaacaacagcgatggacgatccagattgaacgaaggcagaacggcaggctacccttagagccttaa

SEQ ID NO: 2267 - DNA, 195 bp, Zea mays
  Peptide Sequence Number=SeqID_44046
atgggattactcggcatctacagtctggggtcggacccctatgagacggacctagaatcctacgtgtgccatatagaccttcgaccagggaaggtccgctgctaccacgtgcccgggacgaaacaggtggaacatgtacctccaagtgccattcgggcccccaacttggagaggtccaggggcgccacaggctag

SEQ ID NO: 2268 - DNA, 420 bp, Zea mays
  Peptide Sequence Number=SeqID_44047
atgagtagcctgatccgcttgctcttcaccctcgccgcggccatcggcgcggcctcgctcctcgtcgcctcactccgccgccgcgcgccgcctcccgggcttcccgccaagctcgtcccctcctcccacatggcaggacgcaaccggagtttcgtgctgtggctgcacggcctcggcgactcaggccctgccaacgagcccatccgcaacctcttctccgccccggagttccggctcgccaagtggtcgttcccctccgctccccgcgcccccgtatcatgcaacagtgctctgacattagctagcgttttgctttatccgaagaagttaggtggaggagcagtgttcagtgggtgggtgcctttcagttcatcagtcactgagaggatttcacctgaagcgaggaagatgtggttctga

SEQ ID NO: 2269 - DNA, 948 bp, Zea mays
  Peptide Sequence Number=SeqID_44048
atggggccggactcgtcgcccaagaagttgagcctcaaggagcagcgcgctgcctacctccagtggttcgccctcgccgacgaagacggagatggccgtctgacggggaacgatgcgctcaggttcttcgccatgtccaacctctccaagcccgagctgaagcaggtttgggcgatcgctgattccaaacgccaaggatatcttggattctacgagttcatgactgccatgcagaaaaagaactctgggagcaaggtcgagtctgctattgttgcatgtcatccatcagaagcacctactatgactgccagctggtttaactccaagtcaggaaagaagtttaatttgttctacaacaaaggcgctcatattgggccagagcctacaacggacaggtttgttgtcatcactctgatgagagtgtacggagcactgctgtggtcgctcgggaaagtcctgaacacaccagaagtcatgcgtgtctacataggttcattcaacgacaagccgatcagggagacagcggctgggccgctgggcatggagctgttccagaaggaacaagatgacttgctctcggacctgaacgacatccccaagaaggcctgcgaccgtcggatcaacgagttcgtgaagcgggcaagggcggctaaagtccacgcgcacataatcagccatctgaagaaagagatgcctgcactgatgggcaaggccaaggctcagcagaagctgctcgacgggctggatcaacagttcgccaaggtccagaaggagctgcacctgccgccaggggacttcccgagcgtggaggagtacagggagctcctgagcgcctacaacttcgacaggttcgagaagctgaggcccaagatggtccagggcgtggacgacatgctggcctacgacatcccggacctcctgaagaagttcaggaacccctacgactga

SEQ ID NO: 2270 - DNA, 105 bp, Zea mays
  Peptide Sequence Number=SeqID_44049
atggcgcagggtcgtgttactccttgctggaatatatatctcacccctgggagaggtgcaggaatgacacaatttcatgctccctacgtccccaatttaaggtaa

SEQ ID NO: 2271 - DNA, 297 bp, Zea mays
  Peptide Sequence Number=SeqID_44050
atgcaggcggcatgcaaccgcgccaagtgggtgcacatctccgactcccagcgcgcccagcatggaagcccaggcccacgcgtcacgcaaccggtgcgccggatgctacgtgcgagcaactgcaccgccactcgcgccgctgtcacgcctcctcgactgcggaaccagtaccgcgactcgaggcaaccctacgcacgacctagcagcgccagcctggcgcgatgggaccaggaaagggggataccccgaaaagggtccttctctgtgaaggagccaggctccgagcctccctactga

SEQ ID NO: 2272 - DNA, 591 bp, Zea mays
  Peptide Sequence Number=SeqID_44051
atggttcagaagaagaagaaagcggccgcggcgcccaaactccgcaagcttccgaagcgcgacgcggataagaagctcgggaagaagggtgacatggcagagttcagggcgcagctggactcccttgggctgaagatagtccaagtcacggcagatgggaactgcttcttcagggcaatgggtgaccagcttgagggcgatgaggaagagcacatgaagtaccgagatatggttgtggattacattgtgaaacaccgtgaggagtttgagccatttatcgaggatgaagttccgtttgaagaatattgcaactctatgctaaaggatgggacttgggctggccacatggagctgcaagccgcttctctgctgacaagaagaaatatatgcattcacatgcttaattcaccacgttggtacataaacaacttttctggccgtgaagctactaacatggttcacttggccaagggcgggcaagggaaaggccagagaggaaagaagcagaagaagaaagagcaagcggaagcagcagctgccaaggccaaggagtctgcaattgtgccagacctaggagctctttgcatctga

SEQ ID NO: 2273 - DNA, 1134 bp, Zea mays
  Peptide Sequence Number=SeqID_44052
atggctgccctgggcctgctcctgctcctcctcctcgccgtcgtcggtgccgccaacgccgcggcgcccggcggcagaatgtccatcatctcctacaacgaggagcacgccgcgcgcgggctggagcggacggagccggaggcccggacgctgtacgagctctggctcgccgagcacggccgcgcctacaacgcgctcggcgagcgcgaccgccgcttccgcgtgttctgggacaacctccgcttcgtcgacgcgcacaacgagcgcgccgcggagcacggcttccgcctcggcatgaaccagttcgccgacctcaccaacgacgagttccgcgccgcgtacctcggcgccaggatccccgcctcccggagaaggggaaccgccgtgggggagaggtaccgccacggcggtggcgccgaggagctgccggagagcgtcgactggagggagaagggcgccgttgcgcccgtcaagaaccaggggcagtgcggaagttgctgggctttctctgcagaaaatgccaaggttgtgagcatcgatggctttgaagatgtgcctgaaaacgacgagaaatcattgcagaaggcagttgctcaccagcccgtcagcgttgccattgaggctggtggccgggagttccagctgtacaaagcgggtgtctttactggaacttgcaccacgaatcttgaccacggtgtcgtcgctgtcggctacggcaccgaaaatgggaaggactactggattgtccgcaactcttggggtgcaaagtggggcgaggatggttacatccgtatggagaggaacgtcaatgccaccactgggaagtgcgggattgctatgatggcatcctaccctaccaagaagggcgcaaaccctcccaagccgtctccaacccctccaacgccgccgcctcccccggttgccccggacaatgtctgcgatgagaacttctcctgcgcagcgggcagcacctgctgctgtgcgtttggtttcaggaacgtctgcttggtctggggttgctgtccgatggaaggtgccacctgctgcaaggaccacgccagctgttgcccgccgggttaccctgtgtgcaacgtcagagccggaacttgctcggtgggctcctttgaaatgtag

SEQ ID NO: 2274 - DNA, 507 bp, Zea mays
  Peptide Sequence Number=SeqID_44053
atggttgtgcggcggctgggcggcacggggcgcgcgctgctcacgctccccaacatccggaggcgggcgtccaactcctgggccgccgtctgcgacaccttcttctccaccaaggtgacgactgacaacctctccccatgtgtccctatcgcccctgatgtgattttgcttgatccgctgacccgcagcaagtgttcgagagccaccgcatcgtcttcaccgtcggcacctcaatcgcctccgtcctcacggcttgggccggtacgcgttaggctggcgaggcggtgcttggtacgctcgaagggccttcagaagagagcagcaaaagctgatgatgggtcacatgaagtcgtcacagaacaggtggcactggcggcccttcaacaggctcaggaacagcagtatattaaggtcataatgcacccaactgcatgcatggaacaactgactgacgataggattgagttgagacagccatatggtggcagatcgtttgacttcccgtga

SEQ ID NO: 2275 - DNA, 504 bp, Zea mays
  Peptide Sequence Number=SeqID_44054
atggcggtggcctcgacctcgccgctgtccgccaagcccgccacggccccttcgccgcccgctcccggatccgggctcctcgctctcggcgttcgccgcgcccccgccactgccgcgtggaggaggctccgcgtggaggcgatcaggacgcagcgaacggaggtgcccgtcgaggagtccgcccccgccagggacgccgccgctgccgcgcccctggacggaaacggagccggagcggacggctccgtggttccttcctcggacgacagctgggttgtcaagctcgagcagtcgttcaacattttcgccacggattcggtgattatggtactcaagggcgtgtacggtgatcggtactacgccaggttctttgcgctggagacgattgcgagggtgccggtaggcgggcggcgggccatgtcggcatcggacacggcgaggccgcagcccattgcggcggcgtccaggctccgcttgcgtcttggactggatgttcgggtgtag

SEQ ID NO: 2276 - DNA, 192 bp, Zea mays
  Peptide Sequence Number=SeqID_44055
atggaggatgcaaagcccatcaagatactgatgggaacaaacgagcacttggacctcgacgcaggaggtaagtccgtagatcaaaagaatgtcttcctcggacctcataagtccttgtgcattgatgcatatgttgagggggaggatttgctacaacttgaccctttgagactaatgtttttgtttgagtga

SEQ ID NO: 2277 - DNA, 189 bp, Zea mays
  Peptide Sequence Number=SeqID_44056
atgagctggggaatggaaccctcatttttccttattattaaaccttctctggccatcgcgggaatcccaaactggagggcggccaccgcgtcggcgaccaagttgacggcggccaccacgtcggcgaccaagttggacggcggccaccgcgtcggcgaagacgaggaagagtggaggatgagagcctga

SEQ ID NO: 2278 - DNA, 468 bp, Zea mays
  Peptide Sequence Number=SeqID_44057
atggccgccgcgggggagcgccgcaagctttgtggctacctacgcgccgtggtgtccatccccggcggggacgtcgcggcggcggcgtctatccttccgctgtccccgtgcacgctctccgcgtgcggggccgtggcccttgcgccgctccccgacgacgtgcgggcccagccgcggtggcccaggtcgcgcgcccccggcgtcgtgcgcctgctcaggacgctcgtggcgaaccgctgcgtggaggtggagggtacgcttctccgggtcgtgaccaggaggaggcctggggaaggggaaggggacggcgccgcggtggaggccagggccgtcgtgctgctcgacgtctacatacccgtcgccgcgtggtccggttggcagttcccgcgctcgcgctctgctgccgccgccgtcttcaagcatgttaggtgcaattttgtcgatcccattgccatttcggaggaataa

SEQ ID NO: 2279 - DNA, 104 bp, Zea mays
  Peptide Sequence Number=SeqID_44058
atggcgtccggtcaggaaagcagggaggagctggcgcgcatggccgaggaggggcagaccgtcgtccccggcggcaccggcggcaagaccaatggcgatcgcgc

SEQ ID NO: 2280 - DNA, 915 bp, Zea mays
  Peptide Sequence Number=SeqID_44059
atgccgttcggcttgaggaatgcgggtgcgacgtaccaacggtgcatgaaccatgtcttcggcaaacacattggccagacggtcgaggcctatgtcgatgacattgtagtcaagacgaggaaagccttcgatctcctttccgaccttgaagtgacattccgatgtctcaaggcgaaaggcgtgaagctcaatcccgaaaagtgtgtcttcggggttccccgaggcatgctcttggggttcatcgtctccgagtggggcatcgaggccaacccggagaagatcgcggccatcaccagcatggggcccatcaaggacttgaaaggcgtacagagagtcatgggatgccttgcggctctgagccgcttcatctcgcgcctcggcgaaagaggcctgcctctgtaccgcctcttaaggaaggccgagtgcttcacttggacccccgaggccgaggaagccctcgggaacctgaaggcgctccttacaaacgcgcccatcttggtgccccctgctgccggagaagccctcttgatctacgtcgccgcgaccactcaggtcgacacccagctcccaatagctccgatccaaccggaactctggaccatgttcttcgatgggtcgctgatgaagacaggagcaggcgcaggcctgctcttcatctcgcccctcggaaagcacctacgctacgtgctacgcatccatttcccggtgtccaacaatgtggctgagtatgaggctctggtcaacggtttgcgcatcgccatcgagctaggggtccgacgcctcgacgctcgtggtgactcgcagctcgtcatcgaccaagtcatgaagaactcccactgccgcgacccgaagatggaagcctactgcgatgaggttcggcgcctggaagacaagttctacggcaatacaaaataa

SEQ ID NO: 2281 - DNA, 207 bp, Zea mays
  Peptide Sequence Number=SeqID_44060
atgactccaattcaagtgggggaggatgatgaggatatcactcccatacaaacaatgaatcttggagaggacgaacaaggactttataaaggccaagatatcaaggaggagaagctaggacgttcacaacaagagaaagtcaagttcgacccaacttcgtctccaccttggagttcaggacaagtctgcactaaaacagatgcttag

SEQ ID NO: 2282 - DNA, 261 bp, Zea mays
  Peptide Sequence Number=SeqID_44061
atggcgctgaacgcaaccacctacgcggaattccgggtcggccaagctcggactccgccgctatgctataaaaccgaggccgatccccctagcaacagctcccatggttgcgctggtggagaagcgcctgtcacccaggaatttctcaaccgaaacccacgaccaccgtcgaccgcacacaaccgtggatcgcccgcctacgcgcatcatcttcggtatggctccctcaacggcattcgttttcgtacccgcatcgtgtaa

SEQ ID NO: 2283 - DNA, 336 bp, Zea mays
  Peptide Sequence Number=SeqID_44062
atggcctccaagaaagtgaccaccagagctattacctctttggacgacgctatgaaggtgaccctcgccgatgacgcctttcaggttgcaaccaagaacaacaaagcagggttcagaggaacccctcagaacgatgtcccactaggttttgctcccgtggaggccgaaggcattatggaagaaggcgaagtcttgggcatctcagtcgaagatcaactcaaattacgagcactttgcgtaaaaaacaaccacctacagaaagcaaaaggagatactcatagccaagaggcagcaaaccaacatgcaagccagagtaaggcagatggtcctagatga

SEQ ID NO: 2284 - DNA, 282 bp, Zea mays
  Peptide Sequence Number=SeqID_44063
atgaggaagaagacaacattacatattgtctacaacggcgaacaatctgcttcacccaggccaaatcagcggaggcaagcgttttcgcggcgtacaagtagagaagggtacttcgaccgtaccagcgttgaggacctcaaccgcgaccttaagaggggacaaactaagggccacactagaagagagggctcattacagctccccatacatgtcccaaaggctcaattcttccctcgacagcgaagtccaagtcttgacgaagtcaagggcgtgacacgatag

SEQ ID NO: 2285 - DNA, 177 bp, Zea mays
  Peptide Sequence Number=SeqID_44064
atggaggacacgaagggggtttcgcggatgcctccgaccatcctgtgctcgcacttctacgtcgccttcccccagtttaaaggacgggatgctgtggcgttctttagggaggtggaggctgaggcggtaaagattgttggcaagtattcgttgaagaaggagatgttgaggagctag

SEQ ID NO: 2286 - DNA, 330 bp, Zea mays
  Peptide Sequence Number=SeqID_44065
atgtgcattaccgtggtggtgacgaaagttcggcgagcaatcgccgatgctcccacccatgattctgcccaaagaggccatgggaatgttccttgcgatcttgtgaagcttctttgccatccccagagcccgaacatagtcgatttggtggtgcagaggctctcctcattgcgctctcttggctacgacatgctccctgctcgctccgaagactttcagttggtgtcaagggtgcgggatgcctgggatttatacttcgaaccagggggaggccgaggtacacattcgcagcgggagtttgttgtggattctgttgcgcataatctgtga

SEQ ID NO: 2287 - DNA, 213 bp, Zea mays
  Peptide Sequence Number=SeqID_44066
atgacccagttcttcgagttccacgagattgaagaccctgagcatctgtttgaggaactgagtgtagttcgcttcgccatcgtgacattaatggggctcggtagatggttgggtggtgatgaggatgatgattttgattatgactatggtaatggtgaagatgaagtcgtggaggaggacttccaggagttccaagagtatgatgagttctag

SEQ ID NO: 2288 - DNA, 807 bp, Zea mays
  Peptide Sequence Number=SeqID_44067
atgcagtctgaagcatggaatggatacagaaagccaccatcagaacaaaagtactctgaggatgtcggtcatatccaccaaggactcaatttcgagcccaccagggaggagctggatagcttatcgaaagcgtgtagccgactttgggagcttgatatgaaccgtatcgttcctggtaaggactacataatcgactgtggcgaggggaagaaagtttatcagaagggtgatatggcatccgaaagcttgttcagctggctaggcgacgatgtgctaagaaaacccacctactcacgtttttgcgcacttctggataactataacccccaccaggataagcacgaagaaatagtttttgttgaagagatcgccagaacatcgctaattaagtacttgcaccggtacttagtgcagaagggggttgtgcctcaggactatgaggacttcaagaaaatgctgacatccctatggtttgatttgtatggaagaggtggcaactctagctgctctactgcctttgagcatgtgtttgttggtgagatcaaaggaccgggacaaggggaaagtgagcctgattcagagatacagctgctgattgttcagtttgagtggcatggcgtgctgaaatcagtatccaacacgttgattggcgtcagtcctaagttcgaggttgcactctacacgttgtgcttttttgttggaggggaagataaccgcgtcgatattggcccatacagtgtgaacgtcaagtgctaccgattggggaataacaaaattggatcaacctttcccattgcagagaactga

SEQ ID NO: 2289 - DNA, 381 bp, Zea mays
  Peptide Sequence Number=SeqID_44068
atggtggcctgcacgctgttcatccacgacgccaagtccgcctccaccctcatccgctacgccggctccagcggagcctcgccggcgcccaacataaccgagccgccggccggctgggcgactgggcctggtccatcaaccaggccaggcgctgaggttactatcggaagatcatataatacccaagtaatcgaagtagaagaagctttggagaatcatgcaaagagtggtggccttcttaagcaatatgatatagggtttcaaatctctgttcttgttgcgctgacaactactttgatgctcttctgcagccatatccatcagattgatggagaccttgcggttagaaagatgaccccactggatagcaatttagtatag

SEQ ID NO: 2290 - DNA, 399 bp, Zea mays
  Peptide Sequence Number=SeqID_44069
atgggaaagagcaagaaaggcggaagtttgtcgcaccactccggcgacaagaggaagcgcgagttgagtcccccctccgaggactttagtgactccgagtactcggaggaggagttctcctccgagtccgaggggtcgccagcctacgcctcgcccccggtgtcatccgatgacttggacgattcccaagggatcgccgccaaggtgtggacgtatatctgggccgtcgagcactctgggctcgagggctcggatgagtcggagatctcctcggacgaggaggactccttcgactcctccgaggaggggagcggtgatgacgacgacgatgagggcgacagcgacaacaagggcgacggcggcagcggcagggccagtggcaaagcaccaccggcttaa

SEQ ID NO: 2291 - DNA, 228 bp, Zea mays
  Peptide Sequence Number=SeqID_44070
atgggggagtactataggattaggccacctgaggatgctgaggctgataggtccaagagaacattaggggttccctctagtcagatctgttgccacttaggtatctattcactaggtgctacaaagttgagacctataatcaccaagatgggacttgttcgatttgcctgtaccatgaaaagaggttacttggatgccttgggcatagtaggatctagactcttatag

SEQ ID NO: 2292 - DNA, 720 bp, Zea mays
  Peptide Sequence Number=SeqID_44071
atgatcgccggatttggaccccgaggtgagctcccctctccctctctctcttctcctcccccctccccttcttattcctcccgcgcggccccctggcgcgtcccgcacggccccctgacagcccccagcgcgctccctggcggccctcgacgcgctcccgcatggcccactggcacgcgtcctgcgcagcccccggcgcactcccctcgcgaccccagcgttcgtcccgcgcggcccccgacgcactcccgtgcgccccccaggcgagcttctgcgcggccccctggcgcgctccccgcgcagccccccgacgcgctcccccccccccccgcgtcccagcatgcccctgcgtggccccccgacggtgctccctcgtggccttggcagcgcccctcgcggccccctgccccgccctccccgcgcgccccctggcggcgcccctgcgtgaccccctcgtggccccctggcggcgctcccacgcgtgccctggcggcccctcgcacacgcccccgagcggcccctgctcggcccctccccggtggcgcccgccctgtccccgacacggctgcgcgcccccggcgtgactcacgtgtccccggcgcggcctcgcgcagccccagtggtgatgaggatgatggttttggttacgactatggtaatggtgaagatgaagtcgtggaggaggacttccaggagttccaagagtacgatgagttctag

SEQ ID NO: 2293 - DNA, 678 bp, Zea mays
  Peptide Sequence Number=SeqID_44072
atggccggttcaagggataactctgaagtctcccccagcaacaccatagagccaacttgggaaaccttgtcggctgatgaacatctgcagtttgaggagcacaaagagcagctgatccaagaagcaaaggcgaagttcctggtgaacttcaaggtggacaggaacaacaaagtcgttcggcaatgggtgacagatctggcttcgcttcgacctaccacgactacccccgaggaaatgcaggtggatacggaacccttcccaatgaatgtgatcgacttcgagggcaaaaaggttgggcgatgtggaagctcctccgaagccgaggtcgagtctgtcttccgtggccgaggtcgagtctgtcttccgtggccgaggtcgaatctgccttccgtggccgaggtcgagtccgagcccctgggtcgggcgaggcggaggccgtcagctgaggccagggcggagcccgagccctggggtcgggcggagcggagttcgtcgtcttctagggctgagcccaagtccgagccctgggtcgggcggagcggagttcgccgtcttccgggacttagcccgagtccgagccctaggtcgggcggagcggagttcgccgtcttccgggacttagcccgagtccgagccctgggtcgggcggagcggagttcgccgtcttccaggacttag

SEQ ID NO: 2294 - DNA, 801 bp, Zea mays
  Peptide Sequence Number=SeqID_44073
atggccgcgcagtccttcctcctcgccgccactgccgccgccaggtcccccgcggtcttcgccgctccctattcctccgcacgccctttccactcggtccacttcgtcgccggcccgtggggcgccgccgccgccagggcgctcgtcgtcgcggacgccactaagaaggccgtagccgtcctcaagggcgcgtctgaggtcgagggcgtggtcacgctcacgcaggacgacgatggacctacaactgtgaatgtccgtatcactggacttacccctggacttcatggcttccacctcactgctcaggtgggtaaaaacagaaaaacaaactactcgttatatggggcgccaacaaaaaagttgaagccctttgcacctgcgaagcaccaaattctagctacgtccaataattctacaaaccacctgttgaagtcccttagagagcgtttctttggaaatctgctgctgttcaagttgccaagtctaactttaaaaaataaccttttctatcttacaggaccacattttaatccaaacaatctgacgcacggtgcaccagaagacgaagtccgtcatgcgggtgacctgggaaacattgttgcaaatgctgagggcatagccgaggcaaccattgttgatacccagattcctttgactggcccaaattcagttgttgggagagcatttgtggttcatgagcttgaagatgatttggggaaagggggccatgagctcagcctctctactggaaatgctggtggaagactggcatgtggtgttgttggcctgactccattgtag

SEQ ID NO: 2295 - DNA, 192 bp, Zea mays
  Peptide Sequence Number=SeqID_44074
atggccgaggagggccactgccgaagcccctttggctcccctaccacccacgcaccagtgcagcctgcgctgtcggctagagcctcatcgcgctccgtcacctgcttcgccgagcgcctccgcaccgcgtccccgtcgaccgtcgagatacatattaatatgattgcgcgtgatcaaatgttttcgaattag

SEQ ID NO: 2296 - DNA, 357 bp, Zea mays
  Peptide Sequence Number=SeqID_44075
atggagctcacctcggacgatgaagatagagtacgaacagggcgagctccaacagatgatggggcgccagaactgctttggaagttggacgagggcgcgcatccgacgattaccggggcaaggaacaaggcaacgggagcgccagttcctgttttggggcgacgtgggcaagatgggtgcgcccattgtggggaggcagttgaaagggatgacatgtacggcccactcacaggcagcggtggcgctcctctatacgcgcgcgagcgagcgctagggcgaagcaagagcgaggcatggggctacggtgggccagagcgtaggccgcatggggcaggccgcgaggggcgcaagatttaa

SEQ ID NO: 2297 - DNA, 360 bp, Zea mays
  Peptide Sequence Number=SeqID_44076
atgcccggcatggatgccttcgctgctgtgtcactactcgccacactctttctggttcgtgcggcagctgcccatcctccggcggcggctgcggacgccatgacgccgacggactattggcgagcggtgcttcctgagaccccgatgccccgagccatactcgacctattgaccacatctacagtgcttttcgacagtctttgtcgagtgtccgaaaaaatactcgacaaagaaccatttgccgatgaaatgtctgccgagtattctatgccgagggtaacactcgggaaaggctttgccgagtgtcttagacattcggcaaagaacgcgattctgatagtgattgttactgaattctag

SEQ ID NO: 2298 - DNA, 528 bp, Zea mays
  Peptide Sequence Number=SeqID_44077
atggggagaaaatactccccgcggggaaagaaatgggtaaaaaccaatccccatcggggatggcggggccggcctggcccgaacaacgcgtcaaccctagcttccatgcgacccgcgatcgtttcccagttcccacttccgtcaccgccgccgctcgcccgcaggcacgccgcacgccgcgcccgcgcgctcggctacgtggtcgtgcctccctctgcgccgtctgtggactgcgcgtgcgcgtctacgccatggtccctgcaggcctctatcgcggtcccctgcaggcctctgctgcctccgcgtctgctgcgggccgctcgccccgtcgcccgcaggccacagcgcgttgcctgctccggtgcacgcgcccaactgctgctgctgcctgcccatggacgagtggacctgctgctgctgctcggcttcctccggtgcacgacgcagccagccgaccagcggccacgcgcccacctgctgctactgctcggcttcttccagagtccagccagcaacaacagaaaatag

SEQ ID NO: 2299 - DNA, 120 bp, Zea mays
  Peptide Sequence Number=SeqID_44078
atgagcttcggccactcgaaagaaagggccccacagcgcctgccgccggcgagcgcatccccatggagtgggtgcgtcgccgtcggcatggctccaacggatgtcctcgacggtggatga

SEQ ID NO: 2300 - DNA, 2088 bp, Zea mays
  Peptide Sequence Number=SeqID_44079
atgtcgttcggcttgaggaatgcgggtgcgacgtaccagcggtgcatgaaccatgtgttcggccaacacattggccagacggtcgaggcctacgtcgatgacatcgtagtcaagacaaggaaagcctccgacctcctttccgaccttgaagtgacattccgatgtctcatggcgaaaggcgtgaagctcaatcccgaaaagtgtgtctttggggtaccccgaggcatgctcttggggttcatcgtctccgagcggggcatcgaagccaacccagagaagatcgcagccatcaccggcatggggcccaccaaggacttgaagggcgtgcagagggtcatgggatgtcttgcggctctgagccgcttcatcttgcgcctcggcgaaagaggtctgcctctgtaccgcctcttaaggaaggccgagtgcttcacttggacccctgaggccgaggaagccctcgggaacctgaaggcgctcctcacgaatgcgcctatcttggtgcccccagccgccggagaagccctcttgatctacatcgccgcgaccactcaggtggttagcgccgcgattgtggttgagagacgagaagaggggcatgcattgcccgtccagaggccagtctacttcatcagcgaggtactgtccgagaccaagatccgctacccacaagttcagaagctgctgtacgcggtgatcctgacgcagcggaagctgcgacactacttcgagtctcatccggtaactgtggtgtcatccttccccctgggggagatcatccagtgccgagaggcctcgggtagaatcgcaatgtgggcggtggaaatcatgggcgaagcaatctcgttcgcccctcggaaggccatcaagtcccaggtcttggcggacttcgtggctgaatgggtcgacacccagctcccaacagctccaatccagccgaagctctggaccatgttcttcgacgggtcgctgatgaagacaggagccggcgcaggcctactcttcatctcgcccctcgggaagcacctacgctacgtgctacgcctccatttcccagcgtccaacaatgtggccgagtatgaggctctggtcaacgggttgcggatcgccatcgagctaggggtccgacgcctcgacgctcgcggtgactcgcagctcgtcatcgaccaagtcatgaagaactcccactgccacgacccgaagatggaggcctactgcgatgaggttcggcgcctggaagataagttctacgggctcgagctcaaccacatcgaccggcgctacaacgagactgcggacgagctggctaaaatagcctcggggcgaacaacggttcccccggacgtcttctcccgagacctgcatcaaccctccgtcaagatcgacgacacgcccgagcccgaggcaccctcggcccagcctgaggtaccctcggcccagtccgaggcaccctcggctcggcctgcgacaccctcagctcggcccgaggcatcctcggttcagcccgaggtaccctcggcccccgagggtgaggcactgcgcgtcgaggaggagcgaagcggggtcacgcctaatcaaaactggcaccccgggggctacacgcacctgttggtcgccatcgacaaattctccaagtggatcgaggtccaacccctaaacagcatcaggtccgaacaggcggtggcgttcttcaccaacatcatccatcgatttggggtcccgaactccatcatcactgacaacggcacccagttcaccggcagaaagttcctggacttctgcgaggatcaccacatccgggtggactgggccgccgtggctcaccccatgacgaatgggcaagtagagcgtgccaacggcatgattctgcaaggactcaagcctcggatctacaacgacctcaacaagttcggcaagcgatggatgaaggaactcccctcggtggtctggagcctgaggacaacactgagccgagccacgggcttcacgcccgttctttctagtctatggggccgaggccatcttgcccacagacttagaatacggttccccgaggacaaaggcctacaccgaccaaagcaaccaagctag

SEQ ID NO: 2301 - DNA, 480 bp, Zea mays
  Peptide Sequence Number=SeqID_44080
atggcgatgccaaggctagctcaagtgccccggccccaagggaagagctggcggtggaccccgcttcactcgtggcgcctgcggagcatcgcgaggaaagtgtcgaggcaatggtgtcatcctccgctcctgctacgtcggttgggcatggcgaggggaacggtgctggtggcatcgcaccctctgtcgcccattgcgccatcgaagcgtcgcaaggggaaggagctggtgacaacgcctcccccagcatcctccgtgttggcggtggtagttcctttagggcttgtttgggtaatcttggattggagtggattgaggtgtgtgtacatgtcgtgcaagatggtgaaggaagcgaccctcgcgacaaagggaggggccgactattgtggtgatgaacacccctcccataccgaccacaccaacctcgctggtcgttcaaggggacccaagcatgtccgccctcggcgcggttcctcctaa

SEQ ID NO: 2302 - DNA, 147 bp, Zea mays
  Peptide Sequence Number=SeqID_44081
atgtcggtcgccttgtggggtggagcacacggacgatggtcgacggttgaggtgaaggtcatgcgggctcgtgctgatggaccgagagtggttcatacttcaccagtaaacatcctctaccccgtgcaaacattatgtgaagtttga

SEQ ID NO: 2303 - DNA, 750 bp, Zea mays
  Peptide Sequence Number=SeqID_44082
atgctcatatattgtgatggcgtacaaatcgtcctcatgctccccgatacagagtcactgtgggtgatggtcgtggcgttgcctccatccctggacctcagcctggcgttgttcatgggcctaatggcggtcgtgacaccaacgttgctgcagttcttgccgcccaagagcgataagcggacctgcttgtcgtcgttgtccgtggtgttcgctggttctgtctgtcgtgcagcaacttggatcccaactgtcatgcccatagcaagatatctggagctagttccctgcagacttcacatcagtttgcataaaactcaacaacagtgggtttgccatttgaaagagcctgtagatgaatttaccaggcatcttataggatttttcatctttctcgctctgaccatatacacagcaacacaagttccaaatgcagtagatatccggagcttgcagcatttgccagatgtactgagaaaggctgatattcataagattcaggcagagcttgtgtcatgtcttccgtcgttacctcacctttcagatctacaaaagctgaaggatgagctgaagacctcttggaattctatggaggttcttccatctctgtcccgttggcatctcttggagttactcgcaaattgtctgccacacagatttacccatcccaatgaaacaagtttgtctgttcttgtttatatcagagaaaatctgaagatcaatgtgatagatctttctgaccttaggaactag

SEQ ID NO: 2304 - DNA, 720 bp, Zea mays
  Peptide Sequence Number=SeqID_44083
atgagtgttatgtggcccgagggttttgtaggttataagtgggacgcggatcgacgctcgcaccatggctcaatgttaggtgtggttaatgcgaccagttatttacggtgggtcagtctggggccagaagcgggatccactcgagtggttccccttcgacatgcccgccccccgttaggttccaccacgtccgaccccagtctcggtgccacggggttcgaccgggggagggttctttcaaggttgacgtatccacctctttcagctgaccaacgggccctagcggccagggctctttccttagtgcactcacttaccggcgggtcccaaggatcggggatcatttctccgacagtagcccccgaggggagaccagagaccccttcagaccttcgggagagtctggccgccaccaacatagtgctccaggctatcgatagtgaggtggccgggcaggcggaccgccgcgttccgggtcagtactgcttctcgctttcgcaaagacacctaattggttgtttttttgacttctttccccttcttctcatggcattgccagagctggagctagaggtcgtgggcctccgtgagggtgtggatgaggtggtcgccttcgtccatggtcggggtgccaatcgagaagagcgcatccttggtgtcgctaactgggtgcgcctagccgtccgtcatggcgctcgtcgtggtggtgcatggctctag

SEQ ID NO: 2305 - DNA, 882 bp, Zea mays
  Peptide Sequence Number=SeqID_44084
atgaagaaagtggtctactacgagaccgactcttcatcaccctccacctctggctctgaatcgacgtccgtcacttctaagcgccatgagcgcaagaagtatagcaaaccaccattttttgatggtgaggattattgtatgtggagtgataaaatgaggcatcacttaacctcactccacaaaagcatatgggatattgttgagtatggagcgcaggtaccgaaggtaggggacaatgactacgattcggaggaggtcgaccaaatccggcacttcaattcccaagccactactatactcctcgcctctctaagtcccttgcagaaggcacctgggggctacacgcacctgctggtcgccatcgacaaattctccaagtggatcgaggcggtggcgttcttcaccaacatcatccatcgctttggggtcccgaactccatcatcaccgacaacggcacccagttcaccggcagaaagttcatggacttctgcgaggatcaccacatccgggtggattgggccgccgtagctcaccccatgatgaatgggcaagtagagcgtgctaacggcatgattctgcaaggactcaagccacggatctacaacgacctcaacaagttcggcaggcgatggatgaaggaactccccttggtggtctggagcctgaggacgacgccgagccaagccacgggcttcacactgttctttctagtctatggggccaaggccatcttgcccacaaacttagaatacgattccctgaggacgagggcgtacgacgaccaaagcaatcgaaccaacccagaagactcactggaccagctggaagaggctcgggacatggccttactacactcggcgcggtatcagcagtccctgtga

SEQ ID NO: 2306 - DNA, 120 bp, Zea mays
  Peptide Sequence Number=SeqID_44085
atggcgacggttgcttgctttgcctgcttcggctatgctggagacagcataagactagtgccagcagtatcaaccataggtctgcctaatgacggatctagtcagtatcaaccgtgttag

SEQ ID NO: 2307 - DNA, 249 bp, Zea mays
  Peptide Sequence Number=SeqID_44086
atggttggtttaccggtggtgatgaggatgatggttttggttatgactatggttgcctttggtgcaatctatgctcaggaacactgcatgcctgtaggcgatgacggccatgtcctcctcctccccctcccatgcgatgcggcggcggatgacggaggggtcaggcggcggatgggggctaggcggtggggccgtggccgatgccaagctcctccaattggggaggcgctgatggtgggcgagatttga

SEQ ID NO: 2308 - DNA, 1956 bp, Zea mays
  Peptide Sequence Number=SeqID_44087
atgaggcccggcgcccgtctggactcggtggtcttccagctcactcccacccggaccaggttcgacttggtcctcatagcgaatggccggaaggagaagtttgcatctggtttgttgaaacccttcctggctcacctgaaggccgcccaggatcagattgcgaagggagggtactcgatcacacttgaaccaatctcagagttcgacgtgtcattgttcacgagaggcgccgtggagaggtttgtgcgtttcgtgagtactacggaggtccttgagcgagtcacaacactggagtctgagatcctgcagctcgaggatgccattgctatccagaggaacgatagtcttagattaaaatgtgaactttatgactatgcgccttacctgtcacagcctgccatatctttttatatttatttctaccacatgcctaatactatccatccactaataggtggaccggcaaattatgatcctaattcagccacggcaattgttgtttacaagaaggctgttaacaagactgcattacaatttgcagagttcaaaactgtgttaagaaaagagcaagctatggctttcactcgtgctgtggctgctgggtttgacattgacaacctggatgtgaacaactgtactattgcacgcttcctaccttggaaggcatgttcacatttcatcgaactatggaagcagaagcatgaaactggacaatggattgaagttgaacctgaagcaatttctacacgctctgaatttcctccatttaatgcatctggcattgtgttgatgggagacaacatgaagcaaaacctggaatcagggtctattaatggagagccaaatggcgaggatggagctaaagctgatcagaagtccagccagcagatggggtctcatgctgcatatcctccatgggcaatgcatcctgcatctggtgcagttctttacccaccttatcctatgcaaggaatgcctttctatcctggggtgaatccctactaccctccatatcctccagtggatgatcccagttcaggtggaggaaattctcatggtcacaagtcacatagaaaggggaagaggtctggaaagaagcctagtgtagttgttatcaagaatgtgaatgtaacatctaagaagtgtggctcatcagagagtgaatcacaatcaagttctgaagttgagtctgctgacagtgacaactcacactccaaatcaagagaaagaaagcataaaagctcatgttcaaaggagggtaggagaactacttttgatccgggagatgagtataacaaggatgaaacatcgaatggccatggtgttgagcaaggcaactggagtgcattccaaaatttcttgttgagagcagaagaaaaaacaagatctagtgatgcagacctgtttgctggtgagaaagaacccccatcacggagaaaacagaatgtaaacacagcagatcctattattttagttgagagagatggtggcaacgtctgtgagcagaacaaaataggttttgattcagccaatgggaggactagagttatccgggtcatgtccaatgatgaacttgttatgtctggagaagggagaatctatatggattgtgaaatgaaggagattgaagctggtggaggaaggtacaggagagggacaggtgacgactacatggtttatggtcagggatgtcagatagacagacattgtttgttggatcctcttgcagaggcccagtacaagaatcctgttcagcaggacaataataggaatggtgttacggatgagtcctttatgattcctcttaggtccagctcacaggataatatcggagcagagagcagaactactatggacatagatgttgagcttccttctagcattcataaagcatcagataaaaaggctgggcatcagcttttttacgaacctgatgaactggtgcctgagcgttga

SEQ ID NO: 2309 - DNA, 1761 bp, Zea mays
  Peptide Sequence Number=SeqID_44088
atgacacatgctgcgggagcaggacctcttcttgacagtgagtataaacattgggaagaagagattgataagtggcagaccccggttctccaagatgagaggcttccagaatggtacaagattacactctttaatgagctgtacttcctagttgctggtggaaccgtttggattgatagtggatctttggtgtctgatgctgataacaagtcgaatccagaggaaagtaatttgtcacatgagatcgatgacaaagaaaatgttgggaaatttttgtaccttgaaggaatagaatacttcatgtggtgcacctatgatgtacacttctatgcctcctttgctcttttggatctgtttcctaagattgaattgagcattcaacgtgattttgctagagctgttttgcgggaagataacagaagagtcagatttcttgctgatggtacctggggtattcgtaaagtaatcggtgctgtcgcccatgatcttggagcacatgatccttggcatgaattgaatgcttacaacatacatgacacaagtagatggaaagatcttaatcccaagttcgttcttcagatttacagggattttgctgcaacaggtgacaagtcatttggcaaggatgtctggcctgcagtctgtactgctatggaatacatggaacaattcgatcatgatggtgatggtatgattgaaaatgatggatttcctgatcaaacttacgatgcttggacagttcaaggagtaagtgcatattgtggttgcctctggcttgctgcccttcaagctgcggcagcactggccggaagccttggacatgatgactatgctgagaggtgcatgacaagatttgtgaaagctaaaactgtatttgaagccaggttatggaatggttcacacttcaattatgacagtggtacaagttatagtagccgttccatccaggcagatcagctggctggacaatggtatactgcatcgtcaggtttgcctcctctatttgatgaggataggataaaatgcacgcttcagaaaatatttgactacaatgtgatgagggtgaaaggaggacgtatgggagccgtgaatggtatgcatccaaatgggaaggtagatgaaacctgtatgcagtcaagagaaatctggacaggagtaacatatagtttagcagcaacgatgctgctccatggaatggagcatcaggccttcactactgcagaaggcatttatactgcaggatggtctgaagagggctatgggtactggttccaaactccagaagcatggacaattgatggccattacaggtcactaatttatatgcgcccccttgcaatctgggcaatgcagtgggccttgtcgcctccaaggtcgatactggaggcgccgaagactttgtatcacctcgatgtatggattgaaaaatcattaaagcttcctttattgaaaaataatatcctctcaatctggatgaaagaacttgtcggcatgcaacaactgggtagtgacgcctttagaaatccccaggttggtgtgcaacaaaagtttgaaaatctacttagagtcaatgactaccaaaatcttggcaaaaaagcaacctttgccgagtgctgtggcctcggcgtcggtaaagcttctttgcagagtgctgtggcctcggggctcagcaaagaagcaacctttgccgagtgcctcctagtgcactcggcaaaggtactgacaaagggacccgctggcgacctctttgccgagaggtag

SEQ ID NO: 2310 - DNA, 564 bp, Zea mays
  Peptide Sequence Number=SeqID_44089
atggtcagcgggaatctgctctaccggaggaagcgctcgtggcgtgccgatgagttcgtgagccggagcacgctgcaattgctcgactttgatgatggctcaccaccagagcatgcatggagaaggaaactaagtagtcatgctaatagattgaaggagttcaatgtcacattcagagaagcaattagaatgaaagcaccaatcgatccattcactagagagggcaacaagccctcagcctcgcaaggagtacctcttggtgggatggggagtggtagtatttcaagaggctttaggggagaattcaagcattggcagataactcctggttcttgtgaaatgtcacctgtgatggccaatcaattttcgatctttgtcactcggggaggaaccaagaaatacgcttcagttttgtcgcctggtcaacttgatggtttgaagaaatctactgatgatggtatatcatcctgggactggaaattaaagggtgatcgttcaacgtatcatgctttgtttcctcgagcatggactgtttatgatggtaatgatgctaattatttatga

SEQ ID NO: 2311 - DNA, 147 bp, Zea mays
  Peptide Sequence Number=SeqID_44090
atggcgcagatgcctgttggctatgtccgtaccaacgagatggagggcaaccaccagacatacaacaacgagctgatgactgacgtgccggttgccaaatattggacgtctaggattaggacacagacgcatcacactgacagttga

SEQ ID NO: 2312 - DNA, 249 bp, Zea mays
  Peptide Sequence Number=SeqID_44091
atggcgagtaccgatgactcttggttgggctgccaaacgaagtgcacccccgggctcatcagcgagaagaaggagaccgcgggaccagcgcgccgggagatgggttacaaggcgacgccgcgccggaacgtactttgggctctcaacaatgccgaggccaacggcgggacgacgtctgtgccgcggatggaggcggcgcccatgattaagttcagtgggaggcaggatgtggagcgcctgctaaaatga

SEQ ID NO: 2313 - DNA, 153 bp, Zea mays
  Peptide Sequence Number=SeqID_44092
atgacgaagacgacgccgccggcgttcgtgtaccggatcagcacggccgacgagtgggcggagtttcagcgcacgggcgccacccttggaggcgacctcgacagctccaccggctgcatccatctcagcgacctaaaccagaactcagggtaa

SEQ ID NO: 2314 - DNA, 276 bp, Zea mays
  Peptide Sequence Number=SeqID_44093
atggatggtcattccaggggtccaaactacgtcactattattgttggtcatccggagcctggagagttcgtcgagaacgcgcaatccccctacatggcgcgccaactgtcggtgtttcgaacctgcgctcctacaagtaaatttctatgtgcatgttctgggctccagacggtgtgctcggtgggcgtaacatttatattagttcaggcagaatgtccctacatccagtctttggtggctcacgctaccggcaccattattgctcgatgctcgtag

SEQ ID NO: 2315 - DNA, 237 bp, Zea mays
  Peptide Sequence Number=SeqID_44094
atggttagtactctgaatcaggaagcatttccaatcaatggcatatgcatccacatgctttcgaaagatgattaccctgacaacgaagaagacgacaagggtctaaacgagaagtgcagtaactgggccttgattatgcaaataattgatgtacacgttctttgcataattgtattcaaggtatctgaccaaaactcagaaagctgcacgcgtgctctcttttttgttcgtggttga

SEQ ID NO: 2316 - DNA, 786 bp, Zea mays
  Peptide Sequence Number=SeqID_44095
atgggtacaacagctcccgtcgccggagctgtcgtcgtcagggtcaagcaaagcatgctgctcgtcctcgttatcgtcaccagcgtactggtcgtcggccccacggccgaccgtggagccttcgccagcccgccgccggaacccgtgcagtgctcgtccggcggcggcacggccaactgcaccgtgtccagcgcctatggcgtgttcccggaccgctccacgtgccgcgcggccgccgcggtgttcccggcgtcggaggacgagttggtgcgtgccgtggccgccgccgccgccgcgtccgggaccaagatgaaggtggccacccgctactcccacagcatcccgaagctggcgtgccccgggaacggcaccggggagggcctcgtcatcagcaccaggcggctcgaccgcgtcgtttccgtcgacgccgcgacggggcacgtcacggtggagagcggcgtcacgctgcggcagctcatcgcggaggcggccaaggccggacttgccctgccctacgcgccttactggtgggggctcaccgtaggcggcatgctcggcacgggcgcgcatggcagctcgctctggggcaacggcagcgccgtgcacgagtacgtcgtcgggatgcgcatcgtcacgccggcgcccgccgccgagggctacgccaaggtgcgcgtgctcaccgccggcaacccggacctggacgccgccaaggtctctctcggcgtcctcggcgccatctctcaggaactccaaattgaacatatagatgtgaaccaaaatgcatga

SEQ ID NO: 2317 - DNA, 981 bp, Zea mays
  Peptide Sequence Number=SeqID_44096
atggccctgctgccgccgcgtcgttccctgctgcttctgttggcgctcgcggtgcacgccgccgcggccgtgcagctgcacttctacgcgcggtcgtgcccccgcgccgaggccatcgtccggcgcgccgtccgccgccgcgccgcgcacgaccgctccgtgctccccgcgctcatccgcctgcatttccacgactgcttcgtcaggggatgcgatggctccgtgctcatcgacagcacgcccggccaccccgccgagaaggatgccccgccgaacctgacgctgcggatgctggacgtgatcgacgacgccaaggcggcggtcgagaggacctgcccgggcgtcgtgtcgtgcgccgacatcgtggcgctggccgccagggacgccgcggcgatggcggggaaggtgcggtacgaggtgcccacggggaggagggacggcaccgtgtccagcgccgccgaggtgagcctgcctggcccctccgcgtcgttcgccgacgccatgtcggccttccgctccgccggcctcggcgtggtggacctcaccgccctgctcggctctcacaccatggggttctgccactgcgggctcatcatgggcaggctctacggctacaaccgcacctgcgagtccgacccggccatggaccccggcctgctggccgcgctccggcgccggtgcccgccgccgcagaacgagtcgcgcgacgcggtcgtgcccatgaacttcgtcgcgccgctcggcccgttcggcctcgacaacgccctgtacccgagcgtgctcgcggggagagccgtgctgcagatcgaccaggagctcgcgtcctccggcgtcgcccgcaggatcgcggcaatgttcgccacgctgccggggagcttccggaggcagttcgcgaagtcgatggtgaggctggggaacgtcaacgttctcacggggaggcaaggggaagtcaggctcaactgccgaaggtttaacagctga

SEQ ID NO: 2318 - DNA, 285 bp, Zea mays
  Peptide Sequence Number=SeqID_44097
atgccgcctatccagcaaggatcatgcttcgggggctgtggcgaggtgtacggggatttcattgccgctggcaattggaagccggttgtatcagacacatatactttctccagtttagaaatacaactgcatcctacaactgcaaccacacacactatccaagttcctacaactgcaaccacacacactgcaaccacacacccgacgccctcaagcacaattaacatggatgcgctcctaacttctctgaaaatggacggtgccttggattacaccggaaagtga

SEQ ID NO: 2319 - DNA, 456 bp, Zea mays
  Peptide Sequence Number=SeqID_44098
atgcaggtggcatgcaaccgcaccgtggaggcgcacccctccggcttcgtcgcgtccagcatggaggcccaggcccacacgtcatgtaaccggcacgccggttactacgtgcgagaaactgcaccgccacttgcgccaatatcgcgcctcctcgactgcgggaccggtgccgcgactcgaggcaacccttcgcatggcccaacagtgtcgatcaagcacatcgatcacggggaccgggaaaggggatatttcgaaagggatccttctccacgaaggaagcgggccccgagccctcctactgatcaggggttcgaaggctggcccctcagaagggttcgacagccgccccagagcactcgggcttcaggctcattactaattagaggttcgaaggctggcccctcggaagggttcgacagccgcctcagagcactcgggctccgcgcccactactga

SEQ ID NO: 2320 - DNA, 1833 bp, Zea mays
  Peptide Sequence Number=SeqID_44099
atgaggaagctgttgttcatctccttcgtcctctcgctgtccgctgcagcagttcacggtgaagacggtaagcctcagtgccaggcaaatgacattgatgggctgtcactcagagattgtgcaaagttcgtcagtgacttgacagcccgtgctgctctgctcccaagtcgttactgggaccacctgacagtgtcttgttctgggctcctgcctgggccgaccccgctgcaattaaacaagtcacagtcgttcgctgatgcggcacagctgctcgcttggcccgttggccgtgcaactactgcagcaacagcagcaggaatcaacgtggtcactggccactgcacattgcccaggattttctgtggatggccgggcccgggacagcagcatggtgcgtacattggcgtgaacattggcacggccatgtcgtcggtgccagcgccgacgcagatcaccacgctgctccggtcgcagaacatccgccacgtgcgtctctacgacgcggacccggcgatgctggcggcgctgtccaacaccggcatccgcgtcatcgtgtccgtgcccaacgagcagctgctggccatcggcaactcgaacgcgacggcggccaactgggtggcgcgcaacgtggccgcgcacttccccgccgtgaacatcacggccatcgccgtggggtccgaggtgctctcggcgcagccgagcgcggcgccgctgctcatgcccgccatgcgctacctccagaacgcgctggtggccgcggcgctggaccggtacatcaaggtctcgacgccgcactcgtcgtccatcatcctcgactcgttcccgccgtcccaggccttcttcaaccggtcgctggacggcgtgctggtgccgatgctcaggttcctgcagtccacggggtcgccgctcatgctcaacgtgtacccttactacgactacatgcgctccaacggcgtcatcccgctggactacgcgctgttccggccgctgccgcccaacaaggaggccgtggacgccaacaccctgctgcactacaccaacgtgttcgacgcggtggtggacgccgcctacttcgccatggcgtacctgaacgtcaccaacgtgccggtgatggtgacggagaccgggtggccgcacaagggcgactcctcctccgagcccgacgccacctctgacaacgccgacacgtacaacagcaacctcatccgccacgtgatgaacagcaccggcacgccgaagcaccccggggtggccgtgccgacctacgtctacgagctgtacgacgaggacacccgcccgggctccacgtcggagaagtactggggcctgttcgacatgaacggcgtccctgcctacaccctgcacctgacgggctccggcgtcctgctggccaacgacacgacgaaccagacctactgcgtggcgcgggagggcgcggaccccaagatgctgcaggcggcgctggactgggcgtgcggccccgggaaggtggactgctccgtgctgatgcagggccagccgtgctacgacccggacaccgtggacgcgcacgccacgtacgccttcaacgcctactaccacggcatgggaatgggctccgggacgtgctacttcagcggcgtcgcggtggtcacgacgaccgacccgagtcacggatcttgtgtttatgctgggaagaacgggacgtcgttgatgaacggcacctccctggcgccgtcgtccaactccacggagggaggctccggcgcgcaccgggcgttcggcgacgtctcgtcactcgtccgcatcgtctccaccgcgctgctcttcagcgtcgtcctcctcctgttgtag

SEQ ID NO: 2321 - DNA, 2367 bp, Zea mays
  Peptide Sequence Number=SeqID_44100
atgctgctcatcctcgttttcctgctctccttctccagcttggacctccaaataagtggagcaacgactgacactctcaccttgggccagtctctcccatggaaccagacgctggtatccaagggcggcaacttcgagctcggcctcttctcgccgggcaactccaagaagcattacatcggcatctggttcaagaaggtctccaagcaaacggtcgtgtgggtggcgaaccgggacagcccgatccttgacccgtcggcctctcgcttcactctgagcaaccgcggcgagctcctcctccacgcgacgccatcgaacaccctgctgtggtcgtccaacgcgtcctccccttcgccgcgcaccaccgtcgccacgctccaggatgacggcaacctcgtggtgcggagcaacgcgtcgtcggccctcgtggcgtggcagagcttcgaccaccccacggacacgtggctccccggtgccaggctcggctacgacagggcccgcggcgtgcacagcttcctcacgtcgtggaccgacgcggacaacccggcgcccggcgccttctccatggagatcgacccgcgcgggcaggccaagtttgatctgctcgccggcggcacgcaccagtactggacgaccggcgtgtgggacggcgaggtcttcgaaaacgtgccggagatgcggtcgggctacttcgaaggcgtcacgtacgcacccaacgccagcgtgaacttcttcagctacaagaaccgggtaccgggcatcggcaacttcgtgctggaaacgaacgggcagatgcagcggcggcagtggagcccggaggccgggaagtggatcctcttctgctccgagccccacgacgggtgcgacgtctacggctcgtgcgggcccttcggcgtgtgcagcaacacctccagcgccatgtgcgagtgccccacggccttcgcgccgcggtcgcgggaggagtggaagctggggaacacggcctcaggcttccgggcggttcggcagaggcggccggagccccgcggagcgacaagatgtgcgctctctcctgcttgcgagactgctcctgcactgcctacgcttacgaggcagccaagtgcttggtgtggaacggcgagctcgtcagccttaggacactccctaacgatcaaggcgtcgcggggggctgttgttcttcacgtccgtgtcgcggcctcggaggtgccaccgtctgcggcgcatcattcttggcgaaaatcaatggtgatccttagcagctcggtctccgccgtggtcctactcctggcgggcctcataatcgttgtcgcggtggcggtggtcgtgcggaagcggcggggaaagggcaaggtgacggcggtgcagggctcgctgctgctgttcgactaccaggccgtgaaagcggcggcgcgggatttcacggagaagctcggcagcggcagcttcggctcggtgtacaaggggactctccccgacacgacgcccgtggccatcaagaagctcgacggcctgcggcagggcgagaagcagttccgcgccgaggtcgtcaccctcggcatgatccagcacatcaacctcgtccgcctccgcggcttctgctccgaggggaacaagagggcgctcgtatacgattacatgcccaacggctcgctggacgcgcacctgttcaagaacagctcgggctccaaggtcttgagctggagccagaggtttggcatcgcagttggcgtggccagggggctgtcttacttgcacgagaagtgccgggagtgcatcatacactgcgacatcaagccagagaacatcctccttgatgaggagatgggcgccaaggttgcggacttcggcatggccaagcttgtcggccacgacttcagccgcgttctgaccaccatgcggggaacgatgggctatctggcgccagagtggctcgcgggcgcgccgatcaccgccaaggccgacgtgtacagcttcggcctgctcctgttcgagctcatctcgggacgccggaacaacggctcctcggagacagggtccaactccgctgtgtacttcccggtgcacgccgccgtcaggctgcacgcgggggacgtggtcgggctgctagacgacaagatcgccggggatgccaacgtggagctcgagagggtctgcaaggtcgcgtgctggtgcatccaggatgaagaaggcgaccggccgaccatggggctcgtcgtgcagcagctggaaggtgtcgctgatgtcggcctgccgccgatcccgtcacggcttcacatgctggcgatgatgaataaatgtgccgtcggtggggaagcagaggttgaaccctgttcaaatagcggtagcaaaatagacacagaagtttga

SEQ ID NO: 2322 - DNA, 1125 bp, Zea mays
  Peptide Sequence Number=SeqID_44101
atgggccagactgccagagctaggaatcggacgacggccttggcgatccgcgctccaacccagaaaaacgctccaagccgccagccaccacactccaaactcgcggctcttttgctacagcctacaggcccaacaaaacgccaacgcgcgcacagccgtaaccgcgcacgcagctcaatgccagcgccggaaactgcaaaacacggccaaacccacgccagatccagacggccgcccgtccgtcccgcgcgattccgtccgtttagctccaacaaaccaagtctttggagaacgaaaccgcggatcgcaaaccgcggttgcttcgtacatctgcatcgcgtcgccttccgttccctctccagcaccgcaccacagctagcccgcgtgtcccccaatcatacgtaccaccgcgggggcgtgtccgcttgcatcctcctccctcccccgtcccgtctccaccctccacctcctctcgcgtccgccccgccgctcgcggatgcgccggcgcgctcccacccccaaaccctagcctcgatcccgatgggcacgccccgcgcggggtccccggcgtccccggtcaccggcgaccactacctcgacctgctcgtccgcttcgtggcgcgcaacgcgggcgcgctgctcgacggcaccgtcaccctccgcctccaccccgtcggactccactacgtcgcctcccgcctcgaggcgctccgggagctcgaggccgtgggcgccggcgccccagtcgactacctccgcgcctacgtcgcggaccttggcgaccaccgagcgctcgagcagctacggcggatcctgcgcctcctcacctcgctcaaggtcgtcgccccggggccccgccgcgaccccgcgccgctctcgatcctgcctttcgcgcgcctgcgcgtgctcgagctgcggggctgcgacctctctacctcggccgccaggggccttctcgagctccgacacaccctcgagaagctcgtctgtttcaattctacgagcatctcaagtcctgagcacctgcagggctttatttatatcaatgcttgtgctgcagataccatttatgcaactgcagcaaccatccctgctgcgcttgatatatttattctcacggtctaa

SEQ ID NO: 2323 - DNA, 2121 bp, Zea mays
  Peptide Sequence Number=SeqID_44102
atggatatcaaggactcccctgtatggagcaaactttcatatgtctcatgtgcatctaatggtgtagtactcatggacgagtcgttgcaattgttacctgcaactgaaaccttggaccttagtcgcaacaagtttgcaaaggtggacaatctgcagaaatgtacaaagttgcgaaatctggatctcggatttaatcatttgcgttcgatttcatccttgagtgaggtttccagtcgaatcgtaaaacttgttgtgagaaataatgctttaactacagtaaacgggattgaaaatctcaagtcactcatggggcttgatctctcttacaatatcatctcaattttctcagaattggaaatcctcggcactctacctctgttgcaaaacctctggttggaaggcaacccaatctgctgtgcccggtggtatcgagcacatgtgttcagtttttttcgtaatccagagaatttgaagctagatgataaaggtatgaacacacaagaatactgggaaaagcaagtattgtttgcatgcaggcaaaatcaacctgctggttatggattttattttcctgcaattgatgatcatgaagatgaagacatattgaatttgaagatgttttcacatgcaacaaagaagagaaaattttcccgacttgtgagcatagtggaggaagagagaaatctctgtgatggtgtagagcagcagtccacccactgtgatagtgacagttccaagaaggatgaaactgcagctgttgatcatgacctaataattgcttcgttgataaacaccgccgaaatgctgaagaaagaaaagtcaagtaattggctttgtgaatttaaggagtggatggatgacaatacagagaaaacagaaggcgacaacctatctgttggcttaactaatggcaatgggaagtatatcaaacaaaagaaaaggcagaaagcacacaaggagacttcaaataacatgtcggatttggtacaagtttcagaaggtggtagtagctcaaaccttttggaatcagattcatctttcacagataatgcattttctggttcaaatggagtcatcaaacaatcctcaaatgaacttaattttgaccaagatcatctaaaaatgcacttgaattcttttcaacgacctcctcctctagagttagtagccacttcacaaactgaccccttttctgagttggaaaatggctctagaaatatgctggcaaatgggacaccatccaatacaatgagcaagttaatagaatcaagtccaccccatacatattcaagtccacagtcacctccacaatacaaggaggacattctacatcgaagactttttatggaggaagaatttttgcagatttcaggacatcttcattctattggttcacttggtagtggtagcagctgcagcgatggttcttcgagtgattttggttcatgcaattctgaagatgattatgaagaaattcagacaaagatggagttgtctcttaatggccagatggttttatttccttctgtaaatggtgatgatcatgaggcgaataataacttagagcatttttcaggggagaatactttgtctgaccatccagaagaaggtgagccgagttgttcagatcacagagagtttgatattgaggagttccataacagtaaccagagaaatggccatctagggcattatttaggccatttaattgggcaaaaaggcaaggagaagtttaagtggagggtatttcctttcaagaatcataatggtaccaaactagaaaatccaaaaatgaatgacgatcaggtggctgagcatgttttagttgaaggaaatggccagttgacatgcaacccaagcaaaagtactcacaaggaaggctctaaaagtcattcttctaatatccttcataagaacaattcatctgtttgcacaattaacacaggcgaacacaacactcttgaggatttcttcaacttggaaatagcggacaaggatgggtttgaaacatgtgaacaagtagcttgttgcgcacacatgtttcaggattcaagtggtttagttcaaaggcgagtcgttttctctgtattctccatttctgaaaatgttataagcatatga

SEQ ID NO: 2324 - DNA, 387 bp, Zea mays
  Peptide Sequence Number=SeqID_44103
atggggcaaaaggactccaagccttcacatggatatggctactcttcttatgattacgggagtgcttcatcgggatacacctcgagaaacactgggaattcgtcctccagttatagcgtcaggtacgcgccttcttcggagaacagtgtacagccggagacacatgccaggttgcagaggaagtattccaagatcggtgatgactaccgttctttgagccaggtgactgaagctttggcacaggcaggccttgaatcttcaaatcttattgtaggcattgattttacaaagagcaatgaatggacagatgcatacttgtgcttctctatgtctactctgtgctgcactggtacacattacacactaagctaccagactatttcttga

SEQ ID NO: 2325 - DNA, 191 bp, Zea mays
  Peptide Sequence Number=SeqID_44104
atgccgcaatttctattctgcagcggcggaggtgggtgggtggagaggtttcttgtccaccggttctctgaccccgctgctgggaaaacgacgcacggcggaggaagcttcggcgcgggagaggagaagactaggatttttttggccgcgatcaccaggccgagctcaacacgttttgctggtggtgattg

SEQ ID NO: 2326 - DNA, 216 bp, Zea mays
  Peptide Sequence Number=SeqID_44105
atgtatgatgtctttggaaagggctacgagggcatcctggaagcgatgaggaaggctaggaggctcaataaccatgttttctccatgttgagggcacgatgtccccttgaggacaaggttgcatgtgctatcaagccaagtggggcaccgcttcaccggatgaagtttatgaacaccgtttctgcattcgagacattgccacaaagagtcacctaa

SEQ ID NO: 2327 - DNA, 303 bp, Zea mays
  Peptide Sequence Number=SeqID_44106
atggaagcggctacccagctgggcgcggtgaggtctgccgtgggggaggagagacgaacccaagggcgacccgtcggcgatcctcggcaatctggccgcgacccagacttcggctacgaccacggagcttctactacatcggcttcttctctaggatctgaagatgaagatgttcttcaatcagccatccttgccggattcaccacggacgcagcatcccattacatcaacgatcgaaatctggtgactcagacttcaaaaagtaatgcctccggtcctccactgacggacgatcgaaagtag

SEQ ID NO: 2328 - DNA, 333 bp, Zea mays
  Peptide Sequence Number=SeqID_44107
atgtcgttcagcaagcgagttgctgtggccgccgccctcgccttggccctgcagcttatcctggcttcacatcggattactatggtcgcagttgcagcagctggagccaaaaaagacgaaacaatagcaccgttacagacgtgcgagaccatgatcaaggtcccctgctggggcaaaaacgcgatctgcatccccatctgcatcgcgatgcgctacaccggcggtttctgcgacgtcgccacctgcatgtgcaccaagcaatgcctcgccgccgccgaggctgaggcagatggggcatcgcagcaggccgtggcgacaccgcggctgaactga

SEQ ID NO: 2329 - DNA, 1278 bp, Zea mays
  Peptide Sequence Number=SeqID_44108
atgagcttggcggggcggcgcaagtcgtcgcacgcgggcgcgggagccggcgccggcgccggcgccctcgacgcgtccgccacgaagcacgccacgacgtcgctgcgcaagggcgggcggctgccggtctacgtggcgagcgtcttcttcttcctctgcgtggtggtgatgtacggcgaggacatccggtcgctgacgatcgagccgctcacgcgcgtgcccgcgccagcggtgccgggcaccacgggcgctggtgggcggcaagtcgtggtggtgccccggcgagacatctccgcttctgagaagcccgccgccgtgctgcaccgcggcgagcaggagaagccgaagaagcacgcggtgaccacgacgacgacgacgacggcgccgccggtggctgtcgagaagccgcagcagaaggtggtcgccaccgccgccgccaagagcgagaggaatacggccaagaaggcggcggcgaagaagaagaagaagccgcgcaggcagcagcgcgcggcgaagaagacggtggtgccgcccgcgctgggcgtgccggagacttgcgacctgtccaaggggcggtgggtgttcgacaacacgagctacccgctgtaccgggaggaggagtgcgagttcctgacgtcgcaggtgacgtgcatgaagaacgggcggcgcgacgacacgtaccagaagtggcggtggcagcccaagggatgctccatgcccaggttcgacgcgaagctgttcatggagaggctccggggcaagcggttcatgttcgtgggggactcgctgaaccgcaaccagtgggagtccatggtgtgcctggtgcagtcggcgtccccgccggggaagaagtacgtcacatgggagggccagcgcgtcgtcttccacgcctgggagtacaacgcgacggtggagttctactgggcgccgttccttgtggagtcgaactcggacgaccccaagatccacagcatccagcaccggatcatcaaggcggacacgatcggggcgcacgccgagaactggcgcggcgtggactacctcgtcttcaacacctacatgtggtggatgaacacgctggacatgaaagtcatgagaccgggcgccaagagctgggaggagcacgacgaggtggtgcggatcgaagcgtaccggaaggtgctgacgacgtgggcgagctgggtgaacgacaacgtcgacccggcgcgcacgtccgtcttcttcatgagcatgtctcctctccatatcaggtaccccggcccacttcctactacctag

SEQ ID NO: 2330 - DNA, 474 bp, Zea mays
  Peptide Sequence Number=SeqID_44109
atggcgtcgtcgtcgaaggcgccgtcatcgcgccgttccgtcttcgacgccgtccacatccgctcggagttttccgcggccggcatctccgcccacttcatccctctcatctggaacgacctggatggcgttccgtcgctgccggcggccgcgtacgcgctcctccggcagaagttccggccgaccacttcgacgctaaccgctgccgcggactccaaggaccgcaccacgaccaagcttctcatctgcctgcagccaagcttgggcgagcctgcgagcacccgtccagtcaagcggtacaagaacgaccccgacaggaagcccgtgccgtcgatggagcggttggagctgggccatggtctggcgagggctgtcctggcaatagagttgggccatgttctggtgaagcctgtcttggtgacggggctaggccagaaggaagctgaggcggggagaacaaccaaagtgatctag

SEQ ID NO: 2331 - DNA, 795 bp, Zea mays
  Peptide Sequence Number=SeqID_44110
atgacgacgagggagccgcgcgaggcgtcccggcgcgatgggcgcgactcgcacgggaggcgcccccactcctcgttcaggtcgcggagggacgatcccagcccaaggagaagagatgacaggaggcgtgaatcggacagggcgcaccacagaagtcgagatggagaatttttggaggtggtggaccatgatcagaagcggaatagagatgctgcgcagagcgctgaccctccgaatgctgagtcgaacacaatgagcgtggaagtgctgggcaaggtggtcggcattatgaccgccaggctagtgggaaagattgagctggaccagcaaaagaaggatggtgattcaacatggaagcatgatggatttttccagttggaggaagcagcaccccttgccaagaagaggccaccatttcaggagatgaagatacaagaatctgctgacactgtaacagaaccagattctagatcaaggaattatcaggcacggggatatggaaatcatcgacccttcctaaggccagatgatcgaggctttagaagggggtttcctgaccacaggagtgatggccagaggaatgggcatgatataaggggaagattttctgttaggggaggaatggacagagacaggtttaacaattcatatggtgggagaagcaacgcagagcaggcttctggtgatcaagaagaaaaatggaagcatgacctctatgatcagacaaacaggagcccgcctccaaagactgaggaagagcagattgccaaagttgaagcgctgttggcactgtag

SEQ ID NO: 2332 - DNA, 1320 bp, Zea mays
  Peptide Sequence Number=SeqID_44111
atggatctgggcttagcggaggcgacggcgccaacggcgtgcagagcggaggacgcaacaaccgccattggtcttgtcgaggagcggagatgggctgggcagcacacaaccgcggggggaggtgggatggacagaagtgacagcgaggtgtgtgcagcacgggtgggaggcgaaatcgctggaggggaagggacaggagagcagatgcgggatctactcagtaaggactacacttacgaccagaagctgaccatctccaccgccagcgcctctggactggtaagatccgaccgcgctcgtgtgattccatttccatgctgcctggttcctgttcgcttgtccgtgctcgtgacgcctgatctggtagttgtggctgtgttcagcgtcgggatgtcgccgtgcggggtaagactgcccccacgacattatattaagaagatctcacgtaggttgagaaaaccaccgaacccctgccccatccatacacatcgacaccgtagcccatgtgagtacgaccttgaccgggccagcaacagtaaaccgatatatttatatatccttttcattgtatgcttctacagcactattttgaaacatgttaaacggggcctgacttccacagctgtgaagaaaggagggctttattctcttgatgtcagttcagtttacaagtacaagaataccactgttgatgttaaagtggacactgaatcaaatatctctactacattgaccgtgttggacgccttgccatgcacaaagcttgtcacttctgtgaagctgcctgactacaattatggaaaggtggagctgcaatacttccatgagaatgcaacttttgccactgttgttggcacgaagccttctccagtgattgatctttctgggacagtaggtgctcaaggagttgcatttggtgcagaagctgggtatgacactgctacgggaaaatttaccaagtacactgctgcaattggtgtaaccaagccagactaccatgctgcattcattctggcggacaaaggtgacaccattaaagtgtcaggtgtttatcacctggatgagaaacagaaggcctcagctgtggctgagctaacccggaggctttcaacaaatcagaacacactcacagttggtggactgtacacagttgattctcagacagccgtgaaggcaaggctcaacaacaatggaacgcttgccgcgcttcttcagcacgagcttaaacccaagtcactcttgacgatctctggtgaattcgacaccaaggctctggacagaccccccaagtttggcttggcgcttgcgctgaagccctga

SEQ ID NO: 2333 - DNA, 555 bp, Zea mays
  Peptide Sequence Number=SeqID_44112
atggccgcgacccgcgagcagtgcttgccggacccgcagtacggcggcggcatcctccacaacgcgggcctccggggctggtccaccctcggctacggcagcatcgcggagaacatgtcggcgtcgggcaacgcgccgccgcaagatatgagaacgagcggcggagcagaaggccgccgcaagacggcaaaaggtttcgaggcggggtcaaacgacggcttgattatatccgacacgggcactaagcggcggccggcggcggcggggaggatggcggaggcggtcgtgaggtgcctccgggacggacggctcgacggcgagcacgcgccggcactggctgtggagggatcactcaagtgctgcccgctcgcggcgggtgcgatgctccacatcgcggccgcattcgcctcccaggtcgccgcagggaaggcgcaggccaggggactggtggttgtggcgtttgatcggagcccacaggtgtacctggaattcatgcgccgccgcaaccttgacgcaaatgctttggaccgatggtatgatctcaaccatttatga

SEQ ID NO: 2334 - DNA, 2382 bp, Zea mays
  Peptide Sequence Number=SeqID_44113
atggacaccaccacaccttccacttccgtctcgccggcggccgcatccgcccccgccccctactcggactcagctcttgtctcggccgtggctgacgcgcttgtctccgcctcgtgccagtcctcgccgccacccatggacaccctcctggccccgtacctcccgcgcctcacctcctcgcaccacccgcaagtgatcgcccttgccgccgccaacccatcactcgcctctccgcacactctcctcgcctaccgccgcctcttttctcctccgtcctgtctcccatccctactcccgctcctctccattctcccctaccgcaacctcctcccaacccttctcgacttcgtcccgctcgacccattgcgccacctccaccgccacctccttgctagcttccctacaagtgcgctcgccgacgcggcgctctccacgtacgcccgcctacgcctcccccacctcgccgcacaactcctccactcattccgccgccgcgggtgcgtccgcccctccctccaggcagccaacgccgtgctctccgcactcgcgcgcagtccgtccacctcgccgcaggcctctcttgatgccttccactcccttatcgccctgcggctccaccccaatcactacaccttcaacctcctggtgcacacccactgctccaaaggcacccttgccgacgccctctccacgctgtccaaaatgcagggtttcggcctctccccagatgccgtcacctacaacaccctcctcaacgctcattgtcgcaagggtatgctcggtgaagcgcggacgctgctggccaggatgaagaaggagggtatcgtgcccaccagggccacgtacaatacccttgtctcagcgtacgcgaggcttgggtggatcaagcaggcgaccgatgttgtggaagccatgacggcattcggtttcgagcctgacctgtggacatacaatgtgctcgctgcagggctgtgccaggcagggaaggtggacgaggcatttaagctgaaggatgagatggagcagcttggcatagtatcgcctgacgtagtcacctacaatacccttgttgatgcatgcttcaagtgtcagcgctcttctgatgcactgaatctgctcgaggaaatgcgtgagaaaggggtgaagtcaagtttggtcacacataacattattgtgaagggcctttgcagggaggggcaattggaagaggcgttggggcgtctggaaatgatgacagaggagggattgacaccggatgtgattacatacaatacattgattgatgcatcctgcaaagccggaaatgttgccaaagcatttgtgttgatggatgagatggtgagaagtggactcaaaatggacactttcaccctaaacactttgctatataacctatgcaaagagaaacgttacgaagaggctgaggagctcttgcgtgcaccgccgcagaggggctttgtacctgacgaagtcagctatggtacagtgatggcagcctactttaaggagtataaaccagagcctgctctgtgtctgtgggatgaaatgatcaagaggaagttaacgcctagtatttctacttacaacacattgatcaaagggctttctacaatggggaagttgacagaggcgattgacaaattgaatgagctgatggagatggggttggtaccagacgacaccacctacaatatcatcattcatgcctactgtaaggaaggggacttggagaaagctttccagttccacaacaagatggtggagaattcttttaagccagatgttgttacctgcaacactttaatgaatgggctttgtctgtatggaaggcttgagaaagcgatgaagctttttgagtcatgggtagaaaaagggaagaaggttgatgttatcacatataacaccttaattcaagctttgtgcaaagataatgatgtcgatacagctttgcgtttctttgctgatatggaggtcagaggcttgcagcctgatgtatttacatacaatgtcctgttgtctgcactgtctgaggcaggacgatcagtggaagcacaaaaaatgctgcataaattaaatgagagcggaaaattatatggaagatttttttatccttcaataaaatcctctgtggaggcagtcgagacagggaaggacccagaggttaaatctgacattgaatctgttggaaacacacaaggtgatgatcaggagagctataataaatatataaaggaactctgcattggtgggcaactgaaagaagccaaggctgttttggatgagatgatgcaaaagggcatgtctgttgacaattcaacttatatcactttaatggaaggccttatcaaaaggcaaaagaggcaaacacatgcagctggatag

SEQ ID NO: 2335 - DNA, 552 bp, Zea mays
  Peptide Sequence Number=SeqID_44114
atgaagcatcgttctgtagggtattgggtcccctacaatgaccagacggacgtgaaaacacgggcgactgtgcaacgcacctacacacctaatgaggcaattcctaggccccctcctcatcttaggatcagggcgggatggatccagcgagctagacctcgcaaggtggatagatcagagatggtatgcaggcaggttcaccttctcgttcatggtctaacacttagtctacatgaggcatcacgatcgaagttgtcggtcttgaagatcttgagcttgttggcgagctacaccccccaccgccgcctcccacaccctccggagccccatggcctacaccaccttagccatgatggtgtcttcgaggttagccccattggagaggtcgaggtcattgaggtaacaatgcttgtgtcgtcgcccccgtgggagcgggagaggtcaacgacatggagggcagagcaggaggtggagacggaagcgagggataagataaaccccacagaggatcacacactaccatgtgagtcggagtcggtttcacgcatctag

SEQ ID NO: 2336 - DNA, 288 bp, Zea mays
  Peptide Sequence Number=SeqID_44115
atgaagccgttttgttgtttgctgtccgccgccgtattcggggtcttcgcctgcctctatgggctcagggcggacaggggcctacaagatctcctcgggccaaggaatcgttcccctccggcgacctccctcctccctttcgtctcaggccttccactgtatctccatcaaagcgaaggatcagaggctactccgttaggaggagaggtcactcttattggaagtctagaaatgccaaaggatgacatatggcttgtcacagctatcctatctggtctgattgaataa

SEQ ID NO: 2337 - DNA, 1719 bp, Zea mays
  Peptide Sequence Number=SeqID_44116
atggggagaaccttgttcctgccgctgctgtggatcgccatgctgacgagtgctgctcgcgtggtgcaatgtcttccttacgactactcgtccagctctgagtgcttgccggagccgctggagcctcagtacggcggcggcatcctccggaacgccaacttcagcgcgggcctccagggctggtcggcgttcgggtacggcgcagtggaggaaggcctgtcagcgaccggcaacggctacggcgtggcgcggaaccggacgcggccgtaccagagcgtcagccagaaggtgtacctgcagaacgacacgcactacaccctgtcagcttggttgcaggtcagcaatggtagcgccgatgtcagagccgtggtgaagaccgacggcgagttcatccacgccggcgccgtcgaagcgcggtccggctgctggtccatcctcaaaggcggcctcaccgcgcccgcatccggggcggcagaactctacttcgagagcaacgcgacggtggacatatgggtggacagcgtctcgctgcagcctttctcccgggaggagtgggcggcgcaccaccacgcggccatcaagtcggcgcgcaagaagacggtgcggctgcgcgccagggactccgccggcaagccggtgcccggcgcgcaggtgcgcgtcgagcacgtgcggagcggcttcccgctggggtcggccatgagcgcggagatcctgcagagcccggcgtaccagcggtggttcacgtcgcggttcacggtgaccaccttcgagaacgagatgaagtggtacagcacggagcgggtgcagggccgcgaggactactcggtccccgacgcgatgctcaggttcgccaagagccacggcatcgccgtgcgcggccacaacgtgttctgggaccagccgagccagcagccggcgtgggtgcggtcgctgtcgcagcggcagctccagcaggcgacggcgcggcggatccggtcggtcatgtcgcgctacgccgggcaggtgatcgcgtgggacgtggtgaacgagaacctccacttccagttcttcgaggacaagttcgggtgggacgcgtcggcggagttctaccgcagggcgcaccagatggacgggcaggcgctcatgtccatgaacgagtacaacacgctggagtggcccggggacacgttggccgggcccagcaagtacctgggcaagctgttccagatcaagaagttcccgggcaacgccaacgacgccaggatggccatcggcctcgagggccacttctccgtgcccagcatcccctacatccgcgccgcgctcgacaccatgtcaaaggccaacgcgcccatctggctcaccgagatcgacgtcgcgccggggcccaaccaggcgcactacctggagcagatactcagggaggtgtacgcgcacccggccgtgcacggcatcatcctctggacggcgcgccacccgcaggggtgctacgtcatgtgcctcaccgacgacaacttcaggaacctccccaccggcgacgtcgtcgacaagctcatcgccgagtggaagacgcactcgctcgccggcgtggcggacgccgacggctactacgaggccgagctgttccacggggactacaaggtcaccgtcagccacccggtggccaactccaccgtggtgcagagcctgagcatcgacagggagaccgacactgatagcgagtacaccatacacgtctag

SEQ ID NO: 2338 - DNA, 402 bp, Zea mays
  Peptide Sequence Number=SeqID_44117
atggctgtgctgaatttgcaacgggaggttccagttgaatatgttcattgctacaatgaagccgttttgttgtttgctgtccgccgccgtattcggggtcttcgcctgcctctatgggctcagggcggacaggggcctacaagatctcctcgggccaaggaatcgttcccctccggcgacctccctcctccctttcgtctcaggccttccactgtatctccatcaaagcgaaggattagaggctactccgttaggaggagaggaaaggaattgcgagccttgtgttggagaagtcgaagactgagagtatatggtggctccattggtgtccatgttaatggctggcgtgttctagagcaactcggggttgtcgtagagcttagggagacttgccagccttag

SEQ ID NO: 2339 - DNA, 240 bp, Zea mays
  Peptide Sequence Number=SeqID_44118
atgcctccagacgttgtgtttgtcactggcgttttggcctctgtcgtggtgcgacacatgcctccctttggcacatctgcttcgttatcgctctccctgttaacagaaacctcgatgaggatcaatgaatatatgtctctcccaccattccccatgaggattttccctcacgcggcattgaatggcgtgctcgtccacgtttacattgtagatggcctcaaggcagcgggacacgcgtag

SEQ ID NO: 2340 - DNA, 333 bp, Zea mays
  Peptide Sequence Number=SeqID_44119
atgggggaagaagctccgcctccaccctcgcgcgccgtggtcttgccacgccgcgccgccgccgccgcgcactcctccttccgcctgccccgccgccgcaaggtgcacgtcgtccggctcggcggcggcgcgcgcgggcgcgggcccgggcccgggctccggcggtggctgcggcgcgcggcgtggcgcctcgccgagctctgcgtggcggcgttgtcgtcgggctcgggccgcccgggcgaggcgtacccgccgtgggccgacgtggagcgctacttcgccgcgcccttcgtccccgtcgcgcgggaccgcaggcggcctgctaggtcgtag

SEQ ID NO: 2341 - DNA, 646 bp, Zea mays
  Peptide Sequence Number=SeqID_44120
atgcagcgcctcatctcctgtgttcgctctgacaacagaatgcttcatgttgacatcggtgctcctgacaccagcgctcgtggagatgctttgcgtgagaaggcgccgtcggcgaggagctccgcgaccagcgactcgcttcttccgcatgacgacgcgtcaggcagttggggcggggcgagggtgccgcgagatgatggggacggggaatgggagcggacggatctgcgctttctcaatccaatcaccgcacgcgtgcaccgccgtgctcacctgaaactgcctgtcacgccggcgcccccaacaaccccggcacccgcgctaggggtagccttcggctaccctgcctcctcgttcggccccgacgctagccccagcatctcctcccgtgacgcctccctcgatctcctgtcccgttccccagccatctccaatcatggatcctgcgatggagatccccatgtcaccgccaacgccgagatccatcggccagacgcagaccgtagccccgacctccctccatcgccaagcgttgcgttcagcgtcgccccatctgtcctcgcccatggctggcatgggggtttgattcccagcgtacgactccagcccgacgtggtacctcgaccctgcctgagatgtggtgaag

SEQ ID NO: 2342 - DNA, 1722 bp, Zea mays
  Peptide Sequence Number=SeqID_44121
atggcgatggctgagaaggtgaaggagaagatgctgatgctccgcagcagcgacaaccaggagttcgaggtgaaggagtcggtggcgatgcaatcgatgaccctcaagaaaatggtcgaggacggctgcgccgacaaaggcatcccgctccccaacgtcacctcccacatcctcgtcaaggtcatcgagtattgcaacaagcacgccgagccgaccgggccgggcgacgcggccggcaccaccaacaggtccgccgaggatgagctcaacatcttcgacgcagacttcgtcaatgtagagcactccaccctcttggacctcatcctggctgcaaactacctggacatcaaggggctcctgaacctggcccgccaaaccattacagacttgatcaatgggaagatgcctgaggaggtctgcaagaccaacatcaagaacgacttgaccatcccttccacgtcggccttggccaccacaatgccctcctccgagcgaaagcagatggaggccaggtttatcgcctatatgcaagaaactgctgaggagaggatgactgggtttgctgttcgtggtgaaaaatacagaaagcatggtgaacgtccgccacaaccaccattggagatagttaaatacccagctcttttggaaagagcttggggatgggattcgatactgccgtactgtcctgtgaattcttggcccctatacaagacttacctccaagaatattatgagcgcaattctcgtgaagtattggctcatcaagtggaagctaatgctgcctctggtcccaatctcaacggggctgatgagaatgatctggcaactctgttcaacttgtgtatcagtagggaggttcaacttttgaatctgctgaagcgccgtgatcaaaaacacaatgttgatgagatcagcctgaatgaaaagctcaccaactgtgcccgtcagataacttttgtggaatatgctggttttcctttccccagtgttgccttaaagtttattaactctattgtgcctattgcaaaccatggcttcaagtgcatcatggcggagtctgatctgttgtgcatgttgctgatgtgtgggactggaatgatatcccaagtcaacatttgctccaggattcgaaaggtggccttcagatttatgacctacaaaggacctggatgttttgctgctgctgccaccatgatggccaccacaaaggaggccaagttgatgagtggactgctgaggaacagatgtagggaaaataatggtccattttcaaggagtgtctttatcaggaaatggaccattgcagctatgttcagaatatgtgaggaatgttctcctgtggaagagtctacagggggctacactgctactaaattgatacttgatggatctgatgacaagaatccttgtgataaggaactagttaataaggacaacctgctgcagaggaacaagataaatcaaaaataccaaggactgttcaaaggaaaaacaactaaatgccgacaccctgtacaaaagcaagaaccaggagatggaggttgtggaaatcacagttctaacgaatgtaatatgatacttttatgcagcaacgcccgcatcacccagtccggccaatcccatctcaactgtggtgcaaaaactttgggggtgtttggttacaccccgctaaaatttagctcatgtcccatcgaatatttgaacctccgtttcgggtattaa

SEQ ID NO: 2343 - DNA, 684 bp, Zea mays
  Peptide Sequence Number=SeqID_44122
atggattctttcaacgagtgtgatagagaactacagtcaaatgctgttgtttttcaaccaaaaaaggtcattacatcaagtccacagttattactgagaaaacctgatcagtttatgcagaatgttttgtttttcagagaaatgggtgttgataagaaaacaacaggaaaaattctgtgtcgttcgcctgaaatatttgcttcaaacgtggataacaccctcaagaagaaaatcgattttcttaccaactttggtgtttctaaacatcatcttcctcgcatcattcggaagtatccagaacttttattgttggacataaattgtacattgctccctaggatgaactacttattggagatgggtttgtctaagaaagatctgtgctcaatgatctttagattttccccacttctaggttacagtattgaacttgttatgaaaccaaagcttgagtttctgctaagaaccatgaagaagccacttaaagcagttgtagaatacccaaggtacttcagttattcactcgaggggaagatcaaaccgcggttctgggtattgcagagtagaaacatagactgcactctgacagagatgttagcaaagaacgatgaactctttgctgaagagtacttgggacttggaggattgctcgagaaacctctacaatcaagcataggcagttaa

SEQ ID NO: 2344 - DNA, 279 bp, Zea mays
  Peptide Sequence Number=SeqID_44123
atgaaatttgtcgatgacagtacttctagtaaaaggcagaagaaagcgctccagtatgatactgatgaggatgaatccatgaagtctgacagtgaggaaaacagagatgaagattcagatgaagctgctgacaaacaagaaggcaaaaaggtgacaaaaggtaaaggagaatcagctgaagcagttcttcccagcaaggacgatctgaggaagattactaaaatcctcaagaaagttgacttcaacacggctttaaattaccgtctttggcaggcataa

SEQ ID NO: 2345 - DNA, 783 bp, Zea mays
  Peptide Sequence Number=SeqID_44124
atgcctctaaagaacatctgctcctctgtaagtgcccacactggtgtgcctgaagggttccccatcctcaacaacattagggggaatcccttgttctggtaccgccatacttttgctaccatgaaccatcctcttctgaaatatgcgagaaaatgcaccaaattaaatgggataggatgggatgggatgcgatgtcatgggcttcatgatcctcccatcccctctctctacggtctcggcggcaagggaaaggagcaggaaatgaaaggaagcaagtcagattttggggtgatggcgatccaacaagtgaagtcgcgtggggagatggaaaatgagtgggagtgggagggagggagatgggtagataggcgaggtacctctacgaacaatgctgcgctggcgctggcggtgaagcgatcggcgaaggagattgcgaatgccccgtcgcccgtcatgccgaggatggcagtgtcctcgttgctgttcgtggtggcaaagtcggagtcggaggagtggtcggtcgccgtgtcagaggtggagggcttcgacgggaggaagctgtcgaagggaagcatcagaggctggaggcgggggagggataccaaaggggaggtggtggacggtcgggggagggataccagagggaggcggtgggccgtcgtgtccggttcgccggttcccactgacgccaccgagaccgaggcgcgcccgggcaagctgatgatgagcctctcgcccgacagcctatcggggtcgtggtcggggtccaaccatacaccgtag

SEQ ID NO: 2346 - DNA, 1227 bp, Zea mays
  Peptide Sequence Number=SeqID_44125
atgaccgctgagaagtctcgccgcctcatcacatctgattgtggaggcggaggtgccgatgccaagccagaggctccggtctccgaaggagtggtcaatggggacaagtggccacgttttgctgatctcggcgggatggagcaggtgttagatcagcttctggtagaagtgctggtccccctgcgtcgtctggagctgccgaattaccttggggttaggcctgttgctgggctactgttgtacggaccgccaggttgcgggaagaccacccttgcacatgccattgccaatgagactggtgtgccgttctacaagatctcagccccagatatcgtctctagagtatctggaggttctgaagaaaacatcaggggcttatttcagaaggcatataggactgctccctcaattgtattcatagatgagatagatgcaattgcatccaagagggagaatcgagagatggagcgacgaatagttactcagctgatgacatgcatggatgaattccaccagaatattggtggtgatggttctgatgtcgattcatctaaaaagaaaccaggttatgttattgtcattggagctacaaataggcctgatgctgtggatcaagctcttcgaaggccaggaagatttaatcgagatatatatcttggggttccagatgtgaatttaaggaaacagatactgatgatgcttgcttggaagcttcgacttgaagggcaatttgactttttaaagatagcaagggccacaccaggttttgttggtgctgacttgaaagcattagtcaataatgcagggtatctggcaatgaagagattaattaataaaagaagagctcagtattgttctgaggtaaaggtggatgaggcagccatgttagctttggaagatagatggaggtaccttgatagcgggacatcaatgagtccaccttttctgattgagccatcacactttgaacaagccttatcaaaggtgaagccatcagtatccaaaaaggtcgagccagcactcgagcgactgtccggaggcgacgcgcgcggcggtaacagatccgacccaagtcaaggtgagcccccctcccctgatccaacacgaagtgatgagcgtcttgtgggcgtgctcgtcgtcgtggaggtcgagccagcactcgagcggccgtctggactacagtctgagctgctcagagctctcctcgcgcgggactgtgcccattag

SEQ ID NO: 2347 - DNA, 405 bp, Zea mays
  Peptide Sequence Number=SeqID_44126
atgggtccttttggtggaataatgatagagtgcggcaccaatcaacctattgagaaagtgcttgcagctgaagatgcagagtgttgtatttgcctatcggcttacgatgacagtgcagagttgcgcgaactaccctgcgcgaggatgttgcagcattcgaacaacgccaacgagctgctcttgcgccggaagctggaggagcagcagcaggctgccgaacttcagcacgccattgagctccagagccgccgcctcatgggtctccagctgctcgacctcaaggctcgcgcagctgcgacagcagcggcggcatcggcactgccaacaccagttgccaatgccttcgcgtccagccatcctttgagcaccatggcagtcgagtcgccactagagtccggagagtag

SEQ ID NO: 2348 - DNA, 366 bp, Zea mays
  Peptide Sequence Number=SeqID_44127
atgaagagaaaggaaaactccgcgcactcggcgtcgcctctcaacaggccgcgcgggaagcgcaaggccctggccgagctgcccaagtccaacggactgaacatgaaccacgactcggcgccgcggccgtcgaagccgagaacgcggtcggcagcgcgagctgaggcggaggcggcgatgaaacggcagaaggccggagacgcggcgcactggcagatggacacgaggcagcctgacgctgaaagcggcggttgcgccgtacgtcagggacatccaccggtacctccggtctctggagttgtagatgacgtaatgggctcatttcggatgcgtgctgatattgtacggtttagtgctgagatttga

SEQ ID NO: 2349 - DNA, 987 bp, Zea mays
  Peptide Sequence Number=SeqID_44128
atggggaggaagatgtggatggttcatgtatatcagaagaagaagatggttgcgttctgcatacataatattgcctatcaaggtagatttgccagagcagacttcgatcttcttaatctacctgacagtttcttaccatcatttgattttattgatggacatgttaagcctgttctagggagaaagattaactggatgaagacagggatcgttgagagtgatctggttctaacagttagtccacattatgttaaggaactcacttatggcccagataaaggtgttgagttggatggtgtccttcgcacaaagcctcttgaaattggaattgtaaatggcatggatgtttatgaatgggatccttcaacagataagtacaccagcgtgaaatatgatgcaacaacggtaactgaagcaaaggctctcaataaagagaggttgcaagctgaagttggattgcctgtggactcgagcatccctgttatagtttttgtcgggcgtcttgaagaacagaaagggtctgacatactcattgcagccattccagagttcgtgggcgagaatgttcagataatcgttcttggcacgggaaagaagaaaatggaggaggaattaatgcagctggaagtgaaatatccaaacattgctagaggcatagcgaaattcaatgttccattggcacatatgatgtttgctgggtctgacttcattattgtcccaagtagattcccatctgttcatcacctggaggacttgttgacacggttgaggaggggtgtcaccggattccacatgggttctttcaatgtcgagctagctactctttgtgaagacaaggatcaccgacccttctcgtctttggtccaggggcctgcgaagaagtgggaggaggtgcttctgggccttggagtcgaggggagtcaagctggcatcgacgacgcagaggagatcgctccacttgccaaggaaaacgtagctactccatga

SEQ ID NO: 2350 - DNA, 654 bp, Zea mays
  Peptide Sequence Number=SeqID_44129
atggaggagctgagcgcgcaatcgtcggcgcggatcgtaggcgaccttctgctattggagacgcgcaagcatggcggtgcgcagatcgtccccaaccttctgctattggagacgggcggagcagaggagggcgcgccgatcctccccaccgtcgatgtcgcgcgaagaaaaggaaccatgacgacagtgcgcggatcctggccaaccttccactattggagaacgggcggagtagaggagggcgttcatggaaggttccggtatggcggactgaagcggaatttccttcccaacagcagcgcgggcggcggactggagcgacagggattgcggaatcagcgaggctggggcgcagagagcgcgggcgttgatggcgggatcactggagcaccttaccaacagccgcgcgggcgtaagtcctctttcgcgcgcctctccacccccgccgtcgccgcgcgcatccctatccccgcgccgccgccgtctcctccttcttcctccgatcctctaaacctagatcccaccgccatcgagcgcctccctgtcctcgcgccgccgcgcgcctccctgtccccgcgccgccgcgcgcctctctgtctgcgtgcctccctgtcccccgcattaggtgggattgcaagcccgcattatgtgtga

SEQ ID NO: 2351 - DNA, 954 bp, Zea mays
  Peptide Sequence Number=SeqID_44130
atggcggcggcgaccggcgcaggcgcggtgggcgaggggatgcgtcggctcacgcagctctcgcttgtctccaaggtctgctcggagctggagtcccacctcggcgtcgcggaccgcgtcctcgccgagttcgtcgtcgaactaggccgcgcctccgcctccgccgccgccttcgccgccgcgctcagggaccacggcgccgagctgccggactacctcgtccgctccctccacgccgtcatcaccgccatcccggacagcgcccccgctccccccgcctcacgtggcgctggtgcccgggggcgcgtggacaaggcggcgggagaggacgaggaccaggagccggggctgcaccaggtgcgccgggggagggtcacccgggtggccaacgccggatgcttcgttcgcctcgacggcggacgcgaggggctcgtgcacgtctcccagatgcccgcccgcggccgcggccgcgccggcgctaccgtcacgctcggccaggaagttttcgtcaaggtcgtctcggtggacggcgccaagctggggctgtcgatgctagacatcgatcaggataccgagaggggtctccatccgatgcggcgtccgcaccctgcggaggaggacgcgccgagggcaaatccgccagctgatcgccccagacccgccgggaggaagaagggggtttctgggattttcgtttccgatgaggacgacgacgacaaggctggtcctccgacgcgcagaccaactaggcggatgacctcgccggagaggtgggaggtaaagcagctgatcgcggcgggggtgttagatgccaagaactacccggtgttggatgaggatgaggaggggatgctttatcaggaggaagaagtggaggagcttgagattgaactcaatcaggatgagccccctttcttgtggggaaaagggcgatcctcatctgacatgtctcca

SEQ ID NO: 2352 - DNA, 519 bp, Zea mays
  Peptide Sequence Number=SeqID_44131
atgaaccatggagtgaagcaagagcaaaaccccaagccccggagtcattcccatcgccttgggcttattgacgagaaatggccagaagttatgttcatcaacgactatgcggtgttcataggctacctatctatggccgtgacggggacaggtttcctggtccttacatggtccactgtcgtcctccttggtggattcgtcaccgtactagcgaagaaggacttttggtgtctcacagtgattacactagttcagacaagatgttcaatctttgtgggtatgggtgatccgacgaatgactttgacccacatgggtttgagtacggtggaaaatatgtacccactagtggatatgggtttccagacatagttgtttttgtcgcatgtacattcatagatatggctagaatgactattattgtactagttacactatcggcacccctaggtatgggtaccctagatgctacaatcaaactatgttttcatgggaggataggctatagaccccatctatga

SEQ ID NO: 2353 - DNA, 975 bp, Zea mays
  Peptide Sequence Number=SeqID_44132
atggcgtcgccgcaggccttcgtctggtgccgaatggagcgaaggtcgggcgaagtggctgtctgcgggattcgcgacgtagttggtggccgaggccaagcttgggcgaggcggagaattcgctcgaggactgagcttgacgtcgggcaaggcggagaaattgcccgaaggctggacccggggtcggacaaggcagagaggttgcgaccgtgggctggatcctacttcgggcaaggcagagagattctgctcaaaggcccgtccgctcggcttgtcgtattaggcgtcccatcggagggcgccaggcggcgtgtgcgcacgctgttgcataggcgtaatcatgctgctgcaccggacgagatcgatgtcttgctcgggcgatacggactgagtgatggtgacctcgggcgaggtggagtgagtggcatcgacctcgggcgaggtagagcctggctcgaggtcctgtttgatcctcggtcataccgtgggagcctttctgagcgatttgcgagggtagcccccaagcccttgcatggagcaacgggtcgatcgagggatgtctcgacttttggttcatacgccccttcattgcctctctacgaggaggaagatggggaatgtgtcatgctaccctcgttgggcaacgagcatgacgtttcaactgagctgttaacgggtgatccaagcaggggtccgagctcctttcgattgggagtcagcttgaggtccgaagacacaccccaaaggtacctgcgggtgattcgcctggtcccagacccgttcgatggggtccgagggctcgatgcctccctacgatgggataccgacacgaatcgctcctgggggtctcggatatgtcttaagccctttcgaggggccaaccttcgaacccctgatcagtattgggctcggagccctgaagtcctgaggcggttcatcggaaccctgctgagggccgagccttcgaacctctga

SEQ ID NO: 2354 - DNA, 762 bp, Zea mays
  Peptide Sequence Number=SeqID_44133
atgggcatcatggccatggcatgcacgttgagcgggagatggcgccgcgccgcggccgacgccggcttcgaggtacgggtggcggagcctgaccatcactcggacatggacacctttgtggtgctggtgaactcggcggggtgggcgtgcacagcgccggctcaccggcatggtgtttctgcccacggctctgtgctgatccagatggtgtcgttcgacgggctggggtggctcactggcgtcacgttcaaggacctcatggcggtagcactcggcgtgctccgccagcgcttgcccctccacgactgccatacgcggaggcgacatgggtggtgccggcgacatgggcagcgccgacgacatggacggcggcgtcacgtaatctggcacgccgttgccaactatggcacctgggtcttcgtcttcatcttcggctacgaatacaacatgggtgtgcagctcactggcctcccggcctccgtcaccgccatgaacatgggcatcatggccatggcgtgcacgttgagtgggagatggcaccgcgccgcgcccgacgtcggcttcgaggtacgggtggcggagcctaaccatcactcggacatgggcacctttgtggtgctgatggtgtcgttcgacgggctggggtggctcactggcgtcacgttcaaggacctcgtggcggacatggaggaaggagtacaacaaggtgaatggattagagactgcctaggagatttgggacaccctcaaggtagtgaatga

SEQ ID NO: 2355 - DNA, 357 bp, Zea mays
  Peptide Sequence Number=SeqID_44134
atggcggtgacggaggccgggaggccacttctagaggttgtggaggttgccgtccaggaggtcatgccccacggcgaagtatggaggcatgatgagctgcgtgacgccgccgtccatgtcgtcgacgctgcccatgtcgccggcaccacccatgttgcctccgcgtatggcagtcgtggaggggcaagcgctggcggagcactccgagtgctgccgcaagctggaggggcggcggcgtgcgtgggcgacgcaccggcgggaggcggcgtgcgtgagatgcggcggcgcgaggtggagaagaacaggatcaaagctattcaacaaaagtcagctgttgatgactgtcaaaacggttaa

SEQ ID NO: 2356 - DNA, 183 bp, Zea mays
  Peptide Sequence Number=SeqID_44135
atgacgaaggtgatgcttgtcgaaggtgttcaaggctcaaaaaatggaactaagggcatcccatccaccctcatggttgcactgttatcccgggttgtcactccccaaacaggtccttacggagaggtactcaggaaagagcctgagccccctaaagtaatcacaaggaccccatcaggataa

SEQ ID NO: 2357 - DNA, 432 bp, Zea mays
  Peptide Sequence Number=SeqID_44136
atgggtcctttgttccttctgtccttgcgaacactcccgccgcaccccgatgtgaacccccactctttgatatcggtcggcgacgaccgggggagaagattcgccgaagggctcgtagttctcttccctcctctcctctcagcggcggtggcacaatctctgggctacggctcttcgcgtcagttgttgagccaacagcccaggtccggccacctcgcggcggacggttacgtggggtggaagagaaacagggtggcatgctcgtggattaagcagacagggtgggcctgtctatcggcccggtgcggcgccaagttgggtcgagcacagggagaacgtgcatgggccgaccaggcgctttcagcccaggcgcaggtcaaggacaggtaccacgagatatggagcatgaaggatgccgcgatgagtacgtga

SEQ ID NO: 2358 - DNA, 923 bp, Zea mays
  Peptide Sequence Number=SeqID_44137
tcaccaagggtggaaactacggatggcgtgtatacgaggggccatacatctttcacccgcaaaagtcgcctggagggaatacttcgcctgagtccataaacgcaatcttccccgtcatgggctacgaccattctgctgtgaacaaggaaatcgggtcagcatcgatcacaggcggatatgtgtaccgaggttccgctgacccctgcttgtacggaaggtacctctacaccgacctgtactcatcgctgatgtggacgggcacggaggccccagaggggagcgggaactacacgtcggccgtgaagccggtgagctgctccaaggcctccccgatcggctgcgagtccgtcgccgggagcacggacccgctgctcgggtacgtcttctcgttcggggaggacagccgcaaggacgtcttcgtcctggcgagcaagggcgtgtaccgcgtcgtcaggcccagcctctgcggctacacctgccccgcggagagaccggcgaccgacaacggcaccgcgccaggtccaggcgggccgtcgtcgggcgctcccgccgcgacacggctagggaggtcggtggcggcggtagcggtagctctggcgttgatcccgaaagggttgttggaaggcgcggaggaatcagctcttgtccccaacgcagcagcggctcctcggttctggccacggggaacgtcgctctcgtctggcggctgcgcgtcctcgtgctgggacggaatgccgtcgcgccggccccgtcgtgtcgtgcggaggcgtggccgcccaaacggggaaacaggagcaatatgtgctctgtttaacaattcgacagcagacggatcacaacgcaacaaaaatccaatgatgcgatcctcgctgtcaacgttcgtcggttgtgttccaactcgcgggcctggccggactgtataa

SEQ ID NO: 2359 - DNA, 474 bp, Zea mays
  Peptide Sequence Number=SeqID_44138
atggccgccggcagcggctatggcggcggggtagaggcgaaagcgaccaccacggctgtgtcggccgcggcccccgcggaggttcccacgtcggcggcctccgtcgacatctcgctgccgctcctgaagatgtcgcctcgcatcatgcaagtaccccgtccccacatctatcttcgatcctcttgcttcggctcgcgctcgcgctcgcgcttgcgcccggcctggtcacgcttgctgaaggtttctgtcaaagaagacaacggcaatgagtcttctgttactgttcggttgtatggaccaaatacggacttggtgattgataggaaaagggaattgcaggcgataccatatctctcagctgcagggttcggggctcggctacttggaatatttgagaatggagtagttcagtcattcatctatgctcgaacactgtcaccagcagtttcagttgcaatttcaaatgcaagttga

SEQ ID NO: 2360 - DNA, 422 bp, Zea mays
  Peptide Sequence Number=SeqID_44139
atggcgccgcggggctgcggtctgcacggcagtggaacacggcagtacgcgggctacggcactacagcaggcggcagcggccagcggaacggaccccatgtgttgctcgcgctgatccacgtccgccttgcgctcctcaccatcatcacccagtcgcttgtggtcctcgtcgtcgcttgcttcgagctcgcctggcacatcgacgcgtcgagatgtgaagccttcgttgcacagacgttgccctacctcgtggccctggcactcacctctgactccagcaccaagtcgatccttcactgcctcttcacgatccgcaacgtgttatcactgcacgactacgacgacgaccagagctacaacgacgatggcggagggggaagcacatttgtcggggggaagcggcgagagtgcgaatggtggtg

SEQ ID NO: 2361 - DNA, 894 bp, Zea mays
  Peptide Sequence Number=SeqID_44140
atggcgtcctcgcaaggggagtcggtacccccgtggctcaagtctctccctctggcgcccgagttccgccccaccgtggccgagttcgccgaccccatcgcctacctcctcaagatcgagcctgccgcggcgccattcggcatctgcaagatcgtgccaccgctcccgccgccgcccaagcggaccacgctcggtaacctctcccgctccttcgccgcgctccacccggacgatcccaccccgacattccccacccggcaccagcagctgggcatctgcccgcgccgcccccgccccgcgctcaagcccgtgtggctctctccccaccgctacacgctccccaagttcgaggccaaggccggcgcctcccggaaggcgctgctcgcgcgcctcaatgtccccgcctccaagcagctctcgccgctcgacgtcgaggcgctcttctggcgctcatcggccgaccgccccgtcgtcgtggagtacgccagcgacatgcctggctccgggttcgcgccctgcgccgcacgcctgacgcagctgcccccggcgaacgtgggcgagacggcgtggaacatgcgccgtgtggccaggagccccgcgtctctgctgcgcttcgtgcgggaggaggtgcccggggtcacgtcgccgatgctctacgtcggcatgatgttcagttggttcgcctggcacgtcgaggaccatgacctgcacagcctcaactacatgcattacggggctcccaagacgtggtacggggtgccgcgcgacgctgcactcgccttcgtggaggtggttcgcgtccatgggtatggcggggaggtgaactccttaggtgaggcggctgcattgcatcgttttcctactctgctgttaaaccttcgcgatgctgggtga

SEQ ID NO: 2362 - DNA, 1335 bp, Zea mays
  Peptide Sequence Number=SeqID_44141
atggccaccacgagcttccgctcactcctgctcctgttcctctccgtcctcggcgcctccgcgcgcaacgaggaggacgcccgcgcgctcgcggcgctcaagcgggcgctagacccggccggccgggtcctcggctcctgggacccctccggcgacccatgcgccggctcattcgtcggcctgacctgcggccgcgacggccgcgtcaccgccgtatcgctgcagggccgcgggctctcgggaaccctgccgccggcggtcgccgggctgcggcggctccaggggctgtacctccactacaacggcatcaaggggcccattccgcgggagattgggaagctgtccgagctcacggacctgtacctcgacgtgaaccatctcaccgggcccgtgcccgtggagattgctgccattgccaacctccaaggtggggctggtgttggatcacccggtcaagtagttggtgatagcttcagattcaacctagaggaggtagagtgcgcgacgcagtacttctccgacgtgaacttgctcgggaagagtggcttcgccgccgcgacgtacaaagggatccttcgggatggatcggtagtcgctgtcaaaagcctcagcaagacgagctgcaagcaagaggagtcggatttcctgcgtggtctgaagatgctcaccctcctacagcacgacaatcttgtcagcctgaggggattctgctgctccagggggagaggggaatgcttcctcgtgtatgacttcatggttaatggctgcctgtcgcggtatctggacgtcaaggatggttcttccggtgctaccgttcttgattggcctacaagagtttccatcatcagaggcattgcgaaaggaattgagtacctccacagcaagaagggcagcaagccaccggtggtgcaccagaacatatcggccgacaagatcctccttgaccaccacctggcgccgaggctctcggtgccggggctgcacaagctcctcgcagacgacgtcgtcttctcggccctgaaagcgagcgccgccatgggctacctcgcgcccgagtacgccgccacgggccggttcacggacaagagcgacgtcttcgcgttcggggtcgtggtcctccaggtcctcacgggaaggagggacgtctcccagctgaaggtcggcgccgccgctgtcagcgacctcggcggcctggtcgacgcgaacctcgacggcgcgttctcgagaacggaggcggcgaggctggcggctgttgctgcgtattgcacgagcgagacgccaggtcagcggccgaccatggaggccgtggttcagcagctcagcagcacccagtga

SEQ ID NO: 2363 - DNA, 988 bp, Zea mays
  Peptide Sequence Number=SeqID_44142
atatgctgggtactccacatgcttccggaaggaagctggttctcatggaagggacacagctggtatcttcagagtccaccagtttgaaaaaattgaacaattctgcattacaagcccaaatggcaatgattcctgggagatccatgaagagatgctaaaaaattcagaagatttctacaaggagattgggctaccataccaagttgtttccattgtctccggtgctcttaacgatgctgctgctaagaaatacgatttggaagcatggttccctgcatcaaagaccttccgagagttagtatcctgttcaaattgcactgactttcagtcaaggagacttggaattgggtatggccagaaaaagaatgacgagcagtccaagcagtttgttcatatgctgaactctaccttgactgccactgagaggaccctctgttgcatcctggagaatttccagaaggaggacggcgtcgaggtgccaaaggcgctgcagccttatatgggtggaatagagttccttcctttcaagcaacctttggatgccaaacaagctgctgactccaaatcaaacaagtccaaatcaaagccatcacgggaccgcccctcgctcgccgaagccaagcaacgccgccaccaccaccaccaccccaccaggccaccaccatcagctactgctgccgcctgcctgcgcctcgcctccctccaggctccaggaatccatctcccccattgctcccgtccagcagccacctgcactgtgctgcctccttcgttcgtctcccggcctccagtgtcctcggttcccgcggtaacccgcttctcgctttctttcttggcgaaggcaacgcagcaaagatcctggcttggatctgcgctcgcctgctttcttgcgtttcttggcctgtttgattctcgggctgctgctcggttcttggtcctctggattgggcccgccggtggaattatgcttgtttggtttgcagcctaa

SEQ ID NO: 2364 - DNA, 937 bp, Zea mays
  Peptide Sequence Number=SeqID_44143
ccttcccttcctccgcttctccggcctagctctcccaggtggaggtggagcggcggcggcggcttctccacctgtagtctccatggcgtccatctcggtccccagccgggccccttctgcagccgaagacgccgagaacattaggaaagcagtgcaaggatggggcacggacgagaaggcgctgatcgagatactgggccaccggacggcggcgcagcgcgcagagatcgccgtggcctacgagggcctctacaacgaacccatcatcgacagactccactccgagctctccggcgacttccggagcgcgatgatgctgtggacggtggacccggcggcgcgtgacgccaagctcgcccacaaggccatgaagaagcagggcgagcggtacgtgtgggtgctgatcgaggtcgcctgcgcgtccgcgccggaccacctcgtcgccgtcaggaaggcctaccgcgaggcctactccgcctccctggaggaggacgtcgccgcccggttcttggtgcggctcgtgagctcgtaccggtactccggcgagctcgtcgatgacgagctggcgagggcggaggccgcggagctgcacgacgcggtggtggcccggaagcagccgctgcacggcgacgtcgtgcgcgtcgtcagctcccggagcaaggcgcagctgaaggcgacgttcgagcggtacaggctggaccacggcaaggccgtcgacgaggtcctcgaggaacgccgcagcgaccagctcgcggcggtgctcaagacagcggtgtggtgcttgacgtccccggagaagcacttcgcggaggtcatccggagctccatcgtcgggcttggtacggacgaggagtccctgacgagggcgatcgtctcgcgcgccgagatcgacatgaagaaggtgaaggaggagtacagggccaggtaccgcacgacg

SEQ ID NO: 2365 - DNA, 315 bp, Zea mays
  Peptide Sequence Number=SeqID_44144
atggagcagggctacgtctacgggcgagcaggcggcaggcccgcacgcgtcccattcggaagaacaagcagccaccgggcacactactgtgccctcgtgaaaggaccccatgccaacaggccacttcctcgcgcgacgtcgccgccgcggctgtgcagccatgtgccgacgccctcccctcaaattgctgtttgtcgcggacgaatcggcacgaaacccgggcttggcgccttggccccgtccgcgtgctccagcgtcacgcacgcattatgggccctgtttggtttgtggctaaatgtgccacactttgtctaa

SEQ ID NO: 2366 - DNA, 177 bp, Zea mays
  Peptide Sequence Number=SeqID_44145
atggccatcctccgtcgtggaaccgtgctgcgtcatgggcagagcatgtcaacctcgtatgttggttcagggctgtatgatttaatccgggccatccacttcatgtcctacggctcagatgaaccatacctcttcaccgagcactttttgcaaaagggcccctcgggtttgggataa

SEQ ID NO: 2367 - DNA, 426 bp, Zea mays
  Peptide Sequence Number=SeqID_44146
atgggcaagagcaacaaacgcaagcgcgagccgactcctccatccgaggacttcggtgactcggagtactcggaggaggagttctcctctaagtccgaggggtctccggctcccgtctctcccccagcgtcgtctgatgactcggacgactctcaggggattgtcgcggaggtctggacttacatccaggccatcgagcgctccaggctcgagggctcggatgagtcggtgtactcctcggacgaggaggactcgctcgaggaggacggcgatggtgacgacgacggcgacggaggcgacggcggcgatgacggtgacgacggcggcaggggcggcaacggcgacggcaggggcggcaacggcggtagcagcaggggcagcaacgacggcggcagcagcaagggcagcaacaaggccagtggctag

SEQ ID NO: 2368 - DNA, 372 bp, Zea mays
  Peptide Sequence Number=SeqID_44147
atgggcttcaggataaacaggtacgggttcgggtattttaggtttagggcttcgggcttgggttttatgcctagatctaaccgtgatggccttctggataaaggcatcaattgggagggtgccatccccatggccgccgaggtgctggacctggagaccctcgacacagatgatgagggggaacatggcgatggatgggagcgatttgcgaacaccagtgacaagatcgagcaggtgcatctcgccacgctcattctcgacaacaatcaccccgcgcgtagagccgagaggtacaaattgacgtgggttcacatggcccagacgcgctgggagggtgccgatggagaccttgcagttggggcacatgattag

SEQ ID NO: 2369 - DNA, 596 bp, Zea mays
  Peptide Sequence Number=SeqID_44148
gttccgtcacgcagcgcacgccccctgcagcccctcgcgtgcggcccctgtggcccccggcggcacgcccctcggcgcggcgtcccggcccccccctcatggcgcggctccccgcggtgcggccctcggccctccctgcggcggcctcggcccccggcaacgcggcccccctgctccccccacggcggcctcggcccccccccccccgtggcgcggctccctcgcctcccccgtggcgcggctccctcgcctcccccggtgcggctccctggccccctcatgcgcggcccctcggccccctgcgcgcggcctctgccttcggcagcgtggaccccagcgcggttcctgagcgtgtcccggcgcagttcctgcgcacgtccccgtttacccaacgcgttcccgcgtccgcagccccacgcgcgcggaacttgggtgcagttcgcttcgccgtcgtgccgttaatggggctcagtgtatgcggctcgctctgccaaggtggtgatgaggatgatggttatgattatgactatggtaatggagaagatgaagctgtggaaggagacttccaggagttccaagattacgacgagttctag

SEQ ID NO: 2370 - DNA, 330 bp, Zea mays
  Peptide Sequence Number=SeqID_44149
atggcgtcctcgcaaggggagctggtacccccgtggctcaagtctctccctctggcgcccgagttccgccccaccgtggctgagttcgccgaccccatcgcctacctcctcaagatcgagcctgtcgcggcgccattcggcatctgcaagatcgtgccatcgctcccgccgtcgtccaagcgaaccacgctcggtaacctctcccgctccttcgtcgcgctccacccggacgatcccaccccaacattccccacccggcaccatcgtctcttcgcctcctccgccgccagtgttacagattggatccggagggcaccagaccaggattaa

SEQ ID NO: 2371 - DNA, 399 bp, Zea mays
  Peptide Sequence Number=SeqID_44150
atggcggtcgtggcatgcacggacacggtggcaagaatggagcacgacatggatttcgggaagccacggttggagcgcccgcggttacggcctgagcaaccctacatccctcactggttccaaaatcggctagcacaacgcgagggccgcacctacctctccttcgcctcctttgtcctcgccgcaatcccaccccgtccgctccactcgccccacgacgtatctcccaatcaccatgaccgactaggtgggctccacaaggacctgctggacctcgtcgccgcggcgtgcctcctgtcgctcgacctcctcctctttcgtgtcgtctacggctcctggcgcatcgctgtagccgccttcaccgcccgtcacagctgcacgcgactcgactgcccctag

SEQ ID NO: 2372 - DNA, 1683 bp, Zea mays
  Peptide Sequence Number=SeqID_44151
atgagcaggccgaatacccgcaacaagaacaagaggcctcgcgctgatgaatccaatagcccatctgtggctgttttcaagaagatacattccactggtgatatctcaaaaagcgatatctgtcagctttacatggtgtggaaaccgctttgccacggttgccatggtaactccaaggactcaccaaattgtttctgcgggttgattcccattggcaatggggttcgtaaatctggcctctggcagaaaactcaggaaattatccgtggtcttggtcctaatccatctagtgatcttcgtgattctagcgagacacctgctgggttgactaacctgggagcaacttgttatgcgaatagtattctacagtgcctttacatgaacacatccttccgatctggtattttctcattggatctggatgttttgaagaagcatccagttttagatcagctggttcggttgtttgcacaactacagtctagcaaaatggctttcattgattcaacgccttttattaaggcattggaattagacaatggtgtccagcaggatagccatgaatttctcaccttgtttctgtctctccttgagcaatcactaagtcactccaaggtccctggaactagagaaatagtgcaacatctgtttcgtggcagtgtatctcatgtaacaaggtgctcatcatgtggaaaggattcagcagcatcttcaaaatctgaagacttctatgaactcgagctgaatattaaaggtttcaataatttggaagaaagtctagacgactactttagtgaagaaggactagttggggagaatcaatacttttgtgaatcatgtcagaaaagggtagacgccactcgctgcataaaacttagatcacttcctccagttgttaattttcagctgaagcgttatgtattcctcccgaagacaacaaccaagaaaaagatttcttcgtctttcagtttcccagggcagcttgatatgggaaaacggttgtcaaaccctacatctagttatacatatgaactagctgctattttaattcacaagggtaccgctgctaatagtgggcactatgtggcacatataaaagatgaaagcaatgggcagtggtgggagtttgatgatgaaaccgtatccaaacttggtttgcacccttttggtgaaaacttaggaaaaacatcaaataaagatgataggaaacctcaaggcatttctatagaaggttctgttacgaacaataacaatggacaccaggaggctgcatcatcttctagccccggggagatgttttcatctacagatgcttatatgctgatgtacaaatgtaccaataaggatggcaatgctactgaaagcaacaaaattatggaattcaataatagtttgcttccacaccattttcttgatgaaattaatgaacaaaatgcatcgtgtatgaaatcctgtgaagaataccaaagcaagaaaggcagccatttggcatatataacagagaggcgccaagaagtaaaatctattctgatagaagcacccgcaaatccagaggacaattcatacttttggatttcaacagactggcttcgccaatgggcagataacatcactcctcccttaaacgtagaagggcaacagcaagtggctagtgacaggctgtcagccttcagatatggatag

SEQ ID NO: 2373 - DNA, 417 bp, Zea mays
  Peptide Sequence Number=SeqID_44152
atggaggcaccggactgtccggtgtgcaccggacagtgtccggtgcgccaacggctccaggactgcaacggtcgactgctccatttctggaaggaaatcaggcaccgaacagtgtccggtggtgcaccggactgtccggtgcgccacccgactgaaggcaagatttgccttcctggtttgcttccaacggctcctaggccccttgtgcctataaaagggacccctaggcgcctcaagcaaggacatattgagacaggatcttctattccgctgcaacctactcgaagggtcttcactccactgcgttctagtcttcgagtagagcgacatccagatcttattcccgagcctaagggaactttcagaaacccaagggaccctaaagcgcttcttaaggagaactcaaaacgaatttga

SEQ ID NO: 2374 - DNA, 336 bp, Zea mays
  Peptide Sequence Number=SeqID_44153
atggaggcaagaagacctttgaggtaccaagtgcacgggagaaggtcaaagaggctgaggaacccaaagccaagggtgaagaagaagacttgcaaagtcaagggccactctcgggagaagccgacggcgtacggctataattcaccggactgtcccgtggtgcaccggactgtccgagagtggagaagtgctgctaagagcaagagcaaggtcttgagtgtatcgttactctgccgaagtgctgccaagaagattgacatattgagacaggatcttctattccgctgcaacctactcgaagggtcttcactccactgcgttctagtcttcgagtag

SEQ ID NO: 2375 - DNA, 462 bp, Zea mays
  Peptide Sequence Number=SeqID_44154
atggcaaatgaggtgggggcaccactgggtaggagaggtgtgggcagacaaaggaaaaatagaatcaaaggttgcctagaaggcggtaggggcaagaaagcatgtgcaaacgaaactgtaaagcaatggaagctggtctgtattcttataggccaaggaagcagcgacattactcaaaaatggtttcctcgcgacgacagatttacacaagaacctagaacaccgcatttcgacaaagttatacaagaccctgactacatctatcagacttattacatctcgttcagacttatgtgtttcctgtttgtgccatgtatcagtggaagtctcaatgccctgggaaaagaagaagagagccacgagaaaggaaggggcaaaactggaagtctcaatgtcgctccctggttaacgcccagcgttctcagttccaaatgtgaaagaacatcagctttcaaccattga

SEQ ID NO: 2376 - DNA, 381 bp, Zea mays
  Peptide Sequence Number=SeqID_44155
atggcgttccttagccacacggtgaacaacgctcgtccccaccacatgggtagatcaaggggcaccatatggcaaggaaagatgatacatccaggatgtgtcagtcgagccgagccttcgcaagggagcgccagacccctatacgcacaacccggacccccgattgtggcccgggactcccgagtaagcgtgtcgggtctcttggatggggtccggatccctccgagtaaggtccgggccacaacaaggtcccgtgacaggggaaaccctggcaggagcaagggtccggtgttgatgtgtggccaggctttactctgcacatgcgctccccgctcaggcggagacccgatgcgcccacgtggctcattgcccgtgacataa

SEQ ID NO: 2377 - DNA, 413 bp, Zea mays
  Peptide Sequence Number=SeqID_44156
atgaatatgccccatgttctattccagtacgccgataacaggataagaaaaaccctatccacgttctattccacatctcaatccagtacacagccgccgccgcctgctgctcgtgtggttcccgacggttgtcgatgccgcggccccatcccggcgctcggcggcgcgcatcgccaacgccgcagccccgtcccgacggtcgccgcgaccacggccccatcccagcgggtcggcgacgcgcaacaagcatctcgcagctcggcggcggcgcatcccgtcgtacggtggcatccccattcccgtgaccacggtcccatcccgttgcgacgtcgtcccaccgccgtgccgtcctactccacctcccctgctaactcttcccggcgtacactcctctccaccgtctcccctacctg

SEQ ID NO: 2378 - DNA, 378 bp, Zea mays
  Peptide Sequence Number=SeqID_44157
atgggcaaaggcaagagaggtcgcagctcgccccaccatgtcggcgacaagcggaagcgggacccgagccctccttcggaggacttcgatgactcggagtacttggaggaggaggggatagctacggaggtgtgtacgtacatccgcttcgtcgagcgcgccaggcttgaggagtcggatgagtcggaggtctcctctgatgaggaggactccttccgctcgtccgaggagcggagcggcgacgatagcgatgacgagggtggtgacgacggcgacgacagcgacggcgacaaaggcgaagacggcggcggcaagggcgacgacggcggcagtggcagcggcggcaaggccagtggcaaggcgccactatttaaatag

SEQ ID NO: 2379 - DNA, 102 bp, Zea mays
  Peptide Sequence Number=SeqID_44158
atggttgtcggcgccagtgtggagaggttgggccgcgtagaggaaagggaaattgtcaggtgggccgaattgcgggttggcgacccaagtgtggttgagtag

SEQ ID NO: 2380 - DNA, 186 bp, Zea mays
  Peptide Sequence Number=SeqID_44159
atggagatagaagtcattcaacattgttactcacttgataatcattcattgcttactaaaatgtgggcaccaaataacaaagtgatgaggaacaagtttgctactgaggatgaggaagacaatgaagaatattgtccttctgaagatgaggaattagatgatgaggatgatcaaatatttcattag

SEQ ID NO: 2381 - DNA, 393 bp, Zea mays
  Peptide Sequence Number=SeqID_44160
atggcacgtggcccggcgtccccagctcgcccgcccctgcccgtgcgcgccacccctgctgccccggtgcgcgcgcggcctgcggcccttgcgcgcgacgcgcgcggccgcggtgcctcagccccggctcgtcctacctcgcgccccgtcctcggcgcggcgtgcccgcgcggcctcgcccgcggcgcagctccccggcctcgcgcggtcggcctcggcgtggccccgttgccgctcgcggcgcgcaacgcggtgcgtgcgcggctcggcccccgtcatgtgcgtggcctgtccgcgacgcgtcagcgcggccttgcgcgtacgtgctcgcgtggagcgcgcggtgctttggcacggctcgccgtgccctcggcgcgctcgtctaccccctag

SEQ ID NO: 2382 - DNA, 174 bp, Zea mays
  Peptide Sequence Number=SeqID_44161
atggcggcttgccctcgacgcggttcctccgccctcgccccccccccccccgtttcggggtcccgaactccatcatcaccgacaatcaacgccagggctgaagctaccttgccaactgacctgaaatacggctccgcgaggacgagggtgacaccgatcacgcaaccaagctag

SEQ ID NO: 2383 - DNA, 288 bp, Zea mays
  Peptide Sequence Number=SeqID_44162
atggcgagcagagcgcagcaaggaaatccacggcaacgccatggaggcgaggtagggatggaggaatggttggggaaagggctcggctgggaaatccggccaggggcaagcgcgaaagatagcttgagggagagggaggaagaagcagagagctcggccggcgagtcaagagctgcgcggctggatgctgctgccggcgagcagggagaaacgcagagggagaaaaaagatgtctgggcgcaagagcacgcgcggcactgggaaaagcttagctggccgaggagataa

SEQ ID NO: 2384 - DNA, 546 bp, Zea mays
  Peptide Sequence Number=SeqID_44163
atgggcaggggcaagggatggcctcaccgcgctgacggcaagcgcaagcgtcctccaagtccaccctcggaggattttggtgactcagagtactcggaggaagtttcctccgagtatgataggtcgcccgctcctacatcccctgtggcgtcgtccgaggactcggacgactccatggggctgtccaccatggctcgagcatactggtgctccatagaacgtgtcgggctcgatgagtcggatgtctcggaggaggtggaggactccttcgactccgaggagtggagcggcggcgagggcgatggcggcgagggcgatggcggcgagtacgacggcagtagcggtgacgacgacggcaagggcggtggtgatggcgacgacgaagatgtcaacggcaaagatggcgatggcgagggagacagcaggggcgatgacaacggtagcggcaaaggcgacgacaagggcgatagcgacggaaagggcgacgacgacggcaagggcgacgacggcgacaacgaggccgacaacataatgctgctagcttaa

SEQ ID NO: 2385 - DNA, 306 bp, Zea mays
  Peptide Sequence Number=SeqID_44164
atgcccatgatttctcatttcctgcccttgtgcgtgcgcaattgctcaccggagcaaggctgcgccgtagctgagccattccgccacggaccgccaccctctggcgctcctgcgcccggtatcgtgcccgcagttgtgttcacctcgtcaccccgaacccacctgttcccttcccagcgccccagggcccccgcgtgcccgcgccctcgccttcggcgaagctccgccaaggagtcgggcggcgccgccactggcaacccaggaacccaggccgagtttgttgttggatctcaggcgtccatctga

SEQ ID NO: 2386 - DNA, 1356 bp, Zea mays
  Peptide Sequence Number=SeqID_44165
atggacgaccacgacgagtacgccaagctcgtcaggaggatgaacccgcccagggttgtgatcgacaacgaggcctccgacgacgccaccgtgattaaggtagacagcgtcaacagccacggcacgctgctcgccgtcgtccaggtcatcgccgacctcaacctcgtcatccggaaggcatacttctcctccgatggaaactggttcatggatgcgttcaatgtcaccgaccgtgacggcaacaaggttctggacgcctcaaccatctcctacatccagaagttaccgtactgttcctcgcagacgctggaggtggacgactggtactacccgggggcgcacaacacggtgggcatcgtgccgtcgggggactacacctccatcgagctcacgggcacggaccgcccgggcctgctctccgaggtgtgcgcggtgctcgcggccatgggctacgcggtccagagcgcggagctgtggacgcacaacacgcgcgtggccgccgttgtgcacgtcacggacgccgagactggcggcgccatcgaggactccgcccgcatcgccgacatcagcgcgcgcttgggcaacctgctgcgcgagcacagcgacgtgcgcgctggcggcggcgcgggcagcctggcactccacaaggagcggcggctgcaccagatgatgttcgacgatcggggagtggaaggccacgccgcggccgcgccgcccgacggctcgctgcggacggaggtgtccgtgacgcatgccgagcgcgggtacaccgccgttgtggtccggtgccgggaccggcccaagctgctgttcgacaccgtgtgcaccatcacggacatggagtacgtggtgcaccacggcaccgtgagcgcggagcccggcggcggcgcgtaccaggagtactacatccgccacgtcgacggccacgccatccggtgcgaggacgagcagcagcgcctcgtgcggtgcctggctgccgccatcgagcgacgcaccgccgacggacttgagctggaggtgcggacgggagaccgcgcgggcctgctctcggacatcacccgcatcttccgggagaacgggctcaccattcgccgcgccgagatctcgtcctccgacggcgaggccgtggacacgttctacctatccgacccgcaaggcctccccgtggagaccaagaccatcgaggccatccgtgcacaaatcggcgaggccacgctgagggtgaggaacaacccgttcggtaccggggacgacgccgacatggccggcgctggcacaacggcgttcatcttcgggaacctgtttaagttctacaggccgttccagagcttcagcctcatcaaactctactcgtga

SEQ ID NO: 2387 - DNA, 396 bp, Zea mays
  Peptide Sequence Number=SeqID_44166
atggcggcggaaccaatcagaacagcgcttctcttcctcgtcctcctcgccctcgcctcctccgtggccgccgcatcgacggcaccagcaccagcgcgcgcgccaacagcgaccgggtgccggcgcggcgacctggtggtgcggcagcgcgcgacggggcgcgtggtggaggggaagcccgagtacgcggtggaggtgcggaacgcgtgccggtgcgcgcagtcccgcgtgctgctgcgctgctacgggctcagcagcgtgggaggccgtggacccgcgcgccatccgcgccgtggacgcccggcgctgccgccgcgcgggggcgccgtgcgcttcacctacgcctggatgacgccgcaggacttcccgctcctcagctcgcgcccgcactgctag

SEQ ID NO: 2388 - DNA, 429 bp, Zea mays
  Peptide Sequence Number=SeqID_44167
atgacccccttggcacaccagaaagtccagtgcagcctggtgactattggtgaagtccacgcgtcgcccactgattgcgctgttgaccgttggcgcgggcatgactgctacaccggacagtccgtgaataatagcgaagatgctctagggaagagattatacgaggcaattatccagcccaccaaaagaatcgtgaataccttctctcggcattgttcaccttcgtttccatatgttattgtgacgaagcttaacatctttgccattgtcctcaatctattccggaggcgccagtcattgggagttgttccgctcggtgggctttctacgtcagcacggatggcccgcgacctagggtcagacagtctgcgatctggcagtaggagcgaggttccctacgctgagttggatggtccacttagtggctga

SEQ ID NO: 2389 - DNA, 198 bp, Zea mays
  Peptide Sequence Number=SeqID_44168
atgaaggggctactgttgggggtctgcttcgtcgccgaagacgatgagccgcccgtggttcttgagtgtgttgccgaagatcttcctgagcaacaacctggggactcgggccattttcctgagtacctctcttgctcaggaggagatgctggcaacatggaggactttgaggagttccaggactacgacgagttctag

SEQ ID NO: 2390 - DNA, 201 bp, Zea mays
  Peptide Sequence Number=SeqID_44169
atggatcattggatcaagatccaacggttcaccacctttcttagctctatccgccccaggccgttcgctacagatcaacggaccaagccgcgttatcctcctcggcgacactcgggcacaaacgagcgccccaacgaatgcggcggcggctcgccggagccacaccccgagggcacaccagagcaccgttttcctatctaa

SEQ ID NO: 2391 - DNA, 651 bp, Zea mays
  Peptide Sequence Number=SeqID_44170
atggcgctgctgcctcctctcgacctcgctgcggtcgcccgcgtcccctccgtcgcccgtgctaggccgggttcgcgcaccaccgcctccgcatccccgtcgccaacggcgacgctgctcaccggcgagcgcctcgtggtcttcctcttcacgactccggtgcacctcgccgtgttgctcgtgatcctcgtggcggccgccctcgtcgtcgagctcgcccaggacggctccagatgtgccccgcttcgctcgtccctcccccaaggagccgagaggctaagcccatgcgcttcggccgttgctgaccgcagtagtcacgcacgccaagcaggagcagttcgagcgctagcagggattggagcatcaagaagatcctccaagaccaagatgcagtcacatggaccacagaacatcgagggcaccgagttgcgggagcaggcagtggagtatgctcctgtaatctttgcacatgacgcctataagcacttcatctccttcgacttgctatccggtgccgccaccatctattgctaccaccttttcacctatgatttttcctctttctttttaactgggagtacaattactcatggtgcaccaggcatcaaaatgggtcaaatagatagaattgaaaaagaattagaaagctaa

SEQ ID NO: 2392 - DNA, 1593 bp, Zea mays
  Peptide Sequence Number=SeqID_44171
atgaggggaggaggagccggagagaagctccaccacaaggaggccaatgccgcgcacggcgccggcgccggcgccgcggggaagggggccaaggcttgtttcgtcaacggcctcctcctctacgtcgtcctgccggtgctggtcttgtacttcgtcatcatcgccgcctcgcagttctacaaccctcggtgctcgccggagggcaaagccatggcgacgcatttcgttgtggctaacaagcccaacgcgtcgttgaacggatcgactcctccaccagcgactctggcgtcgtccaagacgaggccgacggcagaagaagcgcccaccgggctgcgccatatcgtgttcggcatcggcgcgtcggcgtcgctgtgggagagccggaaggagtacatcaagctgtggtggcggccggggcggatgcgcgggttcgtgtggatggacaagcccgtgggggagttctactccaagagctcccgcacggggctcccggcgatcatggtgagctcggacacgtccaagttcccctacacccacggcgcgggcagccggtcggcgctccggatctcgcgcatcgtgtccgagacgttccggctggggctccccggcgtgcggtggttcgtgatgggcgacgacgacacggtgttcctgccggagaacctggtgcacgtgctgtcccagtacgaccaccggcagccgtactacatcgggtcgccgtcggagagccacatccagaacctgatcttctcgtacggcatggcgttcggcggcggcgggttcgccatcagccgcgcgctggcggaggagctggcgaagaagcaggacgggtgcctgcaccggtacccggcgctgtacggcagcgacgaccgcatccacgcgtgcatgtcggagctgggcgtgccgctgacgcgccacccggggttccaccagtgcgacctgtggggcgacgtgctgggcctgctgggcgcgcaccccgtggcgccgctggtgacgctgcaccacctggacttcctggagccggtgttcccggcgacgccgtcgcgggccggggcgctgcgcaggctgttcgacgggcccgtgcggctggactcggcggcggtggcgcagcagtcggtgtgctacgaccacgcgcggcagtggacggtgtccgtgtcgtgggggttcgcggtgatggtggtgcgcggggtgctgtcgccgcgggagatggagacgccgatgcgcagcttcctcaactggtacaagcgcgccgactacacggcctactcgttcaacacgcggcccgtggcgcggcagccgtgccagaagccgcacgtgtactacatgcgcgggagccggatggaccggcgccggaacctgaccgtgacggagtacgagcggcaccgggcgaagcaccccggctgccggtggcgcatcgccgaccccgccgcgctgctcgacagcatcgtcgtgctcaagaagcccgaccccgacctctggaagaggtcgcctaggaggaactgctgcagggtggtgtcgtcgccgaagcaggggaagaaccggtcgatgaccatcgacgtaggtgtttgcagtgaaggcgagttcgccaaggtttaa

SEQ ID NO: 2393 - DNA, 399 bp, Zea mays
  Peptide Sequence Number=SeqID_44172
atgcacctggctttgtcccttaaagccgggtgtgacaacggcgcccgccggaagcgctccgcaggcgacgccggcctcgcctcgccgctctcggccacgcccaccagcggcgtcaccgacgggccgttcaagaacaccaagacgctcgaggctcccatcaaccaacgtccaggagtccaggcgcgtccgcccaagcagcgtccaggcgcgtccgcccgagcagcgtccaccgtccaggccggtgtccacgccgtccagcgaccgagccggccgcaccgcaccgccagaccgactgaccgagcgaccgtggctcgtctgcccgaggctcccagcgaccaagattcagtctactgctccagacgtcgccatcgtcgcaccgacccctgcctccagctctag

SEQ ID NO: 2394 - DNA, 993 bp, Zea mays
  Peptide Sequence Number=SeqID_44173
atgagtagaaccaaactaggaagcagacgctcaacttctagatcttacggtgacctcgactgccgccgtccaccttgggcccgaagaccgtccaaaacctggtggcctagtggcgatcggcggccggagcagctaaatctaccggcccggcggctgaatcgatcggcgcagcgaccaaatctacggccggcgggcgggaggtggtcccctggaggccggatcggcaagtggggacttgggggcgtcgggctgctggtggggtttcgctggaggctgccgtcgtggagcaccggccaccggggctggcaggcgggcatcagcgatggagtaaagggtgcagcacgacagcacgccagcggccagcagggggcaccgggcaggtgggcagcagcaggggacagcttttatgaattatcggtatatgggctgggtggttcaacagagcacccaaaccctaacgacattaaaggtcttgaggcagataaactggagtgcaggctctatgtagggaacctagacttcaggatgtcagagtccgatgtaatcaagatgttttccccttttggaaagattacagccgaggattttctgtggcacacacgcggtccaaagagaggcgaaccccggggctatgcctttgttcagtacaccactaaagagttctcacctttggcacctgatgtaagcattcaggaagctcagttagcaaaggagaagatgaatggaaagttaatctgcggacgcccaatggtagttcaccttgctagtgagagaagttctctaggctcttcaagttcacatagagcagtcaaagacaagaaattggcaggtggttcaggtgccaaatcacaatatactgatacagctgcaaagatagctgctataaaaaataagttgaaatctctggaggatgggggatgtagcacaaaaaaaccaagacttaatccagacaacttgacagaaatcagggaacagtctcataagaagttttga

SEQ ID NO: 2395 - DNA, 183 bp, Zea mays
  Peptide Sequence Number=SeqID_44174
atggaggtgaacaggaccgcgcatctcagcatctgcgactgcattaagatcgcaaccatgtgcctgcctatctctatctgtctacggcaccagcaactaaaccttattgttgtactattattgttagagcatgaaccttattctattatgctagagcatgtcatgttagctttgagggtctag

SEQ ID NO: 2396 - DNA, 606 bp, Zea mays
  Peptide Sequence Number=SeqID_44175
atgggcgccgtgtaccttgttccgctgccggacaacctcgccctgccagttttcccctttccatgcgcgctctcgccgagaacccagccaccaccaacaggaatcgtagacggagagagagttagagaccgcggtacggatcttcctcacgcgcgaggtattgggatggatggactcggttcattggtcgacggtgagcttcgatgcttgcgttgtcgtcggggggcggagaaggacctcgtggccactagaatttctcacccatgccgctgctccgccgtggaaccactggcgccgtggtcggagaacatcagcatcctcaccattgcgctccctggattgggatctagagcacaggaccgccatccagcaggctcacccgcgatgccccgccgtggccacaggcagcgtcgccgttaccaggcttgggcgatgggggtggaatatgggccgtcaatcccagatgaagggctgggatttgatcccggattctggtttggcctaaactcttctcagtcgtctgatgtggatccggcgcgtgataatcgacctaaggacttaaaatccaggcgcctggtcgaagatccaacggcaaggattgtgtaa

SEQ ID NO: 2397 - DNA, 645 bp, Zea mays
  Peptide Sequence Number=SeqID_44176
atgtggaggcgatgcctactacgcaagagaagagtttggccatcgggtcagctggcttcaccaaagacttggaggccacaagcctggcgaagctgtgtcgccttccagcctgtagacgacagggatgagggtggccacagttaccagggcgatgaaagccatgattgtgaagacaggtgggtcgaagacgagcatccagagtactggggcaaggcaaaggcccataaaagcgggtgggtggagcctccgcccatgatagcgttgctaagaagggggccatttggaggccgccgctgcgcgcgtagtggccccctacgcgaggacgtaactaagcttctggctgaactagctacactgaaagtgggagtcgaggacacggaggccccaatgcaggtaggggtcgaattcaggaatcttctgagtgccgtgaacgctcttgcgctcgagggctgccgccacttcaagccccttagatatattgacttggactttgaccgcgcgtcgcgaacttgggggggggggttcaagacggagtgtgactgggggactccgcgggatgctgaggctataaccgtcgccgccacagagaacatagatatttcgcgcgctggtgatgacatggcgaaggaaacccaacaggtgtag

SEQ ID NO: 2398 - DNA, 231 bp, Zea mays
  Peptide Sequence Number=SeqID_44177
atggtgccacatgctttctggctttccctgagttcgaagtcaaggaaagggatcaagaagagcgttattttgaaaagtgaagttgtggtgattagtccgcccttcactattgagcttggcgggcaggatggggtagccttcgttagcgaggtacaggcggaggccatcaagatcattggaaagtatgtcgggaagttggagtggtcagagtatggacatccgtgggggtaa

SEQ ID NO: 2399 - DNA, 1167 bp, Zea mays
  Peptide Sequence Number=SeqID_44178
atggagatgctaatgagggtgccagggcaagatgttgcttttgagccagcaaagcttctctggcttatccagagggatttcctccgtgacaaatatattgatgaggtcaatcaaatacgagattcgttggcagttatggggaacaacagcactgcttttagcttgcctcagccgcatcttcaaagaacaaaattatgtgatatggaggacaaagaacttgaacccttatatgtaaaacggcgggagcaattaaagcagcttgtttcgtctattgtaaaaccaaaaattgtgcagggcagaactctaaatgggaaggactttgtgtctttcttgcagcagattcttgaggctttgaataaaggcgaaattccatcaacagggtctctagttgaaatttttaacaaagccattcttgatcgctgtctgaaggtgtacagggagaaaatggatggcttaggcctaccagtaccggtagacaaactgcagaaacttcatgagatggcaaatggtgatgctagaattctctttgataagcagcactttggcaaacatcatgctgctcagtcagcactcaagcttgaagatgatattaaaaaggtgtacagaaacttacttctagctaatgaatatcaatcgtcaaagctgtgtgaagctcgcttttctgagtgtgaagataagatggatcaccttcaagtcttgaaacttccttcgatggcaaaattcaatgcaggctttactcactgcaaccaaagtttcgtaaaggaatgtgttggaccttcaaaagaaagctatgaacgtagaatgtcaaagactttagtgtggaaggagggaacccgtgctgtagttatcctgtgcattgatatcttctatggtattgcgatttctactcaaatgcttgccaagtctcgtgctcttttcatcaaggagtacaataacaagcttttcaattggttggtgaccttctctttggtcatggtggtcatcgggcgctttgtcatcaagttcttcctacttgaaatcgccgcctgggtgatgttcatcttcctagagacgtacacgagaatgttctggtcagcggaatcgctgtactataatccagcttggcacatcattgtttcttcctgggaaaccatcgtgtacagcccaattcttgatctggacaggtag

SEQ ID NO: 2400 - DNA, 864 bp, Zea mays
  Peptide Sequence Number=SeqID_44179
atggccaaccgcggcgctgcggccggcaagctcaccgtcgccgagacattctccaacctcagggagcaaggcaagtctaacctgggaaattttcagagtgcattcatcccgttcatcactgctggtgatcctgacctggcaaccacatcaaaagcattgaagattctcaattcctgcggttcggatgttatagaggttggcgtaccatactcggatccactggctgatggaccagttattcaggcttctgcaacacgggcgcttaagaaaggcactacactcgattctgtcatagaaatgctgaagggggttacacctgagctttcttgccccattgttcttttcacatactataatccaattctgaaacgtggtgctgcttacaacgccaaccacgccaacagatcggatgaagggaattgcacaagcttcagaaggatttctctatcttcatggctagagaaatttgcgttcaagaatggttatgagaaaattcctgacaaaccggtagctgttggtttcggtgtatcgactccagagcatgtgaaacagatcgtgggctggggagcggacggtgtgattgttggcagtgcgattgtgaggcagttgtgtgaggctgctactcctgaagagggtctggaaaggctcgaggagtacgccaggagtatgaaggctgctatgcccctcggcctcgggagaaggtctccgcctcgcccgaccccaggcctcggcctcagccttggcctcggaggagtcacatcctcgcccgacctcggcctcggcctcaggagaagtctccgcctcgcccgacctcgggctcggaccgactacgctacaggggatacatcattaccctactcctag

SEQ ID NO: 2401 - DNA, 387 bp, Zea mays
  Peptide Sequence Number=SeqID_44180
atggcaggcgcgttggggcgagcggggcgggcgcgggggaggggaacgagcggagagggggccagcatgggagccgagcacgacattggttccaagcagcaacgtcgacacgccaacgcactggatccccatggtcttgcctcaaccctcttccccttcccctaccgcgagctccgcttcatgccccttgagggcctccgatatgagtcttgtcccgggcctctaaaatatcaggaccggcactgccccgacggcagtagatctattgagctacctagcgatgattccagatatagcaatggcagcatcattcacaacagcggagctttaatgactaacgaggtgaactttgttaacgagtacaacccgtccctcgaatctagataa

SEQ ID NO: 2402 - DNA, 549 bp, Zea mays
  Peptide Sequence Number=SeqID_44181
atggagcgcgtcttctccgtggaggagatccccaacccctactgggttccgccgcaccctcaatcggcggccgccggcgctgttgctgcaccagcgggggaggcggcggggctgatgaaccggtgcccgtcggaatggtacttccagaagttcctggaggaggccgtgctcgacagcccggttcccgtagccggcgccagtaggggcagcgttggagctggagttgaggctgcggagagcaagacaccgggggccgcggcgccggcggctgcctcgagctcggttgttgaccccgtggagtacaacgcgatgctcaagcagaagctggagaaggacctcgctgccgttgccttgtggagggcttctggtgcagcacctccagatcattctccagctggttcttccttgccaagtgtggatgttccacacgcaggccctcttaaacccatcggagctctcctgcgttttcgaaaaaaaaaggaccagcaaccactaaaatctatccagacgcaaccagagtttttaagcaaagcttattacatcgactga

SEQ ID NO: 2403 - DNA, 1062 bp, Zea mays
  Peptide Sequence Number=SeqID_44182
gggcaagatgttgcttttgagccagcaaagcttctctggcttatccagagggatttcctccgtgacaaatatattgatgaggtcaatcaaatacgagattcgttggcagttatggggaacaacagcactgcttttagcttgcctcagccgcatcttcaaagaacaaaattatgtgatatggaggacaaagaacttgaacccttatatgtaaaacggcgggagcaattaaagcagcttgtttcgtctattgtaaaaccaaaaattgtgcagggcagaactctaaatgggaaggactttgtgtctttcttgcagcagattcttgaggctttgaataaaggcgaaattccatcaacagggtctctagttgaaatttttaacaaagccattcttgatcgctgtctgaaggcgtacagggagaaaatggatggcttaggcttaccagtaccggtagacaaactgcagaaacttcatgagatggcaaatggtgatgctagaattctctttgataagcagcactttggcaaacatcatgctgctcagtcagctctcaagcttgaagatgatattaaaaaggtgtacagaaacttacttctagctaatgaatatcaatcgtcaaagctgtgtgaagctcgcttttctgagtgtgaagataagatggatcaccttcaagtcttgaaacttccttcgatggcaaaattcaatgcaggctttactcactgcaaccaaagtttcgtaaaggaatgcgttggacctgcaaaagaaagctatgaacgtagaatgtcaaagatgcttgccaagtctcgtgctcttttcatcaaggagtacaataacaagcttttcaattggttggtgaccttctctttggtcatggtggtcatcgggcgctttgtcatcaagttcttcctacttgaaatcgccgcttgggtgatgttcatcttcctagagacgtacacgagaatgttctggtcagcggaatcgctgtactataatccagcttggcacatcattgtttcttcctgggaaaccatcgtgtacagcccaattcttgatctggacaggtag

SEQ ID NO: 2404 - DNA, 234 bp, Zea mays
  Peptide Sequence Number=SeqID_44183
atggaggaagaggcaatcatcaaacaactagccatggcaacaaggatgggaaggagggccgtcagtggtattgccggtgccaggaagcgaaccagtgggcgggggcttggagaagatcccaggttttgccaaggaatgcttgaacaccgctcattcccaatgcttgccgaacttgcggatctccagcttgatgtcctccatggcggcctccatcttaggtcaccactgctctag

SEQ ID NO: 2405 - DNA, 453 bp, Zea mays
  Peptide Sequence Number=SeqID_44184
atgagctcagggaagcatttgagaacaagtcctcaacagcgccctgtcccggcagacccctctagggcgcgacggtatgggcagtgcccggcgcggctagatcctagcgcagcagtgtgtccgggccagaaccgcctcaccgcgccagcatccgccctgcgccaaggaccgctgttcgtcggcatcgtgcagccctttcgcgccatgcacagtgccctcgccttaccaagcgacgtcgtgagcctgcgcagccccctcgccgtgtgtccacgtctcaccatcgccgccgtcgagcatcgcccatggctgtgcccgggcctgctctgcgcatcccggcgtggcgcgcggctcgtgcggcttgcctgcagcgcgtggccaacggcctgcccggcttttcccaagcaccgacgaagaaggatcgacgacacgccgtccgtgtccacacgtaggtga

SEQ ID NO: 2406 - DNA, 197 bp, Zea mays
  Peptide Sequence Number=SeqID_44185
agactaatttcgagatcaaaaatctaatcccccatctaatccaatataaagggctaattgcagggcctaaaactcatccaaaacaagcatttaagaacaagtctccaacacctgctatagaaggttctaagatagaggctgttgaatctaccgaagctaccctcagctttggaggtaacacccgctgcggcagctga

SEQ ID NO: 2407 - DNA, 1047 bp, Zea mays
  Peptide Sequence Number=SeqID_44186
atggagggggtccccctgggccttatatacatgaccatggggggggtcttcccacacaagaagctttggcactcatctggcttagagctggaggttgactctgccgctctagaccttggtggtgacccgacgagtaccgatctcgaagatgacattgagagttgtggtggcatcagagctggtgggcatgtttcagatgaggaggaagtggatgagggtgaggaggatgttcctcctttggttcgcatgaatcgttgtagcaaagccagcaacgatgtcctaattcaggctctatcaaggctggagatcattccagaaggtctcttattggaacttccagaagctggggatgctggcatccgtgtagaggtcccagatgatgttccttcagctagccttcttgctgggcaagaaataacccgggcagtttcccatgcatcttcgacctttgagggatgtctgatttgcgaggacacttcggtccctaatgttacacgtgagggttatccagcccccgagggtacgattgaggataacccagcccccgagggtgttactgaaggtggtctagcccccgagggtcttgaacttggctcttcttctgctgcttctatggttgttcatgttgggtcaccaccggttcagtctgaggaagctgcggtgacaagtcttgatcttcctactgctcttgccggcccggctactttagaggtgagtaatccgggtgttgaggatccactgcgtgctgttggagccgagattccactaggcgtcgccctgagcatgagttacaatccttctctagcgctcaaacctgctctcgatattgcctgtactagtgtccctctatttgatagtatctcaacgcctccggccttgggatttcctctgttcctttctaaccttcagaatattctaagctcagtgttgactcagccgagggcgtgtggtacccctgttcccaatcaagttttatctttgttgcagtggaaccgtcttctgcttcagaaacagatagatgacatgaaagctttgaacgtaggctag

SEQ ID NO: 2408 - DNA, 411 bp, Zea mays
  Peptide Sequence Number=SeqID_44187
atggaggccggacattccgtgaaggtagatgcgccctacggtgctctctggtggacctcagactgtccggcctcaaaggtcggactgtccgcgagagggttgcaaattgcaagcctctttgttggatgttggaacatcaggcctcagtggttgtacgtctgcgggagggcctacgcattgctgccctctctactaggcatcaaactgttcgacttcagtggcaggactgtccgcgagagggcctgcgctcagcggccctctatgctagacgtcggaccctccggcctcagggctcagaccgtccacatcctggtgcagactggtccaaagcacaggggcatcgaccatagcattgcaagccgatgtgtctgcatgtacaatttctatttcatcgcctacccattgaagtaa

SEQ ID NO: 2409 - DNA, 231 bp, Zea mays
  Peptide Sequence Number=SeqID_44188
atggcgcaccggacagtgaacaggacctgtccggtgcaccaccggactgtccggtggcccacatgtcaaaagctccaacggtcgaaccctaacggttgggtgacgtggctggcgcaccggactgtccgaaagctaggcaagcagggcagtgagctgatcaggaccaacatgacattcagcggtgtcgggagtgatagtcccattgaggcaaaagggtgtcacttccattga

SEQ ID NO: 2410 - DNA, 375 bp, Zea mays
  Peptide Sequence Number=SeqID_44189
atggcgtgggccgggtcagcaccagccgatgaaaggggtaaagggccccagcgcggccgaccgacgaaggccgaagcccatgcatgcatccatccatccatccacgacgaccacactcagtgcagtgcagagatcagggaggatggtggggccacgcccggctgcgctgcactgggggcagagagccagagagggtgggggtgggggggcagacctgtgactctgcgcgtggccactaccactagagtagagctgaagttacatgtgccgtacatgggtgatggccacatgtggatgtggatacataggaggaggagtagatgggtgcatgctgcagagacggacagacagacagacagacaggaggaggagtaa

SEQ ID NO: 2411 - DNA, 363 bp, Zea mays
  Peptide Sequence Number=SeqID_44190
atggccggtgtgcggccaactggcgatttcggcccaaacctaactaagttggtgatgctacgcgaccctgtgcatgcggcggaaacaaccgaggacttaccagcgttagctatggctcccaaaaggttgcccacggcgatgggcgacattgcagccgcgatgaacaacgatgagcaattagggcgcaatcgaggccccacggaatcaatcgcacccctgaacacaaaccctagggcacagcgaacaccccagcaaagcttggaggccctggtggtggccgaactccgacatccccatggcggcaagctttctctccctctcggtggcgctgctgcgaggcgaaaggagttgtggctcaagtag

SEQ ID NO: 2412 - DNA, 843 bp, Zea mays
  Peptide Sequence Number=SeqID_44191
atggagtttggtgtgttggtggtcgggtcgtggttccttcactgttgggagggcgccgggagtatcgtccttctcccctttgaggcaccggtggcagacgtggaagattggaggcggttcgaatcggcctcgccccagggtgatctaagcctcaggactatcaaggagacactcggtagctttggggttgcaatctcgattgcttgggcgtcgatgacacgagatttcacccctttcggcgagtgtattttcgcgtggtcaagggctagggcggaggcgcagctgtccgccctggagcagctctgtgtgggagccgcccattctgaagtaaagctgtgtgagcttgccgagctccgctccaggaccgaacgacttgagagtgaggcggtccaactacgctcctctgagggtgagggtgccaaggtcgaagccgatcacctccgggaagaggagacccaacttcaggggagcctttgtgaggcgacgatcgtgctctctgagcggagcgccgagctccaggagctctacttggtcgtcggcaaggtgtgtggccacctttttcccctgcctccaatcaaggtgcccttggtcggctggctgcagtcactacttggccatgcggagcacgtcgttgtcgtgggcatgttccatctgagcgacctggctccggggcagatggtgtctcacttcattgagattgacgcttctgtgatcgccaaaggctttactgccggtcgaaacgaggagctaggcaccattgaagatcagctggtccgccctcgtgctagatcgcttgccgaacgagttgatgtgaagaccctgttgtctacccctaggatctga

SEQ ID NO: 2413 - DNA, 378 bp, Zea mays
  Peptide Sequence Number=SeqID_44192
atggaggtcatgagggaactgaggatatgctggtcgagcgtcgtgtgtactttggattggttactcgaagaatcgtcgcctttcttggtgatgatattctcttttggtgcaacagccgagccatcgagtggtgaaataaaactgaggtctcccatacctttttcaggcattgaatccgtgtactggtgggagggaaaggtacaatctgatgctgaagaattactcatcatcaagaccagggaatcacttctggatgccttgactgcacatgtcaaagccaatcatgaatatgatgttcctgaagttattgctctgcccataactggtggtaacaccaagtatttggaatggatcaagaacagcacccgggacaagtga

SEQ ID NO: 2414 - DNA, 333 bp, Zea mays
  Peptide Sequence Number=SeqID_44193
atggctatgttagaatatattaccaagatgaaatctcttgcagatgagatggaatctacaaagaagatgcctatttcgcaatctagtgctgatttagcgttgaaaggcctagatcaactgcactactttcttggcattgagaagcgtggttttattcagaccgtggagctgcagacacttagaatgccccctgccgtgaagagtctttcaataagatggactcgtgacattgatgataggcgctctacaagagattttgcagtatatcttggtaaagattttggtgtcttggtgtgctcacaagcagcccacagtctcaaggtcaagtactaa

SEQ ID NO: 2415 - DNA, 927 bp, Zea mays
  Peptide Sequence Number=SeqID_44194
atgagcggaagggcgagggcgcccagggaggcgtggagcacgggcatcggccccgacagtattccgagcatcgcgacggcggggtgggggaatggacctatgcggggcggtcgcagagtgtgggcgaagaagggggtggttgtggacgagacggagcgacggcggggtgggggaatggacctatgcggatgcggggggagcgggacgcggctgggggagcggggcacgcgggctgccatggattggcgcaatttgtgggctcgcgtcgcacaaggaaagggggagtggggcgcgggggaagccgacgctgtttggggagcggggcaaggctgccacgccgtcccgcgatttgtgggcaatctcgccgatctcgcgtcgcgcaaggaaaggggagccgggcgcgcgggcagccatggatggaagctagcgctgctcccgcggctgggggagcggggcacgcgggctgccggagcgggggactggtttgtgggctcgcgtcgcgcagaaaggcagaatgcgatgcaaaggcagaaccgtgcaccaaagaaaatagctgttgtgccttccctgcacaaaagatttctgtccattatcgtggacaagttgacattggatgtgattggtttatcattgttcaactacaattttgattccctcacaacagatagtcctgtcattgatgctgtttatactgcactcaaagaagcagagcttcgttctacagatcttttgccatactggaaggttggtttcttgtgcaagataatcccaagacagataaaagcagagaatgcggttatgattataaggaacactgttgaagagctgattatgaagtgtaaagaaatagtggaagctgaaaatgaacagattgagggtgaggaatatcgaatcgaaatagatggaaacgacttcagacaagaatag

SEQ ID NO: 2416 - DNA, 465 bp, Zea mays
  Peptide Sequence Number=SeqID_44195
atgccccttccgctgctccacctccgtcgggccctctctgcccgcgtctcgaccgccaccgacggcgtcgagggcagtcccggccctgtccgcgtccacagggactggaatggcaagacgatgttgggccccgggatgggcacgcagccgggcaggcgcaccgcctcggcaaggtcccgaaactcgccgggcatgaaggaggcctgctcggggaggtggaggacaagtgagagcgcatggaggttcatgggcatgaagaggcaccgtgcggtcacgctggcgtcatgtgcagcggtgaagaaggttatcccgaactggtcggtcacgaacgcgacgaggcgggtggtgtcgtggagctccacgagcaggcccgcgagcatcgagagtgagcgcgtgcactcctatgtcatgggcgtcttgaaggcggcggcgcggggcaggagttgctggggactattggattaa

SEQ ID NO: 2417 - DNA, 351 bp, Zea mays
  Peptide Sequence Number=SeqID_44196
atggaaaagtcttggttgtgtgcagccaaactccagctcggcctggcacaccggactgtccggtgccccaggctggctgacggtgaaccagctgctctcgagaatcgacggagttgtacggctataattcaccggagtgtctgtattgagaacaagtctccaacattggcgcccacctccggtgaaccctttttcgaccaccttcggcaagcactgaccttcgtcatgccgccgaagaaagctttagcgctaggggctgccgcactacagccactggacccaaatcaggagaccctttctctccgagaagcccgcagtcagaagaggaaggccactagtccaacactctag

SEQ ID NO: 2418 - DNA, 153 bp, Zea mays
  Peptide Sequence Number=SeqID_44197
atgaatggtcggatgctgctggattcctcaccggagctcaagatgcatcccggatccacccgcgacgtagtcagcaccgccgacgtcttcaccgccgctcaggactcagggaaaataggagaaatgaatttagaaaatgaattttcaatataa

SEQ ID NO: 2419 - DNA, 195 bp, Zea mays
  Peptide Sequence Number=SeqID_44198
atggctgatgtcatccctattgctccatcactcgatgacatgtggggaccttttgctagaactcctgttcttgtgcttcatctcgccatgcccaggagacggagccatcgcgatcccaaaggaaacaacaaactcgcagctcaggactcagggaaaataggagaaatgaatttagaaaatgaattttcaatataa

SEQ ID NO: 2420 - DNA, 276 bp, Zea mays
  Peptide Sequence Number=SeqID_44199
atgcccgcttgggcgccagcagcagccgtggacgaggagcggtcgccgggcaggagtgatcggcacagcgaggacccctacgaggtcacgacagctccaatgggtaggctgggaaaggctaccaagcacattggactacatcctgacaggctctccttcgcatttgcgcgggacagaaatgacttgccgaggatggaagcagagagacggatttggccgagcgcacagcagctcgccaaagacggcgtcgaagcagcagtgaccgcggtcgagtga

SEQ ID NO: 2421 - DNA, 1665 bp, Zea mays
  Peptide Sequence Number=SeqID_44200
atgacccaggtgaagcccgcccctgggggaaggatgctgaccgtgctgcgggtgcacctcccgtcggagatcccgatcgtcggctgtgagatcacgccgtatgtgctcctgcggcgccccgacggaggcgtcttcaccgacgacgtgtctgagaccgcgcccgtggatgggtacttcatgcgctacaagtggtaccgcatacaaagtgatcgtagagctgctatctgcagtgtacacccaacagaacaagcaacacttcagtgcatagggtgtctgaagtcaaaaatacctgttgctaagagctaccattgttcttctaagtgcttctccgatgcttggcaacaccacaaggttttgcatgaccgtgctataagtgctttaaatgaaaacggaaccgaagatgatgagttgtttggcagatttggtagcggcagttcgagctcaggggttattagtgctgcgttgtctggttcaacatcaaacctttcactgagctcaggtgttaataatggacctacacctgtgtatccaacaggcactgagaagagttctggtgaaacttggtttgaagtgggatggtcacgaacatatacggcaactactgatgatattggacatgtgctaagatttgaatgtatagttgtggatgtggaaacacgggggactgtgagagctcctacttcagtcatgacatcccgtgtaatcccagcaccgaccccgacaccacgccgcttgatccctgttaatgcagctgatgcaatggtccacttcgatttagatagccggacttcttcttttgggacatttactgtgctgtcctacaatattcttgctgatacatatgcaacaagtgatacatacagctattgtccaacttgggcacttacatgggcttatagaaggcaaaatttgttgcgtgaaattattggttaccatgctgatattatctgccttcaggaggtcgagttcaataaggctgcacagtctttaactgatgcaattattcctgccgctcaaaaaaagttagctctaaatcgtttggttaaggataatattgcgctaattgcagttttagaagctaaatttagtaaccatggaactgaaaaccctagtaaaaggcaacttctctgtgtggctaatacacatataaatatccaccatgaccttaaagatgtgaagctatggcagattcataccctcctaaaagggttggaaaaaatagctgttagtgcagacattccaatgttggtctgtggagattttaattcaactcctggaagtacgtcacatgggcttcttgcaaggggcaaagttgatcatttgcatccagatctagcaatagatcctcttggaattttgcgcccactaagcaagctgacacaccagcttcctctggtcagtgcatactcatcattcgtgagtatggctggtgttggctatgatttggatcaccagcgaaggaggatggaccctgggacaaatgagccattgttcacaaattgcacaagggattttaccgcggattcattgactgtagagtcattattggagctgttggatgaggatagcttgagaaaagacacggctcttccttctcctgaatggtcatcggatcatatagcgctcctagcagaattccggtgcaagcttagagttagacgatga

SEQ ID NO: 2422 - DNA, 498 bp, Zea mays
  Peptide Sequence Number=SeqID_44201
atgactctagagggcgtcaatgagacaattgtatttttaggactacaaacagtcccgctcagcaccggcttcagcacggcatcgtccctggccgacatccccaccaaccagcccatcatcgccgagcacatcctcaccgtgctacagtctttctacgccctgaacctggccctccgcacggagcccttcttcctaacgggcgggatctacatgggcaagtacatccccacggcgggggcgcacatcctggacacgaaccgggagctgccagaggtggccacgcacgcggactcggcctacttcctgggcctcttgaacgcgtggcagaagcgggacctggaggagctgcggttggaggcggtggcgctgacacgggcccagcggtgggtcgcggtgacggacgcgcgggggcgggtgttgtcgtggttgcagaacatgacgaggctggccgcgctgtacaactatgcaaagcagtgggactacggacacccccgttga

SEQ ID NO: 2423 - DNA, 1512 bp, Zea mays
  Peptide Sequence Number=SeqID_44202
atggcgtggtggggcggcgaggagggcgagccgttattcccgtccgtggacaagtgcgacgcgtcccgcctcggtcgggactccacgctggtggcggacctggacggcgcgctgctccgctccccggacgccttcccctactacgcgctcgtcgccttcgagacgggcggcgcggcgcgcctggcgctgctgctgctgctggcgccgctggccgcggcgctgcgccgcgcggtgtcggagtccgcgggggagcgggtgctggtgttcgcggccacggcgggcgcgcgcgtcgccaacgtcgagtccgcggcgcgcgccgtgctgcccaggttctacgccgccgacgtgcgccgggacgcgtggcgcgtcttctccgcgtgcggggggcggaggctggtgctcaccgccgcgccgcgggtcatggccgagccgttcctgcggcggtacctcggcgccgacgccgtcgccggcacggagctcgccgcgtggcggggacgcgccacggggtgggtggacgcgcgccgcggcggcgtgctcgtcggcgagagcaaggcccaggcgctgcggcagatgctcgacgccggggaggtgcccgatgtcgggctcggccaccggagatcggattacgccttcatgagtttctgcaaggaggcctacctggtgccgcggacgccggtggaggccgtgcgcgcggacgagctgccgaagcgggtcgtcttccatgacggccgcctggtgcagcgcccgaccccgctcgtggcccttctcaccgtgctgtggttccccgtcggcctgctgctatcgctggtccgcgtcgccgcgggggtgctgctcccgatgcggtggctccgcgtcgcgttccacgcgctgggcgtgcgcgtcgtcgtgcgggggacgccggcggcggcggcggcggcggcgacacgcacgggggtgctcttcgcctgcagccaccgcacgctcctggacgccgtcttcctctcggtggcgctgggccggcccgtggccgccgtgacctactcgctgtcccgcctctcggagttcctgtccccgatccgcaccgtgcggctcacccgcgaccgcgccgccgacgcggccaccatcgggcgcgtgctcgccgagggcgacctcgccatctgccccgaggggaccacgtgccgggagccgttcctgctgcggttctcggcgctgttcgccgagctcaccgacgccgtcgtgccggtggcggtggagtgccggatgggcatgttccacggcaccacggcgagggggtggaaggggatggaccccttctacttcttcatgaacccgagcccggtgtacacgatcacgttcctcgacaggctgccgcccgagctcacctgcggcggcgggaacaagtccggccactgggtggccaactacgtgcagaggcttatagcctccacgctgtcctacgagtgcaccggcctcacccggaaggacaagtacagggagctagcagacaacgacggcctagttttaaacttttaa

SEQ ID NO: 2424 - DNA, 614 bp, Zea mays
  Peptide Sequence Number=SeqID_44203
gagcagcagcagatctaccctggagcacgaggtcgggcatctgcttgggcaccgccaaggggctgagctacctgcacgaggagcacgagccgaacatcgtgcacagggacatcaaagccagcaatgttcttctcgaccgagactacctgccaaagatcggagatttcgggctcgcgaagctgttcccggacaacatcacccacatcagcaccgcagtggtcggaacgagtggatacttggcgcctgaatacttcgtgcatgggcagctgaccaagaaagccgacgtctacagcttcggggtgcttgtcctggagatcgtcagcgggaggagggtctcgcaaacgatccagtcggacatgttcccggcatggatgatgtaccagcaaggcaggctgctagagatcgtggacgcgagcatggggagctacccggagaaggaggtgctccggtacatcaaggtggggctggcctgcacgcaggccacgcccagcagccgccccacgatgcgccagagcgagtgggacacaaccagaaaagggacaacagaattagaggcacagattcccaagaaacgggggcatattctattacaagatgactacaacatactataa

SEQ ID NO: 2425 - DNA, 456 bp, Zea mays
  Peptide Sequence Number=SeqID_44204
atgggcaggcagccgcacagcatgctgcctctcctgcgaatgctcatgatggagaatgggcagctgtcaaatgaatgggctgaagaacagaacgaacaatacttgcatgatgattgggctgacagcttaggtgttttcattgagaatccagaatatgcgaacacatttgagatcgatgatgttgtgaagatgtacgaggagaaggaagctttccaattcttgcactgttggaagctgctacataatgagcccaagtggaatgataaagtgctagagctaaacaacactccgacaagaaaaacacaacaaccagaaggcccctgtaatcccgttggtacacaacccaacactgaaaatgcagcaattacaaggcctgaaggtcgtgatactgcaaaaaaaagaaggttcaaagaagacactgcatcatctagtgctgctgtagaagtgttgcagtag

SEQ ID NO: 2426 - DNA, 1416 bp, Zea mays
  Peptide Sequence Number=SeqID_44205
atggctgcggagctcacgcagatcgttgtcgtgccgttcccagcgcagggccatgtcaccccgatgctgcacctggcgcgcgccatcgtggaccgcgggcacggcagcatctcggctaccgtcgccgtgcccgacttcatccaccgccgcatgggccagtactccgccgccggggtggccctcgtgtccataccctgcggagtagcggacgaagacggcagcgacgagccccccggacccgctatgttcctgcacgccatggagcaccgcatgccagcccagctggagggcatgctgcagtctgcacggcgcggcgtaggtgccggccgccgcgtctcgtgcctggttgtcgacctccttgcgtcgtgggcgatacccgtggccgcgcggttcggcctgcccgtcgtcggcttctgggtcgggatggtggccacgtaccgtaccgtggcggtcatcccggagcttatcgccaagggcttcgtctcggaatccgcagacggaaccaagaacattggagatctcaacatattgccggcgaagttaaagctgagattcaaagatcttccatggctcctcgacagcgcgcttccccagaaatcaaggatctccttctggctccaggcactggaccgtgcgaagagcctgcgctgcatccttgtcaactccatctccaaggaaggcggcgccggcggcgactcacctgacgaccagcagcagtacgactacgaatatctgccgcaggaccagcagcaaataatgctccacgttgggcccttgctgttcaacgccgacgcctcaaagaagacggccaccatgtggcagcctgacaaaacctgcatggactggctagacaagcagagccccgggtcggtgatatacgtgtcgttcgggagctgggctgcgccgatccagcctgacaggataaggggcttcgcgcgtggcctggaggcgtctggccggccgttcctctgggttctcaagagccacccgtcgtggcgagctggcctcccggacggctacgcagagaaggtttccggccgcggcaagatcgtctcgtgggcgccgcaggaggacgttctgaaacacgaggcactgggctgctacgtcacgcactgcggctggaactcggtgctggaagctgtgcggcaaggggtccgcatgatctgctaccctgtctccgcagaccatttcgtcaactgcgcctacgttgttaacgtgtggaaggtcggggtggagctggccaccagtggacagggtgatgtgaaagactgcatcgagagagtcatggaaggcgacgatggacggcgtctgcagcggaaggtgaatgcgttgcgagaaacagtcacggcgggtgaggcaatgcgtgctgccaagaggaacctcaccttattcatggacagaatcaatggcagttag

SEQ ID NO: 2427 - DNA, 291 bp, Zea mays
  Peptide Sequence Number=SeqID_44206
atgtcaacgtgtattgataacacaacaagctacgctctaatccttgaggcctttatggctctaccgtcagctgcccggccacaaggtcgtcgtggccacgccaacttgggagcaggggacacaggctcagcagaccgcaggcagcaggcagctggcagaccgcaggcataccatgaggggacagcagaccgggcacagagctctcttgctcttgctccccattggcgcagcaacgtggaagctgaatgggaccttgacgcgtcgagtcgagaggaccaggtggtggcttga

SEQ ID NO: 2428 - DNA, 357 bp, Zea mays
  Peptide Sequence Number=SeqID_44207
atgtacatgtacccattcatcttagaatctgcagaaaggaggcaagctgaggctaaccgcatcagggagaaataccctgacagaatccctgtcattgttgagaaggccgagaggagtgacatcccagacattgacaagaaaaagtaccttgttcctgccgacctcacagtcggacagtttgtgtatgtggtacggaagcggatcaagctcagcgctgagaaggcaatcttcatcttcgtaaagaacaccctcccaccaacagctgctctgatgtccgccatctacgaggagaacaaggacgaggacggcttcctctacatgacgtacagcggcgagaacaccttcgggctgttctga

SEQ ID NO: 2429 - DNA, 267 bp, Zea mays
  Peptide Sequence Number=SeqID_44208
atggcggactctggagttgaacttaagatagtcgagcacaaattttttgacataatatttgaaaaaaagatcattatcagattatctagtgttttagttggcgacacaatcatgcaaatgagcaaatctgtcctcagaggaaaaaggagatgctacgatcctagagagagaaggggagggggcggtggggtcacgagtggagggggaggcatgtgtgatggatgcgggaggaagtatgatccaaataacattgactataggatttga

SEQ ID NO: 2430 - DNA, 1513 bp, Zea mays
  Peptide Sequence Number=SeqID_44209
atggcggcggaaccaagagagcccacatcctcgctggatgcccagctcgcggcctcttcctcctccgcagccggcgtaggcggccccaacccgtgctgcgcgacgcagtggaagaattgccagaaattggtgaggagccggacggcgctgcgggaggcggtgaagctcctgcaggctgagaacgagaagctgcggaaggagaactcggagctcagcaaagtgtgcaaggaggaacacctccgaggtgattcagcagaagcagctagggcaactgagtctgatgccagagatctattggaaaaggagataattgaattaaagacacagaacatgagtttgaagcaaacacaaaatacctgcaaaaataatgatgaacttttacgtatctctgaattagaggaagaaaatagaaagctcatacagattttaggagaagaaaggaagaagatcacttctgagaagaaaaaaattgaagaagaaaagtgcaaaactctagaaatgcaaaggatatggaagtcagaagcacagaagtctgaagagtatagaagagttgctgatactgaaagaaaagttgccaatgattggagagcatcatgtgaaaggttgaggagtgaagcaaatgaactcagagctcagttgactgctcaaattcagaaaacagaagaaatacttaaaagggctgaagcggagaagcagaaggtcgccagagaaaagaaacgtgctgattcagagaaatcattatctgaaaagaatagaacacttgttgaagttgagaagaaaaaagtaacagaagaaaagtgccgtgctgacaatttatttgctaagttagaggagcagaagaaactcaatgaacatttgcgaactagcatacaggttgaaacgaagaatgcaatagaagagaaaaaacgaggagaccatttgtttcagaaattagaagagatgagagaacagactgaatgtttacagagaaaggcaaatgaattctctgcaggtagagatgtaatttcttctggcaagtgtggccggcgacacattgatagaatttctgagaatgcaaacgttaagcttctcaaagagaaacttaagctgaaaaaagaacaactaaagcatgtcaagaatgtgtccaagctagataaagcaaaaactgctttaataagaagagagcttcaaagtttaaagcaagactggacacagctactgggtcggtttaacatgctggatgaccaccttgcacgtggtgttgaagatattcatgtcttaacacagccctcccaggctcccagcccctacacgcctccctacaggccagtccatctcgtgtgcacacaaccaagggaaccgttgaatcagcatccagagatacatggctttgaacagaagctgcttcctaatgattcagttcctgccccatattttcggttgcaggctgggacagttccatttggctcttctatcccaagtgaatacacttcatatcagttgcccagagaaagctgctcacgatcaatctcag

SEQ ID NO: 2431 - DNA, 624 bp, Zea mays
  Peptide Sequence Number=SeqID_44210
atgccaaaatcagaccctgagaaagcaacagcacagcaacacaaggagaagaaatgtgtgagtgcgctcgcctggaggagtgtcttgaccgtatcgagggggtacacggcgacggcggaggcgctgatcgccgccgcaccggcgaccgcgtggaccgcgaatacgctttcccccagcggcttgctgcctcccaccatctcggcggcctgcaaggctggaacacaccctccccaaaaatggcgaaatgcggcgagcgacgtcgagagccaggctacccgtccgtcggaggagccttctccacccgtcgtggagccgtcgccgccgtcttctgccccgcctccgtcctcccttgaggcgcttgccgcagaggccatgtcatttgacgaggatgacactgaggagtcaatcgaaatgaaggtacagaaagctctggactgtccatgtgtcgctgatttgaaaaatggtccttgtggaggtcaattcgtcgatgcattttcctgcttcctcaggagcacagaagaagagaagttaaaaaagtgtctcgactttcttgattttagcataggaaatccagatccgagtttgagcctagagctctcccagtatgaactttgttggttttaa

SEQ ID NO: 2432 - DNA, 253 bp, Zea mays
  Peptide Sequence Number=SeqID_44211
atggtcacgatcttcactgggccacggaactatatgggccggtcgccgatgcccgaggccgccgagatggtgggaggcagcaagccgctgggggaaagcgtattcgcggtccacgcggtcgccggtgcggcggcgatcagcgcctccgccgtcgccgtgtaccccctcgatacgctgggagcgacggggcagaagcagaagatggggctccggcaggtggtggaccggctcatggccgcttccggccctgcag

SEQ ID NO: 2433 - DNA, 1448 bp, Zea mays
  Peptide Sequence Number=SeqID_44212
cgcttatcgccgtcgccttgcccgtgctcctccatctcctaaagaggggaaagacgccatggcggccggccgcggccaagctgccgccgggctcccttggcctgccggtgatcggccagagcatcggtcttctccgcgccatgcgcgccaacactgccgagcggtggatcctggaccggatacaccggtacggtccggtgtccaagctgtcgctgttcggcaggccgacggtgctcgtcgcggggtcggcggccaacaggttcatcttcttcagcagcgccttagcgatgcagcagcctcggtcagtgcagcggatcctgggggacaagagcatcctggagctcacgggcgccgaccacaagcggatccgcggcgcgctggtcgagttcctcaagccggacatgctgaggctgtacgtgggcaagatcgacggcgaggttcggcgccacctcgacgagtgctgggccggccgctgcaccgtcacggtgatgccgcacatgaagaggctcacgttcgacatcatctccctgctgctcttcggcctcgagcggagcccgctccaggacgccctcgcgggcgacttcgcccgcgtcatggatggcatatgggccgtcccggtgaacctgccgttcacggcgttcagccggagcctcagggccagcgccagggctcgccggctgatcgcggggatcgcgcgggagaccagggccaagctggaaaggggcgaggcctcccgtagcagcgacctcatcgcgtgcctgctcagtctgaccgaccacagcggcgcgcggctgctgagcgaggaggagatcgtggacaactccatggtggccctcgtcgccggtcacgacacgtcgtcaattctcatgacgttcatggtccgccacctcgccaacgacccggacaccctcgccgccatggtccaagctgccaccggtggcgacgcagagcacgacgagatcgcaaagaacaagggcgacggccagaccctggactgggaggacctggcgaagatgaagtacacgtggcgcgtcgcgctggagacccttcgcttggtgcctcccatcttcggcaacttccggcgagcgatgcaggacatcgagttcgacggctacctcatcccaaaaggatggcaggtgttctgggcggcgagcgtgacgcacatggacacgggcatcttccacgagccggcaaagttcgacccgtcccggttcgagaaccagtcggcggcatcggcgccgccgtgctcgttcgtcgcgttcggcgggggtccgaggatctgcgtcggcatggagttcgccaggatcgagacgctggtgacgatgcattaccttgtcaggcggtttaggtggaagctctgctgcaagaacgataccttcgccagggaccccatgccatcgccgctgcacggactgcccatagaacttgagcagaaggcatcgccatga

SEQ ID NO: 2434 - DNA, 2820 bp, Zea mays
  Peptide Sequence Number=SeqID_44213
atggcctccttgctgtggaagctaggtaccttgctctctgacgagcacaggcttcttagcagcgtgaaggtggatatggtgtccctgaaagccgaggtcgagggcatgcatgctttcctgaagaagatgtcggaggtggaggaccccgacgagcagtccaagtgctggatgcaggaggttcgggagctgtcctacgacatcgaggacaacatcgacagcttcatgctcactctcggctcttgtactgagtccagcagcaaacctagaggcttcaaggggtgtgttgctaggttcttgaacttgttcgcaggtgctaaggcacaccattgggctgccaaggagatccaacgtctcaaacgacaggctgtagaggctagcgatcggcgtgggaggtacagccacagggttggtgatgctgttgctgtccccagatcgagtagaacaagcatagaccctcgcttgccggcgctgtacgctgagacgacaaggctcgttggcgttgatggcccaaggaacagacttatcaagctgctgacgacagaaagagagggcacagtgacagagctgaatgtattctccatagttgggtctggtgggcttgggaagaccactcttgccagtgaagtgtaccggaggctcgaagcgcaatttgattacagagctttcgtatcagtgtcacagaaccctgatatgaagaagatattgaggcatatactctgccaccgagggtgtggcggcagcgaggaatgggatgagcagcaactcatccacgccgtaagagagttcctccaggataagaggtactttgttgtcattgacgatatatggagcacatcagcatggaggattatcagatgtgcttttcctgaaaacaactgttccagtaggatactgacaactactcgcatcgtcacagttgctaagtactgttgctctcctcaccttgaccgtgtgtatgcactgcagcctctcgatgcagctcactctgagagcttatttttaagtaggatttttggttccgaaggtagatgtcctctccatctgaaagaagcttccgacaaaatactgaagagatgtggtggcctaccactggcaatcgtcacagtcgctagcctattggccactaagggtatcacaaaagaggaatgggagaagacgctcaagtccattggttcagcacttgagattcaagatacagacgtggaagagatgaagaagattcttctgatcagctacaacgatctcccctaccacttgaagacatgcttgttgtatctaggcgtgtttcctgaagactatgagatcaagagggaccggttgataagaaggtgggtcgctgaaggctttatcaccgcagaaggtggacaagacatggaggagataggagaatgctatttcaacgaccttatcaacaggagcatgatccagcctgttggcattcagtgtgatggtcgcgccgacgcttgccgtgtccatgacatggttcttgatctcatcgtatccaaatcagccgaagaaaactttctaaccttgtgtggtgacggggatcacaggatggcgcgacgagataaggctcgtcggctatccatcaactaccatgcccgggatggtattgtagtgccagagaatatggtcgtttctaatgttcgatccctcacaatctttgggcacgctgaggacatgtctgctctttccaacttcctgttcttgagggttctagatctagaaaacagggtggtgctggaatacaattaccttaggcacataggcaggctacgtcagctgaggtatctccgactcagttcaagaagaatagctgcgctccctgaacagataggagacctacagaacttgcagaccttggatctgaggtggacaaggctgaaaagattgccacggagcgttgttctgctacgccgactgacatgcttgctggtcaacagtttagaattgcccgaagggattgggaacatgcaagctctgcaggaattgtcagagatcgaaatcaatcgtcacacaccagtgtcttccttgctggaactgggcaagctgacgaatttgagaatccttgggataaactggtgcatcatcgacgcagatcatgatgcaagaaaggtccacgcggacagtttggttacgtccctctgcaagttaggcgtgctcagccttcggtcgatacagatccagagctaccacacctgttctctggacttcttgcaggattcttggttcccacctcctcgccgcctccagaaattcgacatgtccatagattaccatttcccccgaaccccgaagtggatggtctcgctggagtacctcagctacctggacatatacctcactccggtggacgaggagtcgttccgaaccctgggggacctgccgtccctgctgttcctctggatatcctcgagagaggccaggcctggagaaggcgtcgctgtcggcagccacggtttccgttgcctcagggagttctacttcacctgctgggaagtcgggaccgggctggctttcgaaccgggggccatgccggcgctcgagaagctccggatcccatgcaacgcgcgtggcgcgtgctcttcgcatgccggtgttcgggatctcggaatcgggcgcctctcctcctccctgaggcacctccaggttgagatcgtttgccgtggcgcgaggctccaggaagtggaggccgtggaggaagctgtccggaacgccgccagcgagatttctgacgagctcttccttggcgtgagtaggtgggatgaagaagagatcttgaaggacgaggagcataagctagaggaagcggaggcataa

SEQ ID NO: 2435 - DNA, 330 bp, Zea mays
  Peptide Sequence Number=SeqID_44214
atgtattttgatgaacttcttccaagattggtgaaagaaggaagtgatggtaatgctggatccaatgctctttgtgacacaacctgcttgcaggaccgtgatcaactcatgcgccttctcacatatgaaacggtggagcgtgctgtcgaacacagggtggaagccaaagccaagatcttcgggcaagaggtgaacattggtgctaaggacaacggcagccaaccagtctacaaaatcaggccgagcttggtcgccgagctgtacagctacagaatcatgccgctaaccaaggaggttgaggtcgcgtacttgcttaggaggctggattga

SEQ ID NO: 2436 - DNA, 525 bp, Zea mays
  Peptide Sequence Number=SeqID_44215
atgtcagaatcgcccccaaccccgcatggacgcaaacagaatcgaccggctctctctcctgtcacgcgtatgcttcggggatggtttggattcgccacggggttgttgcgacttccttggtcggactcaggtgtatttatatccctaatcgcagctacccttcccatccaatcctcctcatgcgcccggccggaagccataactttgccgtcgggagctgaagttttccatcgcggtcaggaagagacgattcagaccgtcgcgcgcgttcttaactcgccgtcgtgtctgggggctatcgggggcttcatcgtggactggggatccctccgtgctcggcgttcttcggagctcagtccacccatggtgcggtctattggtcttgccgcatcgtgctgtgggcgggcctcggcgcggcatcccagtggtaagtccttcctccccatgcgcgcgaaccacctctctgcccgactccgtaccccgatggccgcttcacccgtcgggagctcggacgccgccgcctag

SEQ ID NO: 2437 - DNA, 227 bp, Zea mays
  Peptide Sequence Number=SeqID_44216
atggagcagatggggaatgatgaggagattgaaggcttgggagatttggggagcatgatgcctctagcgtctttttcagctgattgtgagttcgagaacccgtttacatggactgaagagtcttcggatgaagattcggattattttgccgcattagatgtgacagcgacggagtcttcgccgcggctggagttgggcgaatcgtttaatcccccagctggcgcgag

SEQ ID NO: 2438 - DNA, 288 bp, Zea mays
  Peptide Sequence Number=SeqID_44217
atgcgggacaagtcggccgtggaaagcaagagccgcaacctgatggacaagttgtcggctgcggagaccgaaaaagatgagctcggccgcctgctggcagcggaaaaggaggacgctgacaaagcctgcacggaggcgcgggctgcgcgcgccgaggctagcctcgccctccaacgtgttgcggaggcagaggcgagccacaggagcctgcgcggctatctggacaaggcggaggcctctacccgcacaggggtcgaacgggcgcgtgcgttgctcgtggacacgtag

SEQ ID NO: 2439 - DNA, 1506 bp, Zea mays
  Peptide Sequence Number=SeqID_44218
atgggtggcacggcaggtggaaggtggaggcaggcaggtggtgtggcgcgtcacatgcttgctacaaggttcttgaaaatagctcctgacctgcgggtagttccttaccatttcatcaatagaaggagaaaggaaaaccaaaaaggggcacccacaaacatgaaacaacacaaacacaaacacgtacaagccaaaagagtttcagcccgggtctatgagaaggctaagaccgcttttgctaaattccaaaaacacaactcatccccggccatgatcaaggcagttgagaggcttggggattttccattgaacacacagtcattacgatgtttccaaacagtccaagcttccaaaataatgagagagttcaatccattcttcaaagtattaggcaccaagttaatagcagatcgccaccaatcgtcaaaagaagcctcagccggttgtggagcaaggatagcaagccccacacgctgcagcaagaagaaccagaattgcatcacagatgtttcatgtgttcacttgatgcaaactgaaactgattatgatcgcactgcatccattattgatggcaagtccattgcagaggacatgaggttacatattgctgaagaggtctgtcaaatgaaatgttcagttggacacgtgcctggtctagctgttgttttggttggtgatagaagagattctgaatcatatgtgcgatacaaaacaaaaggctgtgaggaagttggtattaaatctttgttggcgaagttgcctggaaactgttcagaagatgaagtgatggattcagtgtcaagatttaatgaggatccatctgttcatggcatcctagtgcagttgcctctaccagagtttatggatgaggaaaagattctgagcatcatcagtctgaataaggatgttgatggtttccatcccttaaatgttggcaatcttgcactaagaagccgaaatcctttgtttgtgccctgtgctgcaaaggcttgcattgaattattgctccaatctgggattgaactgatgggcaagcatgtatctgtcattgggagaagcaaagttgttggattgccaacttccttacttttacagcggcatcatgccactgtcagtgttatccatgccttcacaacaaatccagaggctattacccgcgaatctgatattgtgatatcagctgctggagtggccaatcttgtaaggggaagctggttaaagcaaggtgcagtggtgattgatgttgggacaaatccaatcgagactaccctaacctgcttggaactaaaggactttgttgttgctgttgtcaaccattttggaaccagtagggatccaaccagtgactacggttatcgcctaactggggatgtctgcttcgaagaagcagtgaatgtggcctctgctataactccagttcctggcggagttggaccagtaacgattgccatgcttcttggcaacacacttgattcagcaaaacgcgtttatggcctaagtgactga

SEQ ID NO: 2440 - DNA, 285 bp, Zea mays
  Peptide Sequence Number=SeqID_44219
atgaagagcattgatgcttggtacagttcagctctggagcactcaacgacacttatacgctggggccctctagtagcaccgaggcgagaggaggaagatgacaagggagatgaaggcaagggcgagaagcccaccgagtgggagatactgataatggatgccatccttgatgtccatacggaagatggtaagcacacgacaatgcgggtaacaattccagacaacacacctgctccgccaccagcagactgcaccgcgtgcaagtcccatgcagcggagaagtga

SEQ ID NO: 2441 - DNA, 345 bp, Zea mays
  Peptide Sequence Number=SeqID_44220
atgtctgtgccagcgttagcccaggtgcctgttggaagctggtttgggctgcatcaactgtccgcgcagaatttggaccgatatcgcagatggcgggggactggaaagaagatggttccttccgctgctcgtggtgtgcttgaatccagtagtggtacacattctggtggctttatgatgaaaaggaaacagcagcctgatgccaaaaaccaaaaggtcaatatggccgctactaacgatgtcatcaggcatgtgatgcacatgctcgcctgcaaagagtacagctcactcgtgctcctctttgattttctcatgtttgcgcggtataagttctacactttttga

SEQ ID NO: 2442 - DNA, 396 bp, Zea mays
  Peptide Sequence Number=SeqID_44221
atggcaccatccgttgcacctgttcctatgatttgcccattcggtatggtgctccgtcctgtcgtttctgccatactggctattatggagacttctcgatacttgttcggcagggacttggtcgctcctcctcgtgggattgctcgacgagtacctggtcggccgctctacctcgcaaacttggtcgatggggatttagtcgaccactgcacctcacagactcactcaacaaggacttggtcgctccgtcttgtggatttgctcggtcatcccgcctcgcatacttgctcggcaggaattggcggagtgggttggagcagaggttacgggcttactctgggtaccctgtccctagggacggaccctttctacgatggtatcatgcgctgggcatga

SEQ ID NO: 2443 - DNA, 1566 bp, Zea mays
  Peptide Sequence Number=SeqID_44222
atgcaaaagatctcaaatcctgttcctcgagttcttcatccagattggttacacaaaaaggtcagggagaaagatgatcgatttcggcagcgtaaactgcgtgatatcttcagtcccttggctaaagaagaggggctgcataacttgaataggactggagatatggaagatttattaatttcaaacaaggatttgaggaaaaatccttctcatggtttagacattgacaaagaaaacaatccaaatggagcatcagtgggatctggtttgaatattagtaaaaaacaacaaaactgtatgactgggttaaatgttccttgcacttcacaaatccaaaatgctgcttcttatgaaacagttgataagggtactgactatcaaggatggcttgatgctaagaaaagaaaatggaaatatgtccgtgaacaaaaaaaacgtcgaagtgacggggaactaaaccaattaactgcagtaattatgcagaagaacaaagtcatgtctctcttctgcttctgccagataatccagcttgcttcaagtacagtgcctggtcacttttttgcgtgggttgttgctgaagggattatgttcaagattcctattaatgtgcctagaactttttacctaaactcaaaggctcctgtcacagaagagtttccaggaaggcgtgtcaaaaagattctcccacatggtagaccttgtttcaaccttattgaggtgaatgttgtgaataatagctgcaaagttgtaacaactgaagaacagttcagggctgaaggcaaaaaacttgcagctcatctagcagagccagatgttgagggaatatacgagacaaaaattccaccagagctcaatgctgttctccaaatcggatgtgtctgcaaagtggacaagtctgcaaaaagacgaagtatacaagatggatgggatctagccgagttgcaaatgaaaacaaccgccgagtgctcatatctggaacagacattttcatttttctatttataccacagcttgagtgaaggaagggctgtatatgtattttacttccccacgtctttccgaatacatgcagtgattgtcaatcctttccgtaacaaagaaatatctccgtcatttcttgaaaagcaatttggagatgcttgccaagcccttggttctgtccctgagaatctgtctttccatgtggactaccaaacatcaattgatgctggaagcaaatacgcacaaagaatgttacttgagtacaggcaacaacattctggacctgtcgtaggcatcatagagtgccctaagctccaagctataaaggtagctatacgagcacttgatgatttgccatgtgtaaccattcctagcaatgcacgtgacaacaactatcaggctcttggctggcaagcaacagctggccgaacaagtatgcagcgttgtgctgcatcaacccaatggttcaatgaacggatttcactcgctaaatatgcacatgtgccactgggtaattttgaactagactggcttctttttactgccgatgtattcttttcaagggcattgcgtgatcaacagcag

SEQ ID NO: 2444 - DNA, 837 bp, Zea mays
  Peptide Sequence Number=SeqID_44223
atggagggggtagagctgaagggtcgagctttacacgcgtcgaacaatacgatctttatgtcaactaccaatctgaggcggcgactccatcatggagacgttgatggaaggaaaaacgagcatgttgacatatccagtgctgattccctcaatgaacctctattagggaagtccaatgatgacaactttggatcagaggtgtatgatcctagaaaacaggatctgtgggatgatgatatgaagaaagaacaactacactggtcatttcttttctcaaacttgattacacaatgggcacaatggttagcaagcattattgtgagctcaggatctatctttggtagattatcccccttctcttcagagaaccaaataaatccagtatatcttagccctttacaggaacaaaggttggatactttaagacacagattgcaaatctcttttgatggctcccgtattgaacatcaaaattcatttcagatgcttctgaacaaagtacaagggcagagatcagattgggagtacccttttgcagttgctggtatcaacgtttcattcatgctggtccagatgttggatctgaagtcaagtgttccatcttctaagtatggaattcgtttccttgaattgcttggacgtgatgagaacgcctttgaccacctgtactgtgtggcctttcggttgcttgatgctcagtggcttgtgaaacgtgcctcctatatggaattcaatgaggtcttgaaatcaacaagaactcagctggagcgggaactggttctagatgatgtgctggaggtgaaggacctgccgtcctacactatgctggatgagtaa

SEQ ID NO: 2445 - DNA, 156 bp, Zea mays
  Peptide Sequence Number=SeqID_44224
atggctagtgcggactccatggccccggtgctcttgctcgtggttgtggccactggccaggttccgtccatcaccaccctactcccgcactcgctagggcctgtcatggacgcacacgtcatcaccatcatgccccagatgggcccgttaacataa

SEQ ID NO: 2446 - DNA, 360 bp, Zea mays
  Peptide Sequence Number=SeqID_44225
atggtgtggcggcatccggatcatgggatgcaggagagggaaccacgcggaccttccatggagagcctggttgaggtcggcgcaagatcgttccctttcatggccatggagagcacagtggatccgtgtggttgccggtgtcgggtcggggtcggcgtggtggagcgagtagagtggatctggggagatgcgcgcagatggagacgcgcacatacggtatacaaccaaacatgccctttctctactcctttaaagcacaagtttcatgcatcgtgcatcatgtgcgaagcacgtaaatcagttctccttctctacttctcgcctaccagttaccagattggccgtgagaaaccaccttag

SEQ ID NO: 2447 - DNA, 189 bp, Zea mays
  Peptide Sequence Number=SeqID_44226
atgagcttgcagtgcggcgaggcgctgtgcaggctcgacggctcaactctgggtgcgaacgcagaacgcgaacgctactcggcgaggccctcctgcgagaccgcaaggcgggggagaacgaggctatggcctagatggggtatccagggcgagcagttttgccgaagaaactgcgacatgggtgattga

SEQ ID NO: 2448 - DNA, 732 bp, Zea mays
  Peptide Sequence Number=SeqID_44227
atggcgaaggaagccgctgtagcgttccagggctgccgctacgccgactgtgccgcagtgctcacgaggctgctggacaagaaagagggcgatctcaaggtgcacttctgtttcttgagctgccttttcgaatgccaccacccagttttactcaacatccatgttattatgtacggttctgttttctcagaaattgtgcctaagaacataatctatctgaattctgaaaacagcaaggtacaccataacatggccatcactgaattcttcttggatgattgtcctgattcaaacaggctgcttaaaattcttggtgattttaagcactacaagcgcctgcatgaggtgagccctgagccccggcggcagcccacacacgttggtgtcgagcaaaccaccagtctggttgggaaaatcggcaaggtcattcgagtagaaaggtgcgaggtcatccagccagacctgcctgaagcggtggcggagaggggcgaagcagtgatgacgagcactgcactgggcgctgcgcgatgtacggtggccggaggggcgagggagtcggagcctagagctagagggacgaaggagcagtgcgagcacgagcaacactgggcgttggccggaacccggagggagcagcgctgcaggcttgcagcggagagggaggcacggagcagcgttgggcgagtcggcgtcatggcgaggcggcggtctggcactccggctacgggctga

SEQ ID NO: 2449 - DNA, 2346 bp, Zea mays
  Peptide Sequence Number=SeqID_44228
atggggaaggcttataacaaaataccaaggaatgtgtgttgtgggctttggacaaacataaagtccctgtttgggacaactccagctctagaaaatttggtggagttggtggagcagagaagaagtgaagagcttgcatgtgcatctagagaacaagctgattctgctaatggggtaggaaacagcgctcattcaggatcaagagggagtggtgctttactacctttttcctctacacataatgcgtcaacttatggggatgaatttgacacgaccataattacattcaacatggctgtcatcctatatcatcttcatgactatgaatctgcactatctgttttggacccactgtaccgaaacattgaaccaatggacgagccaactgctcttcatgtatgctttctattattggatattacattagctttgcaagatgcaacaaaggctgtggatatagtacagtacttggaaaggtcgtttggagtagctaacacaatgaacccgaatgaaaatgcaagcatagctcagcagcaattagctcaagcgaagcctcctgtgaaaattagcatgcctccagattccgattcaaatgcttatgctggtggatatgagaacctttcgtcaggaattttcccagatgagcaaatagaatttgaatctctatgctctagttttgatggacatcagaatgtgggcaggcgtatcttgaatgatttctcaagggcgtctgctgatcttgctgctactgctgctgatttgaaagttagacttcagatttacaaggtccgtcttctactgctcactaggaaccttaaggttgcgaagcgagaactcaaagtactaatgaacatggcacgtggtagggattcatctacagagcttctcttgaaatctcagctggagtatgcccgggggaattataggaaggctgtgaagctattgagcacaccaaataatcggactgaaccagcaatgctagccattttccacaacaacatgggatgtatactccaccaacagagatcgtatcacgcctctatatggtgctttagcaaagcgctgaaatacagcttatcatttcgttcagagaaaccaatgaagttgtctacattatcacaagacaagtcttgccttatttcatacaactgtggtatccaacatttgatgtgtgggaagcctttgttagcagcttcttgttttcgtgaagccatgccgctcttctacaagcgaccccttttctggctccgtttttctgagtgcagcctgctagctctagaaaagggtctcctgtgtgcaaatggtgcttcctcattcaacgatgagattgaaatcaatgttgtggggtcaggacaatggaggcagttgattgtcaacccagtgaactcgagaagtaatttagattctgcaggtgtgactttaggcgaacataaaaatttggtttcacttggatttgctagacagtgtctacaaaatgcgctgctattattggatgctactgagaaggaaaattgggtaatcgcatctgatacagaggattgggaccaaggaaccgtacatggatataaaagctcaggccagaagaatactacaagtacagattctaaaacaccttcaggcccaactctagctaatgtaaatggagaacaaaagggcacaagcttgaatgctaccttgcagagttctcttgctttctatgacgagatccgtagaaaagagtacatcaaaatcagacaggctgtcctggcgaacttggcatttgttgaattgtgccttgataatcccttgaaaactttgacgtatgcaaagtcagtactgcaggtgacagactgttccaggatgtatgcgttcctcagccatgtatacgcagccgaagctctatgtactttgaacagaacagaggatgccgccgagaatctatcagtttatataagagatggtaatcatgtcgagttgccttatagtgtggagaattctgaaaaggccttggttgagaaagacagtgatggtgaagacttggttgctcctgcagtgacaaaactcgccacagaagaacctgagcagctcaggccggaggaggcccgtggtgtcctgtatatcaaccttggcatgattgctgcaaggcagggagaagttgaaaaagccaactacatggtgagccgtggcctggcgatgttgcccaacaacccccgggcagtgctagcatcggtttacgtagaccttttgcaagggaagtcccaggaagctgtcgtgaagttgagacggtgtaggaatgtgagatttagacccgctagcatagcagccagcagtcagcagtcgagcttagaaaagcctcccctttcatga

SEQ ID NO: 2450 - DNA, 471 bp, Zea mays
  Peptide Sequence Number=SeqID_44229
atggccgagctcgaccacgtgccaaggctgggccgccgcggggatgggcggggagccgcgccggggacagacggggccgcgccgtcggcaccggggtgggaatgccgaggggcgtgggctgtgccggaccgagcgccgccgcgcgtggggaaggggccagggcgggcggacgcgggcgtttcggttgcgccggggacaaggctatcgcgccgcgaccgggggcgggatgcgaggggggcgcatcgcgcagggtcccgagtgagctcgctagggggcgaagcgccgagggcgggcggggccatgtccggggccgccgcgccatgggccgcgagcgccgagggcgggggacggggccgcgccggggatggcgagcacggggaagagggggggaggggagagaagagaggagggggagggacctaccgcgcgggggagcgagggcggcggcagtttcgggcggcggcgagctga

SEQ ID NO: 2451 - DNA, 441 bp, Zea mays
  Peptide Sequence Number=SeqID_44230
atgtcatatgcaaagctggctgggctgcacccaatttatgggctctacacaggctttgtcccgttatttatatatgcaatatttggctcgtcacgacaactagcagtaggtccagtggcacttgtttctcttcttgtatccaatgttcttgggggtatagttaattcatctagtaagctgtacacagaattagccatattactggcattcatggttgggatattggagtgcttgatgggactgctaaggcttggttggctcattcgtttcattagccattctgtaatatctgggttcactacagcttcagccattgttattggtttatcccagataaagtatttcttaggttacaacgtcacaagaagcagcaaaattataccactaattgagagcataattgcaggagctgatgaggagaactgcgcatcattatattaa

SEQ ID NO: 2452 - DNA, 504 bp, Zea mays
  Peptide Sequence Number=SeqID_44231
atgaccgcgcacatactgctcatcgcagttgtagcacaggccttgtcgctgtcgctccgccatctccgtcggtcggcgctggacgatcaggcgaagtccctcaaggtccaggccaaagcacttgattccacccagaagcttcttcaacagctctacgatcgcttcgacgaccaggacgatcagctggatgcgattgccgtggatgccaccacaggagtggtcgttctggagaatgtacaggcagtgttcaaggcttggcgcccacgaatcgtacacacagtcgactccgtcaagtcttcaatggacgtgatgcgctcagagctcaccaagatctcacgactccttgaacgtggtgccatggaggacttcgataattctccaagcgtgctcagtccccatgagtcggtggcaaggcgccagtctgcttctgcgacacacgctgacgacccttttgggcaccgcactccctcgactacacgaaagcatggtttcggtttgatctaa

SEQ ID NO: 2453 - DNA, 1116 bp, Zea mays
  Peptide Sequence Number=SeqID_44232
atggacaaagcaacttctgatacagctcgacacacttcggtgcttgatcgggtagcttcactcaaaagttatcaaagagcaaggggcttatgtgatcgatgtgcagagaaatggtctcatggtcacagatgtgctactacggtgcaattgcatgcaaatgaggaagtctgggaactattgggttcagaagaaataactgaagaagtttttgaacctgaacaacaaataatgatggttttatctatggctgcttgggtcgggcaacctgatgcaacagatggtgggccaacaggaagagagctgaatatcggacaagcatgtttccattcagaaccgagcaacgcttcaaaccagttcatcccagcccaattgatgcaggtgcaacattttgagataattggattggacaagcttcttgataatagttctgtagaatcaatgaatgaggaacatacaattggtgattcattagacgaggctgagcaggaggaattgaaccatgagattgctctggagtctactgaagactgcactggctccttgtgcaaagccactgcttttctatttcccaagacagcttttgacttcctgacaaatgtggctgctagtttgtttggtattcatggttctccatctccaagctcagttttggtagatcctcgatatgaaattgtgaagatggcagaaatgcagccatgtgcagaagaaacgccaaaagaagaacagatagtgaagtttgtggcgcagattgacaagccaattctctcttcagaggatgccgtctcaaaaagattcgatgtagtcactgactgtttggatcatcattttgtgaaggaaaatggccatgaaagtgtaatgcagcttctgaagctttcactgacatttttctcgaacaataatcattggtgtgaaaggggcattatgtgtaatgatgattattttctatttttaggttacaagaggttggctgaagaagatggtattcatgtgagagtttatgaggaaaggatggatcttctgagggcttgcatcgttggggcacctggaacaccttaccatgacaatctttttttcttcgatattttctttcctcctgattaccctcatgaaccacct

SEQ ID NO: 2454 - DNA, 198 bp, Zea mays
  Peptide Sequence Number=SeqID_44233
atgacacaaagggagttggaggagtacaagaagataacagagaagaacaacaaggagatggaggagaccaatgtgctcaccaagaagctcttgtccttgcatggcgacgatacagtctctccaggtggctggactgacctagcaccgtgcgacgcagagggtgctccaccaagcgagaaggcaaaaggggatcactga

SEQ ID NO: 2455 - DNA, 2409 bp, Zea mays
  Peptide Sequence Number=SeqID_44234
atggatttgtttacaattgactcggatagtgagtcatatactgggaccagtgacagtgaagaccaagaatgtgaatttacatatagtgaccatgcccaaaacatcttgtccagtctggatgagagcattggcaagattgataattttttgacttttgaaagggggtttctgcatggggatatagtctgccctgtttctgatccctcaggtcagctgggacgtgttgttggtgttgcaatgtttgttgacttggagacaagctcaggtgacataattaaagatgtaaacagcaagaagctatcaagagtgagatcttttgtttccggtgactgcgttgttatggggccatggattggacgagtgataagagcatttgatcttgtcacacttttattcagtgatggagcaaagtgtgaaatcctgttaagggattcggatgtactgaagcccattcctcctgttctttttgaagatgcaccttacttttattatcctggccaacgtgtgaggatagtcgatccgtcagtttccaagtcagcaacatggttatgtggatcatggaggcccagtagagatgatggtattgtctctcatgtcgatgtagggctggtgcatgtgaactggatcacatctgtaaccaatgtttggggagataaatcatcaagtcctccaaacattcaggacccaaagaagctcaccttgctgtcatgtttcccttacgctaattggcaactaggtgattggtgtgctcttatgactgacaacaatggatgcctctggatggattctggcaagtcttgtattcttagtgaagaccagaagtgtgactcttatgcacacatgtattttgaaagttatggttcagattgttctcaaacatttgttgttgccaagacaaagagcactgttgatgttctgtggcagaatggaactgtatctcttggtctagaaccccaggcattactccctgtgagtacccttggtgaccatgatttttggccaggtcaatttgtcctagaaaaactgactgtagaagatgctgcaagatgtccgcgaacggcaatagtgagtgatgtggatgcactggagcgaacagtaaatgtaaaatggattggtccagcacatagtgacattgtcagctatggaagtgaccctgcagtggagactgtaagtgtttatgagctagtagagcacccagatttctccttctgcactggcgaggtcgttatcaggtcagctatgaacatagacaagtctgaagcagatcccacaaatgggtcattggcaagcaaagaatcattggttacctcctctggcttcttatcatgcaccggaaatgtacttgggtacaaggacaatggaattgaagtgcaatgggctaatggtgttatatccaaggtgcaacattttgagataattggattggacaagcttcttgataatagttctgtagaatcaatgaatgaggaacatacaattggtgattcattagacgaggctgagcaggaggaattgaaccatgagattgctctggagtctactgaagactgcactggctccttgtgcaaagccactgcttttctatttcccaagacagcttttgacttcctgacaaatgtggctgctagtttgtttggtattcatggttctccatctccaagctcagttacaagaggttggttgaagaaggtgcgactggaatggaacatcctgcaaaatgacctaccagatggtattcatgtgagagtttatgaggaaaggatggatcttctgagggcttgcatcgttggggcacctggaacaccttaccatgacaatctttttttcttcgatattttctttcctcctgattacccccatgaaccaccttctgttcactatcactctggtggtctccgcctgaatccaaatctgtatgagtcgggaaaagtgtgcctcagcctcctgaagacatggacaggcactggtaacgaagtgtggaatgctgagagctcaactgttcttcagctgctgttatcgcttcaggcccttgttctcaacgaaaaaccttacttcaacgaggcgggatacgacaaatttgtgggcaaggctgatggagagaagaactccatcacgtacaatgagaatgccttccttctgtcatgcaaatccatgatgtatgttttacgcaagcctccaaagcattttgagacgttggtcaaggagcatttcacctgccgtgccccgcacatcctggatgcctgcgaggcttatcttgggggcgatctcgtcggacacgcgcacgacaaagcatacgtagcagaggacggcaacaagaactgctcaaccggtttcaagataatgcttggtaagcttctgccgaagctcgttactgccttctgtgaggccggtatcaccagcgaccggtaa

SEQ ID NO: 2456 - DNA, 270 bp, Zea mays
  Peptide Sequence Number=SeqID_44235
atggggaggctagaaccccgggaagaatgggaatcatggcttgtgggtaaagtgtgcaacctctgcagagtgttagaaactggtatatcagtcgtgctcacgatggctcgtatcaggtgcactgcaccggagcgtccactgcgtcgtacggtgccaggtcaatccagtcacctaaagagacagtatcgtcgcctgcacgaggagcaagagcgccgacaccaggagcaggagcaggagcaggagcaggacaattccccctcgcctcagtag

SEQ ID NO: 2457 - DNA, 273 bp, Zea mays
  Peptide Sequence Number=SeqID_44236
atggcgtcgacgcctgtgtcctacgcggttgttgttcagcggtatcttcggggcacaattgactatggcgttctctttcaccactccactatgactgagctagttgtctactccgacgttgattgggatataaatcggcgaatccgtcctcctaagaaggccccagagatccttggaacttcagcattctctggcaagccagtgattaacaagacaagaatcagaacagaaggagggaaaggaagcatcacaatactaagaacaaagggctga

SEQ ID NO: 2458 - DNA, 378 bp, Zea mays
  Peptide Sequence Number=SeqID_44237
atggtgtaccggcacacagccgcacaaccaagatcgagtcagcagcagcctctactaacactccggtccgaggacggtcgagcctgggacctcaaatccatcaggcggcagaatgatgaaactcttcgtttattcctcagaagattccaaacaatgaggaactgtatccctgaggttgctgaggcagctgtgatcgaagacttttactggggatccaacgatccagttttcgttcgagccatatttcaaaaggcacctaccacctctgaacaactattcaaggaagcggacgtctacatcaccgcggatgaacgggctcaagacctcatcggagacgcgaagcccgtaccaccagcaccacgaagggatgcaaactag

SEQ ID NO: 2459 - DNA, 360 bp, Zea mays
  Peptide Sequence Number=SeqID_44238
atggggctgtccactgcggctcgagcatactggcgctccatcgagtgcgtcgggctcggtgggtcggatgactcggaggagacctccacggagaaggtggaggactcctccgactccaaggagtggagaggcggcgagggtaatgacagcgaggacgacgacaacaacgatgatgacaacagtaagggcgacgacgacggcgatggcaagggcgacggcgatggtggcagcaagggcgacagtggcgacagcaagggcgacagtggcgacggtgagggcgacgacggcaaggacgatggcggcgatggcgacggcgacgacgacgatggcaaggcccgtggcataatgctgctggtttaa

SEQ ID NO: 2460 - DNA, 474 bp, Zea mays
  Peptide Sequence Number=SeqID_44239
atgaagtggatgcttgtcatgctcaagttcatggtttcaaaggagcatgctacaaaagctactcctcaaaagttgaagggacgcgacggggcaacggtggtggagctccggctgcacaggaggaactccagtgagcgcggacctggcgaactagagggattaggggcgaacctaagggtgttccaggtggcgggtgatagggcggagcttactggggcaacagacgtggcagggagttccacggcggccgtagaacgggcggcggacgtaagtgggcggtggcggggctctggtcgcgcaggcagagcgagagagagggcgagggggtcggctgagggcgcaagtgagcgaggggaggtgggtgagcagggcacggggctcaaaaggggcacgtgcacggggacgtggccgaagaacgcgctgtcgtgggcacgtccacgtgggggggtgtgggcgagagttaaggacggctga

SEQ ID NO: 2461 - DNA, 879 bp, Zea mays
  Peptide Sequence Number=SeqID_44240
atgtccttcatctatggcaacatacagattgttgacctcataattagcgatgtgttctttccaactgaagacggtttgctcattctgcaagaagttacctcaaagtttgacatccctaccgtgataatgtcttcaaacgctgacacgagcatagtgatgaagtacatcaccagtggggcttccgatttcctgataaagcctgtaagaattgaggagctgaagaacatatggcagcatgtgctccggaagcaaatcggggagaacagaagctgcagcaacagtgctcatcatcaacacctcgatcaggtctcaatatcatatccaccaccagccggcatagctcctgctggtaccacggcaagagaaagagagatgacgacgacggctaacgggacggtcacggatatacaggatctcaggaagtctaggctcagctggaccatgcagctgcaccgccagttcattgcagctgtgaattccctgggggaaaaggcagttccaaagaagatattggagacaatgaaggttaaacatttgacaagggaacaagttgcaagccacctgcagaaatacaggcttcacatgagaaaagtgaatcaagcattgcacaatgacgacgacacacctccgtcatcaagccttcccaatgaatcaaacattctccggaccgaattcgacggttctttgaatccaacctattttgatcaagatggatgcacggagtactctttgcccaaggatgacctctcaagtggctcggactgtatgctgggagaacggaacaactactcaccgcaaggtttccaggatttcagatgggattcagacaagcaggcatctgaaacgacatatctatggaatttcgaggcagatgagtga

SEQ ID NO: 2462 - DNA, 1899 bp, Zea mays
  Peptide Sequence Number=SeqID_44241
atgggcgaaacgatctcgttcgcccctcggaaggccatcaagtcccaggtcttggcggacttcgtggctgaatgggtcgacacccagctcccaacagttctgatccaaccggaactctggaccatgttcttcgatgggtcgctgatgaagacaggagcaggcgcgggcctgctcttcatctcgcccctcggaaagcacctgcgctacgtgctacgcctccacttcccggcgtccaacaatgtggctgagtatgaggctctggtcaatggtctgcgcatcgccatcgagctaggggtccgacgcctcgacgctcgcggtgactcgcaactcgtcattgaccaagtcatgaagaactcccactatcgcgacccgaagatggaagcctactgtgatgaggttcggcgcctggaagacaagttctacgggctcgagctcaaccacatcgcccgacgctacaacgagactgcggacgagctggctaaaatagcctcggggcgaacaacggttcccccggacgtcttctcccgagacttgcatcaaccctccgtcaagaccgacgacacgcccgagcccgagaaggcctcggccgagcctgaggcaccctcggctcagcccgaggcaccctcggcccagcccgaggcaccctcagttcagcccgaggcacccttggttcggcccgaggtatcctcggcccccgagggtgaggcactatgcatcgaggaggagcgaagcggggtcacgcctaatcgaaactggcagaccccgtacctgcagtatctccaccgaggagagctacccctcgaccgagccgaagctcggcggttggcgcggcgcgccaagtcgtttgtcttgcttgaagatgggaaggaactctaccaccgcagcccctcaggcatcctccagcgatgcatttccatcgccgaaggccaggagctcctacaagagatacactcgagggcttgcggccatcacgcagcacctcgagcccttgttggaaacgccttccgacaaggtttctactggccgacggcggtggccgactccactagaattgtccgcacctgcgaagggtgtcagttcaacgcaaggcagacccacctgcccgctcaggccctgcagacgatacccatcacctggccttttgctgtgtggggtctggacctcgtcggccccttgcagaaggcgcccgggggctacacgcacctgttggtcgccatcgacaaattctccaagtggatcgaggtccgacccctaaacagcatcaggtccgaacaggcggtggcgttcttcaccaacatcatccatcgctttggggtcccgaactccatcatcactgacaacggcacccagttcaccggcagaaagttcctggacttctgcgaggatcaccacatccgggtggactgggccgccgtggctcaccccatgacgaatgggcaagtagagcgtgccaatggcatgattctacaaggactcaagcctcggatctacaacgacctcaacaagttcggcaagcgatggatgaaggaactcccctcggtggtttggagtctgaggacaatgccaagccgagccacgggcttcacgccgttctttctagtctatggggccgaggccatcttgcccacagacttagaatacggttccccgaggacgagggcctacgccgaccaaagcaaccgagctaatcgagaagactcgctggaccagctggaagaggctcgagacatggccttactacactcggcgcggtaccagcagtccctgcgacgctaccacgcccgaggggtccagtcccgagacctccaggtgggcgacctggtgcttcggctgcgacaagacgcccgagggcggcacaagctcacgcctccctgggaagggccgttcgtcatcgcctaa

SEQ ID NO: 2463 - DNA, 2619 bp, Zea mays
  Peptide Sequence Number=SeqID_44242
atggcgcagtcgctggagctgctgctgatccagtttttgatgccggataacgacgcacgtcggcaggcggaggagcagatccggcggctggcccgtgacccgcaggtggtccccgcgctcgtccaccatctccgtacggccaagacccccaacgtccgccagctcgccgcggtgctactccgcaagaagatcacctcccactggcccaagcttcccgcggactccaaggcatcgcttaaacaagccctcatcgattcaatcacactcgaccacaggttctttgctaaatacctatcaccaacccttctacacatgtctgcctcagaatctgcacgctttcaattcactcaaattgtgcatttggccatttgcctaagggacactttgagtgctatccagataatttcatggctggtaaaatttaaagcatctttcttgaaaaagcacaagctggttgtacctatcctgcaagttatgtgcccattgcttacggaaacagctaatgaagatgaagattctgatctagcagcagatcgttctgctgccgaggtcattgatacaatggctatcaacttaccaaggcacgttcttgcaccagttcttgagtttgcttctctgagctttcatcacattaatccaaagtatcgtgaggctgctgtgacgtcacttggtgttatctccgagggttgttgtgaacatttgaaagataagttggaggattgtctgaaaattgttttggaagctttaaaagaccaagaacaaatggttagaggtgctgcatcttttgcacttggtcagtttgctgaacacttgcaaccagaaattttatctcattatgcgagtgtacttccatgcattctaaatgctcttgaagacccatcagatgaagttaaggagaagtcatattatgctcttgcagcattctgtgaggacatgggtgaagatatcctaccgtatctagagcccttgatatgcagattggttatgtctttgcagagcagtcctcggaacttgcaggagacatgcatgtctgcaattggttcagtggctgctgctgcggagcaggcttttaccccatatgccgaaaaagtccttgagatgatgaaaggttttatggtgctaattaatgacgaagatctgtgtgcacgtgctagggctactgaagttgttgggatagtagcaatggcagttggcagagcaagaattgaagcaatattgcctccttttattgaggcttctatttctggttttggattggattacagtgaactcagagagtacactcatggtttctttagtaacgttgctgaaattttgggtgatagttttacacagtatcttcctcatgttgtccctctcgtattttcttcctgcaacttggatgatggttctgctgtggacattgatgatgccgatagcattgaaaatggatttggcggtgtttcatctgatgacgatgttaatgatgaaccaagagttagaaatatcagtgtgaggactggagtattagatgagaaagctgctgcaacacaggctattggttttttcgcactacacacgaagagtgcctatgctccgtatcctttagggcgtctccagcagttcatccatatggtcatcgaaaacactgttttgcacttttcacctttccaaatttccttgactgacactaggtatctggaggagtcactgaagattttgatccggcacagtggttatttccatgaagatgtcaggctgcaggcagtcatatctttgaaacatactgttctgaacatctacatcaagactatgacagaggatgacgataaagaggtagttgcacaagcttgcatgagtgtagcagacattgtgaaggactgtggttttgctgcaattgagccttacatgctgaggcttgctgaggtaacactggtccttttacgccaagaatcaagctgtcagcaagtagagtcagatggtgaggatgatggcgacattgaccatgatgaagtcctcatggatgcagtttcagatcttttgcctgcttttgcaaaaaaatctccccatcctccccaagataagactatggttgttgcaaccttagctgaggttgctcaggaaatgggtgctccaatatctgcttatgttgataagataatgcctttggtgttgaaagagcttgcatcatctgatgctactaataggagaaatgctgctttctgtgctggcgagatatgcaagaatgggggtgctgcagcactgaaatactatggtgatatacttcgttctctgcataatttgtttagtaactcagaatcagatgatgcagtaagagataacgctgctggtgctattgctaggatgataatggtgcagcctcagtcgattcctctcaaccaggttcttccagtttttatcaaagctttgccactaaaagaagatcatgaagaatcaatgactgtctatggttgcgtctgcggtttattattatcatcacatccccagatcctccctctggtgcctgacgtcatacatgtctttgcccaagtggtggcggacagcaggacgacgcgggccggcacgatctcggccggatccgcgccctcggagcccccctgcccgcccactaccccctaa

SEQ ID NO: 2464 - DNA, 420 bp, Zea mays
  Peptide Sequence Number=SeqID_44243
atggggcctgtaagtcagaaggaggacagaggaaaagcccaccttggaatgacccaccctaaagtaacctcatggcaccgagcccgagggtcgagtgaggcagagccagaaggaggattgggcgaaccgagagggacctactcgagtggattccacacttggaccaagattgttttgccacaaatgatcgaccacattaaacatgcctggtaccgagccatgatagtggagttggtgttccttccactcatgacctgtcgaactagatccccgctcatgccttacaaggctgtagacccgcgactcattttattgcctaccgagcctaggcctgagccccctcacgatctacaggactcgcaacatggtgccaaaggttcaacacaaaccaatacaaagatcaaacttagggttcaatag

SEQ ID NO: 2465 - DNA, 840 bp, Zea mays
  Peptide Sequence Number=SeqID_44244
atggggtcgtcggaggccgacgaggaccagctcctcaagagcttcctcgcggagttgcttctgagccgtgctaagcgcggggcttttattgttaagtgcaccaaaattgttatttatttcgttgatgtggaaatccatggcacagtaaactggctcctgtcacttccttatgcaatggttatatcctggatacttggttgcttcaagttaaaccccttcgagcatcttaagttgtcttttgattcatcaccagatgaggtgaaaaagcaatataggaagttgtcattgctggtccatcctgataaatgcaagcatcctcaggcacaagaagcttttgcagctctggcgaaagcacaacagctcctgcttgatccacaggaaagaggctacattcttgaccaagttactgctgcaaaagaagaattgagggcaaaacggaaaaaggagctgaagaaagacagtgcgtccaagataaaatctcttgtagatgagggaaaatatgaagagcagtttgaacgatcggatggatttcagcagcaattaataattaaagtacgtgaaattttgaccgacaaagaatggcgtaggagaaaaatgcaaatgaggatatcagaggaagaaggaagacttaagaaggatgaggaggaaacaaaagagatgtggaagaggaagagagagcatgaagagaagtgggaggagaccagagacaagcgggtctccagctggagggatttcatgaagacaggaaagaagggacggaaaggtgaaatcaagcccccaaaactgaagactgaagatccgaacaaatcttatgtgcaaaggccagtaaagcgaaactga

SEQ ID NO: 2466 - DNA, 234 bp, Zea mays
  Peptide Sequence Number=SeqID_44245
atgggtctttgcgtctgcgggaggcccacggtgcgtgctgctgctggtcctgccccggccggtccgcgggcacaccgggagaaggcgatggctcatgctcatggcctgtgtgcccccgtctcgctcgcacaaaaggggctcaataatttcagggtcggcggccgtcccaagcatgccctcctgagctccactgtcatcgggctggacgtatggagacagcagcgcggcagatga

SEQ ID NO: 2467 - DNA, 927 bp, Zea mays
  Peptide Sequence Number=SeqID_44246
atgtggtggcaggtgatcggtggcaccgtcattgtggtgatgctcccgctggtggccaagacgacgcagccggcgtcgtacgtgttcacccacttccagacggcgcccgacgtgacggggatcggcagcagcgcctacgccgtcgtcctgtccttcctggtcagccagtactcgctgtacgggtacgacgcggcggcgcacctgacggaggagaccaaaggcgccgacaagaacggacccatcgccatcctctccagcatcggcatcatctccgtgttcggctgggcgtacatcctggccctcaccttcagcatccaggacttcagctacctgtacaacccgaacaacgagaccgccggcacgttcgtgccggcgcagatcctgtacgacgcgttccacgggcggtacaacagctcggccggcgccatcgtgctgctgttcgtcatctggggctccttcttcttcggcgggctgtccatcacgacgagcgcggcgcgggtggtgtgcccggcgaacgcggtgtggctgtgcgcggcggtgtgcacgctgctgggcctgcccatcctgcgcatcaacgtggtgttcacggccatcacctccatcgccaccatcggctgggtgggcggctacgcggtgcccatcttcgcgcgcatggtgatgcgggaggacgacttccggccgggccccttctacctcggccgcgccagcaggcccgtctgcctcgtcgccttcctctggatctgctacacctgctccgtcttcctgctccccaccgtctaccccatcaagatggacaccttcaactacgcgcccatcgcgctcggcgtctgcctcggcctcatcatgctctggtggctgctcgacgcgcgcaagtggttcaaaggccccgtcaggaacatcgacgaccacaacaacggcaaggtctga

SEQ ID NO: 2468 - DNA, 267 bp, Zea mays
  Peptide Sequence Number=SeqID_44247
atgggctgtccagacctccagatcagctcctctcccaactccatctcacagtggagccagaaagagaacaagatgtttgaagaggcactcgcatactacggcgagggcacatccaaccggtgggacaaggtgtccagagccatgggaggcatcaagtctgctgaggaggtgcgctgccactatgaagatcttgactatgacgtcaagatgattgaatcaggccacgtgccgtaccccaagtacaagacacatggattctggacctga

SEQ ID NO: 2469 - DNA, 1431 bp, Zea mays
  Peptide Sequence Number=SeqID_44248
atggcactggttcgccccgagcatccaaatccggcagcccgtcgcccgcggctcgtcgtgctcctcctgctcgccttcttcgcccttcagctcctcgtcttcgtcgccttccgcgcagtgcgcccccctcccgccccaccctccgcctccgccgccgccgtgccggtgctggcgtcggtgccgacgcaccgagacgagaacgattcgcgctgcggtggcggcctcgtgtacgtttacgacctccccgaggccttcaacgaggacctgctcgggatgtgcgacgcgctggcgccgatgtactcgctgtgcccctatctcgccaacgacgggctcgggttccctgcgggcgggaccaacctgtcgtcgctcctgccgcggcagctgctcgggtcgtggtacgcgtccgaccagttcgcgctggagcacatcgtgcaccgccgcctgctctcccaccgctgccgcacgacggacccggggcgcgccgcggcgttcttcgtgccattctacgcggggctcgccgtgggccgccacctgtgggcggccaacgccaccggcgctgacagggacagggactgcgtcgcgctgctgtcgtggctacacgcgcagccgtggtaccggcggtcccacggctgggaccacttcatcgcgctcggccgcatcacgtgggacttccgccgcacgacggacgccgggtggggcggcagcttcctcaccatgcccggggtggccaacatcacccgcctcgtcatcgagcgcgacccctgggacggcatggatgtcggcattccgtacccgaccgggttccacccgcgcaccgccgccgacgtgcgcgcgtggcagcggtacgtcgcgcggcgcccgcgccccaggctcttcgccttcgccggcgcgccgcggtcggccatcaagggcgacttccgcgcgctgctgctggaggagtgccaggcggctggggcctgcggcgcgctggactgcgccgagggcaggtgcatcaagaacaacgcgctcgtcatggagctcttcatgggcgccaggttctgcctgcagccgcgcggggacagcttcacgcggcggtcgctgttcgactgcctggtggcgggcgccgtccccgtgctgttctggcggcggagcgcgtacctgcagtacgggtggtacctgcccgtggacgggcgcgagggggagtggtccgtgttcatcgaccgcgaccagctccgcgcggggaacctcacggtgcgcggcgtgctggcggatatcccggagtcgcgggtgcggctgatgcggaagcgcgtggtgaagatgatcccggggcttgtgtactccgcggcgggcgtggagggcatcggtggcggcatgaaggacgccgtggacgtcatggtcgatggcatgctgcggcgggtcgctgagcagcgcccgagatggcggacgacgtga

SEQ ID NO: 2470 - DNA, 645 bp, Zea mays
  Peptide Sequence Number=SeqID_44249
atggctgaaaacttggatgcaatgaatggtgggtggttggaggtatttatagccccaaccaccaaagtgaccgttagtgagggcttctatcgcatggcgcaccggacactgtccagtgcgtcagccacgtcacctagtcgttgggttctgaccgttggagcttatgacagggggctgagaaccgtcgtcgtcatgggagcacgcggggtgccatcattacttgtttaccggggcgagccagatgggacaccgcccaaggtcgggcgaggcaatgactcctccgaggtcgaggttgaggccgagccctggggtcgggcgaggcggagaccgtcttccgaggtcgaggttgaggccgagccctggggtcgggcgaggcggagaccgtctttcggggtcgaggttgaggtcgagccctggggtcgggcgaggccgagaccgtcttccgaggtcgaggttgaggccgagccctggggtcgagcgaggcggagaccgtcttccgaggccgaggcgggggccgagccccggggtcggcctcaccctggcgggtggcacaacagtcggagcagggcaggcgacgctgttttcctgtcaggtcagtcagtggaggggcgaagtgactgcggtcacttcggccctgccgactaa

SEQ ID NO: 2471 - DNA, 345 bp, Zea mays
  Peptide Sequence Number=SeqID_44250
atggcgccgctgcagctgaggcaaggcgccgccctgctcagacagtggcggtttatcgctgttgatctggccatcggcggcccagatttgatcaagtggacgccgaagctaaagagcaaggtagagatgcaaactctcgtggacgatgtcgatatttttaccgagacgctccccgccgtctccactatcgagcttccggttgaaaacgacgcgggtctcgttccctccgccatcggatctgataccgcagatgaccgttggcgctgcaggcttttacaccagacagtctggacgtcgcaccggatagtccggtgccttctctccaccagtgccacctggaactag

SEQ ID NO: 2472 - DNA, 450 bp, Zea mays
  Peptide Sequence Number=SeqID_44251
atggactctgagcctgtcactctgtctggagactttggtaatcagagcaaaggagaaggtaatgagaacgacattatggaatcaccccgatatggtatgcaagctcaacaagtccctctatggagtttaaggaactgcagcttggaaggacctgttcctgatgtcagtgggataccccaacttggctactttgatctttcccacaataatcttaatggttccattccaggaattttctctggccttccttatctccaaagactgtcacttgacgacaacaatttgactggttctgttccatctaatatctggcaagatattgatctaagaggaaataaaagtcttgtactggatttccagaacaatgctctcaacaatctgtcaactcctctttcgccccctcccaatgttaccatcctgtgctgggggctgcgtgccctttatccttag

SEQ ID NO: 2473 - DNA, 591 bp, Zea mays
  Peptide Sequence Number=SeqID_44252
atggctaggccatcacgtgggacaccacggcgttggagcgtgcaacaagtttgtgccgaagcgaattgccagcgacgatctcaaggcaacggactacttggtcaagtaggacctcaggttcatgtcgttcggcgtcgagagaagagggtgccatggggtgggattttctatgttgctctaatggtttttgtgcctcttctcaaagagcctaacttcatagtttacatagaagtcacatcagtatcaatatttatgttatccccgacaacacttcgggtatgggatattttattcaatgaaggggacaatgttttgttctgtgttgctctcacagttttcaagatgcgagaagatgatctactacacacccaacatatcggtgatgtgattgatattttgcaaacaaccacacgtcatctatatggcccagatgaattcctgacgtgtttgcctaacacaattgatgttggcacaaataatgagaaactacttaatgatgaattctacattggactttggcaaaaacatgcgactggcgaggagtatgatgagcttattggagagttcatggctactgttcaacaattataa

SEQ ID NO: 2474 - DNA, 1695 bp, Zea mays
  Peptide Sequence Number=SeqID_44253
atggctgcgaaggacggctcagggtcacaggaccaggggcacaggttgtggcccatgctgtcctacgcttgcggcgagctatgtgtgatcatgctgctctacgtggctgcctttgcatcccatgcagccacaaggctggcgcgcatctgcgggctcaggccaccatgcatcctgtgcacgaggctggaccgcgccctccatggaaacttgccatggttctccgcggacctggtctgttccgtgcatcggtccgaggtctcgtctctggctcactgcaagagccatggccggcttgcacggtccggcgatctctgcaaatcatgcctcctttcatgcacggcggtaggtgcccgtgaggaggtggtgaactctcggcctacgacatccagcagcaggttgtgttcttgctgttctgatccgttcaagaataatactggcgacacgcagaggcattctggagcagccaatgctgtggtgtcttgggatagtgtacctgcagaccatccaaatgagaagacttctgtggtgggcattgaggaagtccaagaatctgacggtcctacaaaggacagcgccgccccttctgcgaatggtggggcagcgaagagcaaccacagatcggccgcgccgacacgcattgctgtggacagcaacggcagtgtaaaaaatgcctccgtcgttgcaagggccaacttgacgtcgcctcggccgtcagaaattatctctgccagggacagcagttcaacgacgcagcaagaggtgaaggcgctcctttctcagatgtcctatgcgcggggcggcctcgacagttcttcgattgaaggatctcctgacgctccgaacgaagaaagcaacgctacgagcaacaagagcccgtatctcgagaggaactattgtgtgctggaaccttcagacgggagcctcgctgacgatgtcgaagggggaagctctctcgagaacgtaaagagacagcttgagctcaacaggaaggccatggctgctctacacaaagagcttgaggaagaacggagcgcgtcggcagttgcggctagccagacgatggccatgatcaataggttgcaggaggagaaggccgcgatgcagatggaagcactgcagcacctgaggatgatggaacagcaggctgaccacgaccacctagcgatacaggatctgcatgatttgctcacagagagggagaaagaattgctcgacttggacgctgaacttgcacactgcaggaggctcctgcagaacgacgatccgttcaatggcgacagatttgatggcactgattatacaacgaacaacaacacggattttgtggggagcgccatgtcccattttgaagacgacaaggcatacattttggaatccttgagcagactggaggaaaatcttggcatttccacaatcagacttgcttctggtgacgccagaaattgtcaagaagacatactgtttgaagatcaggcaagagctgatgcatcgccttccagctgtgacgagtcgagtggtgtagcaagccttaaaattcagatttctctgttgaatataagactgagggcacttgaagaggatcaggagttcctcaatcaggtattgagttcgctccaatgtggtagtgatgggctgcagtgtatacaggagataagcaggcacttagcagagttgcgaagagttgtggctcactaa

SEQ ID NO: 2475 - DNA, 210 bp, Zea mays
  Peptide Sequence Number=SeqID_44254
atggcgaggtcgctgctgtgcgatagagactcggacgtggtgagtacgcagcaccgaacacatggttccgatcaggctgtttcaacggcgagctctgaacgcgcgtcgacgaggctccaggacgcgaggccggatgttgggcacgacgccgaggcctccgggtacgaggcgaggcgctgcgacagtttggcgtggtgctcggcaagctga

SEQ ID NO: 2476 - DNA, 390 bp, Zea mays
  Peptide Sequence Number=SeqID_44255
atggcgacagtggatgtggcatacgagccatcgatgaaggcagtcacggcgaccgacgctgagttggttgacggcgtgcagatccttgccaaccgtagggtgcgcccaggccacatcacaaccaccatcgccctcaataggtactggtgtatctcaagtcctcaaccccatcaacatgttgcaggggagtgctccaacgtcgttgctactagtctagacggtcgacgcctcaccgacgcggagttcgtcgacggcgtgcagatcctcgctaactacagggagttcctgcctgctcctggtgataatggaggagggtatcgaccactaggtggccttgcagatcaaggccttatctactctctgtatactctttggacaatacccttgtga

SEQ ID NO: 2477 - DNA, 288 bp, Zea mays
  Peptide Sequence Number=SeqID_44256
atggaggaatttcccgcagggaatcagggtcaggtccctattgccatctctagtctagcaccattccaagcaggatcagcacaaaagttggtcggcagcagaacaaacaaaacagcgcaagaagtgtctgaagaggcaagcatgaggatctgccattcattgtttattggtgcttatgcagaggaaagggaacgaccagagcttcttgctgaatcatgcgagagaaggaaacgagtggccaaggactctggaaagaccgaacagcaggtgaccgttggcgcgaagtag

SEQ ID NO: 2478 - DNA, 1299 bp, Zea mays
  Peptide Sequence Number=SeqID_44257
atggagcgcgggattcttggctccaggggcgccgtccaaatcttggggtcgaagaccggggccgcgatagatgtgctcaagctgaggttagatgatatcgctactgggggtggacatacggaatggccgttgtcttcagattggctgatgtcttctgttggcatccaagcatacatcatggatttgatatttgattgttggtctactgttggcaggtcatgtggcaaaacaacctctacaagttttacttgttctaccaaacacgagctgaacttgcatgtgaatgttaagccgttgcaattggcaacagatggatcctctcgtttggcatacaaaactccagtgcttaaaaatcagtggaatctttctgctagttcttcctctgcaaatgtggttaccacttttgatgatgacaaaggtgtaccttccagttttgctgaagaaaagatcggagtactgttattaaatcttggtggtccagaaaccctagacgatgttcaaccattcttgttcaacctatttgctgatccagatatcattcgactgcctaggctcttcaggttccttcaaagaccactggccaaacttatttctacttttagagctcctaagagtaaagaagggtatgcttcaatcggtggtgggtcaccattgaggaaaattactgatgagcaggcaaatgctttgaagattgctctggaaaagaaaaaattgaacgcaaatatatatgttgggatgcggtattggtatcctttcacagaagaagccattgatcaggatgctggagatccttacagagatcagatggaggattgtatttctttgatcatgggggagctgagatccagaggaatcttaaatggtcacactttggcgtatcagagtcgggtgggaccagttcaatggctgaagccatatactgatgaagttttagtagaacttggtcagaacggtgtgaagagcctcctggctgttccagtaagcttcgtgagcgagcacattgagacactggaagaaatagacatggagtacaaggagttggctctggaatcaggcattgagaactggggccgggtccctgctcttggatgcacttcgactttcatctccgaccttgcagatgcggttgtcgaagccctcccatctgcctcggcgctgggaaccagaaagcctgaagacaccgattccagcatggatctgatgcattacctgaccaagatgttcttcggctcaatcttggcatttatcctgctgttgtcaccaagactggtttctgctttccggaacaccatgctttag

SEQ ID NO: 2479 - DNA, 1584 bp, Zea mays
  Peptide Sequence Number=SeqID_44258
atggccatcgacgtcgtgccggcggcccacgaccgtgcgggcggcggcgccacggctgccttcccgacgatctccaccctcgtccccgcggccgccgtctgcatcgccgtatccgcctacgtctccacgctgctgtcctactacgccgtgttcggcgtctccctcatctgcttcgcccacgcggtatggccagaccgcgtcggcagcgctctcgtcagcgtcgacgcctacgcgcggcagcaggtgtcggtcgcgcgcggcgacctggaggccgacctgcggcgtctgagggacgcggcgcgagaccacccggcgaccgcgcccgtgtacgctggagccgaagattgcgcgcgccacgcccgcgccgccgtcgccggctgggcggacagcgcgaggaggagggcggaggccaagtggaacgagagcaaggacgccgcgtgcgccgcgaggttcgtgctccgcctgatcgcgctcgtcgcccgtctggccgcggccgtgctgttcgacgcggcgtgcggtgaggctagggcctgggccccgtcggtgctgggatacttgagaggcgtggccgatgggatcaggtcaccgtcgtgcaacagaggcgagggcgcggcgggcggcctcgtgttgaaggacgtcgtatgtctcgtcgggacagggttctacctcctgttcaccatgcacctgctcttcagctccaacaccgccagtggaacgcaactctgcgctgtgtgcttcgcggcaacgtgcggcttggcgatgctgatctctgactggattgacctgccggacgatgccgacgactccgacaccaccaccacttatgacagcgatgccgccggcgagacaagccgggacgaggagctcgaagtgcgcgagtcttggcggttcctctgggttctggtcctcatcacgtactgcgtcgacgctttcctccttcacgtcactctcggcccgcaccctacaacactagcgatcttgaccctctgcaacttggctgtactcaaagttggcagtcaagttcagctgacgccggacgacggggagagagcagccgagggagctgtcaacaagtggcgccgtggtgccatggtggtgtacgtggcgtccagcgtcaagatccttgtcatctaccgcgtgctcgactgttacctggccgcgctcgtgttcttatggcttttcgtcatggcgggcctcctgttggccgaggaggacaacttgttggacttcgataccacggacgaagatgaggaagatggggagagtgttggttttgaagtgaacgtgaccggaggcgccgagagagaggttgatgaggaggccagggaagagcattccaacacgaatccatcagatgatgaagagggaagttctgcgcatcttcatagttcaaaagagcatgagaacgttgaggttgaggagcagcgacacgaagtaccggattgcggcggcggcggcagcacggatgatggctgggaattgatagacgtcgatccggagatgccggcagaagctaactgtagcgccaatcggagggctttttccacggaagcacgccgcgtgatatcctggcttttccgttag

SEQ ID NO: 2480 - DNA, 138 bp, Zea mays
  Peptide Sequence Number=SeqID_44259
atggcacttggtgagtacatggtgggcgttagtgacaaggacaacgacgatgactccacctctaaggtatcactttctgctaatgatctcaccattgagctcgagtggaagaaggaccaaaatctaccaatagaataa

SEQ ID NO: 2481 - DNA, 363 bp, Zea mays
  Peptide Sequence Number=SeqID_44260
atggacccaccctcgggaagaaattcaatcgtgcccgatccttttcgggcttggactggaccggcccaggcggcccaaatgtgcacctataagtggagagctaaactaggatccccaatcaccagacgatgggcttatgagagtgagccagcaccccagcacagcaactgtgttaccggcatcactaccactgcgagagagctcaagaagccagcaggctccaactcccacagtacttgtgagaaccaaagctcagctggtaactacttgttcctttctttgatatttttcgaagaagattttcagacacacggactagctgcatatgctctagtcatctcagtggccacttggaacttctga

SEQ ID NO: 2482 - DNA, 330 bp, Zea mays
  Peptide Sequence Number=SeqID_44261
atgcaggtggcgtgcaaccgcaccgcggtggcacacccctttggctttgttgcatccggcgtggaggcccaggcccacacatcatgtaaccggcgcgccgattactacgtgcaagaaaccgcaccgccactcgcgctaatgccgcgtcttctcgactgcggaaccagtgccgcgactcaagggaccgggaaaggggatacttcgaaagggatccttctccgcgaaggaagcaggcctcgagccctcctactgaacaggggttcgaaggctggcccctcggaagggttcgacagccaccccagagcactcgggcttgaagcccattactga

SEQ ID NO: 2483 - DNA, 780 bp, Zea mays
  Peptide Sequence Number=SeqID_44262
atggcgcacggcggcggcttccgcaatctatgcaggcgtggcttaggtggaagggtgaagctggaaggagccccggtcaacgatgcggacaccggagacttcggcatggctgttacggaagcgaaggctgagtgtgcggtcccacacgtcggcgtccgatcccgcgcgatgggagacagactaggtgggtccgccagtcatcgtcataaggttatggcgcggacgcggagtgaggcaactgtcgagcgagccccgcgaaccagtgagagattgagagcgggcgcgactcgtgcggctgcctggtgggccccacgtgtcggcgccaatacgttagctgggctgcgcggagctgcagctactactctgcagactgcaggagttataagaagagtctccggccacactccgcgtcagagattcagagctgatgaactgcttctgaagcagctgagggaagcgccggaatttccacagagcctgatctccaggtgcaagaacaagtgcacgggtcgcaaccggaagcttggccatgaggtgaccacagtggagttgaagcatcacaggaggattaccagtgggcacaagggtggcagcgcgggtggaggcgccggcgccggtgccgcgggcgcaggcacgggtgggcataacgtgggcggcgggggcgccgtgacgaggccgcacagctccaagaacggcgcggcggcgctcccagtgccggtgtcgtccgtcctgacgctggccttggcctgcggagttgttctgtcagtcatgagctactga

SEQ ID NO: 2484 - DNA, 138 bp, Zea mays
  Peptide Sequence Number=SeqID_44263
atggcgcgaggccgtcgaccctcctcgcgcgccgaccgcaaccacgacccaccgcctctcaccccgcacggggaggcgattaaggcggcagttgagcggtcccagctgtcggtgcctgagctcctggaggagaagcag

SEQ ID NO: 2485 - DNA, 153 bp, Zea mays
  Peptide Sequence Number=SeqID_44264
atggacttcatccgctctggcgtctcgcgcggaggcagcatccatcactggcgattccgcttggggaggagctgtgaggtaccagaactagcggcgcaccacattggggcgctcgtcaaggggtggatgtggatccccatcgcgctcgacaac

SEQ ID NO: 2486 - DNA, 336 bp, Zea mays
  Peptide Sequence Number=SeqID_44265
atggtggacgggggcgcgactatggtgggcggcgcgggagggcgggtgtgctggcgggcgtcgtcgacggcggcgcggcgcggcgcgtggagggacgactttgttgccccggtggacaatcggagctcgacctctcttggtgacgaaaaactagaaggggttgaaggccccttggtccacaccccctcggctcagggaccaggacgatggctagatgccaagacgaatgtatggcaaggttggagggccatcgctccccatcggtggtggtcacatggaaatgggaaggcgtcgaagacctcaaggcaaagtcctctcaaggacctaaagtcctaa

SEQ ID NO: 2487 - DNA, 750 bp, Zea mays
  Peptide Sequence Number=SeqID_44266
atgccaggcctcgccgcagccgagcaggacgccgtctcgctggtgcggcgcgtcgcccgcgccctcaaccgccgcttcaccgacatcgtcgcgctgctcttcagccacaagggcgctggatcgctcggcgccgtcgcggggttcgccatcgccgtggtgttcgcgtggaagttcctgcgcccccgcagacgtgctcccaagcggcccccacctacccctgcagcggctcccgctgcgactgtgcctgatgcggccgagcctatcggtgactcaggcaaggtagtaacacgggaaattgtggtgaagcgactgaaaggctgcagaaaggttacatgccaacttctcggtgttgtttttgaggagacaattcctgaggagcttcagaaacatgccaccgttagaccctccgtggtagagctgctactggaaatatccagatattgtgatctctacctaatggagactgtaattgacgataagagcgaggaaaatgctctcatggccctggagacctctggacttttcagaactggtggcctgatgaaagagaaggtgctcttttgcagctctgaagttggtcgaacttcatttgttcgacagttggaatcagattttcacatagacacgagccttgacatagtttctcaactatctagagaggccgcagctggagctgttttagctgaagcgaacacttccaaccagggtcaggagccgcacgaagtcagattgttcgatgtctgcgcatag

SEQ ID NO: 2488 - DNA, 297 bp, Zea mays
  Peptide Sequence Number=SeqID_44267
atgacgcgggagggatggacggcctccgcgtttgatctccctcgcgcggtcagggcggttgatgggggcggtctgattgccttgcccaattgcgaggcagcggtggccggtggaggagaccgcaggccggagaaggcacgcacgggcacggagacgccgggtccgggaggaaagggtgaagaagggcaaggaggcgcgcgcgagctagagctattcaaaacaggccttaagggctcgtttggtagaactctgctccatgattctttagctctgagagctgattttctaatagagtga

SEQ ID NO: 2489 - DNA, 468 bp, Zea mays
  Peptide Sequence Number=SeqID_44268
atggcgtctgcgctccgctgccggaacatgatcgtcaaccgtatgcaaaggctccgtggccataccatgtcgctctggtgccattacttgaatatggacggtttggatccaaatggtcgtgtcccagttcgaatcaaagtgttatgttacgcgaaggagcggacctgtcggctgtcacctgtcagtcaagcagtgtggtcacgggctggcgccatttttggcctcctctggctctgcagcggccagcaggctgcatctgcatgggcggcgtggtttgctcccaagtgcagcgcctcgacgccgacgcgcaagttccgccatgtgatgagcccggaatttctggacgcccgctgggtctggctgttacgttacgccgcccccctgggtgagattgagtgggtgacagtactgcctggcaactctggtggtggtgccttgacagcacccgcatataaactttggagataa

SEQ ID NO: 2490 - DNA, 1242 bp, Zea mays
  Peptide Sequence Number=SeqID_44269
atggccacacaccgccactggctgctgctgctcttcctcccttgggccctcctctcccgccgcggcgcgcagcctcccgacgccctgtaccctgtcgtgctgctcccgggcaacacctgcagccagctcgaggcgcgcctcacggacgcgtacgagccgccgccggagtcgccgcaatgcggcgcgggcagcaacgagcgcggccgctggttccgcctgtggaggaacgccacggccatggacgaccccgccgtcgcgccgtgcctcgccgaccagctccgcgtcgtctacgaccccgccgcccgcgacttccgcaatgagccgggcgtggagacccgcgtcctcggctttggctccaccgccgacttcctcgccgacaccgaagccaacaaagacctctgcatggggaggctcgtcgaggcgctgcagcaggccgggtaccgcgacggagagacgctgttcggcgcgccgtacgacttccgccaggctcccgcggcgcgggggcagccgtgccgtgccttcgcgcggttcacccggcggctcagggcgctcgtggagcgcgccagcagggagaacggcggcaggcccgtcgtcatcgtgtcgcacagccagggcggctacttcgcgctggagttcctgaaccggagcccgctgccctggcgccggaggtacgtcaagcactacgtcatggcgtccacgggcgccggcgggttcctgctccccctgcggaacctcgcgtccgtgccccgcgacgcgctggaggcccccgacgcgctcgtggcgctgccgtcgccggcggtgttcggtcccggcacgccgccgctggtcgtcacgcgcgccaggaactacacggcgcgggacatcccggagttcctggcggcgatcggagtgcccccgctcggggtcacgctgtacgagacgcgggcgctccccctgcagctcggcttccgggcgccggtggtgcccacgacctgcatcaacggcgtcggccagcccacgatggagcagctcgtgtactgggacggcaacttcagcgagacgccgcaggtggtgtacggcgacggcgatggattcttacccgtggcgagcatagtggccctcgacaccgtcatcggtggtgacccgaggcaggagtactacaagtctatcaagcttgccggcacgtctcacgctggcgttgtctcagatgctgcggctttgaagcgtgtcgtcgatgagattctttggagccctccaatatga

SEQ ID NO: 2491 - DNA, 624 bp, Zea mays
  Peptide Sequence Number=SeqID_44270
atggccgttttgggtaaaagccactctgagcccggaccgagggagggcgtccacacacaccatgcccccgcctccgtgactgtcgcgctccctgcccctacgcaggtccgtgaccgtcgcgctcccacccccaatgcgcacgctacccccacccacctcccattccgctgccaggatcatgcagctctgcgccgccacgcccgagcgtactggggcgctggcgccgccgcgttcccgcagacgcccgagcggagcccgaggttcacgggcgacgcccgactggggcactgcgttcatgatgtcgccgagcgctacggctgcgccgaggacgccggagaggtggcccgcgctgcccgcactctggagtacgcgcctgcgccgaggcgagagcaggcgaggtggggcggcgaatctgaggcagaagcgcctgcgctttatgaatccggagccgaatcgctccgtccagcttgcctcctcaccgttgcttttgcgctctgcttttcacttgccttgcgtggatctgctcaacgcacgaaccaccgcctcgccgagaaggagatcgtcatcgtcctctcctctgcctccgcggtccccgtcgagagcagtgttgctgtcttcgactag

SEQ ID NO: 2492 - DNA, 255 bp, Zea mays
  Peptide Sequence Number=SeqID_44271
atgtcgctggcgcaggcaggctccggcgctgctggagtgctggctgctggacgtagctgcgctagccgatcgatcagatccgacccccaacaccgcacacagctgttgcaagcattgcacggagatcttgaaattactgatatgcttgtgaagacagggatgtcgaaccagaatgatcccattcctgttgaagaacgcgggtttagggttttcgacgcgaggattagcgttggcttgagtcctgctagctcctaa

SEQ ID NO: 2493 - DNA, 396 bp, Zea mays
  Peptide Sequence Number=SeqID_44272
atggaggatagaattgtccaagagttactttcttgtatgttgttcctccaagagaatccagagtatgttgcacagggtgtaactttagctcagttttcgttccagatacctatacctctgcggcaggactatgtcaaaaagaaaccgaagttgataaatgcaagtgatgaagcaagtacaattacctctaagtcttctgaaccagacgaagtgaaccctatagcctgggcagttcctacaaaacatgagggcgatgccagtgaagaagcttctctcgccgatgagacacttgcatcagaagtagtgctaacccggaagaggaaaataggaagctctttgtcagtagagccaaaccatctctctgatgaacttgaaccaaagttggaggatgcttag

SEQ ID NO: 2494 - DNA, 231 bp, Zea mays
  Peptide Sequence Number=SeqID_44273
atggcctccaccgccgccgtcatcgcctcgccggcccccggcaccgccgtggccgagcccgtcgcctggctcgtcgacgagcgcgatggcttcatcacctggctgcgctgcgagttcgccgccgcgaacaccattgtcgaccaccttagctgcaaaaatagcactctaaagaattgtgaaggtctcctctgccagagattaaaaacaaggtgcacaaaaagagcatactga

SEQ ID NO: 2495 - DNA, 342 bp, Zea mays
  Peptide Sequence Number=SeqID_44274
atggcggtgcgggcgcggcggctggggagtctgttccctgctagatccagttcctcgctctccctagccatcacagctgtgcaccacgcctttgtctccatcgtcgtagtcgccgtgtgcacccacaccgagtggcctgtcttcaaagtcgtcctcatcctctcctcctggctcaacgagaccatcaacgtctggatgttcatagacctgctcgggttcatgctgttcttcgacctcaccctggtgcacctcggcccagtacttcaccaaggtgtctggcttctagccattgctcccttcgtccccagctccggcgaccgagctccaaccagggacgtctag

SEQ ID NO: 2496 - DNA, 1578 bp, Zea mays
  Peptide Sequence Number=SeqID_44275
atggggattagaattgtcatcctcgaccctcttcccggctgccccgcgagctcggtttgcgatgagcacgtcatcgggagcttcaacgatggggacacggtccgggagttcgccaagaggtgtggggtcctaacagtggagattgagcatgttgatgccgccacactggagaagctggaaaaacagggcgttgactgcgagcctaaagcctccacaatcacgattattcaggacaagtacaggcagaaaaagcatttctcaagatacgagatcccattgcctgacttcatggaagtagatactttacgcagtatagaggaggctggggaaaagtttggctatcccctaatggtcaaaagcaagagattagcatatgatggtcgaggaaatgctgtagccaagaacaaagaggagctatcttctgttgttgcttcactgggtgggtttgagcggggcttgtatgttgagagatggactcctttcgtaaaggagctttctgtaattgtggcaaggagcagagacaactctactgtctgctatcctgttgtggaaacagttcacaaggaaaatatatgccatgttgttgaagctcctgctgatgtatctaacaaaataaagaagttagctactagcgtggctgaaaaagctatcaaatcattagaaggagctggtgtctttgctgtagagttgtttttaacagaagatgatcagattttattgaatgaggtagcccctaggcctcacaatagtgggcatcacacaatagagtcatgctacacctcacaatatgagcagcatatacgcgctattcttggccttcctcttggtgatccctcaatgaaagcacctgcagcaataatgtacaacatcctgggcgaggatgagggtgaagcagggttctttctggctcatcagcttatcagtagggcactaaccattccaggcacatcggtccattggtacgcaaagccagagatgcggaagcaaaggaagatgggtcatattacaattgtggggccttctaagataagtgtaaaatcacgcttggacaacttgctgcaaagaaactcgtctgatcccaaggaagttagccctcgtgttgctattataatggggtcccaatctgatcttcctgtgatgaaagatgctgagagggttttgaaagagttcgacataccttgtgagttaactattgtttctgcacatcgtacaccagagcggatgtatgattatgcgaagtctgctaaagacaggggtttcgaggtcataattgcagggatggtggcttcattgactcctcttcctgtaatcggagttcccattaagacttcaacactatcaggatttgattccctcctatctattgtgcaaatgccaaaaggtattcctgttgcgactgttgctatcgggattgcagaaaatgcaggtttgctggcagctaggattctggctgcaagagatcctgagctccaggacagggtaactaagtaccaggatgatctgagggacatggttttggagacggcagaaaggctggaggaccaaggcccggaggaatttctgaagggaatggattga

SEQ ID NO: 2497 - DNA, 777 bp, Zea mays
  Peptide Sequence Number=SeqID_44276
atgagcctccccaaaactctatcattttctaatatgagaatagtcagacaatatccaagatcagtgtaccttcaccctgcttcccttgctctatcctcctttcataaatgttctcgggtacctacctatctaggaacgagagagatagaggaagatacaaaacaagtatatcatcgagacgacccaaaagagctagcgagccagctccctgcaaagattatggagagccaagacctgcgacgagcctgctcagagatcgcaagcaagctggagaaactcgtcatcatcggcggtagcaacccacgccccgccgacgtcgtggcctcgagcggctccgaccagcaggtagagaccgtgcgctgcgcgtgctgcggcgtgggcgaggactgcacggcggcgtacatccgcggcgtgcgcgcgtccttctgcggcgactggctctgcgggctgtgcgcggaggcggtgaaggagcgggtgcggcggcagggcccggcgggcagcggcgtggcggcggcgctgggcgcgcacggggccgagtgccgggacttcaacgccaccacgaggctcaacccgacgctgtcgctggcggggtccatgcgccgcatcgcgcgccggagcttggaccggaggacggcgtcgtgccaggagcggaggagcagcctcgatgcgtcgtcggcgacccgcgccgcggcggcgctcaccaggtcggccagctgccacccgcagctcctcggcgacgccgtcgacgctgctgctgccggggatcgctggaggtga

SEQ ID NO: 2498 - DNA, 123 bp, Zea mays
  Peptide Sequence Number=SeqID_44277
atggcccgcatcctttataagaccccattcacttgctccggaacggttccttccaactgtgaaatggtcggcgtagagtttccgcagacaaccgcaagggggaacaagataatgaaacattga

SEQ ID NO: 2499 - DNA, 477 bp, Zea mays
  Peptide Sequence Number=SeqID_44278
atgagtcagagagaacttggtaattctgttcatcgtgctcgagcttttgtggactggctgggacttgctattctgtccacttctaattcacaagcccatcatttagcaatttttcaagctgttttttttgtttctcaaaacatcattgacggagaacctggtcaccatggtgatattgtgttcgtccaagtgatggtgcatttttttagcaggagccagagacgtcgtggaggggccagtcacaaatttcagacggatctttatctagttgccgagtatgcaaggcatgagattgaggcacacaatgaggctctggatgccatggccctgttcgacggcaatgtagacatggttaccaacgtcgatgttgtgccgccgagtaggaccatgacgacgatgggctccttgagcccatggccattgctagcatcgctacttgtgacagtcgcatatgaggaagagactaccaaaatctag

SEQ ID NO: 2500 - DNA, 1821 bp, Zea mays
  Peptide Sequence Number=SeqID_44279
atgggcaccacgtacaagtgctgcttcatcttcaagcgccggttccacacccgcgacgcgccgccgcccgaggacgtccgcgcccttttctccgtccacgccggcgggggaccccacatgggcgccgacgatctgcgacgctacctggtggccacgggccaggaggaggccgaggtggagcggctgctggagcagatcgtccagggccgtgcccgcgtcccgcgcctcgcccgcccgctcctctcgctcgacgacttccaccgctacctcttctcgcacgacctcaacccgcccatccgtcacccgcaggtgcaccacgacatgacgcgcccgctctcccactacttcatctacaccggacacaactcctacctcaccggcaaccagctcagcagcgactgcagcgatacccccatcatcatggcactggagagaggggtcagggtcatcgagctcgacatgtggccaaattcaaccattgacgacatcaacatcgtgcacggcaggacactgacaaccccagtttctctcatcaaatgcctgagatccatcaagaaacacgcctttgttgcatctccctatcctgtcatcataacacttgaagaccacctcccctctcaactccaggagaaagttgccaagatggttgttgaagtatttggcaacatactgtactacccgccagacgacacccatgagctcaaagaattaccatcacctgaacaactcaaaggacgtgtcctcctctcaacaaagccccccaaggagtacctcgaaaccaagcttagtgactccacgaaggagggtgatgctgacctccatcttggcaaaggaaccggtgatgacgcggtgtggggaaaagaagtaccagattttcggaccgagatccagtctgctgaaaaggacgacgagaacgacgacgttgatgatgaggaagaacaaaaactgcagccccatatagctccacagtataaacaccttattactatcagagcagggaagccaaaagactctctagctgatgccttgaagagtgatccagaaaaagttcggcgtctcagtttgagcgagcaacaacttgccaaagcggcaaaggatcatgccacagaaattgtgaggaagagtttgcttcccttgttgaagagatcagcttcctctgttccaaatccaaataggttcacacagagaaacatactgaggatataccccaagggcactcgagtcacttcatcgaactacaatccgttcgttggttgggtgcatggtgctcaaatggtggcattcaatatgcagggatacgggagagcgctgtggctaatgcacggattttacaaagcgaatggcgggtgcggttatgtgaagaaaccagatttcttgatgcagacagaaccacaagtcttcgacccaagagaaccccagcctgtgaagaaaacgttgaaggtgaaggtgtacatgggcgatgggtggcgaatggacttcaagcagacacacttcgatcagtactctcctccagatttctacacacgggttgggattgctggagtcccagcagactcggtgatgaagaagaccaacgcgatcgaggacaactggaccccggtgtgggagaaggagttcagcttcccgctgactgtcccggagctcgctctgctgcgggtggaggtgcacgagtacgacatgtcggagaaggacgacttcggtggccagacagtgctgccggtgtcggagctgcggcccgggatccgggcggtagcgctcttcgaccgcaaagggatgaagtacaaccatgtgaagcttctcatgcgtttcgagtttgcctag

SEQ ID NO: 2501 - DNA, 399 bp, Zea mays
  Peptide Sequence Number=SeqID_44280
atggctccattgccttctctatcccgactcccgagtcccggcgccatccaggtggagttcgtggcggaggatgagatcgtcgaaatcgtcctcaacatccgcatggacgcccttaacatgatctacgtgcgtctgccggcccgccaccacccatttccatctctttcaactccccatccccacctgttcatacatctcacgctgccgccgccgctgtgcaggggggatttcgggcccttcttcccacagattcccaccaaggtgccgctctggctcgccgtggcgctcaagaagcgtagcaagtgcaccatccgcaccccggactggatgactgttggtattggaagcggaaggagagtcgcctcgggaattccagccattgccattccactatattga

SEQ ID NO: 2502 - DNA, 109 bp, Zea mays
  Peptide Sequence Number=SeqID_44281
gcgactatcaagcaacctcgtcatagtttcggctaacccctgcgcgaaccttgaccagccactgcgcgagcacgtcgtcgagactccgacgacgtccgtctacccctag

SEQ ID NO: 2503 - DNA, 252 bp, Zea mays
  Peptide Sequence Number=SeqID_44282
atggaggaagacgatgagttcggtgacctctacacggacatcctcatccccactcatacccccaatccacctcttcctagcaccatccggtcaatccagccaccgccgcctcgcatcctccacctcacatcctccacctccccggatcccaccgcgacggaggaagatgatgagttcggcgacctctacatggacatcctcatccccactcatacccccaatccacctccacgctatccaaccatgttctag

SEQ ID NO: 2504 - DNA, 2088 bp, Zea mays
  Peptide Sequence Number=SeqID_44283
atgtcgtcttcttcatccatcggcaccaatttcatccaggcgctagaacatcagacgtgcaccctcttctcggagttggacaagcatcttcaggctcgcgacgacaaatgggagttccgcgtcgccgtcctggagttctgcgtggtggattcagagcgccaattcgacaacgtctcctccgacctacgaaccggcgtcgtggcccagatctcagtggtggaggcgctcgagtccatcgtcgttgattcgacacagcacatggattcagtttcgtccagcgttcgtgcagatccggagcgtccccacatcgactccgcgatcgaccatctccactcctccatggtcaaggttcgagtggcgatcgacaccagggacctacagtggtcgcctgatgtgcacggcggtggctctggcggccttctcggagagccaggtggtgaaccaactgaaatcagtggcgctgctcatgccggtggcctacctcgcccacatcaccacccccatcggcatcctcctatccaaagcgttcgtcggcgaggtgctctcggacttcctcgggatggccgagatcgacccgctagcaccactggtgatgaacctgatcagggcattctgccgctgcccgggcatgagctgctacgacctcgccggctccatcaccagcaagatcactgcctcaacagctccgccgtcgacttcttcctcaagtacgagcccgagccgacctccaccaaaaccatggttcactttgctcaaaccgtgcgcgacagtgtgctcaccaagtacgactacgtgctactggagtgcaacatcgccagctatggccaggccgagccaccgatgtaccggatatctggcatcccgccgagctcagcttccccttcctggcgtcctctctcctgtagttggtcatccgtgaggaggaggaggttggctgatctaaaggtgaatcataagttcaagggaggaacctgcaagaatcttgttgaccttgttaaaaagataaaggaaaaacaaggagtccaatgcgcctacatgtctcatactttacttggatattggggaggcatcttagcaacatctgatatgatgaagcagtataatccaaagcttgtttatcaagtccaattaccaggtatggtcatgaatctgagagatgttgccttggagaaatttggagtgggcatcattgatcctaacaagagatgtgcattctacaacgatcagtacaactacccttctagtgtgggtatggatgttgtgatggttgacattcataatatgttgggaactctgggaagcgtattgggtggccatgttgcagtaactcggaagtaccagcaggatcttgaggaatccattgccggaaactttcaaacaaacaacataatctgctgcaggagtcacaagttgctggagaatgcgtgcgccatgttctgcctcccaccgcacgtccgcgtccgtagctcccgtcgccgcaatcagcgcctccgctgccgcaatccccttcctccgcgcacgccacgcgagccctcgcctccttcctacgcacgcacgctgagcgggccgctagccgcagcaacgctctcctgcccccgccaccgccccctcactctccagccccagcccccgcgcgcccaccatggcactcacggcgagcgagccgcaacaactcacgctacctctcttgcccccgccaccgccccccgctctccagcccctgccctctgcgtgcatgacggaaggaggccttccatggcaggcgggatctccggccatggtaagcgggattccttccatatttgttgtttgtgcgacatctgtggcagcaattgccctattccttacctcatgatccctctcatcctgactccgccccgtcgctgctggcgcccggttcggatccagcaccccctacaccctgctctggtcctcgggtacccccgcctcaccgccgttcctcgtcacccgtcagcgcaacgtcggtccgctatgctgcgccctgcagggaggcgagagaggatcacttcggccacccttcgccgggagagcatcgacctcgtcaccctcgatgactttcactcgtag

SEQ ID NO: 2505 - DNA, 249 bp, Zea mays
  Peptide Sequence Number=SeqID_44284
atgaccgagtcgcagctcgggctctatgccagaccacagatttttgttgatcgccgcctctcgcggacgcgcagactccgctatggccacgcgctagcacgcttctccggcacgagccatgagcacaaggaggccggacacccgcgcggggacgccgcgagcggcagaaggtcccggaggcgagcaaccgatgctgtgcagaaacagtgcggctcccctagtcccctttctgtggctggcttcggctaa

SEQ ID NO: 2506 - DNA, 1305 bp, Zea mays
  Peptide Sequence Number=SeqID_44285
atggcggaggagacggtgcaggagctgcgcgcgagcttcgcgtcggggcggacgcgccgggccgagtggcgggcggagcagctcaaggggctcatccggatgatcgacgagaaggaggccgagatcagcgccgcgctccatgaggacctggccaagccgcacatggagtcctacctccacgagatatcgattacaaggtcctcgtgcaagtttgccctcgacgggctcaagagctggatgaagcccgagaagatacctgcggccttaaccacgttcccgtcctctgctcaaatcgtgccggagcccctcggtgtggtgctcatcatctcagcctggaactaccctttcatcattggagcaatcgcagctggaaatgctgttgttctgaagccgtcagaaatagcgccagctacctcgtcattgctagcgaagctgctgcccgagtacgttgataactcctccgcaaagcatctaactccggtggctctggagcttggtgggaaatcccctgttgttgtggactcaaatgttgaccttcatgttgccgtcaagaggatcgttgttggcaaatggggatgcaacaacggccaagcatgcattgccccagactacatcataacgacaaaatcatttgcgccagagctggtggcctccttgaaaagggttttggaaaggttttacggggaggatcctctgcagtcagcggacctgtctcgtatcgtgaattcgaagcacttcaggagactgacggaattgatagaagagaaaagcgttgctgacaagatcgtgtacggcggcgaggttgatgagaagcagctaaaaattgctcctacactgttgctcgacgtcccccaggattcagcaatcatgaccggggaaatatttgggcccttgcttcctatcgtgacggtggaaaagatcgaggagagcttcgacttgatcaacgccaggcctaagccgcttgccgcctaccttttcaccaagaacaagaagctgcaggaggagtttgtggcggacgtgcctgcaggagggatgcttgtgaacgacaccgtgctacatctcgccaacccgtacatgcccttcggcggcgtcggcgacagcgggatggggtgctaccacggcaagttcgggttcgactgcttcagccacaagaagggggtcctggtccgcggctttggcggcgaggcgaacgccaggtacccgccctacacgacggagaagcagaagatcctgagggggctcatcaacggcagcttcatcgcgctcatccttgccctcctgggcttcccgagggagaagcgttag

SEQ ID NO: 2507 - DNA, 279 bp, Zea mays
  Peptide Sequence Number=SeqID_44286
atgaccgccatcgcagcaaaatcatcccaagggcctccctacactgaccactcccctactgccctggcccctttcggaaagtttagtggtaaacaagtgtcggggaccataattaggggtaccctcaaggctcctaattctcaactgaaagacaacgtcgcctgcgccgctctgactgcggtgccacttgacagagtgaggctgacaggcagtcaggcccggccgcaggcaccaaaggaagctctgcttcgctcgacccagggctcggactcgggctaa

SEQ ID NO: 2508 - DNA, 111 bp, Zea mays
  Peptide Sequence Number=SeqID_44287
atgggcgattttcaaaacatctgcaataaagggagaggggctcttcgaaggtttggactgatgtacccccaggttgagatcaagaataggtctgtggcaacttcagtgtaa

SEQ ID NO: 2509 - DNA, 378 bp, Zea mays
  Peptide Sequence Number=SeqID_44288
atgtgcttcgccgcctccttctccgacaattttaacaccctgacacccaccgcatccgtcaagatcttgaatataaactggttccagaaggaggccaacggcaatgacgaggtcagcatgacgctgaacatttcggctgacctttcatctcttttcacgtggaacacaaaacaggtatttgtttttgtggcagcagagtatgagactcgacaaaatgctttaaatcaaattttcacctcttataactatattggaagcaatctaaagggcaaggaattcaacttgacaatgcactggcacattatgccaaagactggcaaaatgtttgcagataagatagtcatgacaggctatcagcttcctgagcagtacagatag

SEQ ID NO: 2510 - DNA, 663 bp, Zea mays
  Peptide Sequence Number=SeqID_44289
atggccgcggcggcggcggcggctaggcgtgccgctggccttctccctctcctcctatcctcgcggtccggtgctcgcatacccctccaccgggctgtatcccagatccctccgccttgctcctatcgcctactctcgcagcaagccaagcccttctccgcctctgcctctgcctctgcctcagcctccgcgtcgaatggcgcgaccgcggaaagaacccgtgagctgcatctgtacaacacgaagtcgcggaagaaggagcagtttcggccgcgcgatccaggcggggaggtcggcatgtacgtctgcggcatcactccctacgacgacagtcacatcggccatgcccgcgcatacgtagcctttgacgtcgtctacaggtacttgcgctatttggactatgaagttcgctatgttcggaacttcaccgacattgatgacaagataatcgcaagagcaaatcagctgggggaagatccttttaacttaagtaaaaggttctctgatgacttcttgttagacatggccaatcttcaatgtttaccaccatctgtggagccccgtgtttcagatcatattgatgagattataaatatgattaaacagtttcttgattggatgtataatctcagattggttggagcgaaagggcatttagcgtaa

SEQ ID NO: 2511 - DNA, 2913 bp, Zea mays
  Peptide Sequence Number=SeqID_44290
atgcctaccagatgctgcacactgggggagaatgagaagttaatatgccaatgcttaagcaataaaatagctgtaagaaacttgcctcaaacttctcattgtaaagatgtctctgagaaagtaatgaaccagccttctattgctataacggagagactggagaatgtatcagaaccttcagtggctgatgacagttcatccaaagctgtagcagagaaaaaggatgcttatagagattctgcagtatctaaaggacagccaaattttggtttctcatctgggtcgtccagcattatagtgacaaagttccagaaatcacctgaatttaacaatgtatcctctactgctaaacatagcaaacataaaaatctgtgtgatgaaggatcaagaattgagaaaagttcagcatccagctatgtgcctaccagtacaggatgtgaagaacccctaaatagttctgccaaatctgagctgggtccatcaagagtgaagcgcaaatgtaatcagatttctgagggaaggagactggaagaaacagataatgaggaacattgttctgaactgctaaaaaagactagaacactgaggtgctctgttaaaggttctgaatcagatgattgtactagggctagttcccagtcgtcccagaagggggtttatcaaccacaaaatgaggttaactcattttcttgcagggtgttgagaaccaagcgaaaacatcctattatgcatctaaataagcatgtgaaacagcttcacagacagaccaagttttttgaaggtgatgagcaaccagatgccaagggcaattttcttggtggattagattcctatgatagaaagaggcaagtagaggatatgagcactctggataaaacaagacatcaccaggaagggagtcgagcatttgtccgcaaacttcctaaatatgtgtctctgaattgcattgttaatgaaccgaatactaacagtgaaggtgcttgcagtgggagtggtgggattgattctagtttaattgctacagggattacaaacgataacaggaaatctcccaaaattgttcctctcaatctggttcttaaaaaggctaagagatgcaatgctgttaaactccgtaagacagaaagcacccacttgtatgaggagaaaagctcagattgttctgtgaacagctcagattattctatagaaaagtattccgttgatgatgaaaattgcagcccacaagctgaatatgaactgcaggattccaaaaggagtaggtattcatctaatgatctgaggtcacatgtggctctccacaaaagaacatctggtggaaccaagaatcgaagaacaagtgtatcccttgccaggattaagaaattcgggagcaaatcagtatgctattctggcagtgacaaagacaatgctgtgctagcccatgaagtgaatgctaggaggttgagatacagtggaagactcagctcaaattctccatgctgtgtttgtgggatctcagacctggagccttgcaatcgattaatagagtgcagcaagtgctatatcaaagtgcaccaagcctgctatggtgtactaaaagttcctaggggtcaatggttttgcagaccgtgcaagaataataccatggatacagtctgtgtgctgtgtggttatggaggtggagctatgacaagggcactgaaaaccaagaatattttgaaaagtttgctccaaggtttgatgaatttagaaaggtcagaatattatgttgattccttaggaaatgcaagcagtgagtgtacaagcttgcaaaatccagtagacagtgcacatggggataacattatgaatgcgaagaacatcaccagcaattcctggacctctggaaaatactattcgagtttacttggaccacaaccaatgcagtgggttcacatggtctgtgggctgtggacacctggcacaaaatgcccaaatgacaccacaatgagcgcttttgatgtttcaggtgcttcacctgccaagagaaatactgcatgttcaatatgtgacagaactgggggctcatttgtcaagtgccgagctgtaaattgtttggtattctttcatgcttggtgtgcacatcagaggggtttgctgcaaagtgagcctgaaggcgagcacaatgaaaatattggcttttatgggcgatgcgtgtctcacgccattgttttttctagtcacgttaatcctaagaaagaatactttagaaacaacaattggacatgtgcacgtacagagggttttaaaggccgaaagggagaaggcttttctgatagtagccataaaaaatatgaagagtacagtggcgagttcggtgtttcccaagaacagataaatgcttggttacgcataaatggttcaaagccctgcggacgaggacagaaggagtacatccattacaagcagttaaaagggtggaagcatttggttgtttacaaatctggcatacatggacttggtctctacacatcagtctttattccacgcggctctatggttgtagaatatgtgggtgaaattgttgggcaacgggttgctgacagaagagagatcgaataccagtccgggaaacggcaacaatataagagtgcatgttatttctttaagattgacagggagcatattattgatgccacccgcaaaggtgggattgcaagattcgtcaatcattcatgccagccaaactgcgttgcgaaaataatctcagtcaggaatgagaagaagattaagttagagaagtttgacaaatccaaagtaatgttctttgcagaacggcacataaacccaggggaggaaattacgtacgattaccacttcaaccgggaagatgaaggccagaggatcctttgcttttgtagatcaagatactgcaggcggtacctcaattag

SEQ ID NO: 2512 - DNA, 513 bp, Zea mays
  Peptide Sequence Number=SeqID_44291
atgatgaatcccaatgaagataaagtgaataatgtcaacgacaagattccaacctcgatagtggtgaaaaggaaggatgagtcacatagacatctgctgaatggaatgaagaacaacaagaggaccagaaaaatgtttgggtacaagattaaaccacctcaaccgcaagcagaagcactagagctaatgaatacccaaacaggagaatcaaatcaagctcagttgttcagcatgcaggcaaccggtcatccatcatctgctggcaatcaagcaaagctgactcgcagagaggtcaaagtaagaggtgcttgtttctactgcaaggaagaaggacacttcatttgccaatgccccaagaagcgtctagaccggctcatgaagaaggccttcaagcagaactcaaccagtgatgatccagaagaaattgtcttcactcgctcaaagtacaaagtaattcaaacaactgataaaggcgggaggttgctgaacataagagttgagccgagagagtga

SEQ ID NO: 2513 - DNA, 237 bp, Zea mays
  Peptide Sequence Number=SeqID_44292
atgggagccgccgatctcgcggcggcggcgggcgattggagcgggatgggctcgcaaaccctaccggcaagtggcggcggcgaggagttgggggaagaggtcgagatgatgatgggtggatgggtgggagggaggagaagcacaagcactgggctggggcaccagcgcagcggggtgcacgaaggcaagggcacgggcaccgagtgcgccgcacccgactcgtcgcacccagcctga

SEQ ID NO: 2514 - DNA, 3339 bp, Zea mays
  Peptide Sequence Number=SeqID_44293
atggacaccgccgcgggcccggggccccgggacggccccgatcggacgccgcaggggcccggcgcctcccccgaggaggccgccgctgatggcgtgaagacggacatcgcaggtggggcggaagcgcttgcagcggcaggcgcggccggtgaggccgatccgggtggaggcgccgctgcggcggggcgtgggggtgacgcggaggcctcggcgagcgagcccacggcggaggaggttaacgaaggctgcggcggcgccgctgctgctgcgggcggagatcgccccgccgcgcccgaggcggatgcggacggcggcgcgggcaaagggcggtctgctgtgcacgcggtgagtgaggtggagcagggccaaggcattgcgggggcagcgcaggatgtggatcccgcggtgtttgaggtgaagaagatggacgtgagcgagggtggcgacgcaagcaagcagaatcagcactctccgtcttgtacggccagcgaggtggatgtggggatcgttcctgtggcagtgcgagatttggatcctgtggggtctgaagtgatgatggaggtggacgacggccatgtcagggaacaagagcgcgcgggagtggctgtggcgggcagcgagtttaagatggaggaagctgatggaagagtggtgcatcaagggtctgctgccacatctgctgggggccttcaggcgcgagccgaggaagtgggagagtgcttggtcggccgttacattggccgcaacgcgccaatgcaagcggggatccttattgggaaggttgcatcctatgatagcacagctggcatctacagcgtggtgtttgaggatggacataatgaggatttggagcttcctgagctccacgagttcctcatgcccgacaagaatggcacgttaggcatgagtgtgaactgcaggaagaggaagctgggcctgctggttttgtcggggagtgtctcggaggtgaaagagccagcaagtactagacagagggttgacggatgcgagatgcctgccaacactgatgcactgcggtatagtgggtctggctcggatatgtccgaggatatcgaatcttcgagtaattcatccgatttcactaaagaagaaccatctgagccgtgtcctcctgtacaggctgtggagttgcccccgtcatcgggagacattcatgtgccagaagattccataagctatctcttttctgtttataacttcctgagatccttcagtgtgcagctgttcctgagtccgtttggtctggatgattttgttgcagccattaattgcactgttcagaataacttgttggatgccgtacatgtctcgctattgcgtgcactgaggcggtatcttgaatctaaatctgctcaaggatctcagatggcttcaaattgcttgaagtatttggattggacattactagatgcattgacttggccaactttcttactagagtacctgtatgtgatggggtgcattaagaacctaggggggcagagttttgctagaagccttctagccgctgaatactataaactttctgttgccacgaagttgagggtgctgcaaatactctgtgatcatgtccttgaatcacaagaatacaaaactatactggaagatcgagtaggctacaatgaggagatggaatatgagatagattctagcacctttttggaggctggttccagagcagtcttgactagagcctcaaaggcctcagcttacaaaatgctgaatgatttacagaactttgaaagtggtccaaatgtaacaaattcagatgttgctgtagcagatgtttctcaggacggtaatagtgatgattgccgaatatgtggaatggatgggactttggtatgctgtgatggctgcccatgggcatatcattcgagatgtatcggtcaaaataaagctttccttccccagggggactggttctgtccagaatgtgttgtcaacaagcttggaccaacttcatcaagaattgaacgtggtgcaagaggagctcaaatgtttggcattgatatgcacgggaggctattcttaggaacctgcaactatttactggtgatcgaaatatcttcagatgtagagtcttatgcaagatattacaatcattatgatgttgtcaaggtactccagagacttgcactctcagatgcatatgtggatatatgcaggcaaataatggaatactggaaacatttactcggtagagttcagagtgagagatcaacaatattgaaagaagttggtacaagacatactccacaatccagcatgttgagttttactccaacaatgtcaggagatggaagtggctggacaactttaaaagatggtggggacagtaaaacagtagcacttcctcaaacaaatgtgcaacagaaaattttcgctaatcagtatacagtgtgctctgctgaacaaacggagaagaatgttgatgtttgcaagcaagctctgtcagctcagaacaacatacataatgcacctagaaatggagcttctggaccatttgtggcatcccccgtttctcatcagaatggatccattggaacgggtatgtctaacatagcacaagcacagccagctcatagtatatatcgtccagacttatccactgtttctgcaaagtcagaatcatttcgttcatctttgcaaggtaaacttcaccttcagatgtgtactgaaagacctggaaacatgagttgtggcaaggcagcaaagttgtcttcttttaaaccacaagcttacatgaacctctacaatcatggcaacattgcagcatctgctgccgccaatctagctattattgcatccagtgaaggtaaggtttccacatcccaactgtccgcaaaaccaaagaagaaggtggctgcagacaatgctctacagttgaaagcattttcctcagcagtcgcacaatttgtttggccgagtactgaaaagaagcttatggaagttccaagagatagatgtggttggtgccttgcttgcagaagttcagcaagtggaaacaaaaaggcttgttttcttaacatgaccacatcaaacgctgctaaaagttctgctcgagttcttagcacaatgcgcgtaataaagatttctgacagccatttccccagtattgctgcttatttagccaacatggaggaaagtttgcgtggcctgttggttggttcactacaagacatgcagcagagagaacggtggcgtgaacaacttgaagaagcttccaactgcagaactgtaatacccctcttgcttgaggtgagttacaggatggcatcctttggtacctctcaatattctacaactgagttgtga

SEQ ID NO: 2515 - DNA, 2493 bp, Zea mays
  Peptide Sequence Number=SeqID_44294
atggcaagacaaggcgttggaccgccgcctagacgcctaggcgacacctttaaaacagtggacacaactctgttggaaagcaacatccgtggagtagcattttctgcaagctggttcaagccgatagacgattggcctgcggaatctccttgtccatcaacaggggcatctcgtcctgcacaacaccaaaaacgtggggctggcggaaggcgtggcagaagacgtttgttggtgtctgaacccggtactgttactgatgatgacaacagctggacttggtggaccggaggaaatataataaaacgtactttgcagaggggggctcttctacattcaaccataagaaaagctgctcgccaaggtggtaagaaaaggttagcaggtttatcttatcatgaaggttctaattttccaagacgatctcggcaacttttctggagagcatgtgttggactaagccagacttcgtctcaacttgctctgcaggttagatatcttgatgctcacatcagatggaaggagtttatctctccagatcaaattccttcagatggaaaaagttctgacgctgacttttctgcactcagaaatgctgtactctgtgataaaaaaataatcgacaataagataagatacgcactgaagtttcccaaccaaaagcatcttcctgtccgtctgacaaaaaatatcttggaagcagaaagtgatcaggatgaaattagaaaaatgtggttttctgaaaaccacgtgccattgtacatgttacgagaatttgagcagcatgctgaggctagctccttgcctactccaggaattccggaatgttttaccaatttatacccaaggcgagtgaaagcacctgacagagatgttttttcatatctctttcacaagggagaagtctatccctgcgcgtcatgcaagaagggtgttctctacagggatattgttaaatgcagctcttgtcaaggtaattgtcataaagagtgtacatcaagatctgttgttagcaaaggaggcagtactacttccagtttgatatgcaagttatgtctccagaagcgaaatcttatgctcactagttacaatacaaatgcaagttatatccagcatctacagaagaataatggccaacagccagtgaccgctcccagaaatgtctctaaggttagttcttcccattctgctgagcctgcccccaaagtggaagccgagccagtcacaaaggttaaggcacaacgagttggaaatgtggaagctacaacccagccagttctaaatgtgaaagcccagccacccgccaaagtggtaactcagaacatcactagtgtccaaaagacaaaagctaaaaagtcaaagtccgaaaaaccaacgaaggctaaaaaagttcaagcgatcacatatttcggtctcatatggaagaaaaataagaacgacaaggatgatggaagcgagttcagggcgaatgatgtaatccttaaaagcaaggatggtataggttcgtcaataaaaccaaaatgttgtctatgtgacaaagcatattctccggaattcctgtatgtacgctgtgagaggtgcaaaaattggtttcatggtgattccttgcaacttgaagaagataggattggtgagttggttggataccgatgctgtaggtgccggaggagggccatccccccgtgtcctcattcagataattatgtaaagcctgaacccgaatttagtgagcaaacagttgcaacatcatcggtgtcaactatgctatccagtgggaagacttctgcttcagcagatcaggacccactgcttgcttcgtatggaatagttgaaccaatcggggaagagacaggggatgttgatttatcagcgaacacggcaagcattgccccgggaagtagccagaagctgtctataagaagagcactagctaaaacttctggataccttgaccaagctggtaaatctgtgaatgagtattatgtccagaaccagaatacacctccaggcaatggaaacatcaatttcagccacacgaatgagatttccttttcggaggctgacagcgtgggcgcttcaggactactggggtgggatttttcgagaggaaccgcgtatgctgccccacctggtttcacttctaatcgccagcagaaccgcactagccgtggcagctttgtgccggacgagtgtgagcgtgagccccagacttatttctcgttcactgagctgcttgaggctgacgacgcacagcttgatgacaacgcgtttgggatagctactggtctgcaaggtgatgctaacggctccggaagctttgtccaacgaggagttggttttggtggtacgtctttcatggcagaagatggagcttcgaatatgaacgtgccaacaaatggtcccacgcctgaagaggtagcgtgccacaacggcacgaacactcagccgccacctgatcccagatgttctgtccgtgacctccgcacacaccggtag

SEQ ID NO: 2516 - DNA, 375 bp, Zea mays
  Peptide Sequence Number=SeqID_44295
atgaggtttcacgcggtccctgtggaggagctcttccgccatgctgctggaattgattacccgccatctcacacggagacgcacgggctacctatcgtcattcaagggctgatgactctatccgcccttgtgacatacgaaggcagttttgaggcgttgatctatgaaggaggagatgttggaccgcatgtggagcccctcgatgctgatattgcgcgccgctggtcggtgacggcgttggagcgggcgagggcgaaggctgaagatgatgtaacttcatcatcggatcctgtagagtccaatttgacccaaccaaccatagagaccgatgttggcgacaagaatgaggttgatgttgatgacacccggggcgag

SEQ ID NO: 2517 - DNA, 312 bp, Zea mays
  Peptide Sequence Number=SeqID_44296
atgatactttttacctcgtcgcggaatgaaggaggcaaggaaccactaccacacgtggggctcctcgcgcggcggcggcgtcaccactaccgagcgcgacctggtgttacagtggggtacaaccggaagcacatgcgctgtgtcaaggtgcagcgccgcgacgagggcgccgccaccgtgaccgccgagaaggtcgccatcagccagcgccgcgccacgcccgcagctgcccagcaccacccaaccgaccacacccaccagcaccaccgtgttcttagaaatcatgccaaaacacatttccccacaacataa

SEQ ID NO: 2518 - DNA, 585 bp, Zea mays
  Peptide Sequence Number=SeqID_44297
atggctgcctccgccacggccgcgaggcctctcgccgggaccgccgtcccgctcccgctctcgacgcggacgcggcctgccagggtcgccttgctctccctgattcctcctgctccggcccagcgccttgctctcaggcgtggcgcgtggctctcacccccggagcgcagccggtcggtgcggtgcctggcggctatgagcccggagatgcgggcaacgctggacaaggtcgtaggatccagcaaggtggtgctgttcatgaagggcaccaaggacttcccgcagtgcggcttctcccacaccgtcgtgcagatcctgcgctcgctcgacgtgcccttcgagacgctcgacgtgctcgccaacgaggcgctccggcaggggctcaaggagtactccagctggcccaccttcccgcagctctacatcgacggcgagttcttcggtggatgtgacatcaccgttggcctggaggtgtctctgaaggccatgaaaaacgcttctcagcagttactgcataatcctaatcctaccgtggagccccctacggctgcaacggcgtcccgcgtcccctacaagaccctctag

SEQ ID NO: 2519 - DNA, 2193 bp, Zea mays
  Peptide Sequence Number=SeqID_44298
atggagtcatctgatgctatcgttcgcaaggtgctcgatgcaatgcacctgatggaagtccgccttaccgagaagattaccggtcgttgtgacatcgttgagcgtcgcatggacgcacggtgcgatgagctccactgccgcttcacagcgcgcggctacaccatccagcaggaagtcgatgcggtcatctatgacgagtcaagcgaccacgacggctacggcgcggcgcccttcgatatcaacggctctggcgagaagtccatcttcgacgatggccccagcttcgacgaggaacattgtaccttcagcgccgacaacgcgcacttcaacgacgtgcttcgcgcccacttgtttgattcgttcctcccgacgacgacgacggtgaaggagacgctgcgtgcgtcgttcatgcgtgaggaggacaagcgccccaagaggctggccgacctggaggcgctgcggcgccacaacaccgaggtgcgcgtgtgccgggaggccgacgtgaaggtgcgtgctctggacgccatttccagccacgactttcggtaccgcaagtaccacatcaacgagatcgagatggccacaaagcgcttctccgacgacctccagttcggcgagggcgaatacgaccccgtctactgcgcctccatgggccacacccctatcgccatcaaggggctccggcccgacgcgcgctcgccaagcgcatctggcgcaacaccacaacatcgtgagccgcccaacggcaagtccgacgagccactgcgagtgaacaacttattccagcacatcaagggcatgctatccggcaagagagccgccgtagccgagaagctcgggctcaccgacagccagtctgcatctaccttgattgatgctcaagtggtgtttgatgaaatgcagcaaagtgatacctcggttggcatcgcacatgatgccttcaacacgttcttcagtgagattggtgttaacgagcatgtgacctggatcatcttcatcgctgtcagcttcacggcaagtgcggtctgggcacgggccgcgaggcgcctggacggtgttgtggtggcggacaacagaaaactacgacaagcatctgtggacggccggaagatgcactgctacgagctgctgaccgatgaggcattggagtcttggagaacgcgcagctcaggacaacatccaaggaaagagtacctggagagccctagggccgatctgcggtgcatggccgaaccaactatcgctagcatcagaaatgctcaggctccccttttcaccactatgtacgagcttgagtatgagagagaagaggatgtcatgttcagcttcaacacgatattctatgaaaatggccaacaatctgacgtctacaacttccatgtagtgcccattgtttcagataccatcaatggaataattgggactataattacttatggtcagtctggggcaagcaagacgtatagcatggatgaaccaagcattttgcatcacaatgaacagaaaactggactagttcaacgagttgtggatgagctttttgtatgtttgggatcatcagcgagcacgtggattatgaagttgccaatggtggagatatatttgcaaaaagtgaggaaccttcttgacttgtccaaagacaacccgcagatcaaggaaagtaaaatccaaggaatttacatctctggagcaatagagatatttatcttcaacagttcagatgtcttagagaacctttttccaggaattgacaacagcgctgttgggaaaacacatatgaacttggctagcagtagaaataactgcttatgcattttctcagtacaatatgaatccacttcagatgagagggtaccatcagggacgattatacttattgatttggatggttctgagaaagttgggacaactggggctgaaggacggggtcttgataaggcgaagacaatcaacattgtcattgactcactaagctttgtttcagtcacaatcttccagcttgaagggattgtattgggtctaatcgccagtgctgtcagattctctgatctgggtgctgtcagcagtggccaaggcaatttttctgtctttgtttgggatcctggtgatcgcgctgtcatgttgctcgcttcaggtgttgttctagtgttgcaagagctgccacatttcagatggagggctgcagaggcgtga

SEQ ID NO: 2520 - DNA, 975 bp, Zea mays
  Peptide Sequence Number=SeqID_44299
atgaagatagagcacaaaggtttctcgatagagttctgcaatgacgcgtggcgggccatcttccaggtgatgaactacatcgtggacgccgcgccggtggctagcatggtgcacctcgcgcacgacttcttcactctcccaagcgaggacagactctcgatcaactcctacattgacgcgattccatctccggcttcctctatcctgcaatgggtggtgcccgaggcgaaggacgagggtctcaacaccttgcccaccagggccggtcctgagggcgggcaaccggagcggccgcaccgggccccaaaattccaggggccccaccctaggtatacatacaatatagtgggactgatggtgaaaattgcaaatgtagtggaactacggttactctcggtcacctcccagcagtatgcctatgcgacactgcatcccagctgcaccgaggaattcgacgccacacactcgaacaaggccaagatactcctcaacattatgggtgtctcacatacattagttatgcataatccagcaagaccattgcagttggtgatacttgctgatggcgttcaaataagtcttataacctgggccatctctctacggttatggattcaatctctgatcgtggccagtaccatcctgccaaagcggccttggttggcttttgatccaggcaacctgttatgcacgctcacaggaggagaccaccaccgtgacatcattcctgtatcagcacacggcacgaatcctgcagatgctgctatggttggaatgaaaattgttgctgttggaactcatgtcaagggtaggaccgcctacgttatgagctttgaggtgggagcggtgctggaggacgcggcgtggcaggccccggagtactgcttcaccaacaacggtgggcttgggctggccgacgagaccaccaccaccatcgctggcggcagcagcttcgtccccaggagcgtgctgtga

SEQ ID NO: 2521 - DNA, 849 bp, Zea mays
  Peptide Sequence Number=SeqID_44300
atgtcaaatgacacggagccggagaaagtctggcactacaaggatccttctgggaaggttcagggtccatttactcttttgcaactatcaaagtggacaagttacttcccatgtgatctgagagctgcatcacatacaagcagcaaggcaacgttggttggcactggacaaacaaggaacaaccctagtgtggatcagaccaatgctttctcccctgctggtcatagtgtggttagttcttcaggaataactgttcagtataataagttgggcagtcgcttgcagccgaccaggtctcgcgcgacgagtagcttccgggcgatctcgagccaccgggccggctcggcgcggctgcggccgccgccgccgccggagaaatccatgtgtggtggagatctccatggtggtgggctccacctgcgccgcgccagcggcggcgggaacgccctgggcggggccgcgtgcggggccacctcctccttcccccgcgctcgtcgtcgccgcagcccgggcacgagcggtccctgctcgacggactgctgccacgagaggagctgctgctcggtggtctccaacactgtcagtgccatgtccgtggacggcagcaagagcaagcagcaggcgcgagcagcaggcctcacgctcgggctcgcccaagccaggcgccgctcgcccgacgcccgcctaaccaatcagccggctagagaatccctggagctcttactagcactcatggtcatggacgagattttgatgccctttgctgcggtgcagttccattccatgcaggtgcagagcagcggattgctgggtgcctgctgcctgggcaagcaagcaggccagcagtag

SEQ ID NO: 2522 - DNA, 672 bp, Zea mays
  Peptide Sequence Number=SeqID_44301
atgcgagcactcgagcagggtcggccgaccaggtcccaggcggcgctgccgcaacctggccacctgctgctgctgccgcaagctggggctggctgggggctctgtagtgctgctgccgccggccgccgcagacccgcagtggctggctggtggcttctacggtgctgcctgctgatggacgtatggacgaacgagatgaacaaggagaggctcatgaagatggccggcgccgtccgcaccggcggcaagggcaccatgcgcaggaagaagaaggctgtacacaagacggtcaccacggacgacaagaggctgcagggcactctcaagagagtaggggtcaacaccatccctgcaatcgaggaggtgaacatattcaaggacgatctcgtcatccagttcttgaaccccaaagtgcaagcttccatcgcagcaaacacatgggtggtcagtggatctccacagacgaaaaagctacaggatgttctccctgggatcattaaccagcttggccctgacaacatggagcacctgaagaggattgccgaggagatgcagaagcaggtggctgctgccggtgcggcagcacaggtcaaggaagacaacgatgacgatgttccagagcttgttcctggagagacttttgaagaagtagctcaggagacaaaagcctga

SEQ ID NO: 2523 - DNA, 1509 bp, Zea mays
  Peptide Sequence Number=SeqID_44302
atgcctcctcctcctcctcctcctccgcctccttccaccgactcgcacgcggcgctgctgcactcgatcagcaccctcgcttcatacagcgataccctcgccgacttcctagatcagtggaactccgtcatcctcgacgtcgcctccatcggcgccacgttcgctgccctattcccgggccccggttccgaccctaaaccctaccatcccgcgccggagccggacagggagcccgagccccctctcgcgccacagcctgaacccggacccaatgccgcgccggcgcccgagccgcggtgggagcgggagcccagtccctccccgggccccggttccgaccctaaaccctacctccccgcccccgcgccggagccggacagggaacccgagcccactctcgcaccgccacagtctgaacccggactcaatgccgcggcggcgccagagccgcggtgggagcgggagcccagtccctccccggagcccgcacccgcgcccaaccccgaccgcgagcgcaaggacggcggaggcgcaggcgccgcatccgcggcggacctcgagcacaggtgcaagcagatgaactgcgggggcgtccgccgcttcgtcatcgtccacttgcgggacggcggcggcgagtggctgcgccaggtggtgccgggcgcgctgcggcgcgccccggaccccgccgcgctcgttttccacgccgtcggccgctactacatccgcgccgagagccccgacgcggaggccgcgtgcgcgctcctcctcgagctgtacgtgcgcgccgggtgcccgcgcctccgccggggccgggggagcgaggcggcggagctgctgctgcggcaggaggcccgcgaggccgcgctcacgtggcgcagccgcctcctgcgcgtcagcggcgcggtcggcgacgcgcccggcgccgcgggcgcccgcggcctcgctctcttcatggctgccttcggcgtgcccgccgagttcccggcgcaggagctctgcgaccttgtcgacgctgcccaagcctcggcctgcgtccaggtgctcaaggcctccaaactcttcgccaagaagatgcgggatgtcgttatcgaaatgataaacaaggccatgtaccttcaggcgatgcgcatcatcctcgtattcgaattccaggaagctttccctcttgcaccaacactcgctctcatcatcgagaaacttgagcacgacacgaaagacgagaacgaggggcaggcatcggtatgtttctcatctttcctgccctgcaccacatttgtcaaagaagcagacttacattggtgcatggttctgcaccaggagcgcgatgaggacgacttggctcttttgagttcaatatccaaatgcatggaggatcacaagctatctccctcagaattcactacctttgctgccaagattgcgctgctggaagagcgtgttgggaaggcaagacgacaagcctgtagtacaggagctaagcggaagagaccagaggagtgtgtcgagtag

SEQ ID NO: 2524 - DNA, 228 bp, Zea mays
  Peptide Sequence Number=SeqID_44303
atggcggggacacaaggagacctcgggccgacgatggcggagctccggctgcaaggtgaggaagccggtgagcgcggatcgggcgaaccagaggtgctgggggtgaaccaggaggtgtcccacgttgctagcaaagaggcggagctcaccgaggcaacatgcacgacagaaactcaacgacggccacagaacgggcgacggatcaaggttgcttcttcctctgagtga

SEQ ID NO: 2525 - DNA, 438 bp, Zea mays
  Peptide Sequence Number=SeqID_44304
atggatttgaatgcatcaccggtgcctgacgatgatgagcaacagccttatgatgattcagttgaggttgggtatgctcagacggaacatgttgaatctgctgttgcaacattgcgccgggagcgtgaagagagacgcaagagactaaagagagagcagcaggatgatgggtcaaggctacattcccagcagattaggaatgattatgctcctcaacccaaaagacatagtcgcattaaagaggcacctcagggctggctggactgccctgcatttggggaaccaatagataaaatcataccatctaaagttcctcttgacgaaacattcaatgagtcagtgcctcctgggaagcggtactcctcaaagcaactagttaacaaacaaagaaaagctggccgcgaaaaatttggctcatcgacatcattctgcccctag

SEQ ID NO: 2526 - DNA, 258 bp, Zea mays
  Peptide Sequence Number=SeqID_44305
atgaggctaaaggcaagccaaaacaagaggcaattggagggatggtcggaggtggacgggattcaaaagatctcccagtgcgctggcgagctcacctgcgcggggcagagccacggcgagcatccgatgaatccttttagccggacagcgccacctcatggttacatgcgccacatcgcggaagatttttaccgcggccgcaagtccgagcaatgcctcagccgcggtggcgttcttatccccggcgaggttcactaa

SEQ ID NO: 2527 - DNA, 176 bp, Zea mays
  Peptide Sequence Number=SeqID_44306
atggaggacgccacggatgcaaaagggatggctcggttttatacggctacgaggttccgagtccagggaatcgcggaatccgtggcccggcgagtttgccgcaaccaacctgagatggatgataggactggggataggggcccacaccacagtggcccaagagggaaaccacgcgt

SEQ ID NO: 2528 - DNA, 294 bp, Zea mays
  Peptide Sequence Number=SeqID_44307
atgttccacacggcggcgcccaggatcttcgcccgcgtagaacagaaaagaaaaggctcaccgaagtctcccacgctgagatttgccgccacggagaggcgcgcccagcagctccggcccggcgagtttgccgcaaccaacctgagctggatgataggactgacgataggggcccacaccacagtggcccaagagggaaaccacgcgtgccgtggtgggccgaggggagggtttgggaagtacgtgggccagcagggtgaagggaagaagtgggccgtggggagggagatctag

SEQ ID NO: 2529 - DNA, 450 bp, Zea mays
  Peptide Sequence Number=SeqID_44308
atgaggcgagcgtgcttgccgcccctcacctcccatacgtcctccgcgtcatcagtggaagcactgagggcctcagcgagcgtggatgcgacgccagactggaggaggacgaaaggtgggcgcagttcgccggagaacgagatccgcgtccatggacgctggggtgcacacggcgcggatatttatgtgcatccctggggaaatcggaatggaggcggcggcattaggggcggttgtgcactaaaggaggcgcggtgccggggtcatggcggcggatccactctccctctctccttggttcgatgtgggcgtaaatcaccagtgctagacggcaaagggcgtgcggcggccaagggacttatagccgtggttcgaccgagtcaaccgcagcaagcgggggtcgttgcaacgacgcggagcgatcccggcggacacgacattgacctttga

SEQ ID NO: 2530 - DNA, 423 bp, Zea mays
  Peptide Sequence Number=SeqID_44309
atgtatttgcagccaacaagaactccatcacgcttggagaacgtcacctggtggttgatcttgttcttacgtggcgcgcttgtgctgccgcaacgacccttagtcgtccgggaggagtctggggcgcgacctcagacgctgatcgtctcacgcgtcggccctcagtcgtttagcgcgactgttgaacctagaggaggtggaggcggtggtgggcgagctgggcttctaggtgacgtcgacggtgggcaagctgcgcttctagtgcccctcccttcctcggccatcgggctcgtggagatgttgtcgcgggcactgttctctggcggcgtcggcgatgttgccccagcggctgccgtttggaagtcgtggaggttgcgctctcgggaagcgctccctccaccggatgcgtgcgcgggcacgtag

SEQ ID NO: 2531 - DNA, 1371 bp, Zea mays
  Peptide Sequence Number=SeqID_44310
atgcccctgccgccgcccaacatgcgcacgcaagaacctcacccctggctccgcgatgcccccgacgacctcccggactgcgacgggacgggcgcctgcttccctggcggcggtctgtgctaccccgacgacccgctcgaactcgtccactcgctcttccctgctcagaccaccgtggaccgatcggcgctcgggataggcaccagcgccggcgagcctccctgtagggagcaggagcagccgctggcggagagcgcgtatggtggtggcggcagcggcgggcggaattcttgtggcttgtccagctacgttcttgagggactctccggcctcgaggaaattgatacgaacatgttctttgctgacgacgcgctggacggcggcggcggcggcggcggcggcgaggcgacccaagacaacttgccctgcgactcgacgggagccaagcccaagccgccggcgcacatgccagaagctggtgacgttcacgcgtcgccgctgcccgcgcacatgctacccggcgccctccaagcgtacgacgcgtgccgtgcgttccatggcgcgtcgccgcccatggcagcgggcggtccgctgcccgacttcgtcaccaacgacggcgcgcccatgccagctgctgctggccttcacgcgtgcggcgccttgcccggaattgtctctaacggcgcgtctaagccgccatcgtgccgtgcgttccatggcgcgtcgccgcccacggcagcgggcggtccgctgtccgtcttcgtcaccaacaacggcgcgccaatgccgggggctgctgctggccttcacgcgtgcgtcgtggtgttgcctggcattgtctccatcggcgcgtctgggccgccacggatggagcccatgccagcacgtgctagtctccacccgaacgctgcgccggcgcacgcccctccgccaccgtctccgccgtcgtccagcgcgtcttccggctcgggccgctgcccgtcgtcagcgacatcggggaccgagttcttgcaaccccacgcctgggttgttcccaggcggcagcggagcctacccacaggtgcccgcaggtcacgatccgcgccacgccagaggaacatgcaagcccagaaggtatgccgccactgccactcgccggatacgccgcagtggcgcacaggcccgaacgggcgggccactctgtgcaacgcgtgtgggttacgctacgcgggacacaggctggtgccggagtaccggccgctcacggctcctagcttccggagcgggcagcactccaaccgccaccggaacgtcatgaaactcagggagcaaatgaaggcggcggcgacggaggaggaaccgtcggaacagccgacagaaggcaacacgtag

SEQ ID NO: 2532 - DNA, 2118 bp, Zea mays
  Peptide Sequence Number=SeqID_44311
atggaagaccaatcgcctgaccatatatcagtcggttcagcacaaaagaagtctagtacttcctcacgaggccggcaccgtaatttctcatcatcaacatgcaaagattttctccggaagtttgtggacagtgaacttttaacttcaagcctagaggattggttctctggtcacagtgaagattgtggtttcaggaagccatcttttgatgttcctttcgaccttacagaattacagagttttgattacgctctggagagtgttacttttcagcagctagtacggatgccaaatgccctatatgcatcgacatcagatgtttttgaagctactgcatatcttgctttagaggatttccttcatgcaagcattaaaggactgtggcaaactttctggggtcctgatgaatcaatgccattttcagttgcctgtatacacagcacaagctccaaattttatcctgctgagaaggctattagcagtggaaaactcgatggtgtttgtgcaaccgctatactactcaagaatttgaagcattcacaaggaagatgggaccatattgtcgtcttggctttgttgagacctgatattggaatggtttctgcacatggtgaccaggagccgtctcctgctgttttaggggaggcactgttctttgctttgcgtgtcctactatctcgaagccttggcagatcctccactgttcttcgcaattcagactgtgtttacttgcttcttgttgattcacagtttggcggagtggtaaaagtgcaaggtgatttgaacaagctggattttgacctaaacaatgtttatgactgtgctgctgaatggataaagaaacatgccaacatttcagtttcttccatagatcgagtatggaacaaacttgggaatgctaactggggagacatcgggacccttcaggttctcattgcaatgtttcactcaatgatccaattttatggagagcctaagtattctcttgatgagctggcaacggaacatagttcaaggctacaaagtcgaagatcagaaagacatttggttgacagacaagctaatggtaatggtttatttcgattccaacagcggagtcgttctcctgaaattgttgaagtacaggaggaagcagctgtcgatgtgaaaccacatgaaaccttaaggattgaaataggatctgttgtgttgatggatgatgcttacatgcagaaaggttttcagatcaatgacatcctaacagacagtgatcctcctatttatacttctactcctgtagaagaacctaccagaacctatttgctgtatgtgggctccagcccttctcatttggaaccggcatgggaggatatgaactcctggtaccaagtacagaggcagacaaaagtactgactgtgatgaagcaaagatgcatttctagcagatatataccacagatggtatcttctggacggctcgtccatccaggcccatgtaacaagcctaactcaaatggaagttgtggccatccatggtgcagtactccaatgcttgtcacctcaccagtcggtgagaccatttcaaatctgataaggaatggactgtttggtgttgaggaggctctgagatgttgccatgactgtttatctgctctcgccgccgccgcagcagcaggaatccgccatggtgatatccggccagagaatgtgatccgtgtcaataacggctcaaggcatccatatttcgtgcttattggatggggccatgctatcctagaagatagagaccggcctgtgatgaatctattcttctcatccacgtttgcgctccaggaaggaaaactatgtggagcatctgacgcagaaagtttaatctatcttctatatttctcttgtggtggagtttgccctgagcttgactctgttgaaagtgcacttcagtggagggagacttcgtggtcgaggagagtcatacagcagaagttgggcgacatctctgcggtgctgaaagcttttgcggattatgttgacagcctttgtggaaccccgtacccgatggactatgagatctggttgaaacggcttcgaagaacaatgaacgaagatcatgggaaggaggtcgacacatcctcgagttaa

SEQ ID NO: 2533 - DNA, 996 bp, Zea mays
  Peptide Sequence Number=SeqID_44312
cacacacatcagatcgccacatctccgacaccaaccctcctccccctctcgccgtcggccccgcccgtcagcctcggccgagtgcgtctgcctcgcactcccgcggcccctatagacagagcagccgctctagagcgggaggaaaggcgagcagaggagacagagatggggaagggaggaggagaagaggacggcgcggcggcggccgcgcgcgcggcggagcaggcgcgggagctgcaggacgcggcggctgcgctgctgacgcagacgcgggcggaggaggaggcgctgcgccgccgcgccgccgcgttgcagggggagctgcggcggctacgcgaggccgccgcggcgcacgcggacagcgacaaggttgaggaggacttggatcgagcagcgtgcctcatcgctgaaggtgacgttgcgtcgctgctcccgagcaagacgcaaggcgcttttctgaaaatgttcttgggaccagtaaatttgcgggcaacaaggaaggaggtgcagctcaaggtgaaggaggagtacaatagctacaggagaggcgtggaacttttcctttgctgggccataatgcaaggatttgtcatgatgctgcagaatagatatcagcgtcaaagattatatactaggattgctttggggaaggctaaaagaatggatgttgtatggggagagactgctggtgttgaaggtcaattgttgctgttgtgccctctccttttcctcctgcagggattcgagggttatgttgggtttttacttctgcgcacagctcatactggcgttgtccctgagtggcaggttgtggtatgcgggatcctgctgatcgcgatggcaatcggtaactttgcaaacacagtggacaccctggtaaccaagtcccggttcaaggcgaagatgaagaaatccaagggcagacgggacctcgacacatgcccctcgccaacaggttcatcatcgccgatagattcagcgaccaccaaagcatga

SEQ ID NO: 2534 - DNA, 210 bp, Zea mays
  Peptide Sequence Number=SeqID_44313
atggcaggtgctgaggcggtcggtggtggcgcagaggacgccggaggtgaggcggtgatgggtggagggcccgacatctccgataccatattgttatgggcggcagatggttgcgagggtttgagggcgccggctagggttaggggcgctggggaggccgggcgtagggatttccccacagccggcaagagagaagggatttccttctaa

SEQ ID NO: 2535 - DNA, 225 bp, Zea mays
  Peptide Sequence Number=SeqID_44314
atgaagacgtgttgcaatcagtctaggcagtatcaggcttatggtggtgttgcaggttccgccggaggtagtgatggtacaagtgtagatgcatctgacgttcaatatggcttgggtgttgatgcggtcgctggtgtagatgtcggcaccgaggagatcagatctgaagacactttagatgcatttgtagaaaaaataggggtgatttgcgagttgtctaactag

SEQ ID NO: 2536 - DNA, 798 bp, Zea mays
  Peptide Sequence Number=SeqID_44315
atgaaacaaagcgaagcagaccctgctggttgcagcatgcatgtaaagcatgagcacgatcgagatgctggctgtacaaagcgaagcagacctgttcctatccaaaaggaccccgatgagtacccgcagttgctcgacgggacatggttggtggtttgcctcgcggagttgctcgacgagatttgggcggcctggacgggccgccatgagttacgggcttactttggtaccccattcctggccaacgcgctgaaggaggtcattgagttgctaacgggttatccaagtgagataataccaccctctggtagggtatggtcttggcgagtggtcccgctgggggggaatgtgaggtatgaccttggacgcgactatgagcaaatgaccaatgtgctggtctggtgttgcgtgcgcgggtggcttgacgggttggataacgtcttgcttggcattggtgtgtccccccgtgcgacgtgttcttctggtgctctgctcgaggcggcagatggttgggttcccttcaagggctcgaggcggttgggagatagagaggcgaatcctcccacgccgtggtggtggtgggcccgtttgacaggcaccagacgattgggttcccttctggggctcaaggcgaagaaggggttccttcctcctgtggaggccttaggatggcggttggaagatgagggcgaggtgcctcagcctcgggacgacgaggtggttatgctctcgtccttctacgagcgcgggtttaggctgcccctggacccctttgtgagggggctgctcttctactag

SEQ ID NO: 2537 - DNA, 975 bp, Zea mays
  Peptide Sequence Number=SeqID_44316
atgtacaatgtttatattgcttctaaatgttttctgttcttgatggccaggttctggagcagggattatggaagaggcatttcattagctgaaagttcacattcactaacagtgctcgtctcgattgtatcattcttgcaagctgaactgaacatctctgataaaccagcaaatgccactggcatttcttcccgcaattctggatctgcgaatagtaaaaattccaatatttgggatatgaagatatcagcattttcgatgctcgaagatatattgagtaaggttgcatcaaatatgacagaaaatctgtggcagtctgtcatcgaggtcttgaggaaagttatggattttgtcacagcaaggaaccttgttatagagagtagcatcatgtcaagattttatacatcttttcttcgttgtctacatttggttcttgtggatcccaaaggaccactttcagggcatgttgcagggtttgtagcaaatctgcagatatttttcgtatatgggctgaggtcatcttcacctcctacactagctccaaaagaaactagaacagattcaaaacccagagcttcacgtggacgatatagaccacctcatttgaggaacaaggagagaagagagaatgattcactggaaggtcaaaattcagatagtgagtattcttggtatgatatgagctcatcagactcagacctgagtgatagtgatggttatgcaaaaagtggagaccgcttccggagttcgaaggctagattagctgccattctttgtatacaggatatctgccatgctgatccaaagttacttacttcacaatggccagtacttttgcctgagaatgatgttctccaacaaaggaaatatcaagcaactctgatgacatgcttgctttttgatcctataacgaaggcatttatttgccataatgtcattatgacttatgtgctttatggaaaaaggaaattctaa

SEQ ID NO: 2538 - DNA, 567 bp, Zea mays
  Peptide Sequence Number=SeqID_44317
atggctagatggtcagagggcttgagacccagcgaagacggtgttgacatggggataaggcctgagcatagctacataaggtgggcgccaagcaagaccagtagagagcacgacccactggccagaaggacacgaccttgcttgttggtggttcccatggcccttgtgccagttgcggcagctgccgcctcctgcaggaaccgtgcccgcgccgctagctgctatcaaggcagcaaggcccttgcagcagccaaaacatcccccaccgccgccagcaccgctagcaaggtggtcgatagcctaggcatccttgacgttgttggtgaggcgcggttctttgaggacctgaggatcagcatgttgcatacttcgacgaaggacgtcaagggtttggcgttggcaatgtcgtcgggcggtgttgatgtagaaggcgttgaggcgatagaggaggttcaggagagatgggaatcgatgatgacaacgtcgatatcacaaagggcgttgatgagggtcttaagctgcttgcaacactcgttgatggatagatcgcccgtgggcatcgagtga

SEQ ID NO: 2539 - DNA, 291 bp, Zea mays
  Peptide Sequence Number=SeqID_44318
atggcgcggggcgacgcaatctcatcggcggcgttaagccctagtgcggtcaaggccgcctccggtgtgcacgaatcgagcgcacaactagagagactggcgagtcgcgttgagaccgggctttgccgatgggcggaggaagaaaaggagggacaaggaggcgaaagaactcgaagaagggataacaacattttttcgagtgaagtctggaatgtcccaattccgaagcagctgatcgatgagagacgttcgtgggcatcgaagcagaatttaagggttgaggcgatttag

SEQ ID NO: 2540 - DNA, 1440 bp, Zea mays
  Peptide Sequence Number=SeqID_44319
atggcaactggcgccgggtgggcacctgggcggcccgtcgagaggcatggcgcgccccgcggaggcaacgcgcggtccaagtcggtcgtgccgggtccgcgccgcccctccccgtcccccgcgaggtcgcggccagccgccgaccacagcggcagcgctgatttgtgcagagtgagagttgctgtaaggctccggccgaagaattcagaggatttagctcatggtgctgactttgatagctgtgttgagttgcagcctgagtccaagaggctgaaactgaagaaaaataattggagctgtgagtcctacaaatttgatgaggtcttcagtgaaagtgcttcacagaaacgtgtgtatgaggcagttgcaaagcctgtgagtgtattagaaggctataatgggacagtaatggcctatggtcaaacaggtactggcaaaacatacacagttggtcgacttgggaaagatgacccttctgaacgtggtataatggtcagagcattggagcatatcctctctagcctgtcttttgagacagactgtgtcgccatatcatatctacagctgtacttagaatctgtacatgatttactggctccagagaagactaatattccaatagtagaagatgcaaaaactggtgaagtttccttgccaggtgctgcgatagttgaagttaaagatcttgaacatgtttttcaacttttgcaaattggtgaggcaaatcgtcatgctgctaatactaagatgaacacggagtcatctcgtagtcatgcaattttaattatccatttgcaaagaaacacaagaacaaaagaagaaaatggtagctctttatatgatgttagacatgacacttttcctgatgatctgccacttgttctcaaaagtaaactcttgattgtcgaccttgctggatcagaacgaattgataaatcaggaagtgagggtcacatgatcgaagaagccaagttcatcaatctctcgttaacttccttaggaaaatgcattaatgcgctagcagaaaatagttctcatgtacccacaagagattcaaagcttacaaggatacttcgtgattcatttggagggactgctaggacttctcttgttgtgacaataggtccatctgctaggcattactcagaaacttcaagcacaatcatgtttgggcagagggcaatgaaagtagtgaacacaataaagctgaaggaagaggttgattatgaaattctttacaagaagatggagcgtgaggttgaccaactcacatccgagatggagagacaacagaaggttataagaagtgagaaaatgcagatggataaaaggttgaaagaatctgagaggtccttccatgatttaagaatgacatttaacatgcaaattgagcctcttcaccgccaacaaagctccatgggcgatcttcctgagtcatga

SEQ ID NO: 2541 - DNA, 193 bp, Zea mays
  Peptide Sequence Number=SeqID_44320
gcctctgcagctttatgctgatgggggttaccggctgagaattaggcgtcttgaggtgaatgatgaggacagcgacgacggggcggtgtccttgaagttgcagactccacagccgcctcagcctcctggatctagaggaggaggtgctcctcttagagtcgacattggtgtctccgcctcgactgacgcacga

SEQ ID NO: 2542 - DNA, 375 bp, Zea mays
  Peptide Sequence Number=SeqID_44321
atggcggacatcctcggcgacccggcgtggctgcagctccacccgtggccctacaccgacacgccgtggccgggcctgcagtgcgagctcgcgcccgacgacgcgcgcgtgctccacgccacccgcctccacctggaccccaacgtcgccaccccaccctgtaggcccgggaccaggctcgaccccgcctcgctgcgcggcctgccgcacctctggacgctctccatcttcggctgctttggcgtcgcccgcgctgttcacgtcgttgtcctcgctcgagcagatcgtgctcaagtccaaccccggcctcaccggccccataccagcgacgttggttcttattttggtttggctatcacaagtctgaagttgtaa

SEQ ID NO: 2543 - DNA, 378 bp, Zea mays
  Peptide Sequence Number=SeqID_44322
atggccgccgcacaccccaacgtctctgatgcgtacacactgatgggcaacccgttcatcaccatgcccgccttgtgtacgttatcgctgtccacgctgttcgcgctacacttgtccattcgcgctgcacttgtctatccccatcgcatacaaccgagacaagaaataaaaatagtgatgtatgaaacgggtgaacaagaagaaaccaggatgttgccgcctgctggcctccttggcgagcttgagcatgctgaaggtagtccaaccacacgagggcaaacagaaggaaaaaagaaccatggatcactcaagtctcccaagtgtacaccggagaagtttgagaaaagtcccgatgatgaaggtggagagacctcgtag

SEQ ID NO: 2544 - DNA, 357 bp, Zea mays
  Peptide Sequence Number=SeqID_44323
atggcgttcgccgccgtcctccgcgcccgcctcctcccggtgcccactccgctatccagctcctcgccgccgccattcttcgccccttcggcctacgtccgcgtaccgcgcctcacagcagcagcagcgcgcaccctagggcagctgttcgacacgtcggtgggcatcacagggcaagttgacctcgcggagttggacgggccgttcgtgaagctccggctcaagggcaagttctggcacacccgcgccaccgtggtcgcgcggatcggaaactacctcaagaaccgcattccggaaattttggaggtggagatcgaggacgagaaacagctggatgatagtcccgctgctttctga

SEQ ID NO: 2545 - DNA, 339 bp, Zea mays
  Peptide Sequence Number=SeqID_44324
atggagttgatcgacggagagttggtcagcgaagttggtcagccggtccgtcttgtagagtcgctcggcacagacttggtcgacagaagtaatcaacaagcacgggtcgagatagatgacttcaccaattcaatcatttacagcagcggacataaaatggactctgcctctgtcagcactggaaacacggatacatgcacgaccacctcacgtggtgtcacatgcgcgagcgaagactttgatctttggcgtggtggtggtggtggcatgcatgacggaggtggctttggcttggcctctgaccgctgtgacatggaagtggaaccggatcctcgctaa

SEQ ID NO: 2546 - DNA, 339 bp, Zea mays
  Peptide Sequence Number=SeqID_44325
atgacggtgaagccaactacacctcaagttcctcagttaagggcgtcctattccaccctcatggttgtactgttttccgggggttcatccaacgaaaaggccagggaggctggggaggacccgacgagcattatggcgaagcttgggtcgcgagaatgggaccaaggcgggcagacatcggagaagggtctcgggtggaccggagagcactctagtttggacacggggaagggctatactagccgggcgccaagaggatgcggtggtctgatgaggggtggttctgaggagaagttaggcctggaccgggctgaggagtcactgaaaggggaaacctag

SEQ ID NO: 2547 - DNA, 516 bp, Zea mays
  Peptide Sequence Number=SeqID_44326
atgacggtggcgagacaccagcggcgaaatagctctggtgaagtggtcgatgacgtgggggaggccgtggaggtcacgacggtgtctgggtcgttggcggggatgaccgaagtcggtcggtcctcgtgcgcgtgcggggaagctcgtggcggcaaggattctggcctaaccacggtgacacagttcaattcaatgagttggggagcttcatgtggtggcgggtggccgaagtccagcgagggtgatctcgctgctctggtgaggaagggtctcgattctcgcttgaagaagcttcacggctcaacggggaagctgtccaggggctcgggtgaggctaggtttctctgggaatggctggtcgcgatggccggcgttcgtgtggctcgggtgggcggcgcagagctcgtcagagctaagagctgggttgggatagtgaaggcaagcgcggagtggagtgttgcgcgtctaggggtggctattaaaggcacgggcgagtgcagccgagggacgctctga

SEQ ID NO: 2548 - DNA, 468 bp, Zea mays
  Peptide Sequence Number=SeqID_44327
ctttcaaacagcgctgaaggtggttctctactcaaagatattcctgctactaaggatggaagggttgattggtcacaggatttcttctgcaaaccagcatttctgacagtgtctggacagcttaatggtgaaacatatgcttcagctctatctgatatttacacatttggtccaacgtttagggctgaaaattcaaacacttcaaggcatctggctgaattttggatgattgaacctgagcttgcctttgcggatctgaacgatgacatggcttgtgcaactgcatatctccagtatgtaaccaaagaagtcccagcgatgtttttggcaagggtgtgcatttgtgtttctgggccttttaatggcagtgaacttcatgagaatctgaaacataagaagcctgagccgacctacacggggcttctaactcagccaaaaacagcatccaattattgcaagataatctga

SEQ ID NO: 2549 - DNA, 763 bp, Zea mays
  Peptide Sequence Number=SeqID_44328
gctccgccgcacctccgacagccacgacatcacgccagcagggtgcccaaatctctccggctgccacattggcatggccttctcagagaaggttggccgcgcgggaccgaggacgggacaggcgctctcttggggccgctcgcttccctcacccgcgtggacgcttgtaacccccctactgcaagcgcacctgacctgggcgcgggacgaacacgaaggccgcgggacttccacctctctcacgctcggctccggccgcctcgcctctccccccttcgcgctcgcccacgcgctcgacccatctgggctggggcacgcagcacactcactcgttggcttagggacccccctgtctcgaaacgccgacagtctcttactattttcagctgacgaaggacgtcgatgtccatcgctgtctgtccacgacacacttctaggacctcagcccgagcacgatactgccagtctgggtgccaaaggttcacacttagccaataaagagaccaagtatggggttcaacaaagagagcaagggataaccgaaggcacctctgaggcgctccgctataattcaccggactgtccggtgtacaccggacagtgtctggtgccccaaggaagagcggctctggaactcgccagcctcgggaatttgctccgctataattcaccggacatgtccgaagtcaggcacgcgcgtgctggcacaccggacactctacagtacatgtccggtgtgcaccagacatccaggcgggcctag

SEQ ID NO: 2550 - DNA, 468 bp, Zea mays
  Peptide Sequence Number=SeqID_44329
atggatctgggcttagcggaggcgacggcgccaacggcgtgcagagcggaggacgcaacaaccgccattggtcttgtcgaggagcggagatgggctgggcagcacacaaccgcggggggaggtgggatggacagaagtgacagcgaggtgtgtgcagcacgggtgggaggcgaaatcgctggaggggaagggacaggagagcagatgcgggatctactcagtaaggactacacttacgaccagaagctgaccatctccaccgccagcgcctctggactggtaagatccgaccgcgctcgtgtgattccatttccatgctgcctggttcctgttcgcttgtccgtgctcgtgacgcctgatctggtagttgtggctgtgttcagcgtcgggatgtcgccgtgcgcaattaacgtcattgttggaattggtttcggtagagttgcacttttagttgcttgtgttctttag

SEQ ID NO: 2551 - DNA, 225 bp, Zea mays
  Peptide Sequence Number=SeqID_44330
atggcgaaagggtccgtgactccgcagcagggagctagtagtgagccacacagcattcagagcaatggcgtcgctgacgaccggctactgttgcgtcactgcagaagctttgggctaggagagggagccctagaggtagctgcgtggcgttggtgtgcgcggtatggaggaggaggtaggaagggaatgatgaatacattattgggcgtcgaccgatgcagatag

SEQ ID NO: 2552 - DNA, 324 bp, Zea mays
  Peptide Sequence Number=SeqID_44331
atggcggctgctgcgtcctccgctctgcacgtcattggcgtcgtcgcatctgccatgcccagatccgtcgcccccgcggtggcgaggaggaggagcgtgcgcatggatccccagcatgtcgcgcgatacccgtccccagcccacacccccacccggctccctagacgcacgcacgcagacggcggtgagacaacgactattggaggccgacagtcgtcgcagccttcgcgggcgcgcaagtcggccacgctctccgtcgccgcttcgccgacctccttccgctcaccgatctgctctgttcagtgggaatgggtcagggggtag

SEQ ID NO: 2553 - DNA, 1725 bp, Zea mays
  Peptide Sequence Number=SeqID_44332
atgcccgacataccgagggatgtcgccgagcactcgctggatatccgagctagagcccgacccgtgaagcagcctctgcgccgattcgatgaaaaaaggcacaaagccataggcgaggagatccacaagctgatggctgcagggttcatcaaagaggatgcgggtgcgacataccaaaggtgcatgaaccacgtgttcggcgaacacatcggtcgaatggtcaaggcttacatcgatgacatcatagtcaagacgaggaaagcctccgacctccttttcgaccttgaaacgacattccggtgtctcaaggcgaaaggcgtaaaactcaatcccgagaagtgcgtctttggagtcccccgaggcatgctcttggggttcatcatctccgagcggggcatcgaggccaacccggagaaaatcgcggccgtcaccaacatggggcccatcaaggacttgaaaggcgtacagagggtcatgggatgccttgcgtctctgagccgcttcatctcgcgcctcggcgaaagaggcctacccctgtacgtcttgaggaaggccgagtgcttcacttggacccccgaggccgaggaagccctcgggaacctgaaggcgctcctcacgaacgtgcccatcttggtgccccccgctgccggagaagccctcttgatctacgtcgccgctaccactcaggtggtcagcgccgcgatcgtggttgagagacgagaagaggggcatgcattgcccgtccaggggccggtctacttcatcagtgaggtactatccgagaccaagatccgctacccacaaattcagaagctgttgtacgtgtgccgagaggcctcgggtaggattgcaaagtgggcggtggaaagcatgggcgagacaatctcgttcgcccctcggaaggccatcaagtcccaagtcttggcggactttgtggctgaatgggtcgacacccagctcccaacggctctgatccaaccggaactctggaccatgtttttcgacgggtcgttgatgaagacaggggcaggcgcgggcctgctcttcatctcgcccctcgggaagcacctacgctacgtgctacgcctccacttcccggcgtccaacaatgtggccgagtacgaggctctggtcaacaggttacgcatcgccatcgagctaggggtccgatgcctcgacgctcgcggtgactcgcagctcgtcattgaccaagtcatgaagaactcccactgccgcgacccgaagatggaggcctactatgatgagaccctgtacctgcaatatctccaccgaggagagctaccccttgaccgagccaaagctcggcggttggcgcggcgcgccaagtcgttcgtcttgctgggcgacgggaagaagctctaccaccgcagcccctcaggcatcctccagcgatgcatatccatcgccgaaggccaggagctcttacaagaaatacactcgggggcttgcggtcatcacgcagcgccccgagcccttgtcggaaacgccttccgacaaggtttctactggccgaccgcggtgggcgacttagtgcttcggctgcgacaagacgcccgagggcggcacaagctcacgccaccctgggaagggccgttcgtcatcgccaaggttctgaagcccgggacatacaagctggcaaacagtcaaagcgaagtctacagcaacgcttggaacacccgacaactacgtcgcttctacccttaa

SEQ ID NO: 2554 - DNA, 183 bp, Zea mays
  Peptide Sequence Number=SeqID_44333
atggcgacccgaacaggaggcaacaagcttacagacgtcaagcgcaagcctagccgagcaaaagccgtcactcgattagatgggtttgaccttaatcgatacttgttaatggtcacggcggcacaagggctcaggtcactgtaccatgggattctcatcagtgaggctgacagagaaaattga

SEQ ID NO: 2555 - DNA, 360 bp, Zea mays
  Peptide Sequence Number=SeqID_44334
atggcggggctgaggctggggctcggggttgcgcgcagagcgtggacggggtcgacgcggcgcgcggttgctggcgcggtgaagaagcgtcggggtcgcgcggtgtcttggcttggcgcagcggtgtcgggtcctcctggcgctgggctccaacggcttctggcggcgcggtcagggaaggaaacgcgagggggaggagagagagtgggtggcggcggctgggagtcagggggacaggggagggcgcggccggcttcatcatgggcccctagtgggcttttaggagtgttacagggtgtctctgggccatcagatcttgatccatcaaccgctagcgagtactggttcacgagggcgtag

SEQ ID NO: 2556 - DNA, 255 bp, Zea mays
  Peptide Sequence Number=SeqID_44335
atggctgctggactgctacctgcacttggggaggaggaggaagggggagctggctgggaaatggcggccaggggggaagtggagctcgcgcccgcggagcaggaaagggcgcaggctgggaggtgctgcgcagggaggaatgagggcgccgctggctttaggaagaagaagggcttgggagccatccatgggagcagctgctccctgcttgcagccgtgtgcgtgctgaacagaggagaagagagttgtgcgtga

SEQ ID NO: 2557 - DNA, 498 bp, Zea mays
  Peptide Sequence Number=SeqID_44336
atgtcgggggtatgggtgttcgaggacgggatcgtgcggcgtgcggacagcgacccgcccagcggcgccggcgccggcgggtcccggccgaacaaggtgctggtgcacgttcccagcggggaggtggtgacgtcgtatgacgtgctggagcggcggctacgcgagctcggctgggagcgctacctctacgacccctgtctgctccagttccaccagcgctccaccgtgcacctcatcaccgtaccccgtgacttctcccgcctcaagctggtccacatgtacgacgtcgtcgtcaagacccgaaacgtcttcgagcgcgttcgtgtggctgcttcttgcatgctgtcctactttgtctgccgccgaataaataacgaatgtgtaccaaaatacagagacaatactcaaagaaagaagtcatccgggacaaaggatattactactacagctttatcatccaataacagaactatatcacatccattaggaacaatataa

SEQ ID NO: 2558 - DNA, 564 bp, Zea mays
  Peptide Sequence Number=SeqID_44337
atggggagagggtcacataccaatacggcggcaacacagccaccggttcacgcgctcgagcggctcctccgcgtggtcgtcactccggcgagcaattcacgccgcgcaaaggactgtcgggcgccaatccctcctccgactggacccacgcacctgggccgaaggtcaccaagcacccaaggccccacccccgaggtcgtattccgggcgtcgcaatgggagaccccacggcggcacccgctttctctccctctcttctcgatttctctctctgttgctacaacggtgagggttgaagggctgcgacctggattttatagcgcggcgtccgtgtgtgttccgaactccgcgccgatttggggggaaaagtcggtccgagccgcacgagctacgcgcggaggttacggcgactccgccatgcgcgcgaggccacgcttctacaggatagaagatgtctttagggcatatataggtttgggtaagaaagagtggggagttagtgtatattatcaggctgggaatatgattaagatagatatggatgagataaactacatgatgtag

SEQ ID NO: 2559 - DNA, 237 bp, Zea mays
  Peptide Sequence Number=SeqID_44338
atggcgaagcctggccaagtcactcctcctggtcctcttcggctgaggaagcatcccactcaaccgtccaacccggtggtaacctcatttccacctattactcaatgcagtacaatggatcaaatagtctcattagctgcgggaagcagacgatttgaatcaatttttaaccttacaagtgaccgcacttgtatccgcgcatcgctagcatgggagactccatctcaggaccagtga

SEQ ID NO: 2560 - DNA, 615 bp, Zea mays
  Peptide Sequence Number=SeqID_44339
atgaccactggatctaagatcaagggtaagccgagcggcggccaaaatctctcacaagtcgcgcggtacacagaggagaaggatgggggaaggggaaacccacgccatggttttatagatgagcagagaccgttgaggagcgcaagccatcgctggagaattcgccgcgagctccgcctggctgttaccccgacggcgcccaaattccgagtcggagcatgccgcgggatccgcgatggattggtgaactgcccgcgccgaatccacgtgagcggcggaggttgttgggcggtttaccgagggcgcgagaacggcggagtagctcaacgtcccggcgcccgtggattctgttgcgcagagtccgcgcgaccccagcagtccacgccagcgcgaggaagacggaggaaggcccacccgcagactctcggtcgcgcagcgcgtacaagtcacgagggtgcggtagggatatggcctgcgaccgtcgccagcgtggactccgcggaagtgacggacgtgcggcgaaggatgcgcggattcagttcagggagaggagacgaagctggcaaggcggccccatcagtcagtcaatgggttgttgcgcgcgatagccggtga

SEQ ID NO: 2561 - DNA, 663 bp, Zea mays
  Peptide Sequence Number=SeqID_44340
atgcaggaattcccttgcaggaccgccatcacagcaaaatcctcccgagggcctccctacactgaccactcccctactgcccttgcccctttcgggtaccaggatgattcttcagattctcgtgacctcactctaatcgtagggctctttaataaatgtacacggcgaaggggtatcggggatccagggccgcacgatccagatctggtggtccggattagatcgccattaaatgaagagagaccgttgaggagcgcaagccatcgctggagaattcgccgcgagctccgcctggctgttaccccgacggcgcccaaattccgagtcggagcatgccgcgggatccgcgatggattggtgaactgcccgcgccgaatccacagtccgcgcgaccccagcagtccacgccagcgcgaggaagacggaggaaggcccacccgcagactctcggtcgcgcagcgcgtacaagtcgcgaggggagaggagacgaagctggcaaggcggccccatcagtcagtcaatgggttgttgcgcgcgatagccggtgagaggatgagccgtgggtcccaccgagcagtgcgcgcgtgcggtgggggagtgaggctggcgatgcgcgtgaggaaagatgggccgaagcagattgggcccaagatgagtaagtaa

SEQ ID NO: 2562 - DNA, 2766 bp, Zea mays
  Peptide Sequence Number=SeqID_44341
atgcagcccagcgggggggcctccggcagctcccggggctcgccggcgtcgtcgccgcacccggaccaccagcagccgccgaccccggcgtccgcgcagcagcaagcgcagcaactagggtttaggggccagggaatgatgcatcaccatgaacagcagcaagccttccactctggtgcgccgcatggcatgatgggaccaggcggcgtgaacttccctcagtcctccggtccagtgtcgtccttccagggtcagaggaatctgccgctgtccagtggtggaccgcagggcatggttggaggtcagatgcacaaccaggttgcgatgcagcaacagttcctgaagcttgcgatgcagcagcagcagcagcagcagaaggcggcccaggggatgctcctccagcagcaggccaagatgaatatggcgggttcatcatcaagagaccaggacatgcttaacaaccctgccaagatgcaggagcttatggctcttcatcaggcccagatgtataagcggcagtgtgagcagaaagagcaggggcagtcaagtggtagtgagcaaagaagcggtgatatgaggccacctatgcctcctcaaggagtccctggacagcagttgccatcaatgggtatgatcaggcccatgcagccaatacaaggccaggtaggaatgggcagcgctggtgggaacccgataacaccaacacagtttcaagccatccaagcctgggcaaaagagcacaactttgatctgtccaatcctgcaaacataagtgcaatttctcaactcctgcccatctggcagtccaacaggatggcagccatgcagaagcagaacgaggcaaacatggctgcgcagcagcagcaagcattgccctctcagttgcaacaacagttccctgtgcataacagggatggttcaaatgaaagggctgtgaggtcacttatgacagggggcaatggtgcgcaaacgacgcatatcccccaaagttctggacatgtaaataagattcccgagcaacccaatccaaaaaatgtgcttgcaaattccgaagcaatgcagatgcagcatgtgagacagatgcaacagcttaaccaggctgctgcccccacatctaccccaattgaagcaggaggatcacaggtcccaactagtgctcagccacaaacagggcaaacgggtttcaccaaaaatcaacttcatgtactcaaagctcagatattagctttccggcgtttaaagcgtggtgaccgactcccgcctgaagttcttgaattaattgtatctggtcggccacctgattcacaaggacagcagcaagtttcgggaccccaggtaacacataaccgtgaaagacctactgtaagcaatgctgatgaacatggaaagcagatggagagtggtggtaaagctcctgaaaaacctgcattgttgaaaggaccctgtttaccaaaggtggaggtttctacttcagaagacaaagctagtcctgccagtggtcctggtcccgcgcaagtgatgaaagcttcaccaaaagagcctcttaaaattggaccagtgtctgtaccagaacattgtaacactactgtgattaaatctgagcaggatctggaacggaacatccagagaacacctgggcgaagtgattacaatgctgagaggggtaaatctgtaccagcagaaagtggttcagtggatgttgagcaggcaaaaaggactggctccacaagcagtgcccctgttccaagagatgttcccagaaaataccatggcccattattcgatttcccatccttcactaggagacacgattccatgggatctgcaaattacaacagcaatctgtcactaggttatgatgtgaaagatttattagctcaggaggggatgatagttcttggtaggaaacgtgaggataacttaaaaaagataagtggtttgcttgcaatcaatctagagaggaaaagaatccgacctgatcttgtcttgaggctacagatcgaagaaaagaagctcaaactcctagagcatcaggctcgtctaagggatgaagttgagcatgaacaacaagaaatcatggcaatgccagataggatatacagaaagtttgtcagacaatgtgaacgccaacgtgttgagcttgtaaggcaagttcagcagatgcagagagcttcaagagagaaacagctgaaatccattttccagtggcgcaagaagcttttggaggcacattgggccattcgtgatgctcgaataactcgtaatcgtggggtggccaagtaccatgaaaggatgttgagagaattctcaaagaagaaagatgatgaccggaacaaaagaatggaggcattgaaaaacaacgatgtggaaagataccgtcaaatattgttggaacagcagactagtgttcctggtgatgcagctcaaagatacaatgttctatcttctttcttgacccagactgaagagtatctttataaactaggaggaaaaataactgctaccaagagtcagcaacaagtagaagaggcagcaaatgctgctgcagcagctgcacgggcacagggcctgtctgaggaagaagtgaaggctgctgcacaatgtgctggtcaggaggttatgataaggaacacattctctgagatgaatgcaccaagggataatacatctgttaacaagtactatactttagcccatgctgtgagtgagagagttactaagcagccatcactgttgcgagcaggaactttaaagggactaccattg

SEQ ID NO: 2563 - DNA, 333 bp, Zea mays
  Peptide Sequence Number=SeqID_44342
atgaacgacgacgacgcagtcgaggagcgggcgcggccgagggaggagcgcggccgggacgggacgtcggccgtgcggcggctgtgggaggtgtccggccgtgtcggggcggcgggggtcggcgccaagatctatggcgtcgaccctcctgacacgtgtaccgccgccgacacgggggtcggcgccaagatctatggcgccgacaccctgacacgtcactgccagccaagactccacgtcaggcagacaggcgccaatattattggcgccggcacacagaagctcggcgccaatgatgacggcgccgagctaagggtccattttttgaaatga

SEQ ID NO: 2564 - DNA, 786 bp, Zea mays
  Peptide Sequence Number=SeqID_44343
atggctccaggactgcagcgcttcactgacattgcggacgacggcacgccccagctcgacgccgcgtccggcgaggagctggtccgtgtggaccgcaccgtggctgtcgcccttggcccccgctcgccggagtccccggggactctgttcgtcaccaccaggagggtgatttggctcagcgaagcggagaagggcaagggctacgcggtggacttcctcgccatctcgcttcacgctgtgtcgcgcgacctcgaggcgtacccctcgccctgtatctacactcagattgaggcagcagttggtacagaagaggaggctggggaatcaaatcctgaagcaaatgaactagagctatctagagtatctgaaatgaggctcatactagcggaccccggtcaacgtatcctcttgaattatgttgtttcattaaaagatttctttgttcaagcatgtgtgtatgccttgagcttgatgatggagttcaaagcttcagtggatgcactttttgatgtcttctgtcattgtgctgaactgaatcctgaccctaatgctgagtgcaatggggagaatggctggatccgtggtgaagatatgtctaatggtgactggattcgtgatgatgtggacatggttgatgaaaatgtcccgcagtttttcaatgccaatccgataggtcaaaatggtggatatgaccttagtcgttcagtatttgagcttcaaatcaacgaccaacgttttgaggatgcagaggaggaacaggagagccatgaaaataatggacattag

SEQ ID NO: 2565 - DNA, 306 bp, Zea mays
  Peptide Sequence Number=SeqID_44344
atgtggatagcttgggggtttattcagtactcaagtagtttaggggcggacccttcctgtgatgggcatcacgcgctgagcggcttgatccttgatatgcatgcatccctcctcggaaggcttttcaaggtctctttgaggggagggccgccttccaccgacctagtcagcgcagggatggaggccgtcgagccctttggttggtctggtcgaccaaagagggtccccgtggccaccccgttagtcgggttgccacaggagaatgtgaggtatgaccttggatgtgggcatgagcaaatgacctaa

SEQ ID NO: 2566 - DNA, 246 bp, Zea mays
  Peptide Sequence Number=SeqID_44345
atggagagcttgttatatcttctacaaaaactagaacacagaaggctagaccacttacattactccacaatttgccctgaacaggcaatcattgatgctgcatcatatgttcctccacccccaacagaagaccaaaagaaaaagattgaaaaaattgctgcagttgctgaaaggaagagacttcagaataagaaggtgctttcacagaagaaggaatttagacggaacagaactagctgggattga

SEQ ID NO: 2567 - DNA, 153 bp, Zea mays
  Peptide Sequence Number=SeqID_44346
atggcggcggcggcagtttatggcggcctcaaggggaagcttggcgtcgaggatgcccccgagctgcagctgaatcgcatccgcatcaccctctcatccaagaacgtcaagaacctggagaaagaagaaaggatcaaaggaattgacaactga

SEQ ID NO: 2568 - DNA, 204 bp, Zea mays
  Peptide Sequence Number=SeqID_44347
atggatgaccaaagaaaggagaagccgagatgcgagcactcgagcagggtcggccagccaggtcccaggcgccgctgccgcaacctggccacctgctgctgctgccgcaagctggggctggctgggggctctgtaatgctgctgccgccggccaccgcagacccgcagtggctggctggtggattctacggtgctgcctgctga

SEQ ID NO: 2569 - DNA, 828 bp, Zea mays
  Peptide Sequence Number=SeqID_44348
atggcggcggggctcaagagggaccccctcgtgatactgcgcatggacggcgaggacctcagggacttcgccgccggcagcagatacgagcccacagctgccgccgttttctcgcaggtcgtcgatctcggttccgaagtcgcgtcaccgcgccaatgcgtgttggccgctctacagaagctgtccgtcgaccacggagtgcccccggcttcagatgcctgggtcgcgaagcacatcgtggagccggcgttgcagcagcttcttcctgccgatcagcctgggcagcagccggcctcccgcgatgacctgttccagcagctgaagaagctgctgggcgccgtcgctgatcgactccaggagcagcctgtgatcgtcgcgcacaccgagaaccactatgacgggagtggcgtcaagaggctgctggccaacaaattcgagttggacaagaaggttcagttgctattgttggggaatgcggaatgccaatatggcaataccgagctgctggattctgtctggaaaaatttggcagcagaagataagaacaaggcgtccaaggggtgcctcataaccgcgcttgacaagatggccgatgctgcaagccttccatattacagtgctgtgaaagaggtggatgctgtcgtggaagagtcgatcaagacagcgggcgtcgaagaaggaaaggcagtggatgaagcggagttcaagaagtcgctcacagaaatccttagggctatcatgctgaggctgaacgacagccccgtcttcgtctctaccgacgtcgtcgtgcacgagcctttgtccgggacatcatcgtcggtgaactga

SEQ ID NO: 2570 - DNA, 1851 bp, Zea mays
  Peptide Sequence Number=SeqID_44349
atggcggagaggctggaggcggccgcttccgacgagtacacgcaggacggcacggtggacctccacggaaacccggtgctccggtccaggcggggcgggtggagagcctgcggcttcgtcgtagtgtacgaggtgttcgagcggatggcgtactacggcatctcctccaacctggtcctgtacctgaccaagaagatgcaccagggcgtggtgccgtcggcgaacaacgtcaccaactgggtcggcaccatctggatgacgcccatcatcggcgcctatgtcgccgacgcgcacctcggccgctaccggaccttcatggtcgcctccgtcatctacctcagcgccgtcaatattgtgtcgtccgtcactcagggcatgatcctgctgacgctggcggtgtcgctgccggcgctgcggccgcccaagtgcggcgcgggaacggcggacccggactgcgtgcacaaggcgacgagcgagcagctgggcgtcttcttcctggccctgtacatcctcgccgtgggcacgggcggcaccaagcccaacatctccaccatcggcgccgaccagttcgacgacgcgcacccgcgggagcgcgcccacaagctctccttcttcaactggtggatgttcagcatcttcttcggcacgctcttcgccaacaccgtgctcgtctacatccaggacaccgtcggctgggccgtgggctacgcgctgcccacgctgggcctcgccgtctccatcgccgtcttcaccgccggcacgccattctaccgccacaagcccacctccgccgaaagccccttcgccaagatggccagggtcatcgtggcggccgccaggaagctggacgtccccgtgcccgtggacccgcgcgacctgcacgagctcgacgccgagcactacgccaagaggaacgtggccccgctcccgcacacgcccaacctcagcgtactcagcaaggcggcggtcaagaccggcgcggccacgtcgcggtggtcgctcagcaccgtcacgcaggtggaggagaccaagcagatgctcaagatgctccccgtgctggccatcacgttcgtgcccagcgccatgatggcgcagatcaacacgctgttcgtcaagcagggcaccacgctggaccgccacgtcggccgccacttcgagatcccgccggcgagcctccagggcttcgtcaccatctccatgctgctcgccgtcgtgctctacgaccgcgccttcatgccgttcgcgcgccgcgtcacggccaacccgcgcggcatctcgctgctgcagcgcatgagcgtcggcctcgtcatccacatcctcatcatggccatcgcgtcgctcacggagcgccaccgcctggcggtggcgcgcgaccacggcctctacgacagcaagggcaccacggtcccgctcaccatattcgtcctgctcccgcagttcgtgctcatgggcgtggccgacgccttccttgaggtggccaagatcgagttcttctacgaccaggcgcccgagggcatgaagagcctcggcacctcgtacgccatgaccagcctcggcatcggcaacttcctcagcagcgcgctgctctcagctgtgtcgcacatcaccaggcgccacggccggaccggctggatcctcaataacctcaacgcatcgcgcctggacaagtactacgccttcttcgccattctcaactgcgccaacctcgtcgccttcttcttcgtgtgccgcttctacgtgtacaacgccgaggtatcccacgtcgtcgacgccgggagcagtaagcagaagcgggaagtgcccatggcgatgcagccgccggccgtgggcgcagtggacgccaccctatag

SEQ ID NO: 2571 - DNA, 357 bp, Zea mays
  Peptide Sequence Number=SeqID_44350
atggcgaggtcctccggttcctgctccttctcggctgatgctcgaccgagacaggtcgccgacgccacgctgatggaggaagggagtaggggaggtggtggacggcgaggtcctccggctcctgatgaaggaaggaggaaggggcgcttgcggttgcggatgtctctggcgtcggcaaagtgcgggaggggaactccagcgcattcaaggtggagaagtggagatcgtggagagggaagccgcgggagtggagctgtgcgagcggttgggcgcgacgtcgcggaaggcggaggttaccgaagaatgaagggagacagctggcgtccgtcgctggagtatgggctgctccaaacatag

SEQ ID NO: 2572 - DNA, 4290 bp, Zea mays
  Peptide Sequence Number=SeqID_44351
atggcgcctaatgagaactggcgtcgcacgctatacttgaccaaattgaatgcaagtgagccgctgcccctttccccgttcactccgcttcccagacgtggcaccggcgcaccgcatgtggtcgcaagtcaacccaatgcattgaccgcaaacccgcgcgcgccgcgagctcaaagagtccacaatccacaccaccatgtgctcgccgcctcaccgcccctccggcccttcccgcctcaccgcaagaacgggcacggacgcggacacgccgcgttgtgctctgccacccggccaatgcggaagccaccactcgtcccggccagcctcatcctcgacctcgaggtcccactcctcgtcatccttgccctcgcgaccctcgccgccaatgctgcgacgccagcgtcgccggccgacgcgctgttggcgtggaagtcgagcttgggcaacccggcggcgctgtccacgtggacgaacgccacccaggtctccatctgcaccacctggcgaggggtcgcatgcgacgccgccggccgcgtcgtgtcgctccgtctgcgcgggcttggcctcacgggtggcctggacgcgttcgacccgggcgcgttcccgagcctcacctccctcgacctcaaggacaacaacctggtcggcgccatcccggcgtcgctctcgcagctgcgcgctctggccacgctcgacctgggcagcaacgggctcaacggcaccatcccgccgcagctcggcgacctctcgggcctcgtcgaactccgcctctacaacaacaacctcgccggcgtgatcccgcaccagctgagtgaactgccaaagatcgtccagctcgacctggggtccaactacctgactagcgtcccgttctcaccgatgcccacggtggagttcctctcgctctccctcaactacctcgacggcagcttcccggagttcgtgctcaggagcggcaacgtcacctacctcgacctgtcgcagaacgccttctccggtacgatcccggacgcgctgccggagcggctgccgaacctgcggtggcttaacctgtcagccaacgcgttctccggccggatcccagcatcgctcgcgaggctgacgagactcagggacatgcaccttggcggcaacaaccttactggcggcgtcccggaattcctcgggtccttgtcgcagctgagagtccttgagctcggcagcaacccgctcggcggaccgctcccgccggttcttggccggctcaagatgctgcagcgtctcgacgtgaagaacgccagtctggtctccaccctgccgccggagctcggcagcctcagcaacctcgatttcctggacctctcaattaaccagctctctgggaacttgccgtcgtcgttcgctgggatgcagaagatgcgggagttcggcatatcatccaacaatctcaccggcgagatcccagggcggctattcacgagctggccggagctcatatctttccaagtgcagaacaactcgcttcagggcagaatcccaccggagctcggcaaggcgacgaagctgctaatcttatacctcttcagcaacaatctcaccggcgagatcccgccagagctcggcgagttggcgaacctgacccaactggatttgtcggcgaacctacttaggggatcgataccaaactcactcggcaacctgaagcagctcacgcggctggagctcttcttcaacgagctcaccggccagttgccgccggagatcggcaacatgacggcgctgcaaatcttggacgtcaacaccaacaatctggaaggcgagctgcctcccaccgtctcgttgctgaggaacctccggtacctgtcagtgttcgacaacaacatgagtggcaccgtaccgccggacctcggcgcagggctggcgttgaccgatgtgagcttcgcgaacaacagcttctccggcgagctgccgcagggcctctgcgacggcttcgcgctgcacaacttcacggcgaaccacaataacttcagcggcaggctgccgccgtgcttgaagaactgctccgagctgtaccgggtgcggctggaggggaaccgcttcaccggcgacatctcggaggcgttcggggtccaccccagcatggactacctggacatctccgggaacaagctgaccggccggctctcggatgactggggacgatgcaccaggaccacgcgcctgaagatggatggcaacagcatatcaggcgccatcccggcggcgttcgggaacatgacgagcttgcaggacctcagcttggccgcgaacaacttggtaggagccgttccacccgagctgggtaatctcagcttcttgttcagcctcaacctgagccacaactccttctccgggccgattccgacaagcttgggccgaaattccaaactgcagaaagttgatctgtcagggaacatgcttagtggagccataccagtgggcatcgacaatcttggctcgctaacctatcttgacctgagcaagaacagactgtcagggcagataccaagtgagctcggcgacctattccagctgcagaccctgcttgatctgagcagcaactcgctgtccggtccgatcccttcgaatctcgtgaagctggcgaacctacagaaactgaatctgtcacacaacgagctcaacggttcaatcccagtcagcttctctcgcatgtcgagcctggagactgtcgatttctcttacaaccagctcaccggcgagataccgtcaggcgacgcatttcagagctcatcgcctgaggcttacatcgggaacctagggctctgcggcgacgtgcaaggcgttccttcctgcgacggcagctccaccaccacgtcagggcatcacaagagaacggccattgcaatagctctctcggtagctggggcagtagtgttgctggcaggcattgccgcctgcgtcgtcatcctcgcatgcagaaggagacccagggaacagagagtgctggaggcaagcgacccttacgagtccgtgatctgggagaaggaagcgaagttcacgttcctcgacatcgtgagcgccacggacagcttcagcgagttcttctgcataggcaaaggcgggttcgggagcgtgtacagggcggagctccccggcgggcaggtcgtggccgtgaagcgcttccacgtggccgagacgggagagatatcggaggccggcaggaagagcttcgagaacgagatcagggcgctgacggaggtccgccaccggaacatcgtcaggctccacggcttctgctgcaccagcggaggctacatgtacctggtgtacgagtacctggagaggggcagcctggggaagacgctgtacggggaggagggcagggggaagctgggctggggcaccagggtgaaggtggtccagggggtcgctcacgccctggcctacctgcaccacgactgcagccagcccatcgtccaccgtgacatcaccgtcaacaacgtcctgctcgagtccgagttcgagccgcggctgtctgatttcggcacggccaagctgctcggctccgcttccacaaactggacttctttagcaggatcctatggctatatggctccagagttggcgtacacgatgaacgtcacagagaaatgcgacgtgtacagcttcggagtggtcgccctggaggtgatgatggggaagcatcccggcgacctcttgacctcgctgccggcgatctcctcttccggagaagaagacctgttgctccaggacatactggaccagcggctggaacctccgacgggtgaccttgcggaggaaatcgtgttcgtggtgcgaatcgcgctcgcttgcgcacgggcaaaccctgagtcgcggccgtccatgcggtcagtcgctcaggagatatcggcccgtactcaggcttatctttcggaaccgttcagacagatcacgaaggaccctctacttatggcgcccgactggatgccggaagccagtagcaggcctctcgagcctcacattagatgcgaacgagaaaaaggaacaagacaacgtccgacactgggaaagccccattggggaaatattctcacctcgagggcttgggggctactgttggagatacgatccgcgatccttggggcccatcagtcaacaagcccactagggaaaggcctctggcaactagggcccgctggtcagtcggaggagataggtaacgtctatcctagaagaatccgccctaagacaaaccccacggcatcgaacccggggttggccgtggcagaaccgaacaaggggaactag

SEQ ID NO: 2573 - DNA, 597 bp, Zea mays
  Peptide Sequence Number=SeqID_44352
atgtccggtgaccgttggcgtgaagtagccgttgccccgcagttacaccggacagtccggtgtacaccggacatgtccggtgacgagtttgcgctggagtcctctggtgcaccggacactgtccagtggcacaccggacagtccggtgcgccagaccagaggtgtaagcctaattccctttcaatcggcaacctcacgagcctccacatgctgcgactttatgacaacaagctcaccggcaggttgccggacgagttcgggaacatggcggcgctgcagagactatccataaacaccaacatgcttgagggcgagctaccggcagagctcacgcggctgccgaacctcctcggtatcgttgccttcgacaacctcttctccggcaccgtcccaccggatttcagtcggaacttgtccatcgtcagcatgtcgaacaacaagttctccggcgggctgcctccggggctgtgcaacacaccgcgcctgcggtacctcagcaacgacaacaacgacatctccggcaccgtgcccgcttgctaccgcaagtttaccaagctagtgcgcttccggctggcgcagaaccggctgtccggctga

SEQ ID NO: 2574 - DNA, 1038 bp, Zea mays
  Peptide Sequence Number=SeqID_44353
atggagatggagatgatagatgaagccgcacagcaggctgcaccaggcaccagcaggcgcgcgcttctgctcctcgcccacctggtgctcttttcattctccccgcgccccgcgaactcggcgcaaggcgaggccgaggcgctcctgaggtggaaggacagcctgccgccgccgcggcccgcggacgcgctcgcctcgtggtcactcaacggctccgccgtcgccgcggcgcccgtgccgtgcgcgtggcgcggcgtgtcgtgcgacttcctcggccgcgtcgtgggcgtcgacgtggccggcgctggcctcgctagcggcacgctcgccgccctggacatccagtcgctggccagcctcggtagcctcaacctcagcttcaatgcgctgacggggcgcttctttacgcccaacgtgtccgcgccgctgctcagcgtcaggtctatcgatctgtccaacaacaacttgtcaggtccggtcccggacacgttgccggcgtggatgcccaacctcgagcacctcaacctctcgtccaaccagttcatgggcgagataccggttaccctaggcaagctgactaagctgcggaacctcgtccttcactctaaccatctttccggcggcataccgccggtgcttggcaacgtctccgggctaagggacctcgagctgtcaagcaacccgttgggcggcacgattccagccactcttggcaagctcctgtcactggagcgcatcaacgtcagcctgactcgggtggagtcaacgattccaactgagctcagcctctgcaccaacctcactgtcattggtctcgccgggaacaagctcaccgggggcctgccgccgtcgctggccaagctggccagagtacgggagttcaacgtctccaagaacatgctcaccggcgagataccgccgggctacttcacgtcctggacccatctcagggtgtttcaggcggacggcaaccgtttcaccagcatgatccccgtggaagtcgtggcggcacggagactcgagttcctccatttttaa

SEQ ID NO: 2575 - DNA, 1512 bp, Zea mays
  Peptide Sequence Number=SeqID_44354
atgttgtctgggcatatccctctgacgctcgggaatgccactagcatgcttcggctggacctgtctggaaatcacctcgacggcggcgtgccggtggagctgaccaaacttgcccacatgtggcacctgaacctgagccacaacaacctcaccggagaagtgccggctctgctcggaaagatggcctcgttgcaggatcttgaccttagcggcaaccccggcctgtgcggcgacatcgccggcctgagttcctgtcactcggattcgattcgaggcggctcccgctccagacggtacagagcgaggctagtcctcgtcgtcgtcacgctggtttccgccgcggcgcttctgccctccgtagctgcagtgtcgttcgtgctgctggcccggaggaggaggcaagctggacaagacagcggccccgacacgacggcgagcggtgccggcggcgcgatggctctgacggtgtccatatggggcaaggacgcggcgttctcgttcggcgacatcctggcggcgacggaacacttcaacgaggcctactgcattggcaagggcagcttcgggagcgtgtaccgggccgacctgcccggccccggcgggcggagcctggccgtgaagcggctggacgcttcggagacaggcgacgcgtgttggggcgtcagcgagaagaacttcgagaacgaggtccgggcgctgacgcgcgtccggcaccacaacatcgtgaggctgcacggcttcagcgccatgggcgggcacatgtacctggcgtacgagctggtggagcgaggcagcctcgggaaggtgttgtacaggcccggccgcagctgcgagctgttcgactgggccgcgcgggtgcgcgccatcggcggactggcgcaggcgctagcgtacctgcaccacgactgctcgccgccgatgatccaccgcgacgtgacggtcaacaacgtgctgctggacccggactacgagccacgggtgtccaacttcggcacggcgaggttcctcgcccccggccgctttgactgcaccagcgtcgccggctcctacggctacatggcgccagagctggcgtacctgagggtgacgaccaagtgcgacgtgtacagcttcggcgtggtgacgttggagatcctgatgggcaggcacccgggcagcctcataagctccatgcactcgcggctcctggacaccagtgggtcgttgctgctgaaggacgccctagatcagaggctcgactcccccgaagggcaggtgggcgcgcaggtggtgtccgcgtttctggtggccctgtcgtgcgtgcgggaggacccagagggccgcccaaccatgcggagcgtcgcgccaggagctctcggcgtgaaggcatttggtgctgaacaggccgctcatcgcgatcagggtcaccgatctgactggctctcacggattatactgataccaacagtcgttctttcttcgccgaaaatgtttgcgagtagttcgtggatttctgtcgcttttttgaactaa

SEQ ID NO: 2576 - DNA, 606 bp, Zea mays
  Peptide Sequence Number=SeqID_44355
atggctaccgagaggggtgcatacactcctagcagcgggttatcctctatcttatttattggtgctgtggttattcagaaggacaacggttctttcaagaagttcgctccaaggtcaggcaacaccgtgtttattaagggctttgacacctctggtggagaggaccagatccgcaccgctcttgaagagcattttggatcatgtggagatatcacccggatttcaattccaaaggattatgacactggtgtaagcaaaggaatggcgtacatggatttcaaggacccagattccttgaataaagcatacgagttgaatggaaccgaccttggtggctacagcttgtatgtcgatgaagccaagccgagacctgataacagcggtggcttcagtggtgacaggggtggtggcagagggaggagtggcggcttcagtggtggcagaggagggaggagtgacagggggcgtggtggtagccgtgggcgtggatttggaggccgtggtggaaggggtgacagaggccgtggtggaaggggtacgcctttcagacagaccgctggtacagctagtacaggaaagaagaccacctttggtgatgacgattga

SEQ ID NO: 2577 - DNA, 291 bp, Zea mays
  Peptide Sequence Number=SeqID_44356
atgaggtgcagtccacgaacaactaacctgcaagacaactgcaaagtacaagatctcgagataatggtcagtatggtagacataagaattcaggtggcttcaataaggatattaagcacctggttgcattcaggcattcagctctgtcatcctgcctaccaagaatatagcaaaaagttcaacaaagacaccatgcttctcaacaagaggatagtcagaactcaagcttaccattctaagaaggaagataacaaaaagaaaaatatgctcaggacaaatgaagttttataa

SEQ ID NO: 2578 - DNA, 219 bp, Zea mays
  Peptide Sequence Number=SeqID_44357
atggagataataaacaaaatgaaatcgtctggtttccctgctgacattgggcttggagggcagtcttgcggaggaggcgtgggagtggcgcgagcatcccaaagtcggatcgcagcgcgtcggcggcgggagtttttagtaaatgagacacacccgtacaggacacgacggcgggatccgacagagggacatcgcggtggccgggagagccaaatctag

SEQ ID NO: 2579 - DNA, 516 bp, Zea mays
  Peptide Sequence Number=SeqID_44358
atggtggagggggagacatcagaggaggcaaagaggaggcggacggggccactagaggcgcaggagttggaggagcgcttggagtctctcagggacaaaattgtggccgcaaggattgtcactggcagccgattcggcgaggagcagcgacagtccttgttgcaggagtggttgcgcctcgcatctgccaagttggatctagatctctcaggcatgagcgagttggaccgatcggcagaggcgctgccttggttgataccgccggaggaggcagacaagaggacgacgcacacacggcaagaggcacaggagttggaggagcgcatgacctgtctgctgttgctatttgaggacgtagcagatgacaggattctcgctaaagaggagcttggagcagcagccgacgagttccagctccgcttgacgatgcgtcaacgggccttgacgcgcgagtactcgcgcctcgccaacctgaagaggcctccggatctctccggcatgaccgacaccgactag

SEQ ID NO: 2580 - DNA, 1068 bp, Zea mays
  Peptide Sequence Number=SeqID_44359
atgaattttggtcctgcgtccgccactgatcaagcgaagtggaaatggttcttggcgaacatcaccagcagttacagacagaaatatggcaaggcgttgccgctggtcgtcgtcctcgcggtcgccgtggtcgcgtcccttgcgcagcccggcgcggccgacctgaggccgaactactacgcgagcagttgccccaacgtggaggccatcgtgcgcggcgtggtgcagcagcggctgcaggccaccatccgcaccgtcggctccaccgtccgcctcttcttccacgactgcttcgtcgagggctgcgacggctcggtgctgatcgaatcgacgccccgcaaccaggccgagaaggacgcccccgacaacaggtccctcgcgcccgaaggcttcgacaccgtgcggagcgccaaggccgccgtcgaggccgcctgcccggacaccgtctcctgcgccgacgtgctcgccctcgccactcgggacgccatcttcatgagcggcgggcctttcttccaggtggagctgggcaggctggacggcctgagctccacggccagcagcgtgccggggcagctgccggagcccaaccagagcatggaccagctgctggcggtcttcaacgcacacgggctcggcatgtccgacctcgtcgcgctctcagcggcgcacagcgtggggctggcgcactgcagcaagttcgcgagccggctgtacagcttccggccggggcagccgacggacccgacgctgaacccccgctacgcgagcttcctggcgagcaagtgccccaacggcggcggggccgacagcctggtgctcatggaccaggccacgccctcgcgcttcgacaaccagtactaccgcaacctccaggacggcggcggcctgctggcctccgaccagctgctctacgccgacggccgcacgcgccccgcggtggactcgctggccaacagcaccgccgccttccaccgtgccttcgccgacgccatcgtcaggctcggccgcgtcggggccaagtccagcgcgcggggcaacatccgcaagcggtgcgacgtgttcaactga

SEQ ID NO: 2581 - DNA, 429 bp, Zea mays
  Peptide Sequence Number=SeqID_44360
atgccgtcgacggggagcttggcccgtggcggcatggcgccctcctgctgcagaagaaaaaaacaacaaaaaagaaccaaacctaggagcgccgagtttcgcgagggacaggatacggacgaagagcaggcgacctggcatacacaagcacggggagatccttcatttttctccatagcttcagcgctcttccctcgtttagttcgtggaaggatggagaagcattcacggtctcgaagaatttggttggtgggtgggctcggttcatgctcccgtgctctcagcaacctgccaacccaccccatggacctggtccacggctactacgacaagtacatcaaggattttggtgcaatcgatgcaccactcaccagcctcctcaagaaggcggcctttcagtggggttatgaggcggaggcggcattctag

SEQ ID NO: 2582 - DNA, 762 bp, Zea mays
  Peptide Sequence Number=SeqID_44361
atggccggcgccggtatccacccgttccagcagtggccacccacggcggccgcgccgcccccgccgggggccgcggcctcggtcgccgtccctcctccaccccccgtccccggcgcgcctggcaccgttggcccggacgaggtccgcactatcttcatcacggggctccctgcagacgtcaaggaaagggagctgcacaacctgctgcgctggctcccgggattcgaggcgtcccagatcaacttcaagggcgaccagcccatgggcttcgcgctcttctccaccgcgcaccaggccatcgccgcaaagactgcgctccaggatatggtgttcgatgctgagaccaaggtggcgctgcacaccgagatggccaagaagaacctcttcgttaagagattcccccctgtagcgatgacttcacctgctcctgttacaggaccaactgcctatgctcctgtgcagaacacaaaggataatcctccctgcaatacccttttcattggtaatctcggtgatactgtagtcgaagaggaattgcgaagtctcttcagtgtgcaacctggattcaagcaaatgaaagtgttacgtcaagataggaacactgtttgctttattgaatttgaggctgagaggctaacagggatatggaacgccttggttcttttgctgcagtggaacaccttcattcttttgctgcaggtgaatgccaaggcgtggctatgtactttttggttagagaaccttagtgatgctaaaatataa

SEQ ID NO: 2583 - DNA, 237 bp, Zea mays
  Peptide Sequence Number=SeqID_44362
atgaggactagcctgggagcttcatggcatccccatgttagttctcttggtcgttccaaggaggagtcacggccggtgaagctaggattgcttgtcggagcaattcaccgcctcggatttgtgtgctaccgtgggcggaggacgttgggcaaggactcgccggagatcgccgccgcgcctagctaccaaaggaggaaggagcatcatgcgccgttgatctccacggagatggcttag

SEQ ID NO: 2584 - DNA, 300 bp, Zea mays
  Peptide Sequence Number=SeqID_44363
atgactagggaggagctcggcgtcggcacatctgccggggaagatctaccggggatggggaggagctcggcgcaagcacggggctgccgaggaagggtgaagttcggcgcggctaccagtgaggaggtcttcgtcaaggtgtcgagacctgcgaagggtgtccctgcccgctttgcctccgtcggaccagcggctgcagcgaaggcctggagcgaagggtggcgtctttgccttcgccccaacatttgccctccgagggaccagttcgacagagtcacctggtgccgaagacgtcgctag

SEQ ID NO: 2585 - DNA, 363 bp, Zea mays
  Peptide Sequence Number=SeqID_44364
atggtcacatcttgtctacacatacaacaacaacaacaacaacaacaaagccttttgtcccaagcacgttggggtaggcactattggggtggcacttgtcttgcttcacagggcgcatgtctgaacctgctcggtgtcaggggcccgaaccgtgactcacctggggcaaatgctagggacgccggggtggtgcacatcctcgggaacacggtcatcagggctcgcagagattcagggttcatcaagaagattgctatcaattacttgtatgctttccttaggaagatctgcagggagaacaacaccatcttcaatgttccccatgagagcctactgaatgttgggcaggtgttctatgtgtaa

SEQ ID NO: 2586 - DNA, 183 bp, Zea mays
  Peptide Sequence Number=SeqID_44365
atgcccacgcgcccggacgcgctccacgccctcgcgcacacgggggacggccagtgcctcgtccagtggcacggtggcggccgcgagcttgctgtcttcaagctgggctctgatgggtggtggacggaggcaggcgacggtaggatcaaatggtcctctacgctctccagcagcgtcctctaa

SEQ ID NO: 2587 - DNA, 2031 bp, Zea mays
  Peptide Sequence Number=SeqID_44366
atgtggacggggccacggcgtggccatactccgctggcagcgtctagggccccgcaacgaaccgagagcgccagataccggaccaccccctctgacaggtggtccctcaccaaagtcacgagccgcatccccaaaagccccccgaaaccccttttcctttttgttttggaaaaaccaaagccccaaactctcacaagtggagagaagaaaaaaaggcacgaaggcgtgcctgcaaaacatgtggacgaggatctcccggtgacttgtagtgctgcaactgtaacgccggagctcgtggacagggatcaaagacctgttgctctcgctctctacagcgaagagcgtgctttgctttccggcttatctctagtacagggaggcacgtgtccggcggtgaggcggcaggacgggtgtgttgtgcttgggcctcggcatcgtcgtggtggcttcgacgtgtcaaaaagcgaagcgacgacaggagcggcagcccccagcataattgaggtgagcagctggaggcgaggcgaggcgagggaacccgacccgcggaggagcgacggccacaagaatcgagcggcgcccagtcgtcctccgctccgggcccccgccgttgccggagctggtggcttcgtctcggtggcgcacgctctcgcctcctcctgctgctgctgctgcttgattcgtgctcgtggtgaagagccgctatcagactcggtggctgtggttctgctggcgaggagcaatcaaaggccggctgcagatcacgtcggccacagagacttcatggatcatctgaagaacaccctgagctccggcgacatggacttgccaggaggagcacgggcccctaaggcacgcaagccatacacgatatccaagcagagggagaaatggaccgaggacgagcacaagctcttcttggaggccctgcagcagcacggccgtgcctggcgccgtatacaaggcagcaagactgccgtgcagatcaggagccacgcccagaagttcttctccaaggtcatccgagaatcctctggggacaacagcaacaacagcgtaggtgctccaccgcaacttcagattccgccgccgaggccgaagaggaggccgacgcacccgtacccgcgcaagctgggtaattcagtaggcaaggatgcctctgctgcaatcaagcagcttcggaagccccagttgcaggcgcagtccctgtctgagcaggagaactgctccccaaaatctgtgttgaccacagcacagatgtgctctgaggccctgccagctgaaggcagtggatcaccggcttcctccgttcacatggaggacaaatgcctcacaccaaacacgtcagtcggggagtcaagtgtgcaagtggcactctccacggattccaacgacgcggcctgtgagatacccgaagccgaaggtccggttcttaggctatttggcaagagggttgtggttagtaatttagaccagcagccaagctccaatactgggagcctacaacacgcggcggacatggaactggatgatgcttcagccgagacaccaaccagtggaactgggaagctgtcttcccatgccgcagaagaagcggagacatggtgcccgtggctggtcggtagtacacagcagtttctgtactatctccctcggggagaggtgttctctatgcatcctggttgccagttcctaaactacggtaacggaagcatatcctacacagcgttggacgcacagacagttacctcaaacaagcagcggagccggccatggacggagtcgatcgaaacctccagcagcgtgcctggaacagctcagaattcagatcctgcagaatctacgaaagtaaacagaggtgaagacaaagtggctgtacccgttccaggttcaaggaaatgcgcgggcgcaattccagcctgccgtcgaggttttgtaccgtacaagaagtgcacagctcggagcaaggtgctgcagccggtggcacctggcgaggaggcagatagagagctgacaaggctgtgcctgtag

SEQ ID NO: 2588 - DNA, 207 bp, Zea mays
  Peptide Sequence Number=SeqID_44367
atggggggagaagacggcgttgtgagcggccaagggtttgtgcgcgatgtcagggcgacggtgatggcagagattacatgctttgtcccggggccttggcctggtgatgtgttgaaggacttcttgggcgaaagcctcgtcgacgggttttgccacgtgaagtcgaagctgttgtgtcaaggatgtggcgcgacaaccatgacatga

SEQ ID NO: 2589 - DNA, 309 bp, Zea mays
  Peptide Sequence Number=SeqID_44368
atggcgtctgtggtttctggccggaagaggagccgggagaaggaaccgaggagatcatgctccagcgcccaggccacagcggagccgccaccagccggccacaactttggcggtccgggagccgccgagaatagctgcctcctgcctggttactcggtagacagcacgggcaggccagagcccggaaggcctgcattgctgcagatggcccagtcgccaagcacgggtgtggccgcaggcccagctccgcaacctgcaggcgaacaatgcctgcaagcgtcctggatagaaaggtggctgtctgactga

SEQ ID NO: 2590 - DNA, 3414 bp, Zea mays
  Peptide Sequence Number=SeqID_44369
atggcggggagcttcgacctgaggacgccaaccagaggcgtcgagcaggctatcgttgctctgaagaaaggcgcacatctcctgaaatgtggcaagagggggaagcctaaattctgcgccttcagaatatcatctgatgagacaacattaatatggtactcaaaagggagggaaaaacacttgagcttaagctccgtgtcagctgtggttcttggccagaagacgataaaatttctgcgacagcgttgtccagagaaggaaccccattccttttcacttatatacaaaaacggagagcgctcacttgacttgtttaatcttgtccatattcttctgtttgggtctaacaattcgtctaatgcacttcatgttaaggtatgttcatcgcaaaggaagcccaagaaggcacacggaacattttttggtggtagcgctgattgttcagaatcattattttacacaaggcagcgaacattctctgacataggtacctacttggaaaatcttacacgcaagatgtcaaatccagaaatacatgatttgaaggatgttatggttggtaaccaagaaaaggagcagaaaattacccaaacacctaaactgaaaacctttgaaggaccccgtgcagcatgtaggttagattctctgaaggatgtttttttctggggtgatgcttttggaagtattttagagtgtggtgatacctcaaaaccccttccaatgttagtggactcaacgaacatgcttgatgtacaaagcattgcttgcggagagactcatgcggccataatcactaagcaaggagaggtctactcctggggaaatgagagcagtggcagaattggaaatcaagtaaatatcaaagtctcccggcccaaggtcgttcaatctcttgcctctttacatgtgaaggatgtggcctatggatcaaagcacacttgtgcagtaactgtttctggtgaacttattgaatggggagaaggaccctatatgggccagttggacagctatgcgaggaatcaatggtttccgcataaattgtttagtccactggacggcatatctgttgtgaagattgcttgtggtccttggcacacagcaataataacgtcttctggtcagttatacacatatggggatggaacatttggtgttcttggtcatggagatacacaaggaactacccggcctaaagaagtagagtctttgaaaggctcaagagtgaaatgtgtggcatgtgggccatggcacacagctgccattgtggaagtgatcagtgatttcaagagcaattcaccaagaagcaagctgttcacatggggcgatgcagatcgggggaagctgggtcatgctgacaaaaagatgaagcttataccaacatgtgttgattcactcacagactatgattttattcaggtgtcctgcgggacggcactcactgttgctctctctgttactggtgtggtctttactagtggcagttcgatgcatgggcaattagggaacccccatgcagatggtaaaactgtttctgctgttgaaggactacttaagagcgagtttgtcagacatatatcatcaggttcttcccatgtagcagtggtgactacaaatgggaaagtgtttacatggggtaaaggcaaggaagggcagcttggtttaggtgacttccttaataggagcactccaactttagtagatgcattggaaggtaggcatgtggaaagcctatcttgtggttacaactacactgcagcagtatgtctgcataaagtaatctcaaggaaggacctctctgtatgtagtggttgcaagatggcttttggtttcactagaaagaagcacaactgttaccattgtggatccatgttctgtaattcctgtagtagtaacaaggttgccaaggcagcacttgcaccagataagagcagaaggtatcgtgtgtgtgatgggtgtttcagtcagctactgaaagttgtggattctggtaaggtaaagtctgaactaaataccagcaaaggagctgaaattataaggtcatacacaccaaagttgtctcgtatattcagggatgtaaacttacctgtggaaaaggaaaaggtggctttagtacaacgctccaatcagagaaatgaggtcctgtacactccagtccaagcgaaatctcagagatgggggcaagttgagtgcccagctcaatttctatctgcagaagacagttctcattatcaatctatatcgaagaatcacatgtatagtgcctctgtttccgagagaatgcatgaccccacagtgctgaagtctggcagatctttgcaacagcctaatgatgaccagaggaaagatcttaacagcatagaagaaaccttgctcactgaagaagtaaagcagcttcgttcacagaaaggtgcatttaattgttcttccctcaccggccatcacactgttgagactcacatcgtgcttaatctccaaattcgtgccactgatgatgaacccttcactgatcccacatgctctattcaactccaagcctactttgatgctacttgggttagcgatgctgattgtcgctctctttctgcctattatggttttcttggtggttctctcattgctcggaagattaagaaacagaccgtgatttctcattcaagtgcagatgctgagttgcaaactatggctcttgcgacagcaaagatgacacttctcatggagcaataccatcagaaagctcttcaggttgaactgtataaacaaaaactcgatgagacatggctaattgttaggaatgaggctgcaaaatgcaaagctgccaaagatatcataaaggttctaactgatcagtgtaaggccttgtcagagaaacttttggtcggtcagcaatatgagaaccttgagacaaaatctaatatcagccaaggacaaacattttcagcagatttgcaacatcatcccagtgaaaaatttgccacaggcaaattcggacaactcgacaacaccaaaaatcaccagaccagcagccaaggagacgaagaatatacaccttcttcaagttctgatgtgcaggtagaaggattgtgtggtcatttgaatggttcaagaacatttgacagtaatggccgtattacagaagggaattccattgttgctcgcgtcacctccaatggtgtgatcgagcaaatcgagcgtggggtgtatgtcacatttgctgtatcaccttgtggcaagaaagacataaaacgtgtacgattcagtaacctaaccaggcattcttggtgcagtcggaagcattttggcgagaaggaagctcaacactggtgggaagagaataagggcagcgtctatgcaaagtacagcactgaaaaagcgcaacatcagctagaggttacaatcaagagtgtacaagagtaa

SEQ ID NO: 2591 - DNA, 240 bp, Zea mays
  Peptide Sequence Number=SeqID_44370
atgaagtctggatctgaggaaggcgtcgatgctccgagaggaaggcaacagatgagcagacgaatcgcctcgacggactgcgatttctgggcgcttcggcttctggcgcgagcggggttcactgctcacgaactggacgtgctcgtcgtcgtcctcctcgccgccaacctccaccggctccgaatcggccttgtgccggcagatccgtcgccctgtcgtccgatgtcgcccgagttctag

SEQ ID NO: 2592 - DNA, 270 bp, Zea mays
  Peptide Sequence Number=SeqID_44371
atgtgcggccatgacgacagcggctctcagccccttacggaagcaaggagacgtcagcaaggtcccaacagccccgacagctgtgcttctacaggactcaaacgctcctccgacggccacggcgccatggaccccccggggttgaaacgccgacagaaccagaagggccgaacaccaaaggggaagggaggttgttgcatatcagggacgggacatcagggctcgggcagacaggcgggtcaggcgatgtgtgggaggaggcaggcataa

SEQ ID NO: 2593 - DNA, 972 bp, Zea mays
  Peptide Sequence Number=SeqID_44372
atggcagcggcccactacggcaacggcagctcgacgagcggcggcggcggcggccgtggccgcgggaagcccatcacatgcaaaggtgctgttgcctgcctgcggcttctcttctgcttttgcacggcggtggcgtggggtcccggagtgccgctgtcgctggaggaggtcgaggtggcgccgcctagccccatggaggtccgcgtcaaggtgcttttcacctccatctgccacaccgacctcagcgcctggaagggagagtgcgaggcgcagcgcaaataccctcgcatcttgggccatgaggcagccgggctggtgcctctgtccatgggcggactgtccggcttggttggccggatcgtctgcatgagcataggaccgtccgtgcgcatagtggtagagagcgtgggcgaaggagtagaaggcctcgccccaggagaccacgtcgttccgatcttcaccggggagtgcgagaaatgcgtgtactgcaagtccgacaagacaaacctgtgtggaacctaccgtgtggatcctttgaagagcagcatggtctacgacgacggcacgaggttctccgtggtggaccaggcgtcaggccagcggcggccggtgtaccacttcctcaacacctccaccttcaccgagtacaccgtgcttgacgcggcatgtgccgtcaaaatcaaccctgaggccccgctgcagaggatgtgcctcctcagctgcggcatctccacaggagtgggagctgcgtggaacactgcaaacgtttctgctcggtccaccgttgcagtgtttggactcggcgctgttggtcttgctgtagctgaaggtgccaggctacgaggggcaactcggatcatcggcgtggacgtaaacccttcaaagttcaccaaagagcggttacctgaaggagtccaccctaagggtccaaaggccacccttggggggctcgggagcagatggagcaattga

SEQ ID NO: 2594 - DNA, 141 bp, Zea mays
  Peptide Sequence Number=SeqID_44373
atgaaggacttcagcaatactactatgtttccaccatacaaagtttctcgaaccagttatgttaaaatatacaatgggctttaccattgcgttcctctcgccaaaacaatcgaaaaacatagacggaatgttcaattttaa

SEQ ID NO: 2595 - DNA, 447 bp, Zea mays
  Peptide Sequence Number=SeqID_44374
atggatgccctgggcttcgagtatcctgactatgaaagacttggcgaagaagccgagggattgaaaaggaaaagggttaagaaaaatgttgagagaactgccgaaccagaggtaatcaaggatccttcggtgcctagcggggggaacgctcagaagaaacgtcgaatgatgaatgtgatgagagctatccttgataccccatctccggtggttcgagaaaaaattgtatccactgtggccgacgaaggtgcccaacaggctaaaaacagcggtggtcccctcgggacaaccttatcagaaatcgatagacttagtgataatgttgcacctgggagaaataccgagggggcaattgctgcggagacctcagcgtcgaaggaaaaaggaactgaaaaagcctcttcggaagacaaaagcttcgatcttcggcacctgggcgtccaatag

SEQ ID NO: 2596 - DNA, 150 bp, Zea mays
  Peptide Sequence Number=SeqID_44375
atgaagcgccgtatcctcgcagccgtcttcttcttcctcctgctctcagccatggccatggcgctgccagtggctgccgccgccgtcgacgtcgagcacacatttgtgcgggagaacagtgaagaaaagaagggattagatgaagaatga

SEQ ID NO: 2597 - DNA, 1530 bp, Zea mays
  Peptide Sequence Number=SeqID_44376
atgccgtcccttcccttctggtcgctgttccgttcaccatgctccgccccctctatttgtgaggacacagctaagcgaaggacccagaaaagcaaaagtttcaaagaggttgagaaatttgatgtttttgtgctggagaaaagttctggttgcaaattccggtcgttgcaacttttgctcttcgctatcatgtctgctgcgtttctaacactcctatacacaccatctgtgtatgaacatcagttgcagtcaagctctcggcttgtcaatgggtggatatgggataagaggagttctgatccccgatatatatcttctgccagcattcaatgggaggatgtatataaaagcatgcaaaatctgaatgttggtgaacaaaagctcagtgttggactcctgaattttaacaggactgagttcagtgcttggacacatatgctcccagaaagtgatttttcagtcataaggctagagcatgccaatgaaagcatcacctggcaaactctgtatcctgaatggatagatgaggaggaagaaacagagataccatcttgtccttcgcttccagatcctagtttttcaagagcgacacactttgatgttgttgctgttaagcttccctgtactcgtgtggcgggttggtcaagagatgttgcaaggctgcatctgcagttgtcagcagcaaaattagcagcagccacagcaagaggcaatagaggaatccatgtgctgtttgtgactgattgcttcccaattccaaacctcttctcttgcaaggacctagtgaaacgtgaaggcaatgcttggatgtacaaacctgacgtgaaggctctaaaggagaagctcaggctgcctgttggttcctgtgagcttgctgttccactcaacgcaaaagcacgactctacacggtagacagacgcagagaagcatatgctacaatactgcattcagcaagtgaatatgtttgcggtgcgataacagcagctcaaagcattcgtcaagcaggatcaacaagggaccttgttattcttgttgatgacaccataagcgaccaccaccgcaaggggctggaatctgctgggtggaaggttagaataatacagaggatccggaatcccaaagccgagcgtgatgcctacaacgaatggaactacagcaaattccggctgtggcagcttacagattatgacaaggtcattttcattgatgctgatctgctcatcctgaggaacattgatttcttgtttgcaatgccggaaatcaccgcaactgggaacaatgcaacactcttcaactctggagtgatggtcattgagccttcaaactgcacgttccagttactgatggagcacatcaacgagataacatcttacaacggtggtgaccaagggtacctgaatgagatattcacatggtggcaccggattccaaagcacatgaatttcttgaagcatttctgggagggtaacgaggacgacgaagcgcctcggtgttcaccattgacgcccacacgaagggcgaattcgtaa

SEQ ID NO: 2598 - DNA, 402 bp, Zea mays
  Peptide Sequence Number=SeqID_44377
atgaagctgtggaaggagacttccaggagttccaagactacgacgagttctaggtgtgggttagcggcaacccccagtcggctgcctgtgaaggccgcggttatctacgtttcttttccgcactttgatttattgttgcgaaaacctaagggggaagcggagcaaagaaccgtcgccagaccctcctccgagtatataaaggccaagacgagacccgttcaacgtttcgtcaggacccgccgcgggattcaaaaaacccaaagcgaaacgaccgttcctcgaacggctcgcgcgcgcgcaacggccgcccccgcgaaccgcacgccccgtcgcattaactccgcggcgggaaaggcggcgcctctggcagggggagcgagcgacgcttctccttcgccataa

SEQ ID NO: 2599 - DNA, 360 bp, Zea mays
  Peptide Sequence Number=SeqID_44378
atgtcaagtgacggcagcaaggatggagggctgtacacaccaccacccaagcgcaacagcgacaacgactcaccgtcgagcaaagccaaggcgagtggaagcttcggcaacccggcgacaatgacaacgaggaggctcccgctcccgatgctgacaaggacgaattacgcgattcgtgagcttggagatgccatggaggagaagtacgttgtgaagaagctgctgcgatctgtctcccaacaagtttataaacatgcttcgtcgatggtgttgttcaatgacgtcaacaagatgaccatggaggaggcaattgggtcgttgaaggcacatgaagagattctcaagggacgtgaggactaa

SEQ ID NO: 2600 - DNA, 1803 bp, Zea mays
  Peptide Sequence Number=SeqID_44379
atgatgctaatgcatatgatgacatgtcaaagttttagttctcataacaccaggggtgttacacccgctgccggagaagccctcttgatctacgtcgtcgctaccactcaggtggtcagcgccacgatcgtggttgagagacgagaagaagggcatgcattgcccgtcaagaggccggtctacttcatcagtgaggtactgtccgagaccaagatccgctacccccaaattcagaagctgctgtacgcagtgattctgacacggcgaaagttgcgacactacttcgagtctcatctggtgactgtggtgtcatccttccccctgggggagatcatccagtgccgagaggcctcgggtaggattgcaaagtgggcggtggaaatcatgggcgagacaatctcgttcgcccctcggaaggccatcaagtcccaagtcttggcggactttgtggctgaatgggtcgacacccagcttccagcagctccgatccaaccggagctctggaccatgtttttcgacgggtcgctgataaaaacaggggcaggcgcgggcctgctcttcatctcgcccctcgggaagcaccttcgctacgtgctgcgcctccatttcccggcatccaacaacatggctgagtacgaggctctggtcaacgggttgcacatcgccatcgagctaggggttcgacgcctcgacgctcgcggtgactcgcagcttgtcatcgaccaagtcatgaagaactcccactgccgcgacctgaagatggaagcctactgcgacgaggtcaaccacgtcgcccgacgatacaacaagactgcggacgagctggctaagatagcctcggggcgaacaacggttcccccggacgtcttctctcgagacctacatcaaccctcagtcaagaccgacgacacgcccgagcccgagaaggcctcaacccagcccgaggcaccctcagcccccgagggtgaggcactgcgcgtcgaggaagagtggaatggggccccgcctaatcgagactggcagaccccgtacctgcaatatctctaccgaggagagctgcccctcgaccgagccgaagctcgacgactggcgcggcgtgccaagtcgttcgtcttgttgggggacggaaaggagctctaccaccgcagccccttaggcatcctccagcgatgcatacccatcgccgaagaaggcacacgggggctacacgcacctgctggtcaccatcgacaaattctccaagcggtggcgttcttcaccaacatcatccatcgctttggggtcccgaactccatcatcaccgacaacggtacccagttcaccggcagaaagttcctggacttctgcgaagaccaccacatctgggtggactgggccgccgtggctcaccccatgacgaatgggcaagtagagcgtgccaacggtatgattctgcaaggactcaagccgaggatctacaacgacctcaacaagttcggcaggcgatggatgaaggaactcccctcggtggtctggagtctgaggacaatgccgagccgagccacgggcttcacaccgttctttctagtgtatggggtcgaggccatcttgcccacagacttagaatacggttccccgaggacgagggcgtacgacgaccaaagcaatcggaccaaccgagaagactcactggaccagctggaagaggctcaggacatggccttactacactcggcgcggtatcagcagtccctgcgacgctaccacgcccgaggggttcggtctcgagacctccaggtgggcgacttggtgcttcggctgtga

SEQ ID NO: 2601 - DNA, 228 bp, Zea mays
  Peptide Sequence Number=SeqID_44380
atgaggactgatgaacttacgagggagaacagaaaggaaacagaacagtttcatttcaaaaaatggaccccaacctcggcgccatcatcattggcgccgagccgatgtggcaagtcccagggggtcggcgccatagatttttgctccgacccagctgataatttgaaaaatgaggagaacagtgggataagttggggagattggatcttgtgttatagaatatcttag

SEQ ID NO: 2602 - DNA, 315 bp, Zea mays
  Peptide Sequence Number=SeqID_44381
atggggctcggagaggcggcggggcggctcctggcggccgtggactgggagcgcgaggcctaccctgcgtacgacgacttcctcgcgctccccgccttcgttctcttcttccctaccgtccgcttcctcctcgaccgcttcgtcttcaaggagggggtagcctggttggttggtttgcagacgctaacaggtttcctgaagaaattgctggttgatacatcaatatgggaattaattataaccagtcagcacccagcagttgtattttggattttggatacaagaaatgaagagctataccattcattttggtga

SEQ ID NO: 2603 - DNA, 1143 bp, Zea mays
  Peptide Sequence Number=SeqID_44382
atgtcgtcgtcgtcgaactcgaagcaggagaaaaaggaagaagaggaggagggtgatgtgccgccgtgcatgaatggcgacgtggggagggacgacgacaacaacggcggaggaggaggcgaagaagaagaagaagaaagagaaggcgagttcgcggcggcgatggcgcagctggcgccggagggcgtgcgggcgctgcacgcgcgggtggaggccgagtggggccccgtgctgcagagcgcgtgccagacggcggcggcgcgggcgctctggggccgcgcggtgcgcgacccggctgccgggctgctggccggggagcgctacctcagggggcttcgcgacaagatgcggcgcgacgagcaagccggcgcgagcgaggtgcacggggtcatgatcgccgtcaggacgctctggttcgacgcccgcgtcgaggccgccgtcgccgcgctcggcggcgacccgcaggtcgtcatcctcggtgcagggatggatgcaagagcctaccggctgagctgcctaaagggatgcacggtatttgaactcgacttcccggagctcctagaactgaaatccgaccttctgcgcgaggcagcggcgagttccgcaagccgccagaaactcaccgtggcggcgaaatcattggctagggttcctgccaacatacgagacggggactggatagcgaagctgcagagctgcgggtacgtccccgggaggaacaccgtgtgggtgctcgaaggcatcatctactacctccaccacgcggacgcgatgcaggtcctcgagagcatcgccgccagccgctcctcggccagcgcggtgctcctggtcgatttcatgaacaagaacgcgacgctgctctctccgacgatgtaccacttctaccatgacagccctgacctcctgctgccttctatggggttctcccgggtgacgctgacgcagattggagaccccgaagcgcattttgggctgctgagtcacccggagaacctgttcgataaactgaggaagctgcccaggtcggtggagaaaaatcccgacgacgggacgccgtgctgcagactgtattttgtggaagcctctgcctcgcccgatgaccagatcatgtgtccgctcaatcgttacttggaaatggaatag

SEQ ID NO: 2604 - DNA, 942 bp, Zea mays
  Peptide Sequence Number=SeqID_44383
atgaggctgtcggcatcggggaagaaagcgaaattgtttagattcgccaagggtttgaaagctggacgtcctgtaaagtttggaggcccacgcacagaggaagcgcaatcccaccccacccggcacccgttgaccgctgttcgcctagcaatgagcgccatccactcacccgccgcgccgccggcgaggccgcctttccggcgcagcacgacgggagtagcgtctcccctccgggaaccctcacagccgcaaccgacgccaccggcgcctccgagcctcacctcccgccgcgccggtctcgtcgcactcctcgtggcagcggtggcgccggaacgccctgccgccgccgccgccttctcgctcggcattcgtacgaccgcatcctccgcctctcctaccagctttctcggctctgcagtgaccgggcatctcacttgtattctcccatgttctctcttcgtgttgccgcgcgcagctgggcccaaggagctgctgcgggagcagaagaagaagtcggcgtccttcctcctcgcgcccatcgccgcctcccgggacaccctcgtcaaagcccacgcgcttctgggtaactccatgaaacccttagcaaccgtggctgtgcgatgcaatgtagcttcgccgagtgcgtctactgaggacgccgaggaggtgaaggggcggatccttgcggcaggaagggactgcgtgccgcggcagaggaactcgattgtcgcgctccagtcgcggactggcgttgaggtgtgcacattcagcttgatactgaagaacgccgcgtcgctgctcgccaataaggattccctcaaggttgaagctgatactaggctcgaggagctcataaaagagaagataaaagatggcttactgagcagtgtctctgccctggacaaatttgagcagagtgttaaagactgtttaggtgtttag

SEQ ID NO: 2605 - DNA, 132 bp, Zea mays
  Peptide Sequence Number=SeqID_44384
atgggggaggcgcgggattcgcggtgcttgaagcacgacatcgtggagcttgaggagcggcgggcgatggccggtttcgcgagggtgtgcgggagcgctggaacgatagatgtagtgtttgtacaacagtaa

SEQ ID NO: 2606 - DNA, 600 bp, Zea mays
  Peptide Sequence Number=SeqID_44385
atggggccgggtggtgctggtgctggcgcgcgtgagcgacgggaggccgggcaccgccgcgcggcggcgtcatctcatctcgccgagctggcctgcgccgggcattggccgacgagcgggcggaggcgcgggccgcgtggggggcaagcagcagcgggcgcgggcggacgaacggacggggcgagggctgggctggtggtggaggaactgctggtgctggcttgggatgggatggatgcgtattcgttcgagttggccgctgtggtgacgttgcccccactggccactggccgcaagggcgcagggacgcagggcgcagaggcggctccggtagcgctcgcgcaggggaggtcgcggctccggtcgccggtcgcgctcggccgctcgcgcgggccgcactgccgcaggggcgcactgccgcactgccgcactcgtcggtcgcgctccggtcagcggtcggcggtcgcgctggagcctggctggccgccttggagatgggaatcgggatggagatgggagtcgccgagttgggatcgggacacagccacacgagacgggaaagacggcggccgccggctggtcacggactcacgggagtag

SEQ ID NO: 2607 - DNA, 555 bp, Zea mays
  Peptide Sequence Number=SeqID_44386
atggacagcggtgcggtggagacagcgtccactggggcagtatggtcatcaccttcggcagaaccgagaagcatttctgtcgggaaggaggtattctgcaacaggtcactcaacatgaggaacatcacagcagtgggatttgatatggactacactctggcacagtacaagcctgaaaccttcgagtcccttgcttactatggtacaatagagaagcttgtgaaggatctccgctaccctgaagaggcaagtactcattcatgcagtttgtgggactacaccgatgttgtcatgaactacctttgtgggccatacacttcaggattgtttgaagttgagcctgattctggaaaacttctgaatgctgatattcaggctaccctggtcaacgagtttgtgtgcttcaccaccgttctgaccaacatgttcctgctgagtgggaagtggagtgggaaagaaggccatgacacaggactagtggaactggctgcaagacctgcacggtgcgccgccgtcaccaccttccaccgtggccagtttcatgctaccaagtag

SEQ ID NO: 2608 - DNA, 381 bp, Zea mays
  Peptide Sequence Number=SeqID_44387
atggctgaaaggtaccaacttccacggagttgcgttcctccaacgatgaggcggaaagacggcgggtatcccccatccgggggcttggaagggaccgggaaaggggataccccgaaaaggatccttccccgtgaaggaaccaggctccgagcccccctactgatcagaggttcgaaggctggcccccctgaagggttcgacagccgcctcaggtcgcgtgggccctacacccactactggtcagaggttcgaaggttggcccctcggaagggttccacggccgccttaggctactcgggctccgcgcccattactgatcaggggttcgaaggctggcccccgaagggttcacagccgcctcagacgccgagcgagggatga

SEQ ID NO: 2609 - DNA, 366 bp, Zea mays
  Peptide Sequence Number=SeqID_44388
atggggtcgaaacgccgacaacgtaggatgtcaaccgatgtgaatgagtttgtgacggtgatccaactttcgtctcggtgcaaaggttctggacctggggtccttgacaatgacctcacgtggcctcaggggcggatctccacccgagactgcctgggctgtagccccggtcggcagtcgcggcccagtaaagacccagctccagccacacgacctagcgcctgtcatgctcagccccagctccagccgaccagccgcctagctccctgccttcctctacccgccttctgcttcctccagctccagcccaccagccgcctagctccctgccttcctctacccgccatctgcttcctccagctctag

SEQ ID NO: 2610 - DNA, 669 bp, Zea mays
  Peptide Sequence Number=SeqID_44389
atgccgacgcaggggagaggcccgcagggtaaccacgtcgtggaagaggtggctggcgttagtgaggacgacgcggagggggctgctcaggctcgcggcagcggtggatctgcacgcgattggttgctgcatccacgcctggctgcacggatgtgcgacagctggcccacaagcgtcggcgtgggctcttgtgcacgatggaggggctgccttgccagatgtgtcgggctagggtcggacagccaaggggaacggaagaggggtctgccacgccggtggaggaagggccagcggcctttggggaagggagcgcccacgaggggagggggctcgaagggtgggccggatggccgcaaacgtgcccacgccacgagcaggggaggtggggtggccgggaccacacctagagaggaagcccgacggagatatgctggtggccatggaggtggcacccacagcaaggtggcagggggaacgtggccaagtggaaaacgacgacgtgtcaggcaacgatcgacgcggatccgaggccgggcgatggtggcggcgcgggtccgaggcgccggcagcgggaagcgcgaccagggggcagcggcgagcgtgcgccagcagcgggtcactaaaagggaaatggccttaacatttcctataatcgattttggtgtttga

SEQ ID NO: 2611 - DNA, 357 bp, Zea mays
  Peptide Sequence Number=SeqID_44390
atgggccagcagcccaacagtggtgtcggcccccacacagagaacacactgtctaacatcccccggctgtcgcaacagggcatcgcacacgatgagactggagtagaaaccgaagtcgaggagcctcgccagggagagcggcggcagcgcatgcgtctgcgccggtcagggtggctgcgctcgcggcaaaatagaaggggtatcggcggatcggatcgggaaggccacgacagcgacagatccagccatgaagacgtagatctagtccaaagaacgacggatctagccaggaaggtcgcagcagcgatggatactgctgtggaggcggcaaaggggtgggcgacgggtcaggtctag

SEQ ID NO: 2612 - DNA, 381 bp, Zea mays
  Peptide Sequence Number=SeqID_44391
atgctggtgattccagaactagaacaagagctgaagcttctctcagaatcaaagtctactcgaaaggagcttagacatcttagaatggagcgtgattcgattgaagacaaaatccatcatcttgaatggtctcttaagcttgatgatatctcagaaaaccagaaggagaaattgttctctgaacatgacaatctgctgaaacagagagggcatgttcgtggtcttcatcaagaagctcagaggcaacatcatcagaaggttgagagatttgcttgcttgtacagcagccaggttacaaacttcggtttgtattctcctgacaaatactatcgtccgagcgaagattacatgccccacgagtttgatgtgcttgggctgtag

SEQ ID NO: 2613 - DNA, 243 bp, Zea mays
  Peptide Sequence Number=SeqID_44392
atggctgaaccaagacctttttactcgtcggctctaatgtgtgacggggacatgtggtgtataaagcaaattgagctccaaagaggacataatgaaaatctagatggactaagtgaaaagtgggaagctgttgcagcaaggatgacagggaatcgaagttcatttctctcccggacgaccttctggtggctatcgatcctgaagtacgagaggtaccacttctccatcaactcgtacttctaa

SEQ ID NO: 2614 - DNA, 213 bp, Zea mays
  Peptide Sequence Number=SeqID_44393
atggaccaggcgccgtcttcctccgccgcccagatagaaacaaagcgaaacggattctgggtcacttaccacaatgctcgcagaggggacgacgatccacgacgacaggcggaatctcgacggcggcggaatcctggcgagaaattcaccgagctctgccaccgcattcgtaattctggcggtagcagaaggttcgcgatgacccaacgatga

SEQ ID NO: 2615 - DNA, 441 bp, Zea mays
  Peptide Sequence Number=SeqID_44394
atgacgccgaccacagctcgccgcgacccagcgatgaatctcggaaccaagaggaaaatccgccaaggcttcgatgttcttcaacgcttcagtgaatccccgagcagcagcatgcccaggcgctacactcctatctcaccgaatttctttttctctctccctgcttggtgcactgcgaacttgaatgaggtggatgaggcgtcgatggaggtgccaaggttttatagtatggaggtgacgcccagagcgaatgaataccgcgcagatctctccgtgtccaaacaacccacttcggttccgattttgggggagaagaacagaagccgccgcgaggtccgcctggttgttagcctgatggtgctggatgatgacaggcagaaagctaatagagatagatatatactgcatcgaatctaccgggaggcggttacgccgagctag

SEQ ID NO: 2616 - DNA, 360 bp, Zea mays
  Peptide Sequence Number=SeqID_44395
atggaagaacgccctgctcaccaccgcacgtctccacatggctggacagccaacgtgctgaccaccacggccagacctgcgccgctggcctggagcacgcacctggcgcggattgctcctcggtctgcagtcgcgcggtgtggaaaggagcaggaacacgcgcaccagggaactgagcggctgaagatgaagctgcgggagggggcggccatgggagaggagctgggcaaactgagtgccgtggaagatgagcgccggctgaggagggcgcggaataaccgaacaagccctgaggtggaggacgagcagagccatggacaaaaaggagcaggggcacgattcggcgacattgcggaataa

SEQ ID NO: 2617 - DNA, 210 bp, Zea mays
  Peptide Sequence Number=SeqID_44396
atggaggatagggcggaggggcttaccacacttgttactcaatgtagcagcatggatcaagcagtctcattagctgcgagaagcagacgattcgaatcgagtttcaaccttgcaagtgaccgcacttgtacccaccataaccggaatgggagaccacgtctcaggtcgcgtgaggagggcaatctgcgggcaggttcaatcagatactag

SEQ ID NO: 2618 - DNA, 330 bp, Zea mays
  Peptide Sequence Number=SeqID_44397
atggggctcggtgttgcggctcgctctgccaaggttgatttgtcccttggggaggagtgtggtggcaatgagactgatggttctggttatgaatatggtgctgtgaataataatctgaccaaccaaaagcaactgcttgacttatccccacataaagctagtccactacaaccaaacaggatacttgctgagtatgttgatgtgtactcacccttgctctacacaccaacccccccatccccaggttatcagcattgcaaccactgttcaggagaagatgaagccgtggaaggagacttccagaagttccaagactacgacgagttctag

SEQ ID NO: 2619 - DNA, 384 bp, Zea mays
  Peptide Sequence Number=SeqID_44398
atggcgggggatggccggagttgggcgattcggccacgcggtgctcctattctatcgtggctcatggatatatggagaacggggtatgacgaacacactagtatgcttcttaccgcgaatggatgcttggttggtgctggtcgcggcgatgggtggatccgaggctcgtcgcgatcatcggtgagcaattgcggccgtcccaatggtcggtgtcgcccaatcccaccacgaacatccgacaggagcaacgatgaatctctaccacccaactttgattcctcaacggagttagggccggggatcgacggcggcgcagcacaacccgactctgccctcaccggtggtgatggatttgtgcgtggtgaaaagggggatgggggttag

SEQ ID NO: 2620 - DNA, 468 bp, Zea mays
  Peptide Sequence Number=SeqID_44399
atgtcgatttgtgcaataacaaggcttgagcagggagtagaagacaacatggatattttggctatggggaagggacaaaattcagtgtctctgactggtgctatgaaccagaccaggtgcaatgactgtggtatggatcagaaatggacaaatcagatatttgactgttggaatggcccaagttcagtgttcctggctatacctatgagcctgtgttggactggtgcatggaagccatgttggtcagcccatatactgctggcacctcaagaatacttcctcactgcatgtggagcagatcagggacacctgcccttggtcaaggttaattctctccccagccctaggtttgtcgtaacccagagcctggcacgccagcacctagacgtggtgaccaaagccgcccgagtgctcacctcaccgtggccagatttggagctctttgctgctcaatccatagagttatag

SEQ ID NO: 2621 - DNA, 528 bp, Zea mays
  Peptide Sequence Number=SeqID_44400
atgtccgctggcaagcatgaccaatacttaggtcggtgtaagaccaagaaggagtacacctcaaacaagcacaagtccaaggggaggttcgacaaggaggcactcaaacagaagtacctccacaaagctaagatcaaggagcatgtcttccttgcctccctcagcggactcgaccatgactctgatgactctacttcttcttcctcgagcgacgaggagctcaagaggagggtcgagaacaagctgaacagactctacttcttcgccaacaccacggacaatttgttgaggcttgctactcatgagaggaaagactacaagagcaattatgagagcacgctttgggagcttgagtctgctagagcttctattgtggtatccgacaaaactgaatgtgatgagtgcgctcttcacatatcaaacttcaacaaattacagaccaagtatgccaccctactaggacagaggcctggagaatatgtggctcataaattccagctatttgcgccacatgatctgaagctctag

SEQ ID NO: 2622 - DNA, 147 bp, Zea mays
  Peptide Sequence Number=SeqID_44401
atggcgggggatggccggagttgggtgattcgaccacccggtgctcctattttatcgtggctcggggttatacggagaacggggtatgacaaacacacaggaagaagacgttttgggcagtcgcgtagacgctccccaaaaacctaa

SEQ ID NO: 2623 - DNA, 621 bp, Zea mays
  Peptide Sequence Number=SeqID_44402
atggcgaccatctccatggcagcagtggtggcctctgatctgggcggcatcagtgtgcgtctaggaaaccactcacgctcaatggtagtgatggcatgggagcaggtgtcggacttggaggagcgattcaaccacatcaagctcggctacttcctgcactcgccgttcccctcgtccgagatctacaagacgctccccatgcgcgaggagcttctgcgtgccctgctcaactctgacctcatcggcttccacaccttcgactacgcgcgccacttcctctcctgctgcggccggatgctcgggctctcgtacgaattcaagagggggcacatttgcctcaagtactacgaccgtccggcgcagtcggaggcggacgccgtcagggtggccttttcggatgactggatcttcgttggatcggtctccaagcagctaatcgttgtgtttgacttctggtttgtcagggttggatcgtcatggggctttttgggaagactattcctaagatgtgaaaatgagcaccatataatggaagaggtcccattccgagtagctgaagggccgcagagtggggaaccgaagagcgaagttgtgatagatagcagtgatgtgccgatgtga

SEQ ID NO: 2624 - DNA, 375 bp, Zea mays
  Peptide Sequence Number=SeqID_44403
atgacgattcatgacatgtatctttcatgccgctatagtggtcgtttcagattctggcagcgtgctccacatgccaccatagtgccacgcggcggcagacgggcagaggaagcgtccacggccacgaccggcagcagcagcagcagcagacagcagagggtgaggatccgccgatctgaccagttacaaggcgcgcgcgaggcgggagctctggagggcatggccatggaaagggagccggcgccgaggaaggcgcgctccacgccgagcagcccgaggcgcgacgccgcccctggcatctccgccgtggcatcgggcggcgccgggagctcgctggcgcgcacggggagctgcttcgccgctctcgtcgaatga

SEQ ID NO: 2625 - DNA, 465 bp, Zea mays
  Peptide Sequence Number=SeqID_44404
atggtgggcagtcaggccatcataggaaggaccttctccatcatcaatcagagccagtctcggagcttcttccccagggtgaaagtcgtgcacacaccgctgcagcgggacaacaagtactacaagcgcaaaaacttgcttatggtcatcaagaacaacccgttgtggtgccaccttagcatgggcctgggctatgatgactctaactccaacgatagcggcgtgtcgcctggctcggaccgtgcagacagcatagaggtcgccacagtgccgccggcgccgtcggtcgtcaaggaggcgaggttcctggtggcctcgcccaggagccccgacgtggacgagaacatgctggaggagctgcacgagctgtgcgaggcgcgggaggccggcaccgcgttcatcatggagcactcggcatgtggagaccaagcccgggtcgtcactgctcaagaggctgacatgtga

SEQ ID NO: 2626 - DNA, 2898 bp, Zea mays
  Peptide Sequence Number=SeqID_44405
atggatgaccttgagcatgtcatccttcttgcctccgactcacctgctgccgcagcggcgtccccatctatccgcgcggaggctctcgccttctgcgcccgcgcccgcgacgagtccccgccgtcgtcgctcctccgcctctgcctgtccggcatcgcctcctccccgcacgctcaagtccacttttggtgcctccagtccctccacgacgcgctcctccgccgccggctcgtgctccccgacgacctcgcgttgctccgctcctccctcctctcgctggcggtttcctctcacgccggatcgccaccgttcctccgcaacaagctcgcgcagcttgttgcgctcctcatccgcctcgagtacccccatgtttacccctcttacttcattgatctcctcccgcccgcaccgccgcagcctggccccacggacatgttcgcgcgggttctaatctctctcgacgacgacctgctctcccaggagtacccccgcaattctggcgaagccgccgacgctatgcgggtgaaggattccatgcgcgcacagtgcgtgtcccagatcgccagccactggcacgccgccgccgtgactctccgtacagccgaccctgcggctgcggcggtggcccttgacgcggcgcgcaggtgcatctcgtggattgatgtcggactggtcgccaatgatgtcttcgttcctctattctttgacattgcgatgtcccctggaagcgcgtctccactcgctgctgcagcggtggggtgcctttctggtgtggcgtcgaagaggatggactcaagggcgaaggtgggattgctgaggtcactcctggctgcacagcaggggcttggtagcccagacaatgggttgaaaatggcacctttggtgatagcatatgctgcagaggctctcgaatgtcatagcaggcttggccctagtgatgctgatggagctgcagcattggagatgctggaagaggtgctaccagctgtatttgcagctgcagagagcggtaacgatgaagatgtggattctggttccgtgcttgagttcttatctggctatgtgagcacaatgaaggcaccatctgagaagcagttggggcacttgggacggatcttggaggtggtgcgggtacagatgtcatttgatccagtatatagggggcatcttgatgtgcttgacaagatagggaaggaggaggaggacctcatggcagagcaacggaaagatttgatcgtattattccggagcatttgtcgtgttgcaccagctgcagctcagctattcataagtgggctgattgtgacagctctctcatctgcagaagctagtgtggaggatgttgaggttgctcttaccctgttcttccggcttggagaagctgtgggtgaggaggagattcggactggggcagggctgataggccagcttgtgcccatgctcctaactgcgaggttctcgtgtcacacacaccgcttagttgcattggtgtacctggagacagtaacccgctacatgaagttcatgcaggagcatgtgcagtatgtaccacacctgcttggcgtgttcttggataaccgtggaatacaccatcagaatgcccacgtgagccgtcgtgcaggatacttattcatgagggcagtcaagtcattgaaggcaaagctagtgccttacctggataccatactgcaggctgttggattactgataggcattgaagaggtatcaccagagaagcaggctcagttcttgaccgctcttctaaatcctctctgtcatcaggttgagtcacttgttatggatgccaaagcacgagggcttgaggaatcatcaccaatggctattagccttcaacaaattattgttgcattgaatatggtcagcaagggcttcaatgagcgtcttgtgatggtaaataggccagctattgggatcatgtttaagaaaacccttgatgtagttttgcaagtccttgtttcatttcctagcgtgagacctctgcgatctaaggtcatatcgtttctgcatcgtatgatcgagatattaggtctctcagtgcttccctgtattccaattgcactgagactattgcttcttgacaacgaggctaaagatatggtggaatttctcgtattggtaaaccaaataatctgcaaatttaaatcgtcagctagcgccatattggaggaaatatttcctactattgcaagtcgtttgtctgcgatattatcacaagatgcattttcagctggtcctgcaagcaatactgaggaaatgcgagaactgcaagagctgcagaggacattatacacattcttgcatgctatggcaacacatgatctttctgcagttctccttactcctagctctagggagtatctggagaccataatgcagttgcttttatttacctcatacaaacatagagatatactactgcgcaaggcatgtgtacaaatttttgtgaatcttgtaaaagactggtgctctaactctgaagataaggttccaggcttccgagtatttatgattgagaagtttgctactaattgctgtttatacagcgtccttgataaatcatttgatttacgcgatgcaaactcgcttgtcctttttggtgaaattgtgctggcccagaagattatgtatgaaagatttgggggggatttcattgtgaactttatagcaaaaggtctttctggagttcactgcccaccggacctagctgaacagtactaccagaagttaaagggaaatgatatcaaggcattcaggctagttgtgccgtcaatgtacatagagctaccatttctgcgatcggaagacgtattactgcggcattatctttaccaagtctggcaaccatggttgtgcccttattcattgtattctatctga

SEQ ID NO: 2627 - DNA, 528 bp, Zea mays
  Peptide Sequence Number=SeqID_44406
atggaggacgatgacaccgagggtgtaggcgagagcacctgtccccccgccgccgaccgaggaggctcctcctcggccggcggcggcggcggcgactcacacggttacactgacatcgagaaggaggtattcgaccgtctcatggagaagagaatcccggaggtcgtcgcggacccggtggccttccgcgaagagctccaccgccacttcgagcgcctgccgctgagaaaatttgagccatgtgaagggatcgaggacctcagtttaactggacaaaaggttgtgggtgactatgtggccggttcttcgaggggagatgtagaaatcctccatgttcatgaaattattttttctaccattgacaaaccaaagctcctcgctcagctatctgctttgttgtctgaagttggactgaacatccgtgaagctcatgtcttctcaacgactgatggcttttgtttggatgtatttgttgttgatggctgggatacaaagcctttaaaccgtgcaacctactatcgaaagtaa

SEQ ID NO: 2628 - DNA, 561 bp, Zea mays
  Peptide Sequence Number=SeqID_44407
atggtgcttgcagtttggtttgttcgtgttgacaatttctctgtggggcgttgcagggaagatgggggtcgaggagaggcaggcgcagaagagctcctaggaggagcatcccaagaacctcatcgtcgatgccatgatgctggactcccgcgctgtcaatctcgacaaggggccacctgtcgctctggacaagggggctgccctaagatcctgtttttgcttccttcagatgaaggaacatctatcctagagcttggtgctggaataggttgtttcactggagaactcgctaaaacagttaggaacgtttttgcgctagattttattgaaagtgcgattaaaaagaatgaaagcattaagatggttggccctgttgactaccaaaatgacttggacttttggtgcatggataaatggactgcaagctttcttataacgtggcacatcataagaaacatacataactccaatttccgaaatatcttagtgcagaacaatgaatataagcctgtaacctctagcagagatacacaagagaagctctctttggcatttcactga

SEQ ID NO: 2629 - DNA, 1053 bp, Zea mays
  Peptide Sequence Number=SeqID_44408
atgctagcaggcgcccccaccggcgatgcgggccccagctccggcgctgggagcaacccacccactcggccacggaggttccccggggcggcgcagccggagatcatgcgggcggcggagaaggacgatagctacgcagcccacgtcacggaggcatgccgcgacgcatttcggcacctcttcggttttttgttctgtaacggtgatgatataggtaccagggttgctgttgcttaccagaatgagataaaattgcttggtcagtccctttactacttgctaacaactggttcaggccagcaaacacttggtgaagaatattgtgatatatctcaggttgcaaccttgcatggacttccacctactcctgctaggcggattctattcattttgtaccaaactactgtgccctaccttgctgaacggatcagctccagaattgttgcccgtagtattgtactcaacgaatctcagtttgatgaccatcctgaaagtgataattctagtagtgacattgcacaatccaccacaaatagtgacattccttcaagaagcttaagtgtttctgctctgtcagggttcagaggccgagttcatgccttgtggcaatgggttcttcagaaatggccttcaatgctgccatatgctcaagattttatacagttggctatccggacaaatctaatgttcttctattttgaaggtctgtattatcatttgccaaagcgagcagctggtattcgctatgtattcattggcaagccaatgaatcagagacctagattcaattcctttatcatattcctgtatcagatcttgggtatttttctgttgattcagttgtgtattcttggagctgaaagactccgaagaagtcggggcatccctgttctaaatgaagatggaaatatcatcagtgacatccgcagtggtaaagctgcagatatagcttctcattcagagacctccaatggcaagagcaaatgcaccctttgtctcagcatccggcaaaatcctactgccacaacctgtggacatgttttctgctggtaa

SEQ ID NO: 2630 - DNA, 378 bp, Zea mays
  Peptide Sequence Number=SeqID_44409
atgggggagacccacaaaatcgtccatcgcggggtgagcagtgtggaccgtacgaagatgggggagagtagcaaacaatgcaacgttgttgatgaggctcgaaccttgggggcagctgcgtcagatagggctagtagcaggcggtgtagatttgataatattgacagacttgacggtgtagaattaatggcatataatttcaagaaaatactatgcaacgataaagctatcagtgaatggtgcgtcagaaagataaaaaaagcccttagaaattcagtgtccagaggaactgtacatttacagcgtaatttacataaaaaggtaaagcttcgacgcagtacacagagaagacgctccttgcagatgaagctgacttag

SEQ ID NO: 2631 - DNA, 1152 bp, Zea mays
  Peptide Sequence Number=SeqID_44410
atgatgacccagcctccctctccacgtccctgctccccaactcatacaggtgttgtggcgccctcctctccactcccctatctatttggttgtttgatgtctactttcttcgcctctccggttgcggcatggaactacattgactccaaggaagatattctggtctatgctacaaagttgattaaagctgaaatgcctatttctttgagattgatggggttgcggatgtctcagctacatgatgagaaggacgatccatctacttcaacacaaaagacactagatatattctttcattcatcaaacagtaactcaaatggcaatggaaccaatgttcagagaaccactaattccccagggcaggataatgactctattagtctcacaagcaaggagtacttggcacctgatgctggaacaagtgtttccacaggccaacaggatttcttcctacatgatgagaactgttttattcccgaacaacaacggagtttagacaacgatactaaagaggctgtcctaagcgacccgttaggtggaacaaagtcagatgatgtgtcttacaggcaaagcccgaaggctgtgtcttcatcaagtaaacctgaccaacagtcatggattgatggctacatttgttccatctgtggatttgaactgcctctgggcttcgaggaggagaggctggaacattcagattttcacctggctgaaacactccagcaggaagaagcagtggacagcacaagacacatctcaaacgagaggtcggctgggtcgtcgagcccaatggcaccacctacctcaagatcaattttgctgccgatacatgatagcttaggtagcagatgtgatagatcactgcgagttttagttaacatgttggatatcattattcatagattaaataaatgccttccagtggatgggacatgcttgatcaagcaaccgggcgacacctatgacgacttcgccagctccaagcccgacagcgagtgccactacgtcgtcttcgacttggacttgaacaatttttatgcctgtgggagcagtggcgtcagtttgagtgcatttgcattcttgttctctgagttggttcagtacaaccagactcaagttgacaacattactgagctagaacggaggctagaatag

SEQ ID NO: 2632 - DNA, 321 bp, Zea mays
  Peptide Sequence Number=SeqID_44411
atggatggaggcaacatctggaggtgtcggggctggcggcaggcacaacgtggctcctgcggcgggggacgcggacgggcgtggagctgcatctcagccgctcagggggaggcggcgactgttgcagatcccgggcatcacggggtgaggcgaaggcgtgttggtggggagtgggaggttgctcatgactcccggatgaggctggcgatgttggacatgtgtggcatgtggcggatgcggatggggcgcgaggtcggcctgcgcgacattcggccaccggcggcggatgcggatggggcgaggaggaccgatgacggatga

SEQ ID NO: 2633 - DNA, 207 bp, Zea mays
  Peptide Sequence Number=SeqID_44412
atggaggtggtctacagagagtggagtcttagcttgacaacggggctctggactctgagtccttgtcggcgtgtcctcctcctgttggtcgattcttctggtcgtctcctcgaccgagtgtactacacgtctatacctaccgacacatttcccaactatagaaacaacgactttaaatcgatatacgcagacacaactattctgtag

SEQ ID NO: 2634 - DNA, 2850 bp, Zea mays
  Peptide Sequence Number=SeqID_44413
atggctggtaaaactattataaaggaagaggacctagataaagcagattctgattctctgtttgatgatttggagatatctagtgtctctggttcagaggacgaacaagaaaatggacctgcatcagaacgtgaagttcaagaattaattgtttcatggaagtcatactttgagacatgtgtttgtgccttcatttatgctccatctaggaaccgccagatgctcttcgacggggagaagactcagtcagtaattcagtcttgtgatgttcgtccagttccattgactgttcatcgccccaccatgaaggaagcgaaacgggtatattgtaacctaacacaactctactatgagatggaatgttcaaccacagatgaaacactacctgatgctggaagtgtgaaaaatgttgaacaaggtcaaggaaaaaagaatgaagtgactgcagaccctggggaatctatttctgacttgtctgcccgtttggaattgttgaataagaatgaagcagcaaccataccatcatcaaagaacgaaacaacacctcttcatgaggcagcaaagtgtggcaatgctcagctgaccctggagttacttgagcagggtttggatccttgcgtaaaagatgcaagaggaaagacatcttattcgctggcttcagataaggaagttaggaatacattcagaagatttatggcgctcaatcttgacaaatgggactggcatgctgcagatgtgcctagtgcactaacaaaagaaatggaagaatcacaagctgcaaaacaagcagacaaggacgccaaaaggaaagcacgtgcaaaggaattgaagaaattaaaaaaagaaagagaaaaggaagaaaaggagaaggagaaggagaaggctaaggctcaagcatcacaatcacaatctgatgttaaaggcacttcgagcggccaaatggccaacagaactgcaactgcgccaggccttgtaccaaagcatcagacgccacagcaaatacttatagcaaaggaggaggaacgacagagaaaacaagctgaagaaagagagaagagagcagctgcagcagagagaagacttgcggctctcgctgtccaatctgccggaacgagcgcatcagaaatggcagccgatccttcgtcctcttccacggggcaacaaacggcggacatccgcgcggccccgcccgaggactcgaggcagatggcaatgagcgggccgctcaatgtccggggcgaccggaggccgccgccgatgcagagggccttcagccggcaggtctcgctcggcagcggcgtgacggtgctgggcatggacagagcggggaggagcggtggcgcaaggggccaacggaccctcccccgcagtggtaggagcctcggggtgctcaaccacagcggcggcttggtccaggccgccggcgacggcgccgcgcgcagggttggcgacttcagcatgttccggaccaagtcgacgctgagcaagcagaactcgatgctgccgacgaggatcagggagtccgacctcgaactgcccacgcacgtcgaagacccgcagtccgccagcagcaggccggcggaggacccgctcaacaagagcgtccccgccggccgctacttcgcggcgctccgtggccctgagctcgacgaagtccgcgatactgaggacatcctgttgcccaaggacgaggtgtggccgttcctgctgcggttcccgatcggctgcttcggtgtgtgcctgggcctcggcagccaggccatcctgtggggcgcgctggcggcgagcccggcgatgcgcttcctccacgtcacgcccatgatcaacgtcgcgctgtggctgctggcggtcgccgtgctcgtcgcgacgtccgtcacctacgcgctcaagtgcatcttctacttcgaggccatccgacgcgagtacttccacccggtccgcgtcaatttcttcttcgcgccgtggatcgcggccatgttcgtgaccatcggcctaccccgctcctacgcgcccgagcggccgcacccggccgtgtggtgcgccttcgtcctgccgctcttcgcgctcgagctcaagatatacgggcagtggctgtccggcggcaagcggcggctgtgcaaggtggccaacccgtcgtcccacctctcggtggtgggcaacttcgtcggggccatactggcggcgagggtcgggtggacggaggccggcaagctcctgtgggccatcggggtcgcgcactacatcgtcgtgttcgtcacgctgtaccagcggctgcccaccaacgaggcgctgcccaaggagctgcacccggtgtactccatgttcatcgccacgccgtcggccgccagcctcgcctgggccgcgatctacggcagcttcgacgccgtggcgcgcaccttcttcttcatggccatcttcttgtacctgtccctcgtcgtgcgcatcaacttcttccgggggttccggttctccctcgcgtggtggtcgtacacgttccccatgaccacggcgtcgctggccaccgtcaagtatgccgaggctgtgccgtgcttcgcgagcagggccctcgcgctgagcctctccctcatgtcgtcgaccatggtgtcgatgctgctcgtgtcgacgctcctgcacgcgctcgtctggcgatcgctctttcccaacgacctggccatcgccatcaccaaggaccggcaaaacggcgcggtgaagccgaatgacagggggaagagggccagcaagagagtgcacgacatcaagcgatgggccaagcaggcgcccctctccctcgtgtcctcaatcaccaagagccactcggcggacaaggaggaagaagagagaactgaataa

SEQ ID NO: 2635 - DNA, 1200 bp, Zea mays
  Peptide Sequence Number=SeqID_44414
atgtccccgtcgagcgagtctgcggggcggggcgaacgaccaagtccccgtcgagcgagtctgcggggcggggcgaacgaccaagccccgccaagcaagtctacgaggcggggagaacgaccaagcccccgcgagcgaatctgcgaggcggggttaaagaccaattgcccgccgagcggatccacaaggagggaactcaggccgacgttgtcagccgacagcggccgcgacaagacgacattaactggtgatatcacaagtctcagactaatcactgcagtgaaaacaccttatttgccagatggaagattcgatcttgaagcatatgattctttgataaacatgcagatagagggtggttctgaaggcgtaattgttggtggaacaacaggagagggtcacctaatgagctgggatgaacacattatgcttattgggcataccgttaactgctttggcactagaattaaagtgataggcaacacaggaagtaattctaccagagaggctgttcacgcaacagagcagggatttgctgttggcatgcatgcagctctccacatcaacccctactatgggaaggtatcaactgaaggattgatctctcattttgaggctgttctgccgatgggtccaaccatcatttacaatgtgccatccaggagtggccaggatattcctcctcaagttatcgagacactctcaggttatccaaacatggcaggagtgaaagaatgtgtcggacatgagagggtcaagtgctacaccgacaaaggtataacagtatggagcggtaatgatgatgagtgccatgattctaggtggaaatatggcgccactggagttatttctgtagcaagcaaccttgttcctggcctcatgcgtagtctcatgtatgaaggggagaatgcgttgctaaatgagaagctgttgcctctgacgaaatggttgttctgtctgccgaatcccatcgcactcaacactgctctggctcagcttggggtggcaaggcctgttttcaggttgccgtatgttcctcttcctcttgagaagaggattgagtttgtccggatagttgaagctattggacggggaaactttgtaggacagcaagaggcacgtgttctcgacgatgatgattttgttttgatcagtagaaataaaacagctaatcctgattttgcttacagtttcctgtag

SEQ ID NO: 2636 - DNA, 618 bp, Zea mays
  Peptide Sequence Number=SeqID_44415
atgccgattagagctattgcaaacccggccaaagtgccagaattggagaaggtagcagagcagccgaagatgctggtggcaacgtgtaacatcccaaaatttaatcccaagcccacgcggcccatcccccgcacgcccgcccgctgcgcctcctcccccgctaaccggtcggccccactcgtcagccgcgctctttccctctctcgtcgctctcccgctgacaacctgggcccgcccgtcagtcctttcgtccccgcccgtgacttcaccggcgcgatccccaccgatcaccccccgcctcgtcttctcgccataactcctgcgccagtgaagttaggcaccgctccacccctcagctcactgtgctcgcagcctgcccgagaggtctcgtccctggcgctgtgcgccccattgccgtcgtggcatccctcgccggcgctagctggcctttggccgcttcccacctcgggcgcctataaaaagaatcgcctgagctccatccttcctcacaccggcctcagccactccctctcccctcccctgagccgaatcgagctccgcgccgccgcacccttcctccgctctggtaagctccccttctttgctctggtagcctag

SEQ ID NO: 2637 - DNA, 177 bp, Zea mays
  Peptide Sequence Number=SeqID_44416
atggtgacgaacgactacggcgggtctcacggctcgaagtgggtcctggtggtggcgccccagtttataggaagctccagtgcaagaatccctcgcctgaccgtcatcgcagcaaaatcaacccaaggacctccctacactgaccactcccctactgcccttgcccctttcgggtaa

SEQ ID NO: 2638 - DNA, 489 bp, Zea mays
  Peptide Sequence Number=SeqID_44417
atggcggtggcaggcgggcaggagcagcggccccgtcgtccgccaagctcacgtcccatccgggggcagcaagagaaccctctctcacggcgtgaagacaacgcgcccgtgctccgttcctcgaacggctcgcgcacgcgcaacggccgccccgccaaccactcgccccgtcgcattaactccgcggcgggacaggcggcgcctctggcaggagaaggaccaggaaagggggataccccgaaaaggatccttccacgtgaaggaaccaggctccgagcctccctactgatcagaggttcgaaggctggccccctggaagggttcgacagccacctcagatcgcgtgggccctacacccactactggtcagaggttcgaaggccggcccctcggaagggttccacggccgcctcaggctactcgggctccgcgcccattactgatcaggggttcgaaggctggcccccgaagggttcacagccgccttag

SEQ ID NO: 2639 - DNA, 288 bp, Zea mays
  Peptide Sequence Number=SeqID_44418
atgccccatcatcgtcgcagtcgtgggaggaatcgagccaaacgccaccgctacaccctctccccactaccagcgctaggagtcgggcaactaggcgaaggatccgcgctccaacgcaagtccgccgacggccatcttccccaacaccatccgggttccggtctgatccgatggcccatcatggccgataccccttcactttgccagttcgcagaagagaccctagaaaacataagaatcaaccctgttggaacttgctcccaactgcaaggtggccaacaagggtga

SEQ ID NO: 2640 - DNA, 603 bp, Zea mays
  Peptide Sequence Number=SeqID_44419
atggccgcggacgccatggccgcgagctccgagggcgggcgcgaccgcgccacggggaaggcgccgacgagcgcaggggagagggagggagggggagaggagagggaggagggggagcttaccgcgcgggggcgagcaccggcggcggcggttcgacgagcgaggcagggagcggggcgggtcgggcggggggaggggagagaggggtttggggagggggagagcctgacgagtgggccccaccaggagggcggcggcgactggcaaccgcccaacgcgccgcgcgcgggggacgtggggggccgttggggcggctgggccgcggctgggccgcaaggccagctgggccacccgcgaggcccacagctgggccgcccgcgaggggggcgactgggccaaaagggaggagaggggggaagagaaaaagaaaaagcacttgagcctcaccacgtcctcgcgagcacaaggcacccacccccttctcctattgcgcccggcagcctcatcggcgatctcccccgccgcgggcgccgccacctcgtcgtggaccggccatcccaagcgccctccggccaaattggccctaccaccgtgatcccctga

SEQ ID NO: 2641 - DNA, 171 bp, Zea mays
  Peptide Sequence Number=SeqID_44420
atggggactaggttctttagaaccgaacctcggtttcgcctagtcaccccctctaagcgacattcaagtggcgtaagccctccattcgtgccgattctcctcgccgccatagcggatgatgccctcgtcaatgaggtgttgaacgccttcaccgacatttttgccgagtag

SEQ ID NO: 2642 - DNA, 546 bp, Zea mays
  Peptide Sequence Number=SeqID_44421
atggacacaaaaacagcaaggatagcgggatgtctcaccgaggagctgctgctgggggaggatgagaggaggctggccaaagttggagtgcgcagcttgctatcggaggtggaagaaagggggcgctgcagggacatgggagcgactggagggggcgccggccatggggaggctgttggcggcctaggggagagcaggggcgtcgggaggtggagctgctactcagccatagggaagaagggggaggggcgccatggttgggtgctcggctgctcgagcttcgccggcgccatgggagccgggagcgcgcgccaggaggaggatagggagggcgctcggctgctcgccatggacagcagagagagggaggaagggatgggcgccatgggagcagcttcagcgcgccaaggaagaagggcgtcctgctgcaggggtgccgagcgcagggagcagagggccagccatgggagagaggccagcgccctgggaggagctcagcggcatgggagcttggagctcggccccctgcctgctgccgtgccatga

SEQ ID NO: 2643 - DNA, 882 bp, Zea mays
  Peptide Sequence Number=SeqID_44422
atgaccattggacttgcctccaaaaagctacataatttctgctctcgcctagcgcactcgaccgggaacagggacgagtccttcaggatcctgactgggcacttccaaaacgggcaagcactggacctccacatcgatcccttcacgcagtaccagcaccagcgccagcaacagcaacagctgtggtttcagcacaagaagggccaggaagaagcgcagctgcgtttcttggacggtgagcgcggctactccggcggacatggcgaccaacaggccggcttcaacggcggtgtccccatcacggaggagttctacagcgccaacatcagcgggggccacaacgacgacctcgccaggtcgctgttcccgggcatggatcaccagaaggcgatgcggttcatggatgacaaagaagctatgttcagaaagttggcgcctgggcagctgaagcccgtggatgggctgcaggagctgtgcggatggatggaaggccgcgacctgaagcgcgcggcggtgacgaacgccccgagggcgaacgccgagctgatgctgtcgctgttgggcctcaccgacttcttcccggtgctcgtcatcgggagcgagtgcgaccgggccaagccgttccctgacccgtacctcaaggcgctccagctcatcggcgcatcgcctcaacacaccttcatatttgaagactctgcatcgggggtccgggccggtgtggctgccggagtgcccgtggttggcctgacgacgaggaaccccgggaaggtgctgaaagacgcaggggccagcttgctggtcaaggattttcaggacccggagctgatgtccgtgcttcaacaggtggaggtcgaacccgcagcggcgaatgcgcaaggctga

SEQ ID NO: 2644 - DNA, 939 bp, Zea mays
  Peptide Sequence Number=SeqID_44423
atggtcatcgccaccaagttcgcctctggccaggaggcggttgaggccatcttccggaaggacaagcagccccagggccgccagccggaagatgttcccgaggcgtccactcagcgcggcaccaagaagaaaggcaagaagaagtcgcaagcgaaacacgacgccgccgacgcggaccttgtcgtcgccgctgagtacaagaaccctcggaaacctcccagaggcgccaatctcttcgacaagatgctcaaggagtcgtgcccctatcatcagggacccgtcaagcacacccttgaggagtgcgtcatgcttcggcgccactttcacaaggccgggccacctacggagggtggtagggcccgcaacgacgacgacaaaaaggaagatcacaaggcagaggagttccccgaggtccgtgactgcttcatgatctacggtgggcaagtggcgaacgcctcggctcggcaccgcaagcaagagcgtcgggaggtctgctcgataaaggtggcggtgacagtctacctagactggtccgacaagcccatcaccttcgaccagggcgatcaccccgaccgcgtgccgagcccggggaaatatccgctcgttgtcgaccccgtcatcggcaacgtcaggctcaccaaggtcctcatggacggaggcagcagcctcaacatcatctacgccgagaccctcgggctcctgcagatcgatctatcctcggtccgggccggtgcggcgccttttcacgggatcatccccgggaaacgcgtccaacccctcggacaactcgatctgcccgtctgcttcgggactccctccaacttcagaagggaaaccctcacattcgaggtggtcgggttccgaggaacctaccacgcagtgctggggaggccatgctacgccaagttgagagcacctggagggggggtgaatatgtga

SEQ ID NO: 2645 - DNA, 1629 bp, Zea mays
  Peptide Sequence Number=SeqID_44424
atggacgacgaccacgaccacgacgcgtcgtcgccggccgccggggagcggtgcccgtgctgctcctccccctcctcctcgccggccgtgccgtggcggcggtccgtgaagcggaagctgggcgcggagaagggggaggagggcggggaggcggggcccacggcgcgggtcgaggcggaggacgagtgcgcggcgctgcgggaggcggtggcggcggcccagtccacggcgtcggcgctgcgggccgaggtcgaggaggagcgcctcgccgcggccagcgccgccagcgaggccatggccatgatgctccgcctgcagcgcgacaaggccgaggtccagatggagctccgccagttccgccgcttcgccgacgagaagatggcgctcgacgccgcggacatcgaccagctgcgcgcgctcctcgcccagcgcgcgcgccgcctggtgcgcctccgcgccaggctccgcgagtacaggcgccagttcctccacctcggcatcccgctccccgagggcgaggacctcctgttcgcccagaccgccgccgaggaggaagaggacctactcctcctcgagggcgaggacggctacgccgatggcgatggcgatggtgatggagggtactaccctcagctccgctgcaacgacggggagtactactacgaggacgaggaggaagaagatgcggttgccctcgatctggagcgccggatctgccgcctcgagcacgatcaggaaactcccctgcttgagccaccccttcaggaagacgaagaggaaggcacccacctctacacagaagaggcgttgccggacttgtctgggcatgagcagggtggcctctatgctgatgacatgttatctgtggacggtgtggaagaactgagcgacctccacaatgacgatgaagagctgccagagtctcctactgctggccgtggtgatagggtggaagcaagcgaggctgatggtgttgacagtggcagtgatagggtatacaccattgacaaggtgcatcaaggtgagtctgcgcctattgcaagggtcatggataagtaccagggtgaggcggtggagccagacattaagaagctttacatgaggctggaggcactggaggctgatagggagtcgatgaggcaggcccttgtggcaatgcgcacagagaaggcacaacttgttcttctttgtgagattgcgcagcatcttgccaaggatggagttccagctggggtggggccaggtgtacaccgttcccctagaaaacgagcagttgggattgtagaaaggagattcacggaggacaagagggtggcactcctcaagacatattccgtggttgccttgtttaagtttatttcattaggggccaaatgggtcctcactttatttggcaagaaaaagaagctatctcaaagcaggtatacttttggcttatcaagtaataatgttggtttgctcctactcttggataagtgcccacggatccagaaaaccctcatgagaacaaaatttgctggattggcaaatctgttaaccagaaatttgtgtaaaattcctgatctgaaccgcccttccaaaatatatgcaggtggagccaatacagatccagacgtccagtacaggtaa

SEQ ID NO: 2646 - DNA, 3135 bp, Zea mays
  Peptide Sequence Number=SeqID_44425
atggcggcggtggagagggccgacgagtcggcggcgaccgcggcgggtgacccgcgccacgtccgcaacacgtgcatcctcgcgcacgtggaccacggcaagaccacgctggccgaccacctggtggcgtcttgcggggacgggctcctccacccgaagctcgccggacggctccgcttcatggactacctcgacgaggagcagcggcgggctatcaccatgaagtccgccgccatcgcgctccgctcccgggccggccaccgcatcagcctcatcgactccccgggccacatcgacttctgttccgaggtctcctccgctgcgcgcctttcggactcggcgctcattctcgtcgacgccgtcgagggggtgcacatccagacgcacgccgcgctgcgccaggccttcatcgagcgcctccggccctgcctcgtgctcaacaaaatcgaccgccttatcaccgagctcagcctcacccccgccgaggcctacgtccgcctccaccgcatcgtctccgacgtcaactctatctattccgcgctccgctcccactcctacttctccctcctctccgcactggaggacaacccctccacaagctcttcgtcctcagctgaggacctaccggaggactttgaagacgacgatgacaacgaggacgccttccagcccctcaagggcaatgtcgtcttcgcctgtgcacttgacggctggggctttcgcccccaacagttcgccaacctctacgccagaaagatcggggtcaacccctctgccttcctgaaaggattgtggggccccagatatctagataagaagacggggaaggttgtagggaagaaagccatcaagagctcagacccacagccaatgttcgtggagtttgtgctaagtgccctgtggaagatgtacgagctggtgctgaaggatggtggtgagagtaagggggtgaagaaattgattgtaaactttgacttgaaaattcccgaacgagagctgaagaacagagatacaaaggctgtgctgcagtccgtcatgagccggtggctgccgctggcagatgctgtgatggatatggtggtggagtgcacgcctgatcctgttgctgctcaaggggtcagggttgcaaggcttatgccaaagagggaggttactccagaagatgctgctggatgccctgaggttgtttcggaggcagagagggtgcggaggtgtgttgaggcctgtgatgtgagtgctgatgcgccagtggtagtttatgtgtcaaagatgtttgctgtgccatctaagatgttgccattgaagggagtgtatggggaactattgaaccaccaaagtaccagtgagtcagaggagtgctttatggcatttgcgagggtcttcagtggcgtccttcatgcagggcagaaggtatttgtgctatcaccattgtatgatccagtaaaaggggatacggttcagaagcatgtgcaggaggtggagctgcaatacttgtatgagatgctaggacaaggcctgaagccagttgccagcgtgggtgcagggaatgtggttgcaatccagggtcttgggcagcatatattgaagagcgccacattgtcgtccaccaagaattgctggcccttctcgagcatgatgttccaggcgtctccgatgcttaaggttgcaattgagccctcaaatccagctgatttaggagctcttgttaaagggcttaggcttcttaaccgggcagacccatttgttgagtatacagtttcgcagaggggcgagcatgtccttgctgctgctggtgagatacatttggagcggtgcataaaggatttggaggagagattttcaaaggtcaaattggtggtctcagaccccctagtttcttttaaggagacaatcgaagggatgggtgtcagtttagtggagagcttgaagaacccacaggagtttgttgagaggactactccaaatggtaggtgtactgtgcgagtccaggtcttgaggcttcccattgccctgactaaggtccttgaggaaagtgaacagttgcttggtcaaataattgatgggaaaacagcaaaaagggatggtgttttggatcctcgcctttctcaggaagatggtgattccgctgcaactctaagacagcggatgatcgatgccatagacagtgaattagaagcaatatctaagcaagttgataaagaaaaactcgacaggtatagaaagacatggcttggacaccttgaaagaatctggtcactaggtccttggcaggttggtccaaatatccttcttttggctgaatcaaaatcaagtggtggtgcagtaactgtccaggatggaaggcaaggtgtacttgtgagtggtccagctcatgtctctgagaaattggggtttgtgagggattgcgataccaaaaataacaacaatcttgacaatggtgaatatgcaacggatgctcctgaatcattgcatatagagtctacaacactaaggaacagcattgtctcaggattccagattgccactaatgctgggcctttatgtgatgaacctatgtggggtcttgcgtttattgttgagccttacatatttgctgatggctctgatgctgccaaccaatctgatcaatacaatgtcttcagcggtcaagtaatcactgcggttaaagaagcatgcagagcagctgttcttcagaacaagccaaggcttgttgaggctatgtatttctgtgagttgaccacgccaaccgagcagttaggtgcaacttatgcagttcttggtaagaggcgggcaaggattctgaaagaagagatgcaagaaggaacctcgttatttacagtgcacgcttacctgccagttgcggagagcgttggattttcgaatcaacttaggagtttaactgcaggtgcagttagtgctctcctcgttcttagccactgggaagctattcctgaggaccccttctttgtcccaaagacgcaggatgagctcgaagaattcggggatggttcaagcattgggccaaacttggctaaaaagcttatgaattctgtcagacgaaggaaaggactgcatgtcgaagagaaagttgtggagcatggcacaaaacagcggactctcgctaaaaaagtgtag

SEQ ID NO: 2647 - DNA, 870 bp, Zea mays
  Peptide Sequence Number=SeqID_44426
atggcggggttggcgaggcacgggacaaactggatcgcttggatcatgataccaggttgtcaagggcgttgggggatagagtggccggccctcggctacgtagatcatagcggcgtatacaggttctacacatctgttctctttcatggttctttgcttcatgtgctattcaacatgcttgccttggtacccttgggcactgagttggagagaatcatgggatcagtccgtctcttattcttgatgctccttcttgcaacaacaaatgcaattctccatctcacaattgctttcttggtggcttacaatcctctgtatcacgttccaaatcttgtgaatgaatgctccattggcttttctggagttatattctcaatgattgtcattgagacaagtctgagtggtgtgcaatcacgaagtgtcttcggcctcttcaatgttcctgcaaaatggtactcttttttttttgcatgtgttgatgacacttatgggctgttcaactacttgcttcctgggccatcattttattctaaaatcgaaggcttgtcagcactatctgtttgtgtgaggcgtcctggctttattatgtgtactggaggcactacttatggtcagcttcctacatactctaacacgtctgctgcaccaagtgctctcataaatggaaatttcttgagaaatatatcttcatggatgcctagcagacacacatcaactgctcaggaaggagaagacccaaggtttcctgggagagcacgaacacttggttctgtaggaactgaacccactgcaagggaggcaagtgcgcatttgcatgctaggttgttggataacacaactccaagtgacccactaacgaatacacagtaa

SEQ ID NO: 2648 - DNA, 1578 bp, Zea mays
  Peptide Sequence Number=SeqID_44427
atgcctgacataccgagggatgtcgccgagcactcgctggatatccgagctggagcccgacccgtgaagcaacctctgcgccgattcgatgaagaaaagcgcagagccataggcgaggagatccataagctgatggccgcagggttcatcaaagcggtattccatcccgaatggcttgccaaccctatgcttgtgagaaagaaaggaaggaaatggcggatgtgtgtagactacactggtctaaacaaagcatgtccaaaagttccctatcttctgcctcgcatcgatcaaatcgtggattccactgctgggtgcgaaaccctgtctttcctcgatgcctacccagggtatcaccaaatcaggatgaaagagtccgaccagctcgcgacttctttcatcacaccttttggcatgtactgctacgttactatgccatttggtttgaggaatgcgggtgtgacgtaccaaaggtgcatgaaccacgtgttcggcgaacacattggtcgaacggtcgaggcttacgtcgatgacatagtagtcaagacgaggaaaacctccgacctcctttccgaccttgaaacgacattctggtgtttcaaggcgaaaggcgtaaaactcaatcccgagaagtgcgtcttcggagtcccccgaggcatgctcttggggttcatcatctccgagcggggcatcgaggccaacccggagaaaatcgcggccatcaccaacatggggcccatcaaggacttgaaaggcgtacagagggtcatgggatgccttgcggctctgagccgtttcatctcgcgcctcggcgaaagaggcctacctctgtaccgcctcttaagaaagaccgagtgcttcacttggaccctcgaggccgaggaagccctcaggaacctgaaggcgctccttacgaacgcgcccatcttggtgccccccgccaccggagaagccctcttgatctacgtcgccgctaccactcaggtggtcagcgccgcgatcgtggttgagagacgagaagaagggcatgcattgcccgtccagaggccggtttacttcatcagtgaggtactgtccgagaccaagatccgctacccgcaaattcagaagctgttgtacgcggtgatcctaacgcgaaggaagttgcgacactacttcgagtctcatccggtgactgtggtgtcatccttccccctaggggagatcatccagtgccgagaggcctcaggtaggattgcaaagtgggcggtggaaatcatgggcgagacaatctcgttcgcccctcagaaggccatcaagtcccaagtcttggcggactttgtggctgaatgggtcgacacccagctcccaacggctccgatcgaaccgaaactctggaccatgtttttcgatgggtcgctgatgaaaacaggggcaggcgcgggcctgctcttcatctcgcccctcaggaagcacctccgctacgtgttgcgcctccatttcccggtgtccaacaatgtggccgagtacaaggctctggtcaacgggttgcacatcgccatcgagctaggggtccagcgcctcgacgctcgcggcgactga

SEQ ID NO: 2649 - DNA, 1182 bp, Zea mays
  Peptide Sequence Number=SeqID_44428
atggcttcgccggacctcgccgccggcgacggcagctacgactttcaccttcgctctctctccgcggcctcacgggactccgctgcggcctccgaccccgcctctgaccccaacctcctccaatctgttaggagggtgtgcgagatgtgccgaacggcgaaggaagcgaaggacgagatggtggcgcgggcgttccccgtgatgggcaagctatttcagcgatgcgccgccgctcccacgcaggccgttgcctccaccggcgtgctgctcctcggcttatccctggttgttagtcaggtgttggtggtggcactggaaaaggtggaaagaagttctggaactcttattggtagtagtatagctacaatccagaagagcgctgctcctgagatgcttcttgcactgatggacgaggcatatactggttctgccgtagaagaacctagtggtaattcaggttctgatgatagtggtcccctagaccttactgacccaatgttcttagaccttctaaaagatgagaatgatggcattgccgcaaaacattggatatcccctacgatatcttcaacgttacaagcagcatttaacagcccacagtcggacagattgaaacagtcactggaaatggcacctcgctttcttactttatattttgcaacagcattgcgagacgttaatgactcactgctgtgtgctcttattccagtagttatgtcaagatatgctgcaatgttcccagacaaagttttctctttcaaggtgagggaaaggctttcagacttcattttggctgcattccagcggtctcccaacatcattgcagtactgaagaaacctattactgacagacttggtgaggctcatgataatcttgccaaggcaagtatatctttcaaaaagtcatcccaagccaggcttctctgctttgtggtgactgctattgcaaaattagcaacatgccacagtgagttgcttccgagggcacgcgtgtcattgggtaaggtcgctcgttcccgaacctcagacaggagggtctggcaacgggcctgtgactatttagggctcatgaatgaaccagccatctgtttatctgtactgggaccgtccaccgcccaaggaaatggtcctggtccaccgtctcataatttttcatttgccgacctcctcccaacagaatga

SEQ ID NO: 2650 - DNA, 249 bp, Zea mays
  Peptide Sequence Number=SeqID_44429
atggagaaatgtagttgtagttgtagactctgcatagtagacatttgtgatgttcataggtggtatggttctcttgttggccaaaaaggcgtcattggggtcccgattggttggaggacggcagctttctgttctgcagatgctggtgtgtgccttgttgaccaggggtgtttgttggctgttacgggcatggcgcgtcaccgagtctggtctgctgtgcttctggttctggcgtgcaggagggtgtga

SEQ ID NO: 2651 - DNA, 2070 bp, Zea mays
  Peptide Sequence Number=SeqID_44430
atggccagtttcttcaaggaatgcccgcacccggacgacaagcagcgcaaggagctgagtcgggagctgggtctggtacccctccaggtcaagttctggttccagaacaagcgcacgcaaatgaagaaccagcacgagcggcaggagaactcgcagctgagggcggagaacgagaagctgcgcgcggagaacatgcggtacaaggaggccctcagcagcgcgtcctgccccaactgcggcgggccggccgcgctcggcgagatgtccttcgacgagcaccacctccgcgtcgagaacgcgcggctccgggaggagatcgacaggatctccgccatcgccgccaagtacgtgggcaagcccatggtgtccttccccgtgctgtccagcccgctcgctggggcgcgtccgtcgccgctggacatcgacagcggtggcgtactggggggtgctgccacttatggcggcgccgctgacatcttcggcggcggcggcggcgtcgctgcttgtggtgcggccagggattgtgacaagcctatgattgtggagctggctgtgacggccatggaggagctggttcggatggcgcagctggacgagccgctgtggaacgcgccggcaggcgggcacgacgggtctgctgagacgctgaacgaggaggagtacgcgcgcatgttcgtccctgctggagggctcgggctaaaaaagcagtacgggttcaagtcggaggcgtcgcgcgacagctccgtcgtcatcatgacccatgccagcctcgtcgagatcctcatggacgtgaatcagtatgcgacggtgttctcgagcatcgtgtcgagagctgcgacgctggaggtgctgtccaccggcgtggctgggaactacaatggcgcattgcaagtgatgtcggttgagtttcaggtgccttccccactggtgccgactagggatagctatttcgtgaggtactgcaagcagaacgcggatggaacatgggccgtcgtcgacgtctcgctggacaccagctcagtcctcaagtgccggcgccggccgtcgggatgcctgatccaggaaatgcccaatggctactcaaaggtgacctgggtggaacacgtcgaggtggatgacaggtcggtaaacggcatctacaaactgctggtggactcagggctcgccttcggtgcacgccgatgggtcggaacgctggaccgccagtgcgagcgccttgccagtgtcatggccagcaacattccgaccagtgacatcggcgtgatcactagcacggaggggaggaagagcatgctgaagctggctgagaggatggtgacgagcttctgcggtggcgtgacggcctcagccgcgcaccagtggacgacgctgtccggcagtggtgctgacgacgtccgtgtcatgaccaggaagagcgtcgacgaccctggcaggccgccgggcatagtcctcaatgctgccacctctttctggctccctatcacacccaagcgtgtcttcgacttcctccgtgacgaaagctctcgcagcgaggcacgcacccgcgcgcccacccatacccagtttttttttaatcgagaacactgggacatcctctccaatggcggcgtcgttcaagaaatggctcacattgccaatggccgcgaccatggcaactgcgtctcgcttcttcgtgtcaatcagagcaccaactcgacccaaagcaacatgctgatcctgcaagagagctgcacggacgcctcgggctcgtacgtcatctatgcgccggtggacgtggtggccatgaacgtggtcctcaacggcggcgaccccgactacgtggcgctcctgccctctggcttcgccatcctgcccgacggcccgtcaggcagcagcaacatgcaaggcggtggcggtggcggcgtcggctcaggcgggtcgctcctgacggtggcgttccagatcttggtcgactccgtccccaccgccaagctctcgctggggtcggtggcgaccgtgaacagcctcatcgcccgcaccgtggagcgcatcaaggcggcggtctccggcgagagtgttacccagcagtag

SEQ ID NO: 2652 - DNA, 645 bp, Zea mays
  Peptide Sequence Number=SeqID_44431
atgacggcgtcgagctcgattgggtccaggggaggaagatggagtggtcgaggtcggtgtggggaaataaggggctcggggcagtccttttataggtggccgaggagggaggaggaagaggtggcgagcaccggcgaggcttgctgcggcggtgatgatggcacacagtggtggcaccaggatggctcggggcaggcggtggcgatgggacgactcggtcacagtgcgcggggatgcaagacgccaattcgtgctcgtgagcgagttaatggcgaggagacagggcgagcggtggccgacgacgaacgcgtcgatggccgatcacgggcgagggagaaagaggctgacgagtgggggccgcctgccagagagagggcggtcgcgagggagaaaggacggcgtccttgcggaggcgaggcgtccgggtcggcgttcgcatccgtctacgtcgaggctagacgtgttgccactgccacgacaggtggccacttgcatgaggatccggatctcgtatcacgacgctgggttcatgaggaagaagacagagtcgagccacttgttgcctcgcaccgtggagccatagaacatggcgctgccagcccgcacggcggtcggcgtgacctcgccagtgatctccgtgaatag

SEQ ID NO: 2653 - DNA, 1413 bp, Zea mays
  Peptide Sequence Number=SeqID_44432
atggccaccgccgcaccgggcgtgtgcgccgccgcccggggtcgagctgggaccgagacaaacctttttgaacgatctaggcttcctggaattaggaacgtggatttgttgtggagtctactctcgagaatcttgtctaagttgctcggtcttcctggtattttgctgaagaaattccgaaaggaaggtgtgacggaattagatgctactgcattgctagagctaccacaggatgtgttgatggacatctttggtacacttgaggtccctgacctcatccgagcaggctcggtttgctcgtcatggtatgctacctacaaatgcttgctcgacctgaggcaatacaagcaaccccagacaccatgcttgttctacacttgtgaatctgccggtagcaacgtagggtttctatacagcctcaaggaaaataggtcctacaagttaactctaccggagccacccatccgcagtaggttactgatcgggtcctccaacggttggttgattactgcagatgagaggtctgaactgcaccttgtgaatcccataactggagaacaggttgcacttccctctgtgattaccatagagcatgtgaagcccatctttgatgcatcaggtactatccatatgtacgagttatcatatgagacaccacccgacctgtttgatcttggcgatctgcgcgatgagctctacttcaaggcatttgtatttcccgatccatccaccactggaagctacatcgtggttcttattcacgagccatattcacggctttcgtttgcacgaccgggagatgacaagtggacctgggttggacaaggtagccaatataaagactgcacatatgtggatggccttttgtatacagtgaattactctggagaaattgatgcgtttgattttaccgcgtcccctgttaaaatgacagtaattctgaaagagctgaagtatcctgtatgtgaaaacatgtacattattcaggctccatggggtgatctgttgcatgtttggaggactcttggcgttccacccaatgctccatcgtgggtccctggaaaatgcttgttcgaaaccttaaaaatacaagtgcataaagtggacttggaagcaaagcaacgggtggaaataaacaggttgcagtgtgatagtgttttatttcttggccacaacgattcactttgccttagtgctcaagtacacccagaactcaagtcaaatcatgcatacttcactgacgattttaaagaagtgactgttttattaaaaaattgcatacgtgatatgggagttatggacttggaaaatagtgtcaacaagaaaattgtctctcaaatttggtccaactggccctgtcccacttggataacacccaatcttatgaaactgaatcaggccttcaacagatag

SEQ ID NO: 2654 - DNA, 702 bp, Zea mays
  Peptide Sequence Number=SeqID_44433
atggcgaaggcggcgcaggggggcaacgttgtggaggtcgagagccacgcgctaggtggggaagacgatttgcgcgacatcggcgttgtgcagggcgtgagctacacgcggttggggaagaaagcttgcgcgacatcgtggggcatgagcagggacggaggagaagctgccaccgtgcgtggattagggaagacagcgggcttagaaggaggtagtttgcatcttccgttgctggaccctaacatgcgtgcgacaccattgactccatcagagtggaaggaaagacttgaagctaggacatgccttgatgtgtcctcaggcgaaacatctggaagggggcttttgctgcttgatgtgaggaatgattatgaatgggatgttgggcactttgaaggtgctcagcggcctaatgtggactgcttcagaagcacttcctttggactttcgggagagacagatcctctaaatggtgtagacaaagagaggacagatatactaatgtactgcaccggggggataagatgtgatgtgtattcaacaattcttagaaagaagggctttccgaatccggatacacgggagggaggagtgtccaactaccccaaggcggaggggccaacagggtgggtgggaaatctctttgtctttgatggccggctctcgttgcccccagccactttcaaggaagaagaagatgagtag

SEQ ID NO: 2655 - DNA, 1860 bp, Zea mays
  Peptide Sequence Number=SeqID_44434
atggccgcgacgcacgtcctgcacagcttctggcgacgccaccggtggacggtcctgcgctccctgctccttgtcgctctgctccaccgtctccatctcttggccttcctcgccgcctcctcgcccgtctggctgctcaccgccttccttctcggcgcagtcctcgtcaacagcgaacccaacgtccccctcgcggtcgcggcggcattagaggatcatgagggccgccacctcaccaccgccggcacggggcccagctccagctccagctcctcggacgacggcgccaacgaatccgaggaggacgtggatgaggaccacctcgtcgtcgacaaaaaggaggccgttgcctggacggcggacgacgagcatagcatccagagcatcgggtcgctggagctggagaggaacgccaggctggagaagctcatgtccaggataactgtccatcggggcctcaccgacctcgatgtccacacccccgccgtgctggcgcccaggaccaagaaccccttcgacctcgacctcgaccacgacgcagctatggacgcccccggctccgccccgtcgtccttgctcggccagcacaccaacccattcgacatccacatccagcaaccggacgaggtggaggaggaggacgacgacaagaaagcggcaatgctggtgggacggcacgacagcttcacggcccagccatcgcgcttcatgccctactttgtcgccgacgtcccggaggaagaaggcggcggcggcagcggcagggacgccggcagcgacaactccaactccaactcctccagcccgtcagcctctacggccagcgatcaccagactcaacaagaagccgcagtcaaagtagaagaagcacctgcggcaatggcatcgacgtgggacggcaaggggaacgggacggtggtggcggtggacgtggagctcatcagtgattcctctgacgacgacatgtcgctgcaggctgacgatgccaccggcggcagcctgaacaatgcccatgatccctcggacgaggacgaggaggactcgttcgaggtggagagcatcacgcagcaagtagctgcagccaagcagcagctgcagcccgtgtcgcctccgtcagagcaggggcaccgggacgaagaagacaaagaggtcgcgagcatcgtcagcggccgcaacgagtgggtgccgctcactacgttggtgtcagtggaagagaaggagaagggggagagggggctcacagagaacagggagcaccatatattgggcgctgttccggccatcgacgcctccgctggtgctcgagttggagctgcaggtgcagtggtcgcagccgcaccaacaccaccggcaacagatgttgcttcaggaccaccacctgtaacggcagcagcaccaacaccgcggccaactactgtggcgccaccaaccccaccggcaacagatgctgctgcaggaccaccacctgtagcagcagcaccaccaccaccggcaacagatgttgcttcaggaccaccacctgtagcagcagcaccaccaccgcggccaactactgtggcggcaccaccaccaccggcaacagatgttgcttcaggaccaccacaaccggcagcagcagcaccaccacggccaactgccgcggtagcatcagcaccaccatcagggaagctgagcagcaaatccaaggtggcctccaagaagatagaccccaagaaggctgtcttcggcttcttccgaaaatacaaaagacattataacttggaatggagggagtacttaccagtaaaaggatggatgatgctttatgcttcgatcttggtatcggtgacagatttcacacgcaaaccatcttattcttaa

SEQ ID NO: 2656 - DNA, 927 bp, Zea mays
  Peptide Sequence Number=SeqID_44435
atggtggtggcgtgtggggcggggtacggggaggtgagggtgagggtatggcggctggcaggcggcgtgcgggtggttcgcgcggcggcatttgcggcgtgcgtgcggtgcggctggcaggcggcgtgcgggtggttcgcgcgggcggttcgcgcggcggcattcgcggcgggcgtgcggagcagtagcggcgggctgttcgcggcggcagcagtctacagtattgttgtgaccccgttccgttcagtcatcctccggccggccggccgccgattcttgatgcccgccaccgtttgcagggtgaaccagatcgatttcgaggaggtcacggtggatctgttcaagtctcagcacctcacacccgaattcaaaaaaataaacccaatgggacaggtacctgcaattgttgatggaagattcaaactatttgaaaggtatccttctgacttgttcaccagagccaaaattgagtcaatcttggattggcatcactcaaatttgcggcgtggtgcagcaacccttgtaatgcacactgcattggctcccttccttggtcttacgacaagtcatgaggctgtgaaacaagcagagaagcttgtgatgcagtcactgggggtgatcgaatccgtatggctgaaaggcgatgccaagttcttgctaggtatcccccagccatcgattgcagatctgagccttgtctgtgagataatgcagttggagatccttggcgatgaggtccgtgaccgattcctgggagctcatgagaggatccttgtctggatggacaaggtgaagaaagccacgagccctcattttgaggaagcccacgagctccttttccaagtgaagaaggcacgcatggtgcaaggcagcagcagcaaggcttttgagtcgagcacaaagctcaaaacagcatcaaagctctga

SEQ ID NO: 2657 - DNA, 1410 bp, Zea mays
  Peptide Sequence Number=SeqID_44436
atggagctggccgcgacgcgtgtaggcggtgataattgccgtccagagcacgacgtcggtttcgggagtggcgtggagcacggcgcgtgcggagaccatggcgccgcaagcggcgtacatgtggacgagcgcggtcttgaggaccaggccgaggtgggggccccagcagccccagcggaggagctgcgcgtggagctggctgccgtggcggtgcaagcgcatggaggcgcagggcgcgagcagcttggagaaggtgtgctgggtgggtgcgcaaagtgggagcatgcacgggtagagcgcgagcgccccgtggcagtccccggcgcggaggagggcggatatcatggcggtgtaggacacggtgtctgggcacggcatttcgctgaacaccctggtggcgccgttccactcctcgcagtcggcatagaagatgaggagggagcaagcgaggacggggttggaggcggtcaggccacgacggcacgcctgggcatgtatctggtacgcgaggcggcggtcgcggcaccggagcagggcggcataggcgaactggtcggaggcagcgacggcggggtgggctcggagaacgcggcggaagacgagccagagttcgttcccctacaggaggaggaggaggaggaggaggacgcccgattcgtcgtggtgaccttctacaaattcgtgcccctctttgacccccacgccgaggtcgccagacacctcaacttcctccagggacgcgacatacatggtcgcatttacttgaatgagaagggaatcaatgctcagtacagtggccctcacaaagatgcagtggcatatgcagactgggttaagaaacatcatcagttttctgatatgcttgttcaaacctcaccagctgtaactgggcatgcctttcctagactgaaactacggtacaaaccatcacttgttcaggagaaatttttagccctctgcttcaagattcaatcccgaagcttgtatgtcttagtcacttctttgcaaattcaaaagcttatacatggtgatgaccttccacagttctgcccccagtccccagttctggagttgaaagtgcagtgtaatattaataatatggcaaacacgacctggtggacgcttcggcgtcttcactcggacatcggtggcacgacagagccacgtcatgacaatctagtgtgggcagcggcggatccctatgtccacaactggctcctcaccaccgtcgcagatgatgtccttggccttaggctcgcccacgaaccagatcaaaccgcccaccaactttggacggtgattgtggacctcttccaggcgaacaaggccccctacgccatctttctcaatcatgagttccactccatgactcatatgacctcttcgtcgacgagtactgtcaggagatga

SEQ ID NO: 2658 - DNA, 1479 bp, Zea mays
  Peptide Sequence Number=SeqID_44437
atggaacgctctgctgtgcttcccaatgccttcacctacgcagcgctcatcgccgcctgctccgcggaccactcgctgcacatcggacagcagctccatggccgcctcttcaagtctggtctggagcacgacacctctgcttgcaatgcgctcctcgacttgtacagcaagtcctccgcacgttccctcgacttgctgcttgctttccacgcggctgacatgcccaacgtggtgacctggacttccttcattgctggactgatgcgccatggcagggaacaagaggcgcttgcggcatttgctcgtatgcgggctaccggagtgaagcccaactccttcaccctgtccactcttctgaaaggctgcacctccgcacatgcatgtctgcacgctgcaaagatccatgcctatgtgctcaagaccagttcggagtcattggacgcggctgccggaaactcgtttgttgatgtgtacgcaaggtctgcaagaatggatgacgcgtggaaggtggctaccacaatgtccttcgtgagggacagattcacatacacaagcctggccaaagggctgaatcagatggggcttcaccacagggcactcggcatgatacttcacatgttccacgaggaggttagtatcgacggtttcagcctagcttgcttcctttctgctgctgcgacattggcatccatagagtccgggaagcagctgcactgctgtgcagtgaaattgggattgagcggtcaggtatctctctccaacagcctcataaacatgtacagcaggtgcaagagtctggaggatgctaagagtgttttccagtcaatcagggaacccagtgtcgtgtcgtggaatgctataatctttgggatggcattcaacggctcttacactgaagcgttgtcagtttttgaagacatgattctggctggagctcagcctgatggggtcactttcacagttgtgctttctgcctgcagccatggtggcttagttgacattggcatcaaacacttcaactctatggcgaatatgtttgatgtccccccacaaaagagccactatacattgttcctggatatgctaggacgatcaggccgctttacagaggtggcacacaccatcgaggccatgcccgtccagccagacttatcaatttacaggaccctgctggcatccgccgtgctcctcggatacaagatcatgacgaacagatatatttgtgggatgaagagggatgcaggcatccaagttctgtgctgccgatcaattgctgaaaaccgagcttgggttcttgttaagtattcccatggaaatttctggcatggcattctatcatcttttaatctaggatatcttattcctagtcctgtggaggcctcctttgcagagtggtggggaggagtgatcaatcagatccataaagacaagaagaagggcttcaacattgctatcatccttggggcattgtgcctttga

SEQ ID NO: 2659 - DNA, 786 bp, Zea mays
  Peptide Sequence Number=SeqID_44438
atgcccctgactccatccccaccgtccgattgccggatccacccctacatgcctcatctgccatccatcttcgcgcccccgcatgccttgctcccgctcccgccatgcgcgcagccgctccgcccaacaaccatgcgggatcctcacccaacagccatgcgcgccgactatgcctccaccggatccggccttcctatcgccatcccatcgtccaacagggatccacccccgcatgcctcgctcccgcgccctgcatgcctagcgccggatccgccgtcgggctcggactcgggctcagccccggaagacggcgaactccgcctccgccccgacccagggctcggactcgggctcagccccagaagacggcgaactccgctccgcccgacccagggctcggactcgggctcagccccggaagacggcgaactccgctccgcccgacccagggctcggactcgggctcagccccggaagacgacgaactccgtttcgcccgaccccagggctcggacccagccctggcctcagccgacagtctccgcctcgcccgacccagggggctcggactcgacctcggcctcggaagacagactcgacctcgacctcggaggagcctccacatcgcccaacctagggcgcggaccgaccacacaagcaatgatggcgccccacacgctctatgacgacggcggctctcagcccccttacggaagcaagaggacgtcagcaaggactcgacagctccgacagctgtccttccgccaggctccagcgctcctctga

SEQ ID NO: 2660 - DNA, 3054 bp, Zea mays
  Peptide Sequence Number=SeqID_44439
atgtctgcacgctccgaatttcctccgtttaatccttctggcattatgtttatgggggacaacatgaagcagactatggaatctatgtctgtttccaacggagatgcaaatggcgaagatgcttctaaagcagatcaaaggacatctcagcactctggtgctccccatgagttcttccatggtccatatcagtcagcatatccaccatgggcaatgcatccaccttactctatgcaaggcatgccttactatcctggaatgaacccatattacccttccccctaccccccaatggatgagaccaggtaccacccctcagaaaggagagtatcaaagaaacactcagatagcaaggactcagaaacttcagatgataaaagtgaccagagtggttcagagagggaaacttcttatggtcacaggtcccataaaaaagataaaagggcaggtaagaagaagcctagtgtggttgtcatccgaaatatcaatgtaacatcgaaaaggcacggatcatcagacagtgactcacaaacaggttcagatgtagtatcagaggatagcgacgattcacacgccaagtccagaaagaaaaagaataatagctcaagttcaaagaaaaaagatgctaggaagatggttttcgagtctgcagatgaatatagcaagaatggaatgtcatatgggcaagatggagaccaagggagctggaatgttttccagagtttcctgctaagagctgatgagaaaagagataatgacgcggacctattcgccagtgagaaaaaagcacccccagcaaggatgaaggagagcacaagcgttgatgttgattcaattctcttggtggagcaaaattctgctggggccaatgaacataatacaacaggtttcagtatggaaaatgagaggattagaccccagcagatgctgtctggtgatgaacttatgatgtatggggaaggtgaaggcatgagctttggatgtgatgacataaaggagattgaagctggaggtgtgagatacagaagaggaacaagtgatgacttcatgatatatggacaggaaaagtcaatggacagagggagttctttggatcctcttgcagaagcacagtacaagagccccaccctggttgacaaaaatgtgcacagcttggcagatgaatcgtttatgatacctcttaggtctacctcagaggataaccatgaaccagaatgtcgtactgccattgacattgatgttgagcttccctcaactgttcagaagatatcagatgctaaagctggtagtcagcttttctatgagccagctgaattgatgccggagcgtggatgtgaagacgtttcgtttggatatgatccagcaatggattataatagtcagatacagagtcaatctgccaccatggttgaagatgcacatatggaagatgcattgttgagcactgtggatgaaataaagaagccagagaaagacaagaagctaagaagttcacaggagagtttggataaacgtagaaaagatgcttcagcgaggaggttgtcatcatcaaaaggcccgctgactgatgcacagaaacgcgcacaaaacttgcgaatatataaagcggaccttcagaaggcaaagaaagagcaggaagaggaacagatcaaacggctagaaaggcttaagctagagaggcaaaagaggattgctgcaagaagcagcacttccaatgcaccaacaccacagcagcccagagtaaagccttctcccaaggtttcccccagcacctacaagagctcaaagctcagcgataccgaacttgcatcctcttcacctctcagaaaatttcctatcaaaactaccccagggactgatcctgaaaaaacagcaaaatcaagcaaactaaatgacaatactaatgcagttagtaagccaaccttgacagacatgaaggagagaagtgggaggaccgaatcatccaacgagagattgagaaaacttgctgaacctaaaaccaacagttcgactggccatactttgaattccaagtcagcaagcgtggaccgcccgcggagaaaaagcatgccacaagatagccagacaaagaaaatttcagctataatgcagcttgaccagagtaaatcagcaacactaccagaactgaaggtcaaatactcgcaagctcctgctgttgtgaaaaatgcagtagctagtagagagagaaaagaggtttcagctggagctaaatctcttcgtacaacagaaactgctagtgtaaaggaaaccaacggtaacatctcaaggatgaacagcagcgacgataatgtggtggttgagaagaccgttgtgatgctcgaagatgaggcggtcattctacattctggaagaaatgcagcaaaggaaacttgtagtgatgacaggacagagaagcccagcccagaatcggagtacatagctatcagggctccgctgtctccagttattcttccggaggctgagagatctgatgacctggggagctcatatgaggtggtgactgagtgtctaaaggatgaacctgaggagccaaccttgggcgccgtggagaaaccttaccaggccccctttgctagggtgacatcgctggagaatgcatcagacaacagtccattacctgaatcacttgcgcatgcaaatagcattaaggctcgagtgcctgagcctgtgtacacagtttcagttgagggccatgtggtaagtgaaaagcctcgaagcaaagagccaaaaggcttgaggaaacttttgaaatttggcaggaaaagccatgctgagggcgcaatggattcatcagttgacgaagcctcagcaggagatggttcgatgctgaagaatctcatttctcaagatgactctggtgcgtcttcttcaaaaggttgtgtgcacaacttgtctcttgaatcgatttctaacaaccatgacctagtggtggtggtggaatgttcactatgcttgtttactgtttcatcagcttctcggtccttctccctactgtcaccgttccgcagcaagcacaaggtgattgttctgtga

SEQ ID NO: 2661 - DNA, 204 bp, Zea mays
  Peptide Sequence Number=SeqID_44440
atggccgtcgccgccgccgctccagcgtctgtggcgccgtccccggcgcccaaggccagcgacgacaggaaggcggtggtgcccgtggacgcgtcggagctagagaagcacgtgctggtggtggacgacagctccgtggaccgcatcgtgatcaccaggatcctgcgtggctccagatcacgttttacacttaaatccacctga

SEQ ID NO: 2662 - DNA, 162 bp, Zea mays
  Peptide Sequence Number=SeqID_44441
atggagaatactaaatacctgcgcagccggagcaccggagaagagaggaagatggagatctggccagcagagatggcctggccgcctgaggactggggagtgggccaccgagcctttgccgtgcctggtaaatcgttgggttgggctagtgagagcacctag

SEQ ID NO: 2663 - DNA, 321 bp, Zea mays
  Peptide Sequence Number=SeqID_44442
atggctaaaaattttggcagcgaaacagtgcaaatagcaatgaatgctgtgataacttcacacctactcgtctgtttatatagtgctgcagagacaaatgtgctaggtgtaactctagaactcactaacaagttagaacgaaaaccgatttcaaaaacagctgaaaaacaagaagtagggtttctggccctggggcaccggactgtccggtgtgcgccggactgtccgttgcaccctctgccaggtggggccaggctggcccagggaagaggctttcccacgcagaaacccgagagcgcaggtttcagagttgaattttag

SEQ ID NO: 2664 - DNA, 1224 bp, Zea mays
  Peptide Sequence Number=SeqID_44443
atggaggcgcaggcaaggcatgcgtgcaaaaaatcgcaggaaacagcgctcgccactggagctgctggtactatgatggccacggtgattgggaaaggtggctgctggcgccaccatggtcagcggtcatgtggaaggcgaggccgctacgtgcccgcctcctcctcacaaagccctaggcccctcacgacctcccttccccccgtgccgtccctctcgctgcccccgccgcccccgcgtcctcctatccacgccaatctctcctccgtcctcatacacatcacaagagcggggcacacgatgcgttgcattgcatggctccgccacacacaccccttgcataccgcatcagtgcgtgacaagaggatatatattatcagacacgcacgcgatcgcgcggagatgaaccagtgcgtgccgagctgggatctggtggacgacccgacggcggcggtagctggcggcggaggcggcctaaaccatcaggtctcgacgaccgggggcgcgcaccggggcctgctcctgcaggcgtcagctggaggagcaggcggcgggggcgcgttcgctcccgtcgtcgtgcccatgtcgaaccagtactacgaggtggcggagctgacgtgggagaagggcaacatctcctcccacggcctgctcaaccgcccggcgcacaataagtacccgcccgccgcggcgccgtcgtcggctcagctgcatgccatagcaggaggaggcggccgcggcggcgggtcgccatccggggaccgcgagacgctcgaggcggtggtcggcgaggcggccgcgcggtcgcacttcctctcgcagccggcgccgccgtggctgatcggcgccgacgccgtggcgcgggccgcggcggacgcgctagtgccgtgcgccgcaagggcgggcgagtccgctgcagacggcggagaagcgggcgcctcgaggaggaagcggccgcgcgtggtcggcgacgacagtctggtggtgtgcgccagccaggggagcaccgcgcctcgccgccgcggcgagagcgcgctgctcacgcagctggacgcctgcggcaccgaggccgacgacgtgtgcggcttcagaacgaccacaaccaacaactccacgtccatggaccgtgacgacaaaggctccccggatactgagaacaccagcatcggcggaggggccagtgattcgcgctgtttcagccgtcgctcacaggcaagcagctaa

SEQ ID NO: 2665 - DNA, 1392 bp, Zea mays
  Peptide Sequence Number=SeqID_44444
atgaagacgggagccggcgcgggcctgctcttcatctcgcccctcgggaaacacctacgctacgtgctacgcctccatttcccggcgtccaacaatgtggctgagtacgaggctctggtcaacgggttgcggatcgccatcgagctaggggtcagacgcctcgacgcccgcggtgactcgcagctcgtcatcgaccaagtcatgaagaactcccactgccgcgacccgaagatggaggcctactgcgatgagcccgaggtaccctcggcccagcccgaggcgtcctcggatcagctcgagcgatgcatctccatcgccgaaggtcaggaactcctgcaagaaatacactcgggggcttgcggccatcatgcagcgcctcaagccctcgtcgggaatgctttccggcaaggcttctactggccaacggcggtggctgacgccactagaattgtccgcacctgcgaagggtgccaattctatgcgaagcagacccacctgcccgctcaggctctgcagacgatacccatcacctggccctttgctgtgtggggtctggacctcgtcggtcccttgcagaaggcgctcgggggctacacgcacctgctggtcgccatcgacaaattctccaagtggatcgaggtccgacccctgaacagcatcaggtccgagcaggcggtggcgttcttcaccaacatcatccatcgcttcggggtcccaaactccatcatcaccgacaacggtacccagttcaccggcagaaaattcttggatttttgcgaggatcaccacatccgggtggactgggccgccgtggcccatcccatgtcgaatgggcaagtagagtgtgccaacggcatgattctacaagggctcaagccccggatttacaacgacctcaacaagttcggcaagcgatggatgaaggaactcccctcggtgatctggagcctgaggacaacgccgagccgagccacgggtttcacgcctttcttcctggtctacggggccgaggccatcttgcccactgacctggaatacggctccccgaggacgagggcctacaacgatcaaagcaaccaagctagccgagaagaatcgctagaccagctggaagaggctcgggacaaggccttactacactcggcgcggtgccagcagtccctgcgacgctaccacgcccgaggggtccggccccgagacctccaggtgggcgacctggtgcttcggctgtggcaagacgcccgagggaggcacaagctcacgcccccctgggaggggccattcgtcatcgccaaagttctgaagcccggaacatacaagctggccaacagtcaaggcgaggtctacggcaacgcttggaacatccaacagctacgtcgcttctacccttaa

SEQ ID NO: 2666 - DNA, 477 bp, Zea mays
  Peptide Sequence Number=SeqID_44445
atggaggtcgaggacgacgacaacacggcggcgccgagcgcgtggccgagttcatccaggcgtcgccacctcctccagttccttctccacgcctccatgaggctcgacctccggcccatcgtcaagtacgccgcgcttaccttcttcgctggacgcttcctcccggcactcccgaggaagatggggttctgcggcgcgcgaagcggccgaatagtcaggtcctggctcctcgagcccctgagggacagcaatctcgagctattcgcgctcgtcgcggtgtggattgccagcaagatccacgatcagaagccaatgtcagtgaagagcctcaaagccctgggtgatcgcatcatcgccgaccagcatttcatgtgccgtgattttgccagtgccgtgtttgatgtaacctctaatgctgcaggaattggtgttcttggaggttctttggatttcttacaacctttctctgacccataa

SEQ ID NO: 2667 - DNA, 1302 bp, Zea mays
  Peptide Sequence Number=SeqID_44446
atgtcgtgcccttttcctccactgtcactgccatccacatcctaccctacgaactttttcccgctcgccacaaagacagagaaccaaaagcaagcggaggttctctggccgcggctggtggccaacaagctcttccggaagacctcgggcagccacgctttcgtcgccgacttcccggccgccgatgacgatgacgacatcgtctttggaacggaggccgacggcgggggcgggtgcagccccgacgcggacgccagccgctgcgtgaagcgggcgcggccccacgagcgcaacaagaccctaaagtacaagctgttcgcgagcacgtggaacgtgggcggcgtggcgccaccggacgggctggacctgtcggactggctggacggcggcgacgacgacgggccctacgacatgtacgtgctggggttccaggaggtggtgccgctgcgcgcgcgcaacgtgctgggcgccgacaagaagcgcgtcgggatgcggtggatcgagctcacccgcgccgcgctgaaccggtcgcactcgcagcgcagcaggggcggcggcggcggcaagcagaaggtgcacccggtgcgggacggcggtggcggcgagctgggcagggagtaccggtgcgtggtgagcaagcagatggtgggcatcctgctcacggtgtgggtgcgctccgacctccgccgcttcgtccgccgccccagcgtctcctgcgtcggatgcggcgtcatgggctgcctcggcaacaagctaaagaaggttacttcaaaagtgattaatataggtgatcgtggtcgtggcagccgggtgatcctgctcggggacctcaactacaggatctccctgccggaggccaagacgaggctgctggtggagcgccaggactggaagacgctgctggagaacgaccagctgcgcgccgaggtgtgccgcggaggcgcgttccagggctggagcgaggggcccatcggcttctccccgacgtacaagtaccaccccaactccgacgcctactacggctgcgccaccgccgcccgcggccggaacaagcggcgcgcgccggcgtggtgcgaccgcgtcctgtggcgcggcgcggggctcgcgcagacccgctacgaccgctgcgagtcccggctgtcggaccaccgccccgtccgcgccgtcttcgcggtggaggtggatgcgcccggggacctcaactcgctcaggagcttcttcatgtccgagaggttcgacagggaccagatgctgctccgcaaggatgacgtcaacagcgccagattcggcgacactctttga

SEQ ID NO: 2668 - DNA, 2082 bp, Zea mays
  Peptide Sequence Number=SeqID_44447
atggcctccgccgccgccgtcatcgcctcgccggcccccggcgccgccgcggccgagcccgccgcctggctcgtcgacgagcgcgacggcttcatcacctggctgcgcggcgagttcgccgccgccaacgccatcgtcgaccacctcatcttccacctccgctccatcagcgagccgggcgagtacgaccacgtcttctctctcgtccagcagcgccgccaccactggccgcacgtgatccacatgcagcagttcttccccgtcagcgacatcgccttcgcgctccagcaagccagctggcgccgccacgcgccgccggcccaggcgctcggggctggcgcgtcgccggccgcgctcccgccgccgcctcctcgccgcgcctcgttctcgcagtcccatcactcccaccagcaccatcgccacggcgcccactaccgccccgatccagcgcgcggcgccgccactgcggcgactggatccgagaaagatggacgtgaagttcataataacaaggaagggagggggctgaaagaagcggggaatgtcgtcgatactaaaagtttgcggttggattctcctataactgatgaaggtgaggaaaaatcaaagctgcaagctgtttctgaagaaagtagcaaaatggttgcaacccctgtagagtattcaaccaatgagatcattgatggcagcatggttaatactgttgaagggctcaaggtttatgaaggattactaaatgtaaccgaggcaaataagatcctttccttagtcaatgaaacaagagcctcttaccggcgaggggggcttgaagctagacagaaggttattattgctaaaagaccaatgaagggtcatggacgggaaattgttcagctgggtgttcctattattgatggccctcctgatgatgaaaatctaagagagacaagggtggaggcgattcctgggctgctgaatgatctgtttgatcgcttgtctcagcaggaaattatacccttcaagccagattattgtgtcattgacatcttcaatgagggagactattctcatcctcaccaatccccttcttggtatggtagacctctttgtaccctctgcttaacagattgtgatatggtgtttggccgttatatatcaggagaaaaaggcgatcatagaggtcctctgaagctctcgctcgcaactgggtcacttctactcatgcaagggagaagtattgactgtgcaaagcgagctattcctgctacacgcaagcagagagtcatactgaattttggaaagtccgtagcaagaaagcacatcccagctgaaagtgcctggtctactccattaacacctcctatgccctggggtcagtcatcaaggccagttaacggctcccgccatccccaaagtcctaaacactatgggtatgctccaatcagcggtgtacttccagcaccaccagttggagctcatcacgtcccaccgtctgatgggatgcagccactatttgtagcccctgctcctatttctgctgcagccatacctttcacgccaactgttcccttgcaaaatacatcagctgcttggatacaagaagttactccaaggcctgctccgccacgattccctggtcctggtacgggggtcttccttcctccgggatcaggccaccctctgcctcatcagatgatgccggcttctcatggccatggcgaacccaactctccacaaggttcatccgcttacctgcatagtaaggtcaatggcaaggagacatctaatggcaatctttctcctaagaactcgccgagaaagacatcttgcacagccgaggagaaaccagaatgcaatgggagcttaaatggtggtggcggctctgcggatgagaagtcaactgtaggtatggagcagcagaatggtgttcagaagaatgttgggagtagcaaggtgtttgctgtggatgtcaattataacctagactgtgaacttatcactcttttgggtcctgaacgttttgcaagtgttcttattcaggacgtgggcaaagcatatggatttatggcatgcaatgtgcatacggctgcatctacggggtga

SEQ ID NO: 2669 - DNA, 243 bp, Zea mays
  Peptide Sequence Number=SeqID_44448
atgccatcaaccccgcggtggcaaggagcccaccggtggtcaccgacctccacaccccaagccccaaccaccgactcgatcatcgattcacgcggagaagaacaatgcgaacacctgagggggtacctttttggaagaaacggcaggaacactgttggccacggcagggagcggataacggtgttgccaagacgagcttcagtacgccccgacaacaaaccaggaccacacaacggtctgtaa

SEQ ID NO: 2670 - DNA, 462 bp, Zea mays
  Peptide Sequence Number=SeqID_44449
atggcgaacgcttcctgcttgctcgaagccctccctccgtgcatctggatcccccgggtgtggttcgagcgccacgaagaagcatacaaccgtgtgattgcaaactatcagtggtttgcagaaattgctgttgtggactaccctcttgaacactggcatcagagtagaatgtgtgtggttctcagtgttgttggcaatgcgtgctgcattgatctaggatgtttggggaatggagattacacttctgttagaggggtcattaagatcaatagtgttgaagatgtgcttgagaagttactaatcctcaaccatagtggcccagccaccattgctagagtcttcctcattcgcctctgggccgaaccctccaatgttgatatgttgcatttccagttcaccaacccctcccccattgcaccccaaggcgactactcagaatacctcacaatttcctatctttaa

SEQ ID NO: 2671 - DNA, 291 bp, Zea mays
  Peptide Sequence Number=SeqID_44450
atgaccgtcctaaggcatgggcactatgtaaggatcgatgcccctgaagcaccaacgaatccagggaacatcaacaccactgaacgctttgttgacaagattaaggaggagggaatggttatggagaacaaggtttttgagaccgagaccaccataggttttgggacgacagacgtcatcctaggagaaaaggaacctaaacccatggcaaccatcggacccaatcaacaaaaaagctctctgatgctggtcaatagctctaagaactatcttagggataatcagagctga

SEQ ID NO: 2672 - DNA, 213 bp, Zea mays
  Peptide Sequence Number=SeqID_44451
atgagtggtggaatcatcgacaaagacagggaggaagataaatgtgtcatcggcatacttaagaacatgacacggctccccatctacgatgggatgacacagatcgtgctcaacactcctaaaggcaatgagctgacggagaacatcgaccacgatgatgaaaagaaaaggagaggccttgagtttagtagcatggcagatttggaagcatag

SEQ ID NO: 2673 - DNA, 102 bp, Zea mays
  Peptide Sequence Number=SeqID_44452
atgtcgcacggcggagctttgaacaccggcgagttcatggcgacagtgcggatggtcgaatggatcaatgtgttctggataaccgaaagcatggctgactaa

SEQ ID NO: 2674 - DNA, 744 bp, Zea mays
  Peptide Sequence Number=SeqID_44453
atggcctttggaaatcccgctttatccgcaccgagcaggcttcgaaccactacggttaaagcttcaccatacgaccggaacgtcctgcacgtggctgggcctaatgatcgtcacccgtacgccgtctggaacagaggcctaaaagctgacctgagccgactcccggaacaatccccactccgaactaacgccagctgcccaacagtcaccagaacgtccatccaccatgcaaggcctagccgtatggatattgaacagatctttgacagaccaaagactaaccgtgatggatcggatctaccaagtgggatcaaaacggggcactgccgtcgcgctcgagaaccttgcacaaggggtggcatatctctgaagacacaggagctgtatgcacttgtttttgcagcacggtacctggacctgtttgttcattttgtgtctctgtataacactgtcatgaagctggtcttcttggcaagttctttctcgatagtttggtacatgaagcggcataagattgtgcggaggacatatgacaaggatcatgacacctttcgccattacgttttagtgttgccttgtcttcttctggctctcctcattaatgagaagtttacttttagagaggtgatgtgggcattctccatttatttggaagctgtcgcgatatttccacaacttgtgttgctacagcggacaaggaatattgacaacctgactggccaatatgtcttcttcttggggtaa

SEQ ID NO: 2675 - DNA, 750 bp, Zea mays
  Peptide Sequence Number=SeqID_44454
atgacccaacctggtttcctcccagttggcatgagtacttctaacaggatcatcaagcctggttatgaatcttaccagcccgtgacagttgcccagcaatttggcctcggactagttcctcctcactttcaccttcaccaacttacagaatgcagagctgatctccccgactccattactgttcaatggtgctactcactgtttgacgacctgaagatcctcatcctagccgacttgtgcttcaccttctcaactgacggattcagctcatggtgggggatggggaagtcccatgccttccagagggctttggggccaccgctgcagcagattgataccgaatacgaggtccttgacggggaggccgctgtcgtcgaagcatctagcggagaggagcaagtgccccgaggctgctcacccttgggcaccattgatgtcctgaccgagaccgttggtactctggtcgttcttcaggatcttcatgagccggtcaaccccatgttagatgttgacccttgcctcgggacggctcaagctcttggaaaaggaaattggaggaccttgagaaatgcgtccgagtcaccggaggctgaagccctgaccactcggctgagactgaagttcgccgatctgagtacattgagtcggcagatagtggcaggtgaggacagggacgacgataccgtcattgctgaggttgaccgtgttcgtgtcgaagccatccgcgctgttgatgatttcctccgttga

SEQ ID NO: 2676 - DNA, 606 bp, Zea mays
  Peptide Sequence Number=SeqID_44455
atggcacctacctcttcctcttcctcctcatttccttacttcgagcatgacaccgatcgggagccaactccagtgtgggaccgcattgctgcttatgaggaggctcctccgcattgggatgcagaggagtgggacttcgcggtggagtctgaggatgacctctccctcaccgatggcgaggacctcgagctcctccttggcgaggactgggaggacatcgaggatgaccttttccctgggatggagccgatgagtcgtcggagagtgaggagggcggcatgtcttttgaggaggaccggaggtagccctgttggtcttggaaaactgttcttgggagaggtttaccgattcctacacttgaccatctcgaaccttctcagtggcaagaaacttaggactgatggcccatggtggttcattcagctgtgggctcatttgtattttcaacggtgtatccccaacttcccagtcctggccagcaattccttccccgatgaatctggtaggcaaatcaggtgtaccagttatggtcaggctttatacagtcttcctggcagcaaactgaatcctagggatgcatctggctggttcaaacttttcttctag

SEQ ID NO: 2677 - DNA, 162 bp, Zea mays
  Peptide Sequence Number=SeqID_44456
atgaacgtgttccggctggcgggggacatgacccacctcctcagcgtggtagtgctgctcctcaagatccataccatcaagtcctgcgcagtgccatctaaaacgccgccaaatctcaccgggaggcataacgaacaacaaaatatagaggaaaacagataa

SEQ ID NO: 2678 - DNA, 852 bp, Zea mays
  Peptide Sequence Number=SeqID_44457
atgcaggtggcatgcaactgcaccacggggacgcaccccttcgacttcgacgtatccagcatggaggcccaggctcacacgtcatgtaaccagcgcgccggttactacgtgcgagaaactgcaccgctacttgcgccaatcccgcgccttctcgactgcggaaccggtgccgcaactcgaggcaaccctcgcatggcccaacagtgccagccgagcacatcggtcacggggaccgggaaaggggatactccgaaagggatccttctccacgaaggaagcgggccccgagccctcctacggatcaggggttcgaaggctggcccctcagaagggctcgacagccgcctcagaaactcgggctccgcgcccactactaatcaggggttcgaaggctggcccctcgaagggttcgacagtcgccccagagcacgcagagcgagggatgactctgggtacatccgattcatggccgaggctcgggctacgctcccgagggtgaggctaacaacagctaagtccggcctcaggcgcaacaggaagctccgcctcgcccgaccttgggcctcggtctcagaaggaggtctcctcctcgcccgacctcagggcttggccctcgcctcggcctcagaagacagtctctgcctcgcccaaccccagggctcggcctcaacctcgacctcggaagacggtctccgcctcgcccgaccccagggctcggcctcgaccccgaccttggaaggaatcgcgtcctcacccaaccccggcctcggcctcaggaggagtctccgcctcgcccgaccttgggctcggaccgaccatgccacatggggtacatcattgccctacccctag

SEQ ID NO: 2679 - DNA, 267 bp, Zea mays
  Peptide Sequence Number=SeqID_44458
atggccggaaaacaagtagctcatgagctagctttggtgcttgcttctgatgcgccggagacgaaggttgagagcttagctgtggtagccgaagccactgtattacaatatggaggcactgttgcggacccatccaaagggtcaagcgatgacaacgacgatattgatattgaggaggacaacaccatcatatgccctacaaagccgagccacattgacttcggcaaatcggagattaaaggagggaacattgagagcaaatggtaa

SEQ ID NO: 2680 - DNA, 174 bp, Zea mays
  Peptide Sequence Number=SeqID_44459
atggccaatttggtctcgccgtctcatggccacaaccccaccagcgagttcgccgagtcttccgcttcagttctggccaacttcggcgaccccggaactgccatagcatgcacccgccccaactccggcaacctcactgtcgcgagaaggagcagcaccgctcgcatccgttaa

SEQ ID NO: 2681 - DNA, 486 bp, Zea mays
  Peptide Sequence Number=SeqID_44460
atgggcaagaacaagaagggaggaagttcgtcgcaccactctggcgacaagcggaagtgcgagccaagtcccccctcggaggactttggtgactctgagtactcggaggaggagttttcctccaagtccgaggggtcgccggtcttcgcctctccctcggtgtcatccgatgacatggacgattcccaggggatcgacgtcgaggtgtggacgtacatccgggccatcgagcgctccgggctcgagggctcggatgagtcggagatctcctcggacgaggagaactcttccgactcgtccgaggaggagagcggcggtgacggcgacaacgagggcgacggcgacgatggaggtgatggcggcgatgacggcgacgacaacgacgacgacgacaaaggcgacggaggcaacagtggcaagggcgacggcagcggcaagggcaacggcgtcagtagcaaggccagtggcaaagcgccactagtttaa

SEQ ID NO: 2682 - DNA, 303 bp, Zea mays
  Peptide Sequence Number=SeqID_44461
atggcggcggcgttttatactcctggtgagggcgcaacggcctcgaccgaagcgggcagaacagaccgcattggccacgctgggcaacggcacaagatccgcgcggatttcacggcagcgcccacgacgagcgcaagtcgtggcgatgatagagatgaccccccgggcccacgcgcaagagacatgggaccaccaaatcctgaccgccgcggtcgaattcaacgacccgctcggatcctggcggaattggcgctgatctgttgggagagacgggtcttacacccgggcctacatggaggttag

SEQ ID NO: 2683 - DNA, 216 bp, Zea mays
  Peptide Sequence Number=SeqID_44462
atgccgagaaatatggtaaatcgactttacccctcacgcaacctgagacatggtctcccattccggttatggtgggtacaagtgcggtcactgcacgacggcagtcgaggttccttggaggacatggttgctggagtgacttggtcgtccatcttgccaccgggttggacagtcgagtgggaccctaccttggcaggggaggagcatgaggggtga

SEQ ID NO: 2684 - DNA, 1371 bp, Zea mays
  Peptide Sequence Number=SeqID_44463
atgtcaatggaatctcctgtagttcttcggagcacgaaggcattactcgaccgattggagaaacgccttgtcatttctcattcagtagcatcttcatcagtagaaaatgttgatcatctactgaaacgccttggttctcccccaaggaggagggctcctcctagcagagaaggaaaaactcgggcagtggtaaaaagaccagctaaaagttctgaggcaagcatcaaattgcctagatactcactgagggtggtgctctgtgcttacatgatactggctcatcccagtgctgttttaagtgggcaaggtgagcgggagaaacagcttatcgagtcggcagcaaactttatcaaggagttcgagctgttgattaaggtaatccttgatggaccagggcagtcatctggtgttactggccagaggaagttcagggcacagttggctaattttgacaaggcgtggtgttcgtatctttacagctttgtggtgtggaaggtaaaagatgcaagattattggaggaagatcttgtcagggctgcatgcaagcttgagttgtcaatgatgcaaacatgcaagctaactgcagataggcactcgcaaaacaatcttacacatgacatgaaggcaattcagaaacaggttattgatgatcaaaagcttttacgtgataaggttcaacacctgagtggcgatgctggccttgagcggatgaactctgctctttccgatacgagatcaaagttctttgaagcaaaggagaatgggagtccattgacagcacctgttgcaaatgtgtctacccctttgagcatcaattcgtctgggaaagcaccactttctgaggttcctgaaagttccaggacaaatgttattgggacaagctcagtaatgccagcagcagggcaggttcctgctcttgttccggtactccgatctggtcatggagctccagtagggcaaccatctccttctgcaggagacacctatggtcaaccagagtgcaagggtgagaagcttgacaagctaataaggattggcctgttgcaactcattagtagtgtggagggcttgcaattgcagtcaactcctgaaagttttcagattaatctgctgaggctgagggccgtgcagagccaattccaacaggtgatcgtgatcgccacaagcatgctcgtcctgcaccaagttctgatgagagagaactcgagggccactcctctggaactggaaaatgccatctcagaactcgtcaaggctctcgcggaacagccagggaagagcagcgcagacgagcgccgggaaagaccattggggagcaccagggaggagcagcgcagacgagctcgacaagcgccgggagggagaggatag

SEQ ID NO: 2685 - DNA, 438 bp, Zea mays
  Peptide Sequence Number=SeqID_44464
atggaggtgtacttaccagctgcggctcgacacagggcactgcccacgcgcaccataggtctgcggcacggggatgtcttccgcgcacggtttccgggcagaagaacggcgaccgcggtagtggagaccgagtcccccggaggatttcgtcgtgttgttagcgctggacacgaagaaaagatagggaggagaagcggatggctccgaccagtgggtccagatgacaaagggagaccacggctgggcaccacgaacggactccgcgcatcacgggcgaatccagggcggttctgttatggggaggtcagcagcccccgaccgtgtcctaacagccgatcccggtttggacggaaggtaagggatgagcctgacgatgagggcccacagaaactcaagttctacgaccccattctagggtttacagtgcgcttgcagtag

SEQ ID NO: 2686 - DNA, 1242 bp, Zea mays
  Peptide Sequence Number=SeqID_44465
atggaaaaatggttgggttctgaatactcatttcgtagaagggtcttcttcaactacgagaagaggatacggcttctcagtcctcctgagaagatttttgagtactttgcgtctgtgaggaatcgagaaggggaagtttacatgttgcctgctgacttgatgagagcagtagtccctgtttttcctccatcagagtccacggtagttcgtgaaggaagattaaggggggagcggagccctggagaattgcactgtgctccatcagagttctttatgcagttcgacacaaataatgatggcctcatctcctttgctgagtacattttttttgtgacattgctcagcattcatgagtcaaatttcactgtggccttcaaaatgttcgacattgaccacagtggtaatgctgataaagttaatttatctcgccaagaaaaaagacctgctcgttatgagcatgttcaatcatctgacttgtttgttgatggtaaaagaagggacatgccgcttttcagggtgatagacagagaagagtttaagaaaataatggcactgatgcggtcctttaacagacaagggtcgactcataaggatggtttacgtattggacttaaagttggcaagcctgtggaaaatggtggggtggtcgagtacttctttgggagtgatgggaatgaacctctacactttgacaagttttctaaaattttgaaggaattgcatgatgagattattcaactggagttcagtcattatgatgtcaaatcgtctaaaacaataccagcaaaggattttgcattgtccatggttgcttctgctgacatgaaccatatcaacaagctgcttgatagagttgatagtttggtcaaggagccagatctgaaggacatacgcatcacctttgaggagtttaaggcatttgctgatttgcgacgaagattggagccactgtcgatggctatctttgcttacggtaaattgaatgggttattgacgaaggaggatctaaaacgtgcagcgcaacatgtttgcggggtcgacttaacagatagagtagtagacatcattttccatgtgttcgacacaaatcaggatgggaacttgagcccagaagagttcttaagagcgttacaaagaagagaaactgatattcgtgaaccaacaataccaggtccattggggttcttgtcttgctggttcagtggtaggaagtgttcttcactaaaacatgtggttatctga

SEQ ID NO: 2687 - DNA, 357 bp, Zea mays
  Peptide Sequence Number=SeqID_44466
atgacatattataccaacttaagagactcaagtgacacagcaatgccaagttctaggacccaagtcaaggatgctccctcgtcctttctggatgatgtgcacacaaataatcatggtgctcttcttgctggctacatctatgacaaggaggcagcaaggcagcacccaggtgtactggagccttccgactgctatgggcctgactgtttcagattgactttctatgtctgcgccgtcgtgtgttgctgcggtaccctgttgggcgtgttcttcatatcgaggataaagccggtctaccagatgctctacgcaagtggatcgttcagacatcctcggagccaacagcagctccactga

SEQ ID NO: 2688 - DNA, 246 bp, Zea mays
  Peptide Sequence Number=SeqID_44467
atggccgtgatgggttcaacatcggaaaagatgtacctctgccaggaccgtctcgatgtaggcctgctgaccgaggaccctttaactggtcacatgccttgctttagctctctgttgatcgccggagagattgccacgaactccgctcggtttagcctcaccgcggccagcctgttccagcctgagctcatcggagatcggtcgagagctgtccaccgtcggggaccccatcctgcgaagaattag

SEQ ID NO: 2689 - DNA, 390 bp, Zea mays
  Peptide Sequence Number=SeqID_44468
atgggcaaggacaagaaaggtcggggttcgccgtgtcacatcggcaacaagcggaatcgtgagctaagttctccctcggaggacttcggtgactccaagtactcggaggaggagttttcctccgagtccgaggggtcgccgtccgtcgagcacgccgggctcgagggctcggatgagtcggaggtctcctcggacgaagagaactcttccggctcgtctgaggaagggagcgacggcgacggcgacggcgacgacaaaggcgatgacagtggtgaaggtggcagcgacgacggcggcaatgacgacggtaagggcggcggcaggagcgacgacgacggcaagggcggcagcggcagcagcaaggccagtggcaaagcgccactggcttaa

SEQ ID NO: 2690 - DNA, 729 bp, Zea mays
  Peptide Sequence Number=SeqID_44469
atgaccacttggcgatcagcttttgttctgatatttgctcagtctatccgtcttcaggttgatccaccaatattatcttgtggagtagcccacccattacatcatcttggggtcgacttggctcatcttccgcatcacgtactggtgatgaataacataaggagaacagctattccttaccggggtaaacgacgacgtgaccgggactgcatagatcaagatgaagctttcgaacacgtcgatagtgcgacacgaaggagtgtcgtggctgctgctgctccatggcctagggcgagagcaagcaccagggaaaatgacatcggcaagcttgaggacgggcagcccagttcggtgtcggacagaggcgaactgagcagcggcgcttgctgtcaagttaagacgacggcgatgacacaaggccggaacagtggtgaacgacggcgcaagacgagcagggagagcagggagacgacgatctgcactacgataggaaagacgcagcagtccccagcggcgtgggaggaccagctggtggcgctgttgctactcgttggggtgggcgtcagggggccgagcacaacatctagagcggcggcgcggtggtgcctaggagctgagcagatccaaggacggagttgggagacatggccagcatcaacgaacggtgctaggagcaagcaggccgggacgggatggccgtgcgccatggccgagatttgggcgagctag

SEQ ID NO: 2691 - DNA, 444 bp, Zea mays
  Peptide Sequence Number=SeqID_44470
atgcagaaaaccccctggggtaaccctaaatctaacccgtggtccttcccctattggaacagtacccgcgtcggagagaagggcggcggggcttatcggcggcgagatagctccggtgaagtggtcgatgacgtaggggaggttgcagcggtcacgttgatgtgcgggtcgtcgtcggggatggccggagttggtcggacctcgtgcgtaggcagggaagctcgtcagcgtcgaggatcccggcctaaccacggcggaataactcagtccattgagttggggagcttcacgggaggtcagggaagtcgtaggcgcgagcaattggagaatggtgtacctggtagctcggtctacgcgcggtggcaggcggccgaagtccggcgaggatttgagttttggaaaacagagaacacggctgatctttatgaagaggtcgaaatttag

SEQ ID NO: 2692 - DNA, 543 bp, Zea mays
  Peptide Sequence Number=SeqID_44471
atggacagggacttggccgaggtcggcccatggagggggcactcggctgctcctgcgcgaggaaggagcagggggcgccgcgccatggctggccgagcgcgcgagggggctgagggtaggaaaatggcgtggaggagaagggagagggagggagtcatcttcttccttggtgcctcacgtgaacagcaggaggctgccgctggttgtgtccctggccgtgttgatgctagagcatggaggagagggggattccacggcgaggcactggagcatgagtctaaggagctccctgctgaaatttctgggcgccagggaggaacgcacggaggggcactggccctaggggctgctccatgcgcgccatggacagggacttggccgaggtcggcccatggaggggacgctcggctgctgctgcgcgaggaagaaggagcagggggcgccacgccatggctggccaagcgcgcgaggagggggctgagggtaggaaaatggcgtggaggagaagggagagggaggtgggctgccatttatggaggataa

SEQ ID NO: 2693 - DNA, 513 bp, Zea mays
  Peptide Sequence Number=SeqID_44472
atggagctcgctgcggtatttcatcgaacacatcgagggcgcgacacgaaggagtgtcgtgctgctgctgctccatggcctagggcgagagcaagcaccagggaaaatgacatcggcaaggttgaggacgggcagcccagttcggcgtcggacagaggcgaactgagcagcggcgcttgctgtcaagttaagacgacggcgatgacacaagtccggaacagtggtgaacgacggcgcaagacgagcagggagacgacgatctgcactacgacaggaaagacgcagcagtccccaacggcgtggggaggaccagctggtggcgctgttgctactcgttgggtggacgtcagggggccgagcacaacatctagagcggcggcgcggtggtgcctaggagctgagcagatccatgaacggagttgggagacatggccagcttcaacgaacggtgctgggagtagggaggccgggacgggatggccgtgcgccatggccgagatttgggcgagctag

SEQ ID NO: 2694 - DNA, 339 bp, Zea mays
  Peptide Sequence Number=SeqID_44473
atggaggaggggcagccatggtgggacaagcctggacgcctagtggaggaggagatcccggtggaggagcagcggcaggggcgctcaaggtgttgggcgccatggatctggagaaggggagctgcaggggcgctgctgtgccgtgggaaggagaggagtagaagttataaagttaagcaagaacaggcacaaaaaatcatggccaatgccgcggtggctggctgcctgactggctgcctgacggcgaccgcggccgaggggcggggtggcgtcgtcgacgagcggcgggatggggcagaagtgacggcggctgcgcttgtggtttggtgcgtgaaatag

SEQ ID NO: 2695 - DNA, 855 bp, Zea mays
  Peptide Sequence Number=SeqID_44474
atggcaacagcagtgcagcgcggtccacgggccacggcgggtgggtttggcttcgggcctctcggcgacggacctcaaaacccaacggaagccgacgcggacgaagtggagaagtcgcggtttctgccaacacacgccgagtggacggggccctttattcccagtcgccggtgcccagctctagaccgtgagagggcggagcagatctcgccggccggggccatgggtgctgccggcgcgatccggcgggcggcggcgtcggtggtcgacagggcgtgcgcggggacgcggggcttccgccgcgcgctggcgcggttcgcgccgcggccgtcggcgttcggccccgccgcagacgcggaggccgcggcggtgcgcgccgtgcggaacctccggaccttccggttccactacgccgtcctgcagtgggtgctgctgctggcgtccctggcgccgcggcaccgggcctccgtcgtcttcctcatggcggcgtccaagggcctcctcgtctacggcggcctcctcaaggcgttccccaactcggcgctgctccggaggctcctcgaccgccgcctcgtggccgccgtgttcgtcgcgctcgtgctcgccgacatcgtcgccgcgggcgccgtcgccaacctcctggccgcgctcgccgcgggcgtccccgtcatcgtcctccacgcgtccttccgcgtccgcgacgatctcgaggcgccctcgccggacgcggcggcggcggccgagaacggcaaggaggacgaggcgtcggcggtcgtcgagaagaaggaggacggcgacgtcgaggcggggcccacgcggcggtccatggcggcggcaccaagatcacccaaatga

SEQ ID NO: 2696 - DNA, 153 bp, Zea mays
  Peptide Sequence Number=SeqID_44475
atggcgggcggaaatacgctcgccggagctaaggaacggtggctggccgatgagggtgagtgcggggcgaagagaggattcgagttagggatcaaggtgaacatccctgatctttggctcaaggaagtaatggctcttggtgtggctttttaa

SEQ ID NO: 2697 - DNA, 333 bp, Zea mays
  Peptide Sequence Number=SeqID_44476
atgagggagaagaagatgttcacttcgtacgtcaagattaaagattctcatgacacgatcatctttggagatgggaaccaaggcaagtgcgtgaatagtgcaagccagaagttagagcagaagtcagaggcgcaccggacggtgtccagtgtggcactgaactgtccagtgccgcatgaggacaaagcctccaatggtcaactgctcccaaaccctaacagttgggtgacgtggcggcgcaccggacagtctacaggacttgtccggtggcgcaccggactgttcgacgcggccatcgacagcaaccttccccaactgcttgttggtggttga

SEQ ID NO: 2698 - DNA, 441 bp, Zea mays
  Peptide Sequence Number=SeqID_44477
atgcctgaaggtcttaaagatgcagagaagtgtcttgaactagaccccaccttcactaaagggtacacaaggaaaggtgcaattcaattcttcatgaaagaatatgacaaggccatggaaacctatcaggctggcctgaagcatgacccgaaaaaccaggaactgcttgatggtgttaggaggtgcattgaacaaattaacaaggctaacagaggtgaaataagtcaggatgaattgcaagaaagacagaacaaagctatgcaagacccagagatccagaacattcttaccgaccctatcatgagacaggtgctaaatgatttccaggagaacccaagggcggcccaggagcacctgaagaaccctggagttatgcaaaagattcagaagcttttaacgtgccctttaacaagcagcgacggcaaaagaatgaggggctaa

SEQ ID NO: 2699 - DNA, 198 bp, Zea mays
  Peptide Sequence Number=SeqID_44478
atggattgccagcgtctcgatgtggcaaaggactgtattggagtcctttcaaagcaatttcctggcagtacccgggttgcccggctagaagctcttctgtttgaagcgaaaagtgaatgggctgaagctgaaagagcttacacgcaaatcctggaaatcaatccatttgaccaggagagctgcgcatcattaaattaa

SEQ ID NO: 2700 - DNA, 867 bp, Zea mays
  Peptide Sequence Number=SeqID_44479
atgggtataatgcgagtcgcggacgatgtggaggccaggttggtggtcggggcaggtggcggcggcgggaccgccaccaccacgacggagccgcttctccgccactgccacggcggccgcaaggaggaggacgaccaggggtctaagatccgggacagcccggaggcggagggggcgtccgactgcgggaggacggacggaggctcgctgcggatggtccttgtctccaccgccgtcgccgtctgcggctccttcgagttcggcacctgcgtcggctactctgcgccgacgcagtcagggattgtagaggaagtcgggctatctatctccgagtttgcaatttttggatctgtactgacagtcggagcaatggttggtgccgttactagtgggcgcttggctgattttctcggacgaaaaatgaccatgcggatatcagctactatttgtatattcggttggctctccatacatctggccaagagcgctatcatgctctactttgggagaaccttgctgggtttcagcactggagttctttcttatgtggtgcctgtgttcatagctgaaatagcgccaaagaatctccgcgggggtctcgcaacgtcaaaccagctcttgatctgttccggaagctcagctacctacatcataggagccctggttgcatggcgcaatttggtacttgttgaccggagggaactgagtgaaaaaatttggtccaggtttagtgccttgtgtcctcttgctagctgggcttttcttcattccagagtcgccaagatggctggtaaggcacttcccgtcttagctaaatgttctgtgaaatgtggttttttggatgtgtgtggtggaaaaagaacctag

SEQ ID NO: 2701 - DNA, 1641 bp, Zea mays
  Peptide Sequence Number=SeqID_44480
atgcccccgcctcgactccgtttcgccaggcacttatgctccgccacggcatccgatcccgccggcgctccgacttcgtccacgatctcaaacgctgctgccctcgccgcggccgccgccctccgcacgccgcggctcgagccccgcctcctctccttggtcccccgcgccgtcctcctccatccagactttgctcgcctcacgctctcctgccttcttccggccgtggctccatcgctccgcttcctacgcgctctgtctccacacctccccggccccgcccctgacaccgccccggtgaacgtctcccctccgctgcccggggtcgacaagttcctcctccgcctcccaccgcacctcgccgcagacgtcgccgagctcctcagctcttacctccgcatccacctttccctccgtgccttcaatgtcgcgtcctgttccgcactccgcgcggcccgcccagacctcgtcttccgcttcttctccgccttctcttcctcgccagaattccccggcaatgccactaccgtcggctgcctcgcccgggcctacgccgccgagggccgccccctcgacggcctcggcctcctccgcgacgccgcgcgccgtgggtcccctccgcccgccgacgcagttgctgacctcatcggcgccttcgcagccgagggcaacttcggcaaggtctccgacacgctgcacctcatgattgccaccgggtgcaccccggacaaggtgatctaccagcgggtcatacacgggctcttcaggcggaggatgggtggagaggccctgcgtgtgttcagagagatcaagcagcgtggctatgacattgacggagttacatataccacggtgatccatgggttatgcgaaatgcggctgattggagttgcacagcagatgtgggatgagatggtgggcaggggcatcgcccccaatgagtatgcctactgctcccttgtcacttactattgcagagttggtgatctcgacaaggcccgcaaggtatatgatgaaatgcttgagaaggggttcaagcagactactgttagctgtaacattctcatcaaaggattctgtgttcatgggagggtgtacgacgcacttgaggtgttcgaggaaatgtccatcaagggaatcaagcatgatgtgatcacgtacgacacattgatcaatggcctattcaaagctgggaagttggacttggcgatgcggatgtacgagtggttgctatcatctggtttggagccaacatcgtcaaccttcggtcgtcttatatgtgccatgtgtgagaacggacaggtgcatgctgcagtagacctgatcaagtcgatgcggaccaagggcttggagccaccggtgtggacaaacgatcacatcatcagtggcttttgtaagatcaatctgtctgatgagggcatggcatggttggcaggtatgttgaaggacaacataagaccccaaagacagacatttgattacttggtggagtcgttgagcacctctgggcgattggacgatgtgttgctggtcctgaatataatgttcaaggttggatttgaaataggcacatttgcttgcaccgtacttgccgagaagccgtgcacaagcaatgtatctttactcccaccaactggataa

SEQ ID NO: 2702 - DNA, 345 bp, Zea mays
  Peptide Sequence Number=SeqID_44481
atggcgctgacaccaccacccaccctgtcggattgggtggcggactccggagcctcttgccacaccacacctgatgtcgacacgctatctcactcccatccccttcacccatctttttcgtcccttattattctggggaacagttccaccctcctcgttatctcattgagtgactcggttcttccagggccgtttcacctcaaacacgttcttgttgctcccaacatcattgaaatcctctttctgttcaacggttcaccatcgacaactcgttctatggagtttgttccctttgggtttatctgtgaaggatctggctaccaggacccttctcgttcgatgtga

SEQ ID NO: 2703 - DNA, 522 bp, Zea mays
  Peptide Sequence Number=SeqID_44482
atggcgagcgataaccgcgcgtcggtcttccccttcgccgccgccgtccttgtggtgctcctcgctggcggcgccgcggcggacgacgcctccagcgacgacgacgctgggacttcacggacacccggctgctccaacaagttccagctgaagggcctgtttgcaggcataagactgattgcaacgcctgtaaaccgtcctggcctggtacaatacgggtttgacagcaaaagtgaggctgcagcagtatcctacggtggacgcaacgtccctggcacggcacgggacgagtctaggaggctggggcactttctaggatggtttacggctttattccaggtcaaggtgaagaattgggtgaatgggactgaagttgctatagcaacacgtggggaatgtgctttcacggaaaaagcaaatattgctcaggccagtggttcgaccggtttactagttatcaatgataatgaagaaagtaacctgtctcatgtttctagagctttacaagatggtttgcggtga

SEQ ID NO: 2704 - DNA, 117 bp, Zea mays
  Peptide Sequence Number=SeqID_44483
atgcgagaagtggactgtgaggtagacgagcctaacacgttcgaggacgacccgcaggacacgttcgagcaaaagggtgatgaagaagatcttgatggagacttcgatgaatactaa

SEQ ID NO: 2705 - DNA, 330 bp, Zea mays
  Peptide Sequence Number=SeqID_44484
atgtcttcttcctcccttaagcgtcgtgtcttcccatcttccaagccatcggatggggggtatccgccgcctttccgcctcctcgttggaggaacgcaactccatgggagttggtacctttcagccatcgttcggcttcaaggcagcggcatcgaccctgaggtcagtgctgccgctgttcggccccccggagcagaagtcgtcgttgccgccgctgccggagcaggtgacggcgcgccgtccgtcggccttccattgctccgcaggccttccccctcggagtggggtcgttcgtacctgcggaggggggaaccggagttccgttcgtaa

SEQ ID NO: 2706 - DNA, 1173 bp, Zea mays
  Peptide Sequence Number=SeqID_44485
atggcgcagcttggctgggcggcggggaccgccatgatgctgctcttcgccggcatcagctactacacctccacgctgctcgccgagtgctaccgctgcggcgagccgggcaccgggaagcgcaactacacgtacacggaggccgtgcgcgccatcctcggcggtgccaagttcaagctctgcggcgtcatccagtacgccaacctcgtcggcatcgccgtcggatacaccatcgccgcctcaatcagcatgctggcgatcaagagggcggattgcttccacgacagagggcacaggaacccgtgccgcagctccagcaacccctacatgatcctattcggcgccgtcgagatcgtcttctcacagataccggactttgaccagatatggtggctctccatcgtcgccgccgccatgtccttcacctacgccaccatcggcctcgcactcggcatcgcgcagaccgtcgccaacggcgggttcaagggcagcctcaccggcgtcaatgtcggcgacgggatcacgccgatgcagaaggacacgatcaaggcgccgccgccatcggaggtgacggtgatgaagaaggccacgatggtgagcgtggcgacgacgacggtgttctacatgctgtgcggctgcatgggctacgcggcgttcggcgacgacgccccggacaacctcctgactgggttcggcttctacgagcccttctggctcctggacgtcgccaacgccgccatcgtcgtgcacctcgttggcgcgtaccaggtcttctgccagccgctcttcgccttcgtggagaagcgggcggcagccaggtggcccgacagccggttcatgacccgggagctgaggcttggacccttcgtgctcggcgtgttccgtctgacctggcggacggccttcgtctgcctcaccaccgtcgtcgccatgatgctccctttcttcggcgacgtcgtggggctgctcggcgccgtctccttctggccgctcagcgtctacttccccgtcgagatgtacaaagcgcagcgtcgcgtgcgcaggtggagcacgcgctggctctgcctccagacgctcagcgccgtgtgcctcctcgtctccatcgccggcgccgttggctccacggccggcgtcataaacgcagtcaatttgcaccgaccattcagtggctaa

SEQ ID NO: 2707 - DNA, 486 bp, Zea mays
  Peptide Sequence Number=SeqID_44486
atgcgctgcgcggccctcagtcagagtcatggtcggtcgcgctgcccctgccaggtccaggtccaggcccagcgcatcgcccatgggagtccaatcgtcacgtggcgtgcatccgtgtgcgtaccagacagcgggccggcggggggaagatgtgtggtccgacgtgggcgcgcgcgcgccaacggagtccggagggcggccgtgccccgttgcgtccggtcctcctcctccgtggtcggctccgcctccaatcccctcccttcttcgacgatgcgagcacacccgctcatcctcttcgtacctgcaccgccacctcatcctcttcctcgccgcgtcgacacccaccgcactctctccctccccgtgcaggcgccgctaccctgttgccgcgcccgcacctccttccccatccgcgcccgccgcggctcctccggcagctccgccacgcgcccaactgcaacctgtctgcacggccaccgctgcctg

SEQ ID NO: 2708 - DNA, 208 bp, Zea mays
  Peptide Sequence Number=SeqID_44487
aaaaccgattccgctgcccacgtccgagtctgcacgacgggagcttgacggagatactagagtcgctgctgaggccgagggaaacgtccacgacaccagcccgagaagaggaacactgcacatcaggaagctcaagcaccaagccacggttgacagcaaccagaaagaagcccacaacaccacacaggcgctcgagcacagcagttga

SEQ ID NO: 2709 - DNA, 351 bp, Zea mays
  Peptide Sequence Number=SeqID_44488
atgggagtgtcctctattcttccctggataaagaggacatctgggaatgcttttgggcaggacggcatcgttgatcacgactcgatggtacgtgtggaagcatgttggaacacgagagagttatacaggtttgagccacctgaatgtgtaataccctacgtcctattggtgttgaataatgagtttgctggtggtgctcaggtgctcctgctcatcaggagttcggttatctcccgagtatctaactcttcaggcgacatccaggtccttaataccgccgaagggtgctatcagcttcggtttccactctaccgacatcaagaggatcttgtgtgtctttggtgcccatga

SEQ ID NO: 2710 - DNA, 333 bp, Zea mays
  Peptide Sequence Number=SeqID_44489
atggtcgcgcgccgaggccgcaccacggcgggcgccggggcaacgccgagctccacgaacatgaggaggaggggggaacagggaagaagggagcgagggagggctcatggtggggcgaggacgacggggcgggcggttccgaggggcagggacgactccggggcggctgcgggcgctagagagaaggggaggggcattgggcgacgtgagagggagaagggaggaggtacgcttcaggatatggttgatggtgtgacttggcctacaaccctgccaccgggttggacggtcgagtgggatgctgctccgataggagaggagcatgaggagtag

SEQ ID NO: 2711 - DNA, 297 bp, Zea mays
  Peptide Sequence Number=SeqID_44490
atggcgggcggtggagagctcgccggagttggagtttctgctcggggcgtgaggcaaggtgttgttcggctccccggcggtgggaagagcgcatcgcctttgagagcaggacctagacaggacgacttcgggggtggtgaaccagtgaatccttgtgaattgctcgccggaggcagaacttcgtcgtggaatcacccctcgccatggacagacgtgctctccggcctagatcccggtatgacgccgcgaatagcttcgccattctctatccctcgttttgtggtagaaatcgtgtag

SEQ ID NO: 2712 - DNA, 891 bp, Zea mays
  Peptide Sequence Number=SeqID_44491
atggggcgcgtctccctgttcgacgacgtttgtcgctgcgccgggaccacgcaaaggctgagccagggcatgctgcgcagggtcacgcaggcagccgcgccggggcacgagcacgccaaccgcaggccgcgccgggcaaccggcacaccacgatgtcgcgccgagggcgccgggccgccgcgagctgcaccggggcaaggccgccacgagcagggccaggccacgctagggccgagcgcagggggccgcgcgctggccgagctcaaggtcgcgccgaggcgggcggacgcacacaccagggcgagcacgccgggcgccgcgagcaggggcgggcgcgccacgccgcgccgtagcgggctactacgcggggaggggccgagcacgccggggcaaggacgagcgcgccggggcgggggcgggcgagccgggcgggcgcgccgtgggctgggacacgccggaccgccgcgtagagtcggacgagcgccctgccgggggcaggccgcgtcgaggcggacatgtcgcggtcgcgccgcagtgggaaacgggagcgcgcgaggggagccgcgccacgccgggcggggcgccacggccgcgcgcacggcacgccaggccgccttggccacgcgccgaggccacgccgggcgagcgcgccgggccaggggtggggctacacagggaccggggttgaggaagaagggggggcgaggccgccatggccgcgcgccgaggccgcaccgcggccggcgccggggcaacgccgagctccacgaacacgaggaggagggggaaacagggaagaagggagcgggggagggctcaccgcggggcgaggacgacggggcgggcagttccgaggggcagggttggctccggggcggttgcgggcgctag

SEQ ID NO: 2713 - DNA, 726 bp, Zea mays
  Peptide Sequence Number=SeqID_44492
atgccagggatccaacaatcgcgtgactccgttcgatccgccctggacgcggcgttggttgacgcaaatcctgcggatatggtgctggcaccgttgagcaaccgagtccgagtccgttgcgagatccgcgcggtagaagaacccctggatgacgggacccaccatcagcggcttggtgcaacggccccagcaaagcaatcggagatcacgcgacgacagattgcgaattttttgggctgcgcggatctcagctggagaagagacatccgacgaactggaccaaccgtcagctacccagcgcatcgggcccgcgtggcagtgaccacgacgctaggcaccacacaaacgcagtgtgcgcccgacagcgcggctcatgctgtcagccagcgaagtcaggggtgggctggcatcgtgagctgtttccgagcatcgaggaatcgacagtcaagcttcgacgaccaagagattgaactctccgagttctatgaggctgaagatcctgagcatctgtttggtgaaggcaatgatgccctgccgggcgacctaggtagtgctcaatggggagtagctctctccgggcagaaagggaatcacgacttgtgggtaaaagatgtttgtattacaggtggtgacaaggatgatgtttatgactatggtaatggtaaagaagaaggcatcgaggtggatctccaggagttccaggacttcgacgagttcgaggattag

SEQ ID NO: 2714 - DNA, 258 bp, Zea mays
  Peptide Sequence Number=SeqID_44493
atggcaaaaagagtagtccgtgctttgggtttgatatttggatgtgtgttcgctgcatccctgggttatacagcagctattaacttgatcgagctttcaatgcagtacactccccgccttgtttattactaccagtgcctaacatggttagaaaatgtggttattgagagcttcagtataattcttgctgcatgcttttggtgtgacaaaatccttgtcattctcgctgtcttccgcgaggagatgaccaatggatga

SEQ ID NO: 2715 - DNA, 378 bp, Zea mays
  Peptide Sequence Number=SeqID_44494
atggacgtcgacgaagccggcggcgaggagaggcgaccgtcagagaaggagctcttccgcgccgctgagtccggcgacgccgccgcgttcgcctccctcgcccccgccgacctctccctgcgcaacgaggacggccgctccctcctccacgtcgccgccgctgccgggcatccccaggcacgaaaaggggcattctacgctctagaatcgaatatgatgggtggaaactggaaagtggtgctcgcgcttgcccagtgcggtggtgacgccgcggctagcgtgctgaatgcgcaggacgaggaggggtgggcgccgatccactccgccgcgagctccggcaactctcaaatcgtcgacatcctgcttgagcgagaatga

SEQ ID NO: 2716 - DNA, 266 bp, Zea mays
  Peptide Sequence Number=SeqID_44495
gctgccgtgcaggcgtactcgtcggtcgctgcggcctgcgggaatattttaatagtggcccacccgcaccatgcttcgcgaccagagtcaagtgtggtcggcttggttgggtcctcgcgcggcaggaagcatcggagtccggcggtggtgtcgcagtggaatcaggccggactgaggctgggccaggaggacaggagacaggggctccggctctggcccgtggccccggtctagcagctcgcatcgggcaaggcgcttgtcactga

SEQ ID NO: 2717 - DNA, 1323 bp, Zea mays
  Peptide Sequence Number=SeqID_44496
atgagatactgtgccgaagttcttgcctccctgcctttcacatgctccgatgaaccactttacttgatctatgatataaatcgaattattcaccttaaagctggaggagttgagagcaatttgaaaaggtggacttctatgtctcagtctcaaaatacagtggatatgccaacgttgccaggagagaggcatgttgtcatgcaagagcctggcggatattatgataacgtgggctatgcccatgaaagggtgaatgccaatccttgcagtacttcagacgtggacatggccaaagtgcaggttgacgtggatatggccaaagtgcagggagattgccttgatgcaatagcccttcagctactgctgaaattgaagagacatttgaaagttgtctatagtttagatgatgcccgctgtcagtcattttctctaaaggagcctccgaaatctggagaaacattctccaggcagaatattccttttaatgttagcagcactaacatcagtctgccgagctgcctgcaggacgtagcttctgtttaccaggatttcaagacagtgctccacgaagattccatggactttgctgtgttcatcccttcagtccagattaggaagcgcccaaccccgagaaatacgacaaacccaaccccaagaagtacgacgagggtcaggagaacggctgcctcgagtgttacaaaagcccgtggtggcgcacgtggcgatgactccgacgactccgatgatgacgactggaccgggggcccaagagtgcttgacttcagtgggggtggccgtgtgacaaggcagagggtccaattgactaccgaattctaccggagaatacggtttgaagttcccctcttaatcactattttcttcttcattgaagggcaggccgcgaagtggcgagaagccttcccactgagcaaaggtcctaggttcgatgcagcctctcggcaaaatgcaggctggctaaatacaacaatgatggagaacaggatgactttgaatccaactgatcttgatgattttgacaagagaaaattgccatcacctaggttccaggttgaggttgtcctggtagattacgatggctcgcaaccaccaaaaccagccgctggagcagttgataataaatctgatgccgattcctcggctagcacggctgtgaaagaaaatagtgttgcgcctgcagaatccaacaaggggactggaagcaatgataaagatgaagtattctcggacagtgacgacagggaggatggatcatctaaggaaagaaaggagaggactgctggcgcggtggtcaaggcagtgtaa

SEQ ID NO: 2718 - DNA, 999 bp, Zea mays
  Peptide Sequence Number=SeqID_44497
atggccggtgccggcggcgactggcccttcacggccgacgacgacgcgtacggcgccgactcctcggcgatgttcgcggagctcgccgcagggtgctgggccgccgccggcgggacggcggcggaggagctgatgatgtcgatgctgctgccgccgcctgaggatcatcatcaccaggcggcggtactggcgacggcgccggccgccgtgtcgtccaggtccagctccaccgacgacgacgacggggcgccggcggccgcagccaccaccgaagcagcgagcaagccaccggcggcggggaagacgacgatgacgaagtcgtcgtcggcggggcagaagcgggcgcggcagccgcggttcgccttcatgaccaagagcgacgtggaccacctggaggacgggtaccgctggaggaagtacgggcagaaggccgtcaagaacagccccttccccaggagctactaccgctgcaccaacagcaagtgcacggtgaagaagcgcgtggagcgctcctccgacgacccctccgtcgtcatcaccacctacgagggccagcactgccaccacaccgccgtcgcctgcttcccgcgcgccaaccacgccgccgacggccgccaccacctgccgttcgtcgaattctctgctgcctcctccgcgcaccaccactaccacagcaacccctacagcggcaccgccagctgcgtcaacgaccaccacctgccgcccctcctcccgacgacgacgacactcgcgcctcggcacaacgctctcgacaacggccagcaggagctgcaggcggcgatgtcgatgccagtggcttccgtgccaacgacgtcgttgttgccgccgcctactactgctctggcggcgccgccagtggcttccgtgtcaatgacgtcgtcgtcatcgttgccacctgctagcagtagcgctgctccggccgccgtcgacaagggacttcttgacgacatggtgccgccggcgatgaggcacgggtag

SEQ ID NO: 2719 - DNA, 141 bp, Zea mays
  Peptide Sequence Number=SeqID_44498
atggcgccccttcgtgtgcatgtgtggcaggtctgccctaaggggagcggtggtgctctcatggatgtgacctctctcaaggaggaagtcgtgcagattagccaagccaaggaggccgacaagctgggtcttcgtatataa

SEQ ID NO: 2720 - DNA, 153 bp, Zea mays
  Peptide Sequence Number=SeqID_44499
atgactaggcggctggattggaggctgcaaaaagctgcctatccatcccaggcgtccgatttgcctgaaagagcaaatctagagagtagagaatcttatgatgttcaggaaggtgaacctgaccctgagatcaagatcacctgcctaaaataa

SEQ ID NO: 2721 - DNA, 828 bp, Zea mays
  Peptide Sequence Number=SeqID_44500
atgggaaatacaactcaaggacagtgtatggtgtttacgtggaacggcagaagaacaaacactaagcagcgatatgtctactgcactatacttgacagcattgtgaaggtgactggcatcataaagtttgatctacatgttgaaccggaaagtggtaggaaagaacttgaagtgggaggaaatgtacaaggcatatatgacctgggacctgatatatttggttcagaggcgatttttgttcccaaacatccaggtgtgtctggagaagaagatgacgactatttgatattctttgtacacgacgagaacacagggaaatctgaagtaaatgttatcgatgcaaagacaatgtctgctgatccagttgcggtggttgagcttcctaatagggtcccttatggattccatgccttctttgtaaccgagtatggatatattgatattaacctaatttcatgtgattggttacctgtcctcagcaatagaaatccacaagaaggcgttgcagtggaggtggaggcccgcgagcgcgggcaggcgcaggaggtcggcggggagcaggccggagagatcgttggagcacaggctgagcagctgcagtgcggttggttgaccgaacgtgcccagaggcacggcgcccgggaggcccagccccaggaaaagcagcgcgggcagccaggcggcatggggctggcaagcgggcggcgctggctggcggcgcggcgcagcgcgcggggtggcggcggggcgtgcgggctggcggccggcggcgggtgcgatctggtgggaagcaggaaaggagataggaagagagacgcgcggggttag

SEQ ID NO: 2722 - DNA, 699 bp, Zea mays
  Peptide Sequence Number=SeqID_44501
atggagggaggcgcggtccagcagctagtgagcggcggagcggacagcggagctagcctgctgctggcgtcgcgctcggcgtgggatgtggtggatcagtgccagtggatggaggcaagtagtaaagaggagagaggtgaagggtacaagtacaatggggcgggcctcgtagccatagctaagcggcacgtcgatctacgggaaacgaacgttctgtggtggcgcgatcaggcggcaaccgtgatccggtgcccgcggtgctttgcagcgggacttgagcccgaggatgactggagcctgactctggagatgcgaccaatctgctcgtatctggtgagcctggcccaaggtctgccccacgcgctccaattggttctcccgcgtaggtaccacacagtgcagaaaatagtatggtaccaatctgactcggcacgagatctcttccgcgaggacgagtccaagtccgtttggaccgagatggtgaccgagtcccttctcgatgaaggagtggaaagataccttggaactcgtcctgtcaacgactctgactcccctaagaatgccctggtcttcgtgagcatgtgtgttggcctacggaagcagcgcgatgattctatccaggagtttcgctgtcaagatgttctgtatctgaaaggaaaatgggcttatacatttcctctaatcaattttggtgtttga

SEQ ID NO: 2723 - DNA, 177 bp, Zea mays
  Peptide Sequence Number=SeqID_44502
atggcgacctccggcttgatggtgggggaaagcgagctgggctgcggcctctgcccctccctcagcctcaaggattttcatcaccagggctggggaggggagtgcgccgagttgagtggagccgacgccaaagtcgatcagccgaggcctcggatcgggctggtgaaagtggcctag

SEQ ID NO: 2724 - DNA, 267 bp, Zea mays
  Peptide Sequence Number=SeqID_44503
atgtcgggagaacatgccaaaagggagatggtcaccggcgataagcctgaaggctcgagaaggaagaacgatgaacaaactccatcaagggaggccggcgacaagcacaatgaggaatttggttcctccatcaagtcacataggaagagtgacaagaagaaaaagaaaatgaagaagctcaaggggggcacgtacaaggatactgagccccgacatgtgggcccaggggcaaaacataaggaaataactaatgcttgtaatgcctag

SEQ ID NO: 2725 - DNA, 3006 bp, Zea mays
  Peptide Sequence Number=SeqID_44504
atgcctcgcctcgcattcctccgccgctccctccccgcgaggcttctcgcgcgagcgtgtggtggtggtggtggtggagaccaggggagcccggaccaggtggcgcgggacgaggaggccggaggcagcggcggaatgagcgggcggtcgtcggcgggtgggccgtccggcggggagtgctacgcgtgcacgcagcccggggtgccggcgttccactccacgacgtgcgaccaggtgcactcgccggactgggacgccgacgcggggtcctcgctcgtgccggtccagggccaggcgcaggcggcggcggcggcggcggcgccgcggcagcggcacgcggcgcggtggctgttggggcccgtgctggacccgcggagcaggcgcgtgcagcgctggaaccgctggatcctgctgggccgcgccgccgcgctggcggtggacccgctcttcttctacgcgctctccatcggccgcgctggccagccctgcctctacatggacgccgggctcgcctccgcggtcacggcgctgcggacctgcgccgacgtggcgcacctcgcgcacgtgctcctgcagctccgcctcgcctacgtctcccgcgagtccctcgtcgtcgggtgcggcaagctcgtgtgggacgcccgcgccgtcgccgcgcactacgcacgctccgtcaagggcctctgcttcgacctcttcgtcatcctccccatcccgcagtacgctggcattggcacgcatgtgtgtggcacagtggcagcagggaggctgcagtttcttgaaagatcaaggggggatcccaagaccatgacccgcagtgattgctgggatggaggagaattcaggtggcggatttggagatatatatcacccaatcatgcggacttgcggaggggaaaaagaaaaagaaacagcatcatggttatcttctggctggttataccaaagttaatcagggaggagcaggttaagcttatcatgacaatactgctgctcatgttcatatttcaatttctccccaaggtctaccatagtatacacatcatgaggaaaatgcagaaggtgacaggttacatctttggatcaatatggtggggatttggtttaaatctatttgcctatttcattgcttctcatattgcgggtgggtgctggtatgttcttgcgatccagcgcatcgcttcctgcctccaggaagaatgcaagagaaacaacagttgcgatctaatatcgctagcttgttccaaggagatatgttttcaccctccgtggtcatcgaatgttaacggattcgcgtgcgatacgaacatgacctcctttagccaacaaaatgtgtctacttgcttgagtggaaaaggttccttcgcttatggaatctatttgggggctcttcctgttatatcgagcaattcgctcgctgtcaaaatactctatcctatattttggggcctcatgacactcagctgcatttttcatgaacttatacaattccttgaattgctcggcagtacttttggtaacgaccttgccccaacaagcaatggcattgaggtgatattcagcataatcaatgtcctcagtggccttatgctcttcacgttgctgatcggaaacatacaggtatttctgcacgcggtcctggcaaggaagcggaagatgcagctgcggttccgggacatggaatggtggatgaggcggaggcaactaccgtcccggctgaggcaaagggtgcgcaaatacgagcgcgaacgctgggccgccgtcacgggagacgaggagatggagatgatcaaggatctgcctgaagggctgaggcgggacatcaagcgctacctgtgccttgagctagttaagcaggttccactgttccatggcatggacgacctgatcctggacaacatctgcgaccggctgcggcctctggtgttgtccagcggggagaaggtgatccgggagggcgaccccgtgcagcgcatggtgttcatcctgcagggcaagctccggagcacgcagccgctgaccaaaggcgtggtggcgacgtgcatgctgggcgcgggcagcttcctgggcgacgagctgctgtcgtggtgcctgcgccgccccttcgtggaccggctccccgcgtcgtcggccacgttcgagtgcgtggaagcggcgcaggcgttctgcctcggcgcgccggacctgcggttcatcaccgagcacttccggtacaacttcgccaacgagaagctcaagcgcacggcgcggtactactcgtccaactggcggacgtgggccgccgtcaacatccagctcgcgtggcgcaggtacagggcccggacgtcggcggacctggcggcgccgccgttggtgggcgggcccgacgacggggaccggcggctcagacactacgcggccatgttcatgtcgctacggccgcatgaccacctagagatattgctgcttctgaccgcgccattgcggcctcagctgcaggctgcagctgctgatgaacagaagagatggcaggaccgcaggccagattcaggcggagcagagaacacaagtcggcgttcaggttctccaccaccagattcagaaaccgtctgttcgtcctctccaaaacgattagaatcgataaacgcgctcgtaaatcgtaataaccctaaaccaaagcgtgagcgagacgcgcgagcgccatcagcggcgaagctcgtacaccgggacaactccacaatacggacggattccaaatgcggaccgatagagattattactagttttgctcctacaattgtgttccaggttgctcttctgttgattagacatggtgctgatgctgatgctgaggacaagaggaaggctacactgtccttggcggagcatcgaacagcccaaggcctgcacttgtcgacgcagccatggcgatgcttgaaggttgatctagttctctgctttaagcctaaactttcatgtcctatcaagaggaatggaaagtttgataggagaaactgttctgagtag

SEQ ID NO: 2726 - DNA, 327 bp, Zea mays
  Peptide Sequence Number=SeqID_44505
atgtacctattccttattcttcttcttcctcccgtagcagccttcggcggccgcgacaacagaggccagacggtcgtggatctcttgcctcgtctcgttgctctcctggctcgccatgctttgggcgctgcgctcaagcgcaagggcctccgcttcgacctgctcaaggaggtggacgcgctgcgcagggccaagaacctccgcgccgaggccaagggcgcagcagacaggcccaggaggtggcaggccagggacctggccgtcttcgcgctcttcgccgccgcctgcggggtgctcgtgctcaccaggttcctgctctgcaattag

SEQ ID NO: 2727 - DNA, 579 bp, Zea mays
  Peptide Sequence Number=SeqID_44506
atgaagaggtcagaagtgcagcacggggcagggcattcgtcactcgaccgttggagtccagactccagccaggccatgcagctcccctccctccaggccaccagcgccaacggcaacggtcacttgccgctacgctgtcagacacttccattgtctccccggctatttaacccacccacccccgcttcgtctctcatgccccaaagcaaagcaaagcttcaaagcatctctgctaggattttagcgagcggcaacgacgagcgacccaaaaaagcaatcattagtcaccatatctggtcctctcgctccacccccctcctctgcgacttgaggcaggacaggaggcacagacgtgcaatggggttcgtgctggtggtctctctgcccttcatcttcttctccatcctcctcggcttcggctgctacttcctcggcaagcacaggggccgggaggagatgcggaccggcatcggcgtgcagatctacggcacgccgctgccgccgcccggcgtcgtcggagcctcctcgccgccgcctgagccgttccacagcaagaaacaatggtccgaggctgtgtga

SEQ ID NO: 2728 - DNA, 420 bp, Zea mays
  Peptide Sequence Number=SeqID_44507
atgggcatgatgatcggcagcggaaaagtcgtcgtcggggaactctggcgagcaatgtgcacggcaggagacgacgacactgagaaaaggtgtgcggtagcgaaccctaacgtgggacgagctaggtgcagggacaaatcttcctggcactacgatcgccgagcaagggaccactggaggagctccgaccggcagcaggttgcacagcaagcggcgccaggcgcacagtgcaggcaacgacgaggatacgtggtgcggcgagcaggacacgacaagagagtgacgaggttccgactgtggatggcttggattgctaaggaattggacttcggcggcggtagcactcagctccgcgcgggcagcaacaacaaagcaaaggagcgggaaggaataattggtggcgagaaacgagcacgatga

SEQ ID NO: 2729 - DNA, 345 bp, Zea mays
  Peptide Sequence Number=SeqID_44508
atggcgtttgaggaatatatggaaagatcaaaatggatgtatgaattaaatagaatgaaactcgggtttggttttgtcaaggactacatagtctggactttccacgatgagagaagacatgctactgtaggtgaatcatcatgtgctggaggaaactcattgacgacaaatgcaggtgggccaccaactggcacctttgttgctggcgacaataatgatgctgatcgtcgtgattatatcacaatggatgatttgtttagagatgatcctggcaacaagggtgacaatgaggatgtcggtgctaccttgctagagcttgagatgtggagcttttcaagaacataa

SEQ ID NO: 2730 - DNA, 618 bp, Zea mays
  Peptide Sequence Number=SeqID_44509
atggctgctcatcacgcccaccgctccccccaccgcagttcacacccgtgccccggctctcccgcctcattgcgcgtccgtgccccccatctactgctcgttgcccacgccctggccttcccctcaccacgtcggcccggatctgcacgcccgcctgcccctgcccatgatgctactctcttgcccagcccccgcgccgttcgcctcaatccacacggtgataatgtgcccccgcctcaatcctgcgaggctgtgatccacttgcacctgcgaggcctacactgcaacacgctctgcccttccccctcaggtcgaggcgacgaccgacgggcccggcgagcaggtggggatctggaacctcaagggcacgggtaccggaaccacttcctggatctggcgcggcggggggcagtcgcggaggccttctttcacagcgagatccaccgacggctggccgtcactatcgcactcatcgagcttagccgcatggggtacttcacccggctccccgggttcggtcgccgcctcatcccagactcttacctgagcttctccgcgctcccagcaggaagcaatgttgaggcggctaagcgatgctacaatggaacaatccaataa

SEQ ID NO: 2731 - DNA, 219 bp, Zea mays
  Peptide Sequence Number=SeqID_44510
atggggccgagaggccagcctctcatcgcacgcttctatctccacgtcgtcgctgccatctggggccgatgtccagctcacggatcccgcgtgccgcgccctacctcactggcaggcggacccgactatctcgcgcaattctccaccaacttcaggaactaccacattcctgctggtcttatgaagattaagaagaaggagttcctatccctcaaatag

SEQ ID NO: 2732 - DNA, 624 bp, Zea mays
  Peptide Sequence Number=SeqID_44511
atggctctcttcatcaagttgcggaggttccagtacatctcctttgcctcgggctcgtctggcttggggattgataaaaggcatcatggctgtcgtagccatgttttgcccggggttgaggaagtactgcgcactgtcgttgctcttagcgacctgataaaaaatcttcctcgctcgaggcctttcatcttcaaggcgtctctgctcaatgttgtggtaaacccggtcgagcctctcaacaagtgcatcaaggtcctcctgttactgttggagggcagcctcgtgagcgagaatgcacgcctggcactggccctggtattcttcttcttggatggggtaccccaagtccccccttcattgttgcctcgtggtggcgtgtccactaagcaggctctttctggcaccacatcggagtccaagccaagctccatcgaggaacttctcaagtcatcctcgaggaggtcgaggatggacataggcggaacgcctggaccccgggactatggcattggcctcattttggctaacggggcagagttcgctggtctcctgggcgaggaagttgagggagccaaaagtgatctggctgcttggaatgaaagtctcactcctggcggacgttga

SEQ ID NO: 2733 - DNA, 216 bp, Zea mays
  Peptide Sequence Number=SeqID_44512
atgtcagggactcaatttgtgaagaccagaaagatagaagggacccaaagtaaagtgtcagtggctggtacgataattgatcacgtgatgcggaagacgagccaagtcgaccccaagtgcgggctactccgcatggtgatgttgaaggacgaacctgctggatcaagtgctaaggcaaggatgatcatcaagtggtcgtcacctaacaaacactaa

SEQ ID NO: 2734 - DNA, 357 bp, Zea mays
  Peptide Sequence Number=SeqID_44513
atgcagaggtgcgctagtgccaggtgcggcgagtcagcagatcaaggaaaccgcccgcggccgccccaggggtccaggtctcctcacggcgacgggagagcgcgagccaatgtggagcgtgctccagtatatttattgccagagataaaagcatatgccttggtcagtgacttaagcttagaaaaagtacaatactttatgtatgaattcagaaatcccaatgatattcattctgaatatgtgcaaatgcagcttcctggtgttgatcccaatgatccatctgttaaagatttgttggcatcattgcacaaccagggagaggctatagcattgttcagcttcaccttgattaaataa

SEQ ID NO: 2735 - DNA, 339 bp, Zea mays
  Peptide Sequence Number=SeqID_44514
atgaaccgcggtgaggtcttcactgtcttccggtgtgctcggtcgaagccaaaattcgcggtgtcttcccttcctcgccccaaattcgtagtgcacggtcaattagtactcccttacgaccgtatagacccagcgtggctgcctgtttccaccggaattcgtcgcgacgcccatttcccgtcatcgaaccccgcaaagcgcactcgtctccgcgttccgtggctatgcgaacctgggtgttttcaaagaaaaagatttgatggtggatccatcatggccgtgatgggttcaacatcggaaaaagatgtacctctgccaggtaccaaactttgggtttaa

SEQ ID NO: 2736 - DNA, 489 bp, Zea mays
  Peptide Sequence Number=SeqID_44515
atggaaagggagagcgggtgggagggagggaggcgcactaccttttgggtggagatggagaaggaggcggcgccgaagcgaggatacacgcctacgatgcgtgcacgacgacctgtttgcgtcgacggagaggcgatgcaagcggagagaagacgcaaagaagactgggtttccgccgcagcggcttctttatcgagtattttttgtcggacactcggtaaagacagttttggccgagtgtcacctgactctcagcaaagaaaagtcactgtcacggtgccaggtgacaatgacactgactttgccgagtgtctactgtaccggcactcggcaaagaaactctccgtagcccctttatcagttcctttgccgagtgtattaggaggcactcgacaaaggctccgtcttttcccagtgccaactgaactagctctcggcaacggtagcacaagtgagcccctttgccagttcctttgtcgagtgcattag

SEQ ID NO: 2737 - DNA, 291 bp, Zea mays
  Peptide Sequence Number=SeqID_44516
atgttgccgcagagagcaccgccgctggtacatcctatagtgattggcacccagatcggcgccaacacactttttggcgactccactggaaaaatgtgtttgtatctattaaatcggcccctaatggctagttctaaggacaactccaatgtttcccccaacaatatcatcgagccgactctagagacattactggctgaagatcagcgggaattcgaggagcacacagagcagctgatcaaggaggtcaaggcaaagtacttggccaattttaaggtggacaggcactag

SEQ ID NO: 2738 - DNA, 423 bp, Zea mays
  Peptide Sequence Number=SeqID_44517
atgggcaagagtaacaaacgcaagcgcgagccgactcctccatcggaggatttcggcgactcagaatactcggaggaggagttctcctccgagtccgagggttctccggctcccgtctctcccccggcgtcgtctgatgattcagatgactcccaggggattgccgcggaggtctggtcttatatccgggccgtcgagcgctccgggctcgagggctcggatgagtcggagtactcctcggacgaggaggaggactcagactcgtccgaggagggcaacgacggcgatggcggagacgacgacgacggaggcgacggtgatgatgacgacgacggcggcaggggcggcaacggcggtggcagcaagggcggcagcggcagcggcggcggcagcagcaaagacagtaacagggccagttgctaa

SEQ ID NO: 2739 - DNA, 465 bp, Zea mays
  Peptide Sequence Number=SeqID_44518
atggcccagccctcgagctgtcaaagtagtgattcgacaaggcagtataccaaagtacaattgtatgtggacagaaagtataacgttattgaaaatgagttcacagacttacaagtggcagcccgccatctagagtttatggtgttgacgttcctcctccagcacattgatttcttcgagctgggttgcttctacttctgcgatgcttttgaaggtgctaaaggttcaacacaaaccaataaaaagatcaaagttagggttcaaaagaaaggagcaaaagaaacagaagagaaccctggtctggcgcaccggactgtccggtgcccaggaccgtacgtcttcaaacttgccaccttcgggtttctagaaagccattctgctataattcactggactgtccagtgtgccagcggagcaacggctagcaagcgcaacggtcgactccaacggtcgcctgcaacgtga

SEQ ID NO: 2740 - DNA, 525 bp, Zea mays
  Peptide Sequence Number=SeqID_44519
atgagcttgccgaccacccaagacttggtgctggacgccgagcgtgtcaacgactccaccttccggtgttacgtgtattgcctccacttctttgcgcttgaggtctgccctgtcctactcattgacgaagaacccgacaaccgttgtattcgcctcctctcctgcaagctagagggatcactgctcatggaggcgcataatgagaaattcttaggtaagggttttctgcagcagcaggtcacaagatttgacgcttcaaccgcttacatcagatgctacaatagagtcagagttataggcgaggatcctgataatggatttaagcctacaagtggaagggtggagtcggatggaaacagtcatgtaatttatgcaaagactgtcagtaagatgataatcacccccaccaagtattcatacgacttcaagactttgatgtatattgtgttttgtacatgtaccattgactaccgcagatacatatttacatctcggcaacatctgccacttgcacaaatgcactaa

SEQ ID NO: 2741 - DNA, 312 bp, Zea mays
  Peptide Sequence Number=SeqID_44520
atgaactcggagcggcaggcgacgaaacgcgccttgggggtgaacgacgacgacgacgagacgatggatggcgatgaggaggaggaggaggcgcggacgatggcgcgggagcggtggaaggcggaggggagcggaggcggcgagcagagtggtgacatggcagtggcgaaggggagccagggcaagggcatggcggtggcggaggccggatggaggcgagacggagacaccaagatgcgaggaagagaggagatagtacgggcggagacaccaagatgcgaggaagagaggagagagtacgggaggccgtga

SEQ ID NO: 2742 - DNA, 465 bp, Zea mays
  Peptide Sequence Number=SeqID_44521
atggcggtgctgctggaagttcgccggactgacaaaattgcattcccattggcatgcttccggatattctctcgccgtccagacttccggaatttatgggttatgggcgatggaacggaggatcctcctctcctcatcctagaaaaggggttatccatgccggttgtctggatcaatccgacgcctggaccatcggaccggaatacctctccagctgaaaccgttgcgacagtgccattaagagatacgactacgagaacggaacgctactgggatggaagccaaagattgcgagtgatgccgcggactgacgaaccctcaaccaactggttgtatcgtatggatgtccgagactccgagtgcgagaggatgaacgtcactagcagagtggttaaccctcgcggactgtggtcaagctgtcgcttttgctgccgctgtccactctgcctgtcaggcgcgctatga

SEQ ID NO: 2743 - DNA, 282 bp, Zea mays
  Peptide Sequence Number=SeqID_44522
atgttcgcccgcgcgggtgaggtatccaccgagctcgcggtcgacctgcgcgttgtcggaacccgtcgtcaacgtcggtgtctctacaggcgcattcctcttcttcgtcgatatatattaggcagcatcgacgcattgcgtgctgctcgcaatagcacagacagggctcgacatgggcgatgcattctcttcattcacttgcacacaacagctggatgtgactatgtgaacgactctacaaaagttgcataccatgtgctcgatagaatgtcgatgagctaa

SEQ ID NO: 2744 - DNA, 157 bp, Zea mays
  Peptide Sequence Number=SeqID_44523
ccaacatcccagtctggtgaccacgctcacccaactgctcacctcaccgtggccaggacaactcagcaagtgtatgctgcttggaacaggatctcgccaccgcagatcggcgccgttggcagcctgaccgtcaacccgcttaaccgcatcttctccg

SEQ ID NO: 2745 - DNA, 414 bp, Zea mays
  Peptide Sequence Number=SeqID_44524
atggcgcacaggacgccggaaatccagctcgatctggtgggcgtaggggcgtggccggggtataaactagtccctggtattctccctcctagatcacccgtgccaatttccctgagaaccatcaccgccgtagagttgtgggcgcggcggaagaaccttcgccaaacaccattgccgccgacccgaattcgctctgccgccgttgccattgccgaggtgctggcccctggagtttcgctggtctcgaaggaaggtgtccgtgttcgtattgctctggattggccgccagcgtcgacgaatttcatcgccgataccgcggatccgccgtgtgccgtgggcggactacctcggtgcttcgattggcggtatggaaccttctctaatgctagccgttgtaccaatttcattttgtga

SEQ ID NO: 2746 - DNA, 162 bp, Zea mays
  Peptide Sequence Number=SeqID_44525
atgaagatcaaagtccatccaagtctagaagtaagcccgagacaagtgaacaaaggctggcgcatggttgacaagagggactttcccttttttcccttcggaactggaactactgctggagcatctaattcatcagttactggcatgtctgtgctgtggtga

SEQ ID NO: 2747 - DNA, 464 bp, Zea mays
  Peptide Sequence Number=SeqID_44526
tgaggctggctcttgaaaatgagctaaactctgatagatttaaaggaatactacactttcacgagcgggaccttgctaaatgtctaatatcttttcctattggtattggtgatgttaagttcacaggaaaagaagacaaggaagaagctactacttatatgattgagcaagctgtgggtttccatcatcatttggctttgcccttcctcctcgttttctttgagattggcaatcttatccacttttttactttgatccacacagatgaaggcaagcttgtcttcgctctatcttaccaggaaagtaggaaatacacacccctgttggttaaagcagactcgtatgcctattctgatgcggagggatcagccacctctttctgttcgaaagattccagacctgacttaaagccctctttcacaagacatttggttgatcaggatttggtaaacctagagatctga

SEQ ID NO: 2748 - DNA, 1125 bp, Zea mays
  Peptide Sequence Number=SeqID_44527
atggaggaggtggaggtggccaaccgggccgcggtggagagctgccaccgtgtgctggccctgctctcgcagcagcgggacccggccctgctcaagagtgtagcgtcagagacggccgaagcctgcgccaagttcaggaaggtagccgccctcctcggcagcggtgtcggccacgctagaggcaggttctccagacgagtccggcctctggggctcgttggccacaagagccccgtggggagcggcggcaacaacccggtggagatgctgcccagcgccgccgccgttacgtccccgtctccgtcaaccagctacccgccgcaaatgcgcgctcggctgaacggcgtgccagacccacgagggctggacatggcctgctccagcagcagcaagagcggcggcgttggcggaggcggcgctcatccattcggcggagcgccgaagctggtgcagccgctgtccgtgcagttccagatcgggaacgtcgcgcacaggtacccgttccaccagcagccgccgtcgcggcagaagctgcaggccgccgagatgttcaggaggagcagcagcgggacgatcagcctcaagttcgatagcccaatccctagcggtggcggtggcgccgctggcaccgtgtcgttcgtgtcgtccttgagcatggacgggagcgtgggcgtggcaagcttggacgggaagcggccgttccatctggtcggcaccccggtggcggcgagcgacacggcggcagacgcccaccgcgcgcccaaacgccggtgcacgtgtagaggaggcgaggaggatgggagaggcaacaagtgcggcacctccggcaggtgccattgctcaaagagaaggaagctgcggatcaagaggtcgatcaaagtgccagccatcagcaacaaggtcgccgacatacctcccgacgagtactcgtggcgcaagtacgggcagaagccgatcaagggctccccgcacccgaggggctactacaagtgcagcagcgtcaggggctgcccggcgaggaagcacgtcgagcggtgcgtggacgacccagcgatgctgatcgtgacgtacgaaggcgagcacggccacacccagctgccggcgcagccttccacccagacgtag

SEQ ID NO: 2749 - DNA, 306 bp, Zea mays
  Peptide Sequence Number=SeqID_44528
atgaagctcatcgtgccatttgattgcactagatcgccgtggtttagccggaacatccgccgccgacaagatcccccgcctgcgcaagtgaaccagacgattccggccacctccgccgtcgagccgtacatcgttgaggtagccccggatcgagcaccagagcctgcaccagaggatctgcctgccacagctttggaaggttctttggaggacatggttgctggagtgacttggccgtccatcttgccaccgggttggacagtcgagtgggatcctgcctcggctgaggaggagcatgaggagtga

SEQ ID NO: 2750 - DNA, 1350 bp, Zea mays
  Peptide Sequence Number=SeqID_44529
atgcaagttgaggaagaatcctcaagtgatgatgatcttgatgcaaacattgccttgatggtgagaaagaccaccaaaatgctgaagaaactcaaccgagaagcagcgccagcagccacaccctcccctggcagcctgcgcgcgcggcctgccccgcatccccggcccatcccgcagtcgctgcgtagcctagcaaaccgtgctggcccagcgccacaaaccctagccgcctacacgcgctcccacctagccagcgcccctccgctcgcccagccgtcgcagcctagggcccacgtgccaggcacgcgtcgccgcgccctgcgcgtgactgcgcgcagtcgcgcgcttgcccaagccccggcgtgtgtgtgccctagggctgccgccaccgctggctatagggggcccacctgcccaactcggtccacggtgtactattcatcttccccaactgcccacgaccacgatctcccacaccgcgctccactcaaaaccgcccagcaaggccgtggccgagagctccgcacgctgtgctccacgcctcgccctcgcctctgtgccgtcgctgttcgtcgcgccctcgtggttgccgtcgggcagtcgccgcgcatagggccccgccgttgtggtgttcttgccctcgccgtgtcgcgccattgtcgtcgtgccccaccgtcctgcagcctcggtagcagcgagggtgcgcgcgacctcgacgcggctgaccctagcacctccaggcggacgcccaagtcgcggcaaggcagggcgatgccccttgctgcgcgcgcgctctaccgagctgtggccatggcgtccagccaggaacagccgaaccgccccgcccctcagaccgtggccctagccgtgttccccgaccatgtcgctgctggccgtggccacggctcgcccctacacgttgtgtccatcctcgacttcgataagccgccaacaaggcctcccccagccaagcctcgccgtcgacgttcgcgtgcccgtgccacgaagagaagcttcatcgccgtccctcgccccgctattgttcgtgtcatgtggccagcgcagtcctacgcgcgctccgcgcggtttgtgcagcaccccacacagcccctgcgcctttgtatgacacgtttctgcgccctcgcagcgcgtcgtaggggtttcgacgacaggaactggggtgtagttcgcttcgccaccgtgtcgttaatggggctcggtgtatgtggctcgctctgccaaggtggtgatgaggatgatagttttggttatgactatggtaatggtaaagaagaaggtgttgaggtggatctccaggagttccaggacttcgacgagtttgaggattag

SEQ ID NO: 2751 - DNA, 168 bp, Zea mays
  Peptide Sequence Number=SeqID_44530
atgggagaccatatcatgcacaacaaatttgatgcaaagagttggcttgctactgtagagaatttagagaaaaaactcctaccagaaggagtgaagattcaagctgaagaggtgactgaagaagagtttgctccagtgcctattcatcaagtggatggagctatctaa

SEQ ID NO: 2752 - DNA, 168 bp, Zea mays
  Peptide Sequence Number=SeqID_44531
atgggagaccatatcatgcacaacaaatttgatgcgaagagttggcttgctactatagagaatttagagaaaaaactcctaccagaaggagtgaagattcaagctgaagaggtgactgaagaagagtttgctccagtgcctattcatcaagtggatggagctatctaa

SEQ ID NO: 2753 - DNA, 321 bp, Zea mays
  Peptide Sequence Number=SeqID_44532
atggccgagcagcttagtgttgcgaagaaacgacatgagttgggcgcgccagagaggatagttggtggtggtgaggcgtatggtgactgcttgatgcatagagatggcagccatggtggaggaggaagacatcatagcggaagaggtggtggaaggggaggaggaggagattccgacggtggtagtggacatgctaaaccttcggctctgggactaaaaattagtccctatcaaccaaacacccccttaatcatcgttagcaggaagaacaatttgcgacagccgacaggtggcaagtcagcctgttccgtcgctgaatag

SEQ ID NO: 2754 - DNA, 1803 bp, Zea mays
  Peptide Sequence Number=SeqID_44533
atgagcttggttgctctgtatgcaggcacaatcaggccactagaagacgagaaagagcacagacagtacaccctaatcagcagcagagcagtgagctcacaccacgcttctattgagccagacactgatacgtgggtcccatggacccggatcctggaggggccgaaggatcctctgctccgtcaaagattcccaacgaagcctcaagcacacctgcgccgcagcccgcagttgcacagcgcaggcgatcatcaccaaagaatccgggatggcccgcgccgcagctccactcccaccgcctccgtgtcgtcttcctcgtcagcacgcagcagtcaggtcaccaccaacagcaacagcagtagtgccgtcgcgttgtctcccactcccaagtcccaactcccacctcccccgcccgccgttcaaatctccctagcctcccgaagtaggcaagtagccctccctgttccatcgaacccagcagagcagccagccgaacaacgaagcatgccgtcgaagccgaacgccgcgtcgcgcctcgtcttcctcgctttcctcctcgtcatcagcgccgccgcggccaacgatgacgccgcggcgcggcggacgatggagcagttcgccggcttccccgcctccgacgacggcgagggcccttccagcgacttccacgtcgactccgagggcctccagcgtcagatcgatgaactggcctcgttctccgactcgcccgcgccgtccgtgacccgcgttctgtacaccgacaaggatgtgcaggctcgaaggtatataaaagggataatgaatcaacttggccttgttgttcgagaagatgctgttggtaacatatttggccgctgggagggttccgagcctggactaggagcagttgcaactggatctcatgttgatgccattccattctcaggcaaatttgatggtgttgttggagttctgggtgctcttgaggcaattagtttgctgaaaaggtctgctttcctgccaaaaagatctttggaggttattatgtttacatcagaggagcctacacgatttggaattagctgcttgggaagccgcttaatggcagggattgaagaacttgctcaatccctccgaaaagtagttgacaatcagaatgtgtcatttttggatgctgcagaatctgctggctataagttgaatctagaggacctgcatagcgtatttttaaagacagacaaatactctgcttttatagaactgcacattgagcagggtcccatcttagaaaaggagggtatccctattggcattgttactgcaattgctgctcctgcaagtcttaaggtggactttgaagggaatggcggtcatgctggagcagtgctgatgcctgcaagaaatgatgctggactggcagcagctgaattagcattagcagtcgagaaacatgtcctggaatcaggatcaattgatacggttggcaccgttgatgtaagagatattgatgagaagagaaggaatgatgtcattgagaagattcgccagtctgcagcacatatttcaaagaaccgtggagtagagctttcagaatttaagatcatcaaccaggacccacctgctctatctgacaaatcagtcgttgacgcaatggaatttgctgcaaaacagttaaacctggcatacaaaaagatgattagcagagcctaccacgattcactcttcatggccagccacaagccggaggagtatgcatcacccgaggacatggcgaatggggtgaaggtcctagccttgacaatggctacgctgtcgctggagtga

SEQ ID NO: 2755 - DNA, 963 bp, Zea mays
  Peptide Sequence Number=SeqID_44534
atgtccgttgctttaatcagagggcattgcctcatgttggtaatgatttcagcaaaggatgaaccagacacagagctacctccagctgttgatgggttgcttagagttcatagaaggataacagatggtttagaaactgaaactgatcagcctcaacgagctactgtcaacactgggccgacaaggctactggttccagcttcccaagctggcagcctaattgggaagcaaggagcaactattaagtcaatacaggatgcttcaaagtgcgttctccggattgttggtaagattaaagcacacaatatgcacagagagcaacctatgcctcctccacaggcatggggcccccctcctccgtcaccctggggtcatccaccaccaaaccttcctcctggtggcccaggttatgttgggaacccacactacatgcctccacggccacaagagaactattatcctcctcccgatgtgccccctgtagaaaagcagccacactatggaatttcttcatatggacgagatgcacctccaagtgctcccccagggaatcaaaaccaagcacatgggtcatctcaggtgacacacagcatgcaagttcctctttcctatgctgatgctgtgataggggcagctggtgccagtatcagctacatccgcaggcatagtggagcaactataagtattcaagaaggcgctcctggcgagatgacagtggagattacaggaagtgcttcacaagtacagactgctcaacagctaatcaagaatttcatggctgaagcttctccccagggaccaccagccccaggtccacacggtcaaccagtggacacgggttacggctcgtacccaccttacggtggagcatcctatgggtctcctccaggtgctccagctccagcgcctcacaacggtggaagttatggtgctgcaccatactcgtcgagctatggatactaa

SEQ ID NO: 2756 - DNA, 504 bp, Zea mays
  Peptide Sequence Number=SeqID_44535
atggcgagagcgggtgtggtgcacggggcgtggctagacgcgaccccgacgccaagcgcgggcatggctccaacggcgagagcgtgcgtggatctcgatgaatcggtcgtgcgcaagatttctgtgcccagcacgaggtccacggtgttctgtgccagcgatgcaaagatagggaagaggagcgagccgccgcaccgtcgaccccaaccattgctgcatggaggtccgccttgggcctccacgatgctccatacacgcagtggaggggcgccaacttccttgccccgggggagcacaacggacacagtggagggcgcccagtctgcgtgccaacttccttgccatgaagtggagactggaggcccctgtgcctgcacacccgtcaacgccatcaagtggaaccgcaccagcaccagcgagtgccccctactcgtgctctcagtgcgccatcctcgtggtcggccaggagcccccaccgcacggatcaaggttctctatgcttaa

SEQ ID NO: 2757 - DNA, 2592 bp, Zea mays
  Peptide Sequence Number=SeqID_44536
atggcgtcccgctcctactccaacctcctcgacctggcaaccggagcagcggaccaggcgccggcggtcgcggcgcttggcgcgctccggcggcggctgccgcgcgtggtcaccacccccgggctcatcgacgactcgccggcgtcgccgtccacgccgccgcggccgcgcaccatcatcgtggccaaccagctcccgatccggtcccaccgcccggagtcgccggaggagccctggaccttcgagtgggacgaggactccctcctccgccacctccaccactcgtcgtcccccctgatggagttcatctacatcggctgcctgcgcgacgacatcccgcaggccgagcaggacgccgtcgcgcaggcgctcctcgagacccacaactgcgtgccggccttcctgcccacggacatcgccgagcgctactaccacggcttctgcaagcagcacctgtggcccctcttccactacatgctgccgctgtcccccgacctcggcggccgcttcgaccgcgcgctgtggcaggcctacgtctcggccaacaagatcttcgcggacaaggtgctggaggtgatcaacccggacgacgacttcgtgtgggtgcacgactaccacctcatggtgctcccaaccttcctgcgcaagcgcttcaaccgcatcaagctcggcttcttcctgcactcgccgttcccctcgtccgagatctacaagacgctccccgtgcgcgaggagcttctgcgcgccctgctcaactccgacctcatcggcttccacaccttcgactacgcgcgccacttcctctcctgctgcggccggatgctcgggctctcgtacgagtccaagcgggggcacatttgcctcgagtactacggccgtacggtgagcatcaagatcctgcctgtgggggtgcacatggagcagctcaagacggtgctcgggttgccggagaccgaggccaaggtgtccgagctgatggagatgtactctggaaaggggagagtggtcatgctaggcgtcgacgacatggacatcttcaaggggatcagcctcaagctccttgccatggaggagcttctgcggcagcaccccgagtggcgggggaagctggtgctggtgcaggtggccaacccggcgcgagggagggggaaggacgtcgccgaggtgcagaccgagacgtacgccatggtgcggcgcatcaacgaggtgtacggtgagccggggtacgagccggtggtcctgatcgatgagcctctgcagttctacgagcgcgtggcctactacgtcatagccgaggtgtgcctggtgaccgcggtcagggacggcatgaacctgattccctatgagtacatcgtctcccggcaggggaacgagaagctggacaggatgctgcggcaggggaagccagaggagaagaagagcatgctggtggtgtccgagttcatcgggtgctcgccgtctctgagcggcgccatcagggtgaacccgtggaacatcgaggccgtggctgacgccatggagaccgcccttgtgctgcctgagaacgagaagaggctgcgccacgataagcacttccgctacgtgagcacccacgacgtcgggtactgggctaacagcttcctcctggaccttgagaggacctgcaagtatcattctcagaagaggtgctggggcattggcttcggcctgcggttcagagtggtctcgctcgacctgaccttcaggaagctttccttggagaacatccttatggcataccggagagccaagacacgggcaattctgctggactacgatggcacgctgatgccacaggcgattaacaagagcccgtcaactgaatctgtgcggatcctcaacagcctgtgccgagacaaggacaatgtggtgtacctatgcagcgggtatgaccggcgcacccttcatgagtggttcccttgtgagaaccttggcatagccgcggagcatggctacttcctgaggtgtaagagggacgcggaatggaagacctgtgtcgctgccacagactgcagctggaagcagatcgcggagccggtgatgtgcctgtacagggagacgacggacggctcaaccatcgaggacagggagacggtgctcgtgtggaactacgaggacgcggaccccgacttcgggtcgtgccaggccaaggagctcgtcgaccaccttgagagcgtgctcgcgaacgagcctgtgtcggtgaagaccacgcctcactcagttgaagtgaaaccgcagggcgtgagcaagggcttggtggcccggcgcatgcttgtgtcgatgaaggagcggggccagtgcccggacttcgtcctgtgcatcggcgacgacaagtccgacgaggacatgttccagctgatcgccaccgctgcctgcggggactcgctggcgtccaaggcggaggtgttcgcgtgcaccgtcggccgcaagcccagcaaggccaagtactacctcgacgacgcggcggaggtggtgaggctgatgcaggggctctcctacgtctccgaggagctggcgctggcgaaccagcgggatgaagacgaggactcctctctggacgacgtgtgggagtag

SEQ ID NO: 2758 - DNA, 1044 bp, Zea mays
  Peptide Sequence Number=SeqID_44537
atggggagcagcgcggtgcaggtgcagcggcgtaggcggcagttgacgctggttctggtgaccacggcggcgctgctggagcgcgcggacgaggcgctgctgcccgcggtgtacaaggaggtaggcgagtcgctgggcgtgtcgcccaccgcgctgggctccctcacgctgtgccgcgcgctggtgcagaccctgtgctacccgctcgcgacgtgcgccgcggcgcgctacgatcgcgcgcgcgtcgtcgctgtcggggcattcctctgggccgtggccacgctgctcgtcggcgcctcgggcacatatctccagatggcgttggcaaggggcttcaacggcgtcgggctggcggtcgttgtgcctgcggtctactccctggtggccgactacagcgacgacggcacgcgtggcgcggcgttcgggtgggtgacgatggcgcaaagcatgggccacgtcgcggggaactccctcggcgtgctgctagcggctacaagcttcctcggcgtcccaggctggcggctggcattctacgccctcgcgctcgtcagcgcctcgatcgccgccctaacgtggctcctcggcgccgacccgcgccccgtcagcgtgaaggccacggctgcggccacgctggcccaactcgtccgagaggccaaggacgtggtgaaggtgccgacgttccagatcatagtggcgcagggcgtggctgggtcggtgccgtggtcggcgctcagcttcgccgccatgtggctggaactcgtcgggttcacgcactggcagaccaccgtcatcactagcctgaacagtctcgctaacgcgcttggctcgctgttcgcggggttcgtcggggacccagtggcgctgcggttccccaacacgggcaggatcgcgcttgcgcaggtgtgcaccgcgtcgagcatcccgctcgccgccgtcatgctgctggcgctccccgacaacccctctgcgggggccgcgtacgccgccatgttcttcgtcttcggcttcgtctcgccctggtgccccgcctccacaaacaagtga

SEQ ID NO: 2759 - DNA, 852 bp, Zea mays
  Peptide Sequence Number=SeqID_44538
atgaggctatggtgccgctgtgtatgggtggcgcaggggtttatgggttttctagacctgctggagaatggttcctttggaggcccctcacaggaagaacagagtgctctatatacttttctttatccaagcaaagacttacttccagatgataaggagatgagtatatttgatcatctagaggagcttcgtgacaggattttcatctcagttttggctgttggggctgcgatattaggctgttttgctttttcaaaagatttggttatttttcttgaggcaccagtgactgctcagggtgttcggtttttgcagctctcgcctggggaatttttctttacaacattaaaggccctttcttatttcatggttctagcaatgtgtaatccaatgattgtggtcgtacatggtgcacaagtacctctttttttcctggaatatgcaagagaactgcgcaccaataatattaaggagataaaagaggtttcaggttattgtggccttttacttggaagtcctatcattttgtatgagatcattgcatttgttatcccagatggggcagtggaatcgttgtggtcaatagaccagtactttgaattcatacttgtgctgatgtttagcacagggttgtcctttcaggtccctgttatccagcttttgctgggacaacttggattggtttctagtgaccaaatgctttcgatctggagatatgttgttgttggtgctgttgttgctgctgctgtgcttacaccttcgacggacccgttgacacaaatgctcctggctggtcccttgcttggtttatacttgggtggtgcatggatggtcaagataactgggcgctaa

SEQ ID NO: 2760 - DNA, 411 bp, Zea mays
  Peptide Sequence Number=SeqID_44539
atgggtcagcagctcgtgccgagtgccgacgccggcgggcgccgtcttcaactgctgcgcctgcgtgctaggatggctcgccgtctactgcgccaccagcctgctctagatgctcagctctggctattccgaatcacgagagaagataagcagctaaaataccgagacaggttcaaattaaatagggaacgagaaccttttccgctgtcggaattttttctcgtccaactgcgagtcccgtggtgtcagcctcagggcaagcaatatggcattctagctagtcatggaggatgggcgccagccgccagcagccagcaggtcgagagtacaccgtcgggcgtcagcatgtgcatcgggctgctttttgctactgttggctccgacaagcgcacagtgcttatcgtacaataa

SEQ ID NO: 2761 - DNA, 657 bp, Zea mays
  Peptide Sequence Number=SeqID_44540
atgggcccctctcctcgctctcgctttgctctcaccgtgaccaatttccttcccagcagaataactccagatatgctgacatttccaggcactctgagtacttgctctgagaaatccaaaggtggaacaagaaacaaagtgctcccttctccaagtttacaaactattgcacactgtttatcacctaggagcgcaacttataagctggtactgcaattgttggttgcccagtatgattctataatttacaagccgacagccgtgacgatgacgacaggccgtgtgggctgtgttatttggtgcggcccacgtaacatgcccagcacgtcgcaagctctcgggccaacctggcgttcgggtccccactccctctatccctgcccagctttctcctccctctatcgcttcgcccaccccaccctgcgacgcaaccgccccgcgacgcctgcccacaccctacaccaccgaccatcgtctgcgcttcgccccaccccgcggccgaccatcgccatgcacatccaccactacgtcgcgtgcctcctctccaccactgttgccccctcctcgccgtcgcggctgcccgttgcgtcctggctccacactgatgatgacgatgaatactacgccttctgcaagctcagccgcccggccccatag

SEQ ID NO: 2762 - DNA, 1248 bp, Zea mays
  Peptide Sequence Number=SeqID_44541
atgaccgcgtcaaaaaaggtgcaccatgtcattcgatttcgtatccttttcctctttctctctcttacaacagggaccgggaaaggggataccccgaaagggatccttctccgcgaaggaagcgggccccgagcccccctactgatcagaggttcgaaggctggcccctcggaagggttcaacagtcgcctcagagcactcgggctccgcacccactactggctggccctcgaagggttcgacagtcgcctcagacgcagagcgagggatgaccctgggtatgttcgatacataaccaaggctcgggctacgctcttgagcgccgcctgcgccgctccgactgctgtgccactcgacagagtgaggctgacagcagccaagtccggcctcgggcgccataggaagctccgcctcgcccgaccccagggctcggactcggcctcggcctcggccccggaagacgacgaactccgcctcgcccgaccccagggctcgaactcggcctcggccccggaagacgacgaactctgcctcgcccgacccagggctcggactcggcctcggccccggaagacgacgaactccgcctcgcccgacccaagggctcggactcggcctcggccccggaagacgacgaactccgcctcgcctgaccccagggctcggactcagccctggcctcggccgacggtctccgcatcgcccgacccaagggctcggactcgacctcgacctcagaggagcctccgcctcgccctacccagggctcggaccgaccacgtcacaggaggggccatcattaccctacccctagctagctctagctacggggaacaagaccggcgtcccatctggctcgccccggtaaaacaaataatgatggcgccccgcatgctccatgacgacgacggctctcagcccccttatggaagcaaggagacgtcagcaaggactcgacagccccgacagctgtccttccgcaaggctccagcgctcctccgacggccacgacatcacacgaacagggtgccaaaacctctccggctgccacgacggcatcccgagacgaaacacgctggtgacaacaggaacgtcgtcgccgccgtggattcaggaatcgttcttggatccaagcagaagggggacaagctaacggcaggcgagtcagcgtcgggccaggaccgttcttccgagtctggcgacgggcgcggcatctgcgacatgggagggaagcggtgctccctctag

SEQ ID NO: 2763 - DNA, 213 bp, Zea mays
  Peptide Sequence Number=SeqID_44542
atgtggacgctgctaagcaaggggattgtagccttgaaggccgggctggcatacaatgttgtccatggactcttactgctggtgttggcccgtgacaggctcctgggatcttacaaggtactaatgcaaagccttttggcacccgcccccaaacaaagcacgctctgtggtatgtctcaccaacgacaaactgagaagaatttgagttcttaa

SEQ ID NO: 2764 - DNA, 735 bp, Zea mays
  Peptide Sequence Number=SeqID_44543
atggcctggcagtggcaggcgcttacaatccgtatggaaatggactggcaggtgcttatggtgtgcttggtgctcatgctgcacaggaaaattcaactgaaacatgatcgaaaaaatgaaaccaaagtggatagtgaacagaaattcacgcaacacagccgcaacgcagaaattcacgcaacacagatactggggggcgccgagtgcggagattgctcgtttccaagtgcggagattgcatcgcaccatggagcggaggtggagggcagaaggttcgcgacgcaccaggatctgttgggggcgggcgttgctggcgcggcggggactgcgggcacagcagctttgcgggggcgcggcgaattcggggacagcggggacgagcacggcggcggggactgcgggcacagcagctttgcgcgggcgcggcgaattcggggacagcggggacgagcacggcggcggggactgcgggcacaacagctttgcgggggcgcggcgaattcggggacagcggggacgagcacggcggcggggactgcgggcacagcagctttgcgagggcgcggcgaattcggggacagcggggacgagcacggcggcggggactgcgggcgttgcagctttggcggggactgcgggcgcgaggacggcggcgaggactgcggcggcgaggagtcacgagcgcgggtaattgcgggcacggcagaacagaggagatgtacacgcctacactaa

SEQ ID NO: 2765 - DNA, 525 bp, Zea mays
  Peptide Sequence Number=SeqID_44544
atggcgaaaccggctggtgggcgacgccgcgagtcagaccggcctccaccgacttctctgcatggtcatcggagcagcacaaggatcatcgggaggaagagagtcgccgtctcgccgactccgggctcccggaccccgcactcgccatcacgcaccctgcgcaagcagcgaagcgtccgcttccacttccacatggacgacgccgtcaacctccttgagtcgctgccgctggatgtactgataaaaatcttgtgtaaggtgaactacagtgatctgaggcaccttctcctagtgtcaaaacaagtcaaggaagcaacaatttatgctagggagctgcatttcaagttttcgacgccgtcggcgaagcccgtttttagagacgaggaagccggcggtggcgacgacacttgcccttgcgcgcccaagcaacaccgggctgcaaagtcacgcttgcggggccagaacctagagagaatcgccgtcaacctgtcggcgtcgtacgagagcatgctccccgaggtctag

SEQ ID NO: 2766 - DNA, 123 bp, Zea mays
  Peptide Sequence Number=SeqID_44545
atgaccattcgtccattatcagaagtgaaggctaaacccaaattatcagataccggtgtcgacatattggtaaatgcccattatttcttgtctgaggcaggcattgaagagattggacattaa

SEQ ID NO: 2767 - DNA, 190 bp, Zea mays
  Peptide Sequence Number=SeqID_44546
atggcacgagatggcctgttgccatccttcttctctgatgttaacaagcaaactcaagtacctgttaagagcacaattgtgacaggcatctgtgcagctgctctggcttttacaatggatgtctcacagttagcaggaatggtaaggaaccagctatctgttcctgtttgtgttggtggagaagacacag

SEQ ID NO: 2768 - DNA, 231 bp, Zea mays
  Peptide Sequence Number=SeqID_44547
atgaccccaagtttcatcagagatgaactagctgctgatggaaagcctctgacgtgcttcgtgtcccaagagctgaagttgaatattgcctctggtgattcaaactttttggatcttgaatggctttccacctcaggcaactcaagtgatgaaagggtggagaggagaggtcagaggaaggatggcgatgactcgacgtttcgtttgactgactcagtctttctcccttga

SEQ ID NO: 2769 - DNA, 298 bp, Zea mays
  Peptide Sequence Number=SeqID_44548
gcaagtactgcgagaatgtcatggggatgttgcgacagttcctgatgatgattcaattgaccaatcagatggcaggatccatgactatgaaggcaaggtgacattagctactgatgttaatgaatatgttacttctgcggcaaacaacaacgaggagaatcttgatattacatcagtacagcaatctgaagtcactagagctgatttcttggatgtcacaagcaatactgaatacaacctaacagcaactccagattatgcaacttcaagtgcactgttgcaagattctgcttcatag

SEQ ID NO: 2770 - DNA, 630 bp, Zea mays
  Peptide Sequence Number=SeqID_44549
atggtggcctccagcgcactgccgtcctccaactcctccccatcggctgccttcacccaaccgatctggacgggcaagacgtcatcgggtggatcgcggctggcctgcggaggggcgctagggcggtcgaagtggatttggcgctgccgctgccggaggaggagggcggggaggaggaggaggaggagggagaggaggaggagggcgaggaggagggaggaggacccgcacgccggtcacgaggcgccactcttggagctccccgccgatctgttccaggccaggaactcactggagcggctggcgctcagtcggttcagcctccgcgccgttccgctccccgcggtgggtctcgccggcctccgctcgctctccctcagccacgtcgacgtcaccgacgaggcgctccggggccttgtcgccaactgcccggcgctcgagcgcctcagcctgaagcgctgctcccgcctcgccatggtgagcgtggccagcgagacgctgcgggtgctggtgctcgtgggctgccaggccttgaaacaactctgcgtcgacgcgcctgcgctagagtcgttcgccctgcactgcaacgtcttcgtcaccaaccgcgacgcttcctgtgaatgggattag

SEQ ID NO: 2771 - DNA, 1050 bp, Zea mays
  Peptide Sequence Number=SeqID_44550
atggcggcgccggaatcggaatgcggcgggagtgacggctaccgcgacctccgcggcgtgcgcgtcgacctggacacgggagcggcccgagccggtgggggaggaggcttcgccgtctccttctggctctacctgtccgtctccgccagaccgtcctcggtgatcctccaccagatcacagcgggagatgacaccaagttgccgtttcttgctttaggtgaaggaaacaaactgcttctcttcccgttgatgaggctgcacagggaagctcctgctcctgctagttcgtacccatggactgacacaaccaatctatcatctacgagtgtatgccctcttgagaaatggttccacattgggtgtgagaacccaccatttaagttatctattgactattcatgctctgatggaatcgaagagggtgatgacggcatttggagcatcgttggtgggaaggcatcttgccggagaaatttcattttggaagtagtactaaccaacgcttttggtgaacctgtgaaggataaagaggtcgtttcttcacttgtctatgctgatgatggaacagtagttgcaaaatcaagggatgattctgagcctcctttgcttattacttgcgaaggacttgaatatgcagcgataagcaggcctctaccaattatacgtgggcgagcactatttaaactcaagatatctcagatgacgaactcatctcgactcagggtgactgatgttggtctgctggactggagagtggagacgccggcacgccgccggtgggctacagacgctgccagagaagatgactggagcttggagcagccgccggtgactggaccactggacgccgatgactggagctggacggcaccagagagcaatagggcgtccaagcggtggtccaacgccttggaccgccttaccgctttcaaaaccatgttaaacgcgcagacatcagtgggcgaccagattcctaacgatcggatgattaatcgctcaggtcgacgactagtcgggcgacttggaaatctggtcgtgtcgtccttctaa

SEQ ID NO: 2772 - DNA, 279 bp, Zea mays
  Peptide Sequence Number=SeqID_44551
atgagggaaaggtttgatgggtactctggtattttggcacatgttaattatgttgatcaagatcttcagtgtgacaatgaaggatggcttctggacaacccaatgggaatccggacagagcgagaaatccatgcagagcttgaaggagcaacgatatacaggagggtgtaccaaaagattgtacttatggtgtttagcatcgggtgctgtcttcgttctgtccagaattcaggtctggaattgctcaccatctatcggtatgacatgtgcaatgactaa

SEQ ID NO: 2773 - DNA, 897 bp, Zea mays
  Peptide Sequence Number=SeqID_44552
atgccgaacctagaagagttgcagctgctgatggactacgaaggttactgccttgaggccgtgtccggtttcttcaagctcatcccacttccagtccttcaacggctctttgtgcgtctgctgctgcttaccggagctgaactccatgcgcagctccatattgatcacaagcgagagggagaaggcagctgcggttgctcagcttcttcctggataagtcccctgtcctccaacagctggtgcattggagaaggcgtcgagcgaggcaagcattaccgtgtgccggcccaaggaagacgataccccgaaccatccacacacgaggttcatcctggaaaaccttttgatggtgatgatgcagagcatatgcaatggatttattcagagattggcaatgatgcttctcaatttgttggtccacttgtattgaacctgttgataaagtgcattgatcctagaacatactgtgcgattatgcgtatcttagcgcacctttattatgttctttgcaccaatatactttgttttttccttttccggtgtgatggtgagatcgacgtggagctaaagcacgtgagggatgctgtggcgaagaaaggccaggcactacacgaggagcaggacatggtcaagaaggtcgcccttgccacgctcgacatcctcagcgtcggtgctagccgtagtggactctcctcccgtgcgaccgcggcagccagccacggcctggccctaacaactgtagcaagcagcagtccccgctcggctgccccggcacctagccccagtaactgtaggcagcggcagcgcggtcgccccagtgccctccgctctcccaaccgccctccaagacaaccatttggccccctgctacactttgtgcctcttaaccttgggtga

SEQ ID NO: 2774 - DNA, 474 bp, Zea mays
  Peptide Sequence Number=SeqID_44553
atgcgtgcattgttctcgaagctgccagcgtatggatcggatcggatcctcctgcatggactctccaactccaaggtccaagctcggcttgcgctggatcgagcagtggagctcctgtcgcgtaaagaaccaggcccctccgccgcctcggcatcgccctctggttcaggaggtaggtcccggcgtctactagcgtgctaccgacctccactccactccactccgggctcccgcatccacaattctaaatcgtacgagtcgcaccagcgccaacgccgccgctgcatcctccgccacaccaccaacggcagaggccacagagtttggcccgcagcgaggggacgttcttggacagaaacgccggggacgaggacgcgcaggcacggagacacgcagacgtgccgtcccgcgcttgggaaatgggaactagaggcgcggaccaacgtcggcgtatttttgcatgatagagactag

SEQ ID NO: 2775 - DNA, 309 bp, Zea mays
  Peptide Sequence Number=SeqID_44554
atgctgataatttttcacgccatgtctctgctgtttaaaatcctgcctctgccatcccataaccacagcatgcgagctagcgtactgcggcgccggcggcacgtgcaggaagaacggctccggcatgagctaccactgcgagtgcaaggaggggtacagcaacctcctcaacatgaccgcgatgccttgcttccagaactgatccatttcacagcggattctactgccactgctgctgatggtggtggtctcattggccgtcggttacgtgatgtaggtcgaggatggagcgtcccacggcaacactag

SEQ ID NO: 2776 - DNA, 1962 bp, Zea mays
  Peptide Sequence Number=SeqID_44555
atgggcggcagcgcggatgcgaacggcgcggggtcggtgcgggtgccggtgccgccggcgcggccgttcctggacacgttccgcgggaacctcaaggagaccttcttcccggacgacccgttccgcggggtggtgcgggagcgcggggccgggcggcggaccgtggccgcgctgcgctacttcttcccgttcctcgagtgggcgccggcctacgcgctgtccaccttcaagtccgacctgatcgccggcatcaccatcgccagcctcgccatcccgcagggcatcagctacgccaagctcgccaacctgccgcccgtgctcggactctactcgagcttcgtgccgccgctggtgtacgcgctgatggggagctccaaggacctggcggtggggacggtggcggtggcgtcgctgctcatcagctccatgctcggcagcgaggtgtcgccgacggagaaccccgtgctctacctgcacctcgccttcaccgccaccttcttcgccggcgtcttccaggcctcgctcggcctcctcaggttgggcttcatcgtggacctgctgtcgcacgcgacgatcgtggggttcatggccggcgcggcgacggtggtgtgcctgcagcagctgaagggcatgctgggcctcgtccacttcaccacctccaccgacgtcgtctccgtcatggaatccgtcttcagccagacacaccagtggcggtgggagagcgtcctgctcggctgcggcttcctcttcttcctcctcgtcacccgcttcatcagcaagaggcgtcccaagctgttctggatctccgcggcggcgccgttgacgtccgtcgtgctcgggagcgttctggtgtacctcacgcacgctgaaaaccacggcatcgaagtgatcggttacctgaagaaaggcctgaatccaccgtcggtgacaagcctgcaattctcaccgccctacatgatgctcgcgctcaagactgggatcatcaccggcgtcattgccctcgccgaaggcatcgccgtggggaggagcttcgccatgttcaagaactaccacatcgacggcaacaaggagatgatcgcgatcgggacgatgaacgtcctgggctcgctcacgtcgtgctacctgaccacggggcccttctcgcgctccgccgtgaactacaacgccgggtgcaggacggccatgtcgaacgtggtcatgtcgctggcggtgatggtcacgctgctgttcctgacgccgctgttccactacacgccgctggtggtgctgtcggcgatcatcgtctccgcgatgctgggcctggtcgacttcggggccgcgctgcacctgtggcgcgtcgacaaggtcgacttctgcgtctgcgccggcgcgtacctgggcgtcgtcttcggcagcgtcgaggtcggcctggtcgtcgccgtcgccgtctccctgctccgcgtcctgctgttcgtcgcccggcccaggaccacggtgctcggcaacatccccggcaccatggtgtaccggaggatggaccagtacgccgccgcgcagacggtgcccggcgtgctcgtgctgcgcgtcgacgcgcccgtctacttcgccaacgccagctacctgcgagagaggatctcgcggtggatcgacgacgaggaggagcgcaccaagagccagggcgagatgggcgtgcggtacgttgtcctcgacatgggtgccatcggtagcatcgacacgagcgggacgagcatgctggacgagctcaacaagtccttggacaggaggggaatgcagatcgtgctggcgaacccgggcagcgagatcatgaagaagctggacagctccaaggtgctggagcagatcggccacgagtgggtgttcccgacggtgggcgaggcggtggcgtcgtgcgactacgtgctgcactcgcacaagccgggaatggccaaggacagcgccgccgcccacgagagcatggtgtga

SEQ ID NO: 2777 - DNA, 2904 bp, Zea mays
  Peptide Sequence Number=SeqID_44556
atgggggttcaccgtaggaattattcagatgatgaattttcagttgctggcgagaggccagaagtagaattcatggacttccagaacgacgacacctttcaggattattcatgtgaagatacccctgtgcttgtctcagctcctttccctttcgaggatggaaaaccaaaatctgcacttgtcggagaaacatcagctgataccatacagattgagaatacctctcctgaatctgtaaatctgtggagtgtaagaattttctcttcgaacccagaagacagctatgttctatcaatgatgagaccaccgtcagatgatgctaatgaggaggaaaagcatgcttttcttgctttgacgtccgtggaagaccgtacacttctgcctggacaaacccttacagtttggctgtcttgtacgccaaaagatattggcctgcatacatcaatcgtgcatgttgatatcggtgatgagaagattgagcgtgtggcttttcttttggcagatgacaatgtctcccaggccttattttctgataagccttattccaggagacgtgaccaagttaagaaatttgggccttctccaactgtgccaggtcgtcgtccaactaagcagcacgttcaaggattcaaacataggcttcctcagtatgcaatacctgcgcacatccgtgagctcattgaaagtaaacagaaacctgatgtcttatatgatgagttgagcatggtaaactatgcagaatatttcagcactcttctagtcatggaagagctcaatttggaggaggagatgagaacatatgacatggagggtgtcttaatgagaaggaggggtatgcattttttgtctcttgaggtccctggtttggcagaaaaaaggccatcactagtccaaggagacttcgtagttgctagatatgctgggaatcatgctcaggcttaccaaggtttcattcacagggttgaagctgatgagatatttttacaatttgaccatcagtttcacatgaatcatcatgatagaaaccggtaccatgttagcttcacatataacagagtgaacatgagaaggctttacaagtcaattgacgatgcaaaatatttgggacctggcattttgtttcctcgccaatcaccttgtagagttttgaaaaggtggccgtttaatcctctgaatccacatataaatactgagcaagctgatgctgttgcaatggtacttgcctgcagaggaggttcaccatatgtgatatatggacctccaggaactggcaagaccatgaccattgtagaagccgttttgcagctttacacgggaaagaagagggcaaatattctcatttgtgctgcttccaatactgcagctgatcatgtactggaaaagctccttcaagctagctatctgatccggccaagtgatatctttaggctaaatgctcagagtcgccaatacgaggatgtcagtactgattttatcaagttttgcttctttcaagatcgggtgttcatgtgccctcccttacaagcattggtgcggtacaggatagtcatatcgacctattcgagttcctatcagctgcaggctgagggcattcgccaagggcatttcacacacattttcctggatgaggctggccaagcctctgaaccagaggcgatggttcctttgtcggggctgtgtggaagagacactgtggttgtgttagcaggagatccaaagcaattaggtccggtggtttactgtaagcaagcagagaaggatggtctggggacatcatatctggaaaggctgctgactgacttcgagccgtacggaacaaggaatcctaactacgtgacaaaactggtgaggaattaccgctgccatcctgcaatcctggagctaccatcagagcttttctatgagggtgaactgattccctgtaaagaaggagagtcatctgcttatgattgcataggccttcctgacaagtccttccctgttcttttcatcggaattcaaggatgcgatgagagggaaggcgccaacccatcatggttcaacaggatcgaggttagcaaagtggtctctatcatcaggaacctgacaaggggcggggacgttgatgcatctgatataggagtaatcactccgtaccgccagcaagtcgccaagataaagaaagccctagaggcattcgaaatgcccggcctgaaggtcgggagcgtcgaacagttccagggccaagagagggaggtgataatcatctccacagtccggtcgaccgtaaagcacaacgagttcgacaggtttttcaacctggggttcttgagcaaccataaaaggttcaacgtttctatcacccgcgcgaaatcgttgctcgtcatcgtcggaaacccttacattatcaccaaggaccgtcactgggataggctcctgcgatactgcgctgacaatggctcttatcaaggatgcccccttccaccaccggaatctcatgcttattcagacggtaccagattcttctccgagcatgacgacgggcatcaagctggaccttctgggcaggacgactactacaaccaagaagccacctactgcagctacaacaaccaagagccttctgacttcggtttcaggcttggcagtggtgctgaacctgcttcggagaaccaagagttaccgtccgaggagctgcctgaggacgagaagcagccattattcagcaacccccaagcggatctcgaggagacgccgaagcaggacgtcgtcgaggaaggggctgcacagggaggcgtgctggccgacccgacatcgtcgacaaccgccgacgatcagctccagggtgcatatgcggagaagtacagcttccctcctggctggtgcgacgtttcgagcatcccggcgcaaggctggggcgactga

SEQ ID NO: 2778 - DNA, 744 bp, Zea mays
  Peptide Sequence Number=SeqID_44557
atggaggaggagcgtgtcctgcttacagtttgggatgacgcagggcaggaacctgaggctgtcgccgacgtggagctgcgtccagcccgggcggcagtcgcagcggtagcccagcgtgcccggcgccaccgtgcagttgccctgcccgcaggccaccgtgctgcatatggaatctgcagaacacatgcatatcgcgtcaaggtcaagggaagggaagccggggtcgggagggtgctctgtcgtcgtcgtcgtcgtcgtcgcttactgatgacgggggagaagatgggggcgagaggggagaagaagtcggcggcggccacggcgctgagggccaggagcgccaccgccacgacgaccgcgggcgcgggcgcgggcgccgcggcgcagggaacccttgctcggcggagcatcttggaagatcagggtcacttcaccgctcgttggatctcgcgcgcctttcctggacttggaggactggactccgctccgcgcttgggggcggggcggttgtgttcgtttcgttcgtcgtcgctttcctttggttgcgttttaagtgggagggagggaaaggggcgagggcggttggcaggcgcggcgaggccatgcgtgggagagcttttattcctggctctcgcgccccctggattgactcggccgccgaggccagatgatgcagcagcagcagatcaagagatggccaagtcaaaagcgagctcccagatggcggtgcctccatgtccatag

SEQ ID NO: 2779 - DNA, 558 bp, Zea mays
  Peptide Sequence Number=SeqID_44558
atgacagttgttggaaagcacctctccattgttcaggtgaacgaaaagaccaccattacaaggatctatcttgccaatgcgcttcatatgataacagagatgactgatgagcaaatgatagcatttattgtacaccgtgtcagagcatcagctgtttttctgacagcttttccatcgctcccgaggaagtatgttaaggctctgctccatacctgggctagaggacgaggtgcaatgcctcttgtttcttttatgttccttcgagacttgtgcattcaagtaggttcaaattgccttgatacttgcctcaagggtatctataaggcttatttggtgaactgcaaactgtccaaatctataagcggatcaaaacaacaacacattcaattccttggaaattgtgtcagagaattgtatagtctagatccacaaagtgcgtatcagcatgcttttattttcatccatcaactgggggttatcctaagaggagctcttactgaaagggggccaaagaaatcttaccaaaaaaattatgattggcaacacattctgccttga

SEQ ID NO: 2780 - DNA, 957 bp, Zea mays
  Peptide Sequence Number=SeqID_44559
atggtaccgacgcctcccaagaagcgtccggcaccggaccaagaaccaggcgccgctgacgtaaacaagcgaccgcggcacaatgctcccgcttctccccggagcatcgcggagttcgagctgttcgaggtgctcggcgagggcgccgaaggcgtcgtgcgcagggggcgcgaccgccggactggaaagaacgtggcgctcaagtggatcttcggtgacgggcccggcggccacggccaccccgaccgtcgcgcgctcgccatggaggccgggtgcctccacgcgtgccgcggtcacccctcgatcatcgggatacacgatgtcgcggccgaccccaagaccggcgacgtccaccttgtgctggagctggtccgcggcgggctaaccctccgcgagtccatgtggaggcccttgtcggaggacgtggttcgcgagatgatgcggcagctaatcagcgctgccaggaagatccatgacgccgggttcatacatagggacatgaagccagagaatgtcctagtctgcccactcggcgcgctcaaggtttgcgatttcggatcggcgacgcggcaggagcccgccggtaagccgcatgaggcgcaccccgtcgggacgctgcagtacaactcgccggagctgctcgacggcaactggtgctacggcccggccgtcgacatgtggggccttggctgcgtaatggctgaggtcctgactgctgagaccctattcgatctggagacacgggaggagatgctcgacgagatgtccaagcttcgagatcagatggcctccgcggcagggaagcttgatccggagtgcttggcgcatctgtctgaggccgggcgtgatgtgctaacgggcctgctggccttccgcccagatgagaggctcacggccgcggaagcacttgagaaaccatggttcaaaaacttcaaatcacattggataggattgtag

SEQ ID NO: 2781 - DNA, 1494 bp, Zea mays
  Peptide Sequence Number=SeqID_44560
gttgctatttatgcggagttcagaagggattggccagaagcattgaagttctatgaggaaggtgttcgtgttttgcgtgagatgattggaacttcgacaaggttgcctccaacccaacgcctggttgagataaaagcagttgccgagcaatttcactttaagatatcaaccttgctacttcatgccgggaaagtggtagaagtaatcacatggttccgtaagcatatcaaaagctatgaacgggttcttggaacaccagaagttgcttttcttcactgggaatggtttagcaggcagttccttgtctttggtgagctgatagaaacaacatccacaactattccagatacactatctcctcgatttggcactgcagacaacacattgactgagtgggaatttcagccagcatactactatcagttagcggcaacttacttgagggagaagaggtatgccatcgaatgctcgtcatcaatggctaaccttacaacagaagttaatggagtacctgagtcagtaatgccttctgtatatgttggccaatatgtgcgcttgtttgagcaaggagatacagttagtctactaccctatgctttgtcagaagctgaaaggtttcaagattcttatgagataatagcattgttcagaaaagcttatgaatcatttcagagcctaggtgctacaagaatggcttctgcctgtagcagtggaatggccatagaatattacgcaactggtgattttagcaacgcaaaacagctttttgatagtgttgctggtctataccgtcaagagggttggaccagtttgctctgggagaacctaggatacttgagagagtgctcaatgaaacttaattctcccaaggattttatcagctattccctagagatggctgcattaccattattttctggtagtggagaggaaaatcgagaaaacaaaattaagagtgggcctgcaggttcccctaccatttctaggagagagaatatacagcaggaagttattaatgttttggaaagaaaacagtcatcagaaggaacatatgatggatttaataatgagatagaagaagttattcaccttgatattgatcagataagtctgctaagaatggtgcttactgcatctgttgcttttcatgatcaatatgtaaaacctggttcacctctgcttgtcagcgtgtcactcttatctcatcttccttctccagttgtggttgatcagttggaggttcagttcaatcaatctgactgtaactttgtgatgcatagtgcacaggaagactcactcccttcatattcaaatttgcatggccaagttattcaagatacttcttctcttactttacaggatcattatggaattgaattaatttgttttaccctgagcattaatcttaggagttgctggcctgacaatgtgatctctgtgactttaggtgctctttcttcagacaaattattacatactatttttactgcttaa

SEQ ID NO: 2782 - DNA, 960 bp, Zea mays
  Peptide Sequence Number=SeqID_44561
atggtaccgacgcctcccaagcgtccggcaccggaccaagaaccaggcgccgctgacgcaaacaagcgaccgcggcacaatgctcccgcttctccccggagcatcgcggagttcgagctgttcgaggtgctcggcgagggcgccgaaggcgtcgtgcgcagggggcgcgaccgccggactggaaagaacgtggcgctcaagtggatcttcggtgatgggcccggcggccacggccaccccgaccgtcgcgcgctcgccatggaggccgggtgcctccacgcgtgccgcggtcacccctcgatcatcgggatacacgatgtcgccgccgaccccaagaccggcgacgtccaccttgtgctggagctggtccgcggcgggctaaccctccgcgagtccatgtggaggcccttgtcggaggacgtggttcgcgagatgatgcggcagctaatcagcgctgccaggaagatccatgacgccgggttcatacatagggacatgaagccagagaatgtcctagtctgcccactcggcgcgctcaaggtttgcgatttcggatcggcgacgcggcaggagcccgccggtaagccgcatgaggcgcaccccgtcgggacgctgcagtacaactcgccggagctgctcgacggcaactggtgctacggcccggccgtcgacatgtggggccttggctgcgtaatggctgaggtcctgactgctgagaccctattcgatctggagacacgggaggagatgctcgacgagatgtccaagcttcgagatcagatggcctctacgtctgcggcagggaagcttgatccggagtgcttggcgcatctgtctgaggccgggcgtgatgtgctaacgggactgctggccttccgcccagatgagaggctcacggccgccgaagcacttgagaaaccatggttcaaaaacttcaaatcacattggataggattgtag

SEQ ID NO: 2783 - DNA, 273 bp, Zea mays
  Peptide Sequence Number=SeqID_44562
atgacggttgttggaaagcacctctccattgttcaggtgaacaaaaagaccaccatcgcaaggatctatcttgccaatgcgcttcatatgataacagagctgactgatgagcaaatgatagcatttattgtacaccgtgtcagagcatcagctgtttttctggcagctttcccatcgctcctgaggaagctctgctccatacctgggctagaggacgaggtgcaatgcctcttgtttcttttatgtttcttcgagacttgtgcattcaagtag

SEQ ID NO: 2784 - DNA, 1197 bp, Zea mays
  Peptide Sequence Number=SeqID_44563
atggccatggctgatggccccccgctccacctccaccacctccacctgcacgatggggattcagatgtctcgctttggcgcgagatgggagggacggagagaccgccgggcccgccaccaactgcagctgcaagcctgcaactggccaaaggactggcgccggcggctagcaaatgcaaatggctggcagcagtgcagcacctctttgggaaaggaaaggaaatgaaaggaaagaaaaggctgtggtgtggtgtggccgaggtttcacgcccgggggcgctttctacacttggaaacagcagggaggatccctgcctgcctgatcgcgtgtcccgtgtccgttcaatgaagagaggtgggagggagaggttcattggcctcttgcagttgcggtcgcagatcgcgaaacaacggccttctctttcagaagaggagctagtgctgcgtgtgcggaggaagtcgacgccgacgtttcggggccctttaacgccgccgagggggcggcactggcactggcactggcgcgcctcctgtgagacggtgaccacggacccgtcgtacgcagaaccctggcatgcgaggattcaagaacgcagtaggtactataactgtaatggccaaaccgcggctgcggcatctactagtgtcgctgaggcagctacgagcgagtcgtcctcgtccatccacccggcccggcccctggagatcgaggattcgaggcatcgccaggaccacaactgccaagcctgcgtccggcgtccctctacaagggacgctaaagcgttcgatatgttatatttagcgtttctcgccgtccgctaccgcccccagcaagaaccggcaaatggttcgctaaaatatagcggcagctcgacgaccggtaaatgtggagtgttgttgttcatccgctatccgtccgcacagagctgttgcctggttcttatcgtcttcgccaacagcgtgccacaacacaactctgctacgccaccagctctgctgctgcgccaacccgttgagcaccacgccatggccgtcagggcggaggttccacgacgtggcgccgtgcgtggtctcgtccgcgacattcgtgtccagagcgtgccgattcggtccagcacatggaaggagcatcatgggcatggagtccatggtggcctccggcggcgcggtgctgttgtaggcagccctatccgccgg

SEQ ID NO: 2785 - DNA, 624 bp, Zea mays
  Peptide Sequence Number=SeqID_44564
atggcgtcactgtctgtcgccgccgtggcggccaccatagcgatgccaagcagcagcggtgggagagggcgccgtctcagggtcgcgtccatggccacccagaagggccagaagccgacgcccaagaccgtctccggcacgagaagatcgtctcaagatcggcgggtgacaacggtgggagcgcgcgtgcagggcacgacgacggtgttcccggtgggcgagccgggcccgcggccggcgacgacgagcggcaaagcgccggttaagctgctgacgaacgtggagaagctgcggctgctgaccaaggcggagcgcgcgggcctgctgtcggcggcggagcgcgcggggctgtcgctgtcggcgatggagcggctgggcctactgtccaagctggaggagctgggcgcgctgtcggcggccacggaccccggcacgcccggcgcgctgcttgcgctcgcgctcccgctgctggccgcgggccccgccgtcgtgtacctcgtccccgaagagcaggcgtggcaggtggcgctgcaggccgtcgccgcgctcgtctgcgtggtcggaggcgccgccgcggtggccgcgtccacgtttgtgtccaggctgcagggctcctccagctga

SEQ ID NO: 2786 - DNA, 2472 bp, Zea mays
  Peptide Sequence Number=SeqID_44565
atggaatcggatgatacctcaaatcgaatggtgatagctcatcaacaaggatatgctcatcaaactgatgataatacaatacaaaatgtgagtgcagcccaagtttctgataggtgtagacagctatacagcagcagcacccatggatgcacttccgctcttgggcttctggcttctgcttatgaatcatcagaatctgatgaagaagcagatgcacctaacaatatatcaaacaattgtgaaaacaataatgcggcaaatggagccacaaatattcagtcctccagaacatcagttcaggatgaaaatacgaatttgcaattgtatgaagaggaaaataactccagagcaatagcatctctgatgcaaccagtggaggataagagtactgctatgactcctgttagtatggaaacaaatattatccatctagcagatcagggagagtcactaaccttccatgagcagtggcatgcgtatcttgactttgatgatctaactgcatcaggtgtaaaagcctctccgaatactagtttgggcacggctaaagctgcaatgaaaacagatgcactgactttgttcaagtacagcaaggattcctgcagaatgcacgtgttttgtctagaacatgctttggaaacttggacacgacttgaacaaattggtggtgctaatatcatgctcttatgccatccagaataccctagagcagagtcagcagcaaaagttatagcagaagaacttggtatgaagcatgcctggaaagatatcactttcaaaaaagcaacacgtgaagacactggaagaattcaattggctcttcaggatgaagatgcagaacctacgagcagtgactgggcagtaaaaatgggtatcaacatatattacagtgccaaacaaagcaaatctccactttacagcaagcaggtaccatacaattctatcatttacaaggcatttgctcaggaaaatccagacagcttcgcagatggacagcgatcaagcacaacaaagaaaaaggtagctcgatggtggtgtggcaaaaaatggatgtcaaaccaagttcatccacttttagcttatgaacaggtagaacagaatcatgaaacagtttacagcaaaacgatgttatctgctagttgtgacaggatgcaagaacaatcaacaagatctactaccctgatcaaccaaaattcttcaaaaaagataaccagagaaaaagagggggactctgttgagaaatctagaggcaaaaagaagagatgcagtgccagtgcttctgatgaagctgctttgcactgcagtgtgtatgatcagcctgtaaattctgataatcatgccaaatatgaagatggagatgaaagtgtggaagcacggaacacccgacatcatcaacaatatgaatcgctaaataaaaaatcaagtttgaagaggcgaaaggataataatagaagcaacagctttcatgagctacacaaggacaatgttgacattgactgcaggtttgatacagacggcactgaaaacacctcaataggtgactgggataatagtccaccacaagggggtgatgtcaaagcagtgaaatctggtgctcgattgctaggcactaagaggtttagcaaggagaagggaagtaatagtttgtcaaatgtaaacaagaaattggtaaagatgggtaagaaaattagtactaagaagcaaaagaatgacaaaacaaataggcagtttcaagaaaatcacaaaaaggctgacattgtggatttgcttcatgaagatgatggagatgaaggcacatacatagactgcaatgaaattcgaaaacaaaaaacagatgacgtgagagtaaaatctagaggcaaaatgcaaagtggcaagaaaaaagtcagcagatgtcaggcaagtgatggttcgcacaatggaggcaaggaaatgaaattatcaagtgacatagaagtgtgcaacagaagaggagatggaacaacggcagccaattttgaagaaattccaaaagaaaaggccgatgctgtgaaagtgaaacccaagatgcaaggtgacaagaaaaaaaccagtaaacatcaggcaggcgatggagataaaggagcaaaattttcttgcgatatagaagggtgtgacatgagtttcagcacccagcatgacctgtcgctgcacaagagagacatctgtcctgtcaaaggatgcaagaagaagttcttctgccataaatacttgctccagcaccgcaaagtgcacctggatgaaaggccgctcatgtgctcattcccaggctgcgcgaagacattcaagtggccatgggcgaggacagagcacatgagggtgcatacaggggtgcgcccgtacgcatgcacggaacctggctgcacccagacgttccggtttgtgtcggacttcagccgccacaagaggaagactggccactcgtgtgacaagaaaaagaaacgcggcctttga

SEQ ID NO: 2787 - DNA, 342 bp, Zea mays
  Peptide Sequence Number=SeqID_44566
atggccgggaggttaaccgcagcagggttccgcgtccttggcggcggcggcgcacgcgccgcggccgcggccgctgccctccggcaccgcgccggcatgggcctccccgtcggccgccacatcgtcccagacaaacccctgcccgtgaacgacgagctggtgtgggacaacggcacgcccttcccggagccctgcatcgaccgccttgccccgcacatcggcaagtacgaggcgttggcgtggctgtgcggagggctggggttcttcgctgccctcggtgtggctgcggtggtgaacgataaggcctccaagataccatatatattcctccacctactataa

SEQ ID NO: 2788 - DNA, 648 bp, Zea mays
  Peptide Sequence Number=SeqID_44567
atggccactcccgctcccaccctgccggagccggccgcgcaagagctgaccgctgccgtcgccggcgccggccagcggcagcagccccatcaccagcacccgctcctcgcggcggcggctgcggcgtcgctcctcgccgtgctctacctcccccggccggtgctgctgctcgtgctctccccggcctcgctctcctccctgctcctgctcctctccctcctccacctcggctccacgccgccgccgccgcctcccgctctcgccgcccctcctccttcctccccgccgccgacggaggagaagaagcagcaggagcaggagcaggctccagaggccgcgtgcccgccgcctccccctcctccgccgccgccagagccggagcgtggggccgtgttcccggagctcctggagttcgcgtcgtgggcggccaaagggcgcgcgctggaggtgatccacgaggagttcgaggccgagtgggggctgccggaggagatgggactgccgtgggactcggactcggactccgaccccgactcgggcagcgacgacggctacgtccggggcggcggcgacgcggacgacggcatgatcgagatcgagctggaggaggacagcctcatcgagatcgacatctccaggtgccggtga

SEQ ID NO: 2789 - DNA, 252 bp, Zea mays
  Peptide Sequence Number=SeqID_44568
atgtacatatatgcatattcaggtgtagaagatctgacctcaggcaaatggctgaacatgggccacaaggccaagaaccgggtgaacatcttccccaggatgtatgactacaagagtgccaaaggtgaagacttcttggagaacaccatcggggtgcaccagctgaagcaggacctgaggtgggcacacacactggagcacttcaatgtcaccaggctggagccctccagcatgctactacacaacttctag

SEQ ID NO: 2790 - DNA, 420 bp, Zea mays
  Peptide Sequence Number=SeqID_44569
atggtgaagggacgcacggggcagcgcgtcaggctctacgtccggggcaccatcctcggatacaagaggcgagctcattgcctccgcttcttcccccgtccgtgttacttggatctggccattcctcggtccaagtcgaaccagtacgagaccacgtcgcttgtgcagatcgagggggtgaacaccaaggaggacgtcgcgtggtacgctggcaagcgcatggcgtacatctacaaggccaagaccaagagcagtgagacccgctacaggtgcatctggggtaaggtcacccgcccgcacggcaactccggcgttgtccgcgccaagttcaagtcgaacctcccgcctgagtctatggtcagtgacgcactcagtacgccgtgtgatgtgtgctgcttcccaattgatgctctgtcctga

SEQ ID NO: 2791 - DNA, 726 bp, Zea mays
  Peptide Sequence Number=SeqID_44570
gatttgatacagccgagttcaatgctgcaggcacagaaggcttctggtgctgctggatcaaatactacaggccaacctgaaggtggccctgattctagaactgtctttgttagtaatgtacattttggttcatcaaaagatgctctttctcgtcacttcaataagtttggagcggtcttaaagacccatattgtgactgatggtgtcactggtcagtcaactggctcagcatatattgagtttttgcacaaagaatcagcagaacaggcattaaccctgaacgggacatcatttatgtcacgcattttgaaggaacacttgccgttgttcatatccctacatgaggacaaggttaacagaatttacatctcagtatctcactcatggagaatcactgatcaaccgaaacagaggaaagtcgttcggaaaagctccactgaagtaacccagctgcctgtcttgccccgtgcttcttggggatcaccatttgcttcaaggctcattagaactgcatacccaaggccgaactatcccggtgcaattcgtgggcgactatcactcaggggtgctgcccggagtttacagtggaagcgtggtgttgctgattcaggagatgttggaaaacctagtccaactgcacctgggaatcagttggtcaccccggccacacgaaacttcacctacacacgcacggagccaaaaacaaatgcgggagcgatggcatga

SEQ ID NO: 2792 - DNA, 729 bp, Zea mays
  Peptide Sequence Number=SeqID_44571
atgtcgatgcgacacaaagcaggtgacgaatgtcgcggcgtctccgccaccgtcaccgccacagttttcaggcgaccccgccgacccacacgaccaaggcgcagcagggggcctttcgctcacaagatcggccgttacagcgccgaagaacgcagggagaagatcgagcgctaccggacgaagcggaacttcgacaagaagtcaagaagatcgatcacggtaacgatctctttcccgcgccgcacgatcgatctgcaaatgcagtcccagggaagtggcatcaaaaccacagcaacatttgacgacggcaagtggtggtgggaaacgccggtggccgctccagctgcggagcggcatacttcgcgctgcctaacgatggacggacgcggaccgggtgccagtgccacagatcacggtgcacgccgaggccgtcgcatggcgacggcggttgccacttgtgccggccgggcgcttaagcttttgttgctggttgggccgccgccaccagagaatcgggagcaaaacggctggggagacaccagcccagcagccgagcgggctcgctcgtgcttgtggtcgtggcctcgtgggggtcgggctggtggacctggaaacacgcggcggtccagacgtgccgcgccgtatcgcaaaatgacccgagctgttcaatacattttctcgtcaattaaatcctggagatgctactggtcaagatccgttgtagtctag

SEQ ID NO: 2793 - DNA, 786 bp, Zea mays
  Peptide Sequence Number=SeqID_44572
atggacaggccagatcaccagcagcagcagttcttcatgccgacgacggtgcaggtgccacagccacagcagcagcagcagcagctctgcgtcccgatgctcgacgagccgccgtcctcgtttttggcggggagaggcggaggcggggcgtcggggaggggggagaggaagcggcggttcacggaggagcagatacggtcgctggagtccatgttccacgcgcaccacgccaagctggagccccgggagaaggcggagctggcgcgggagctgggcctgcagccgcggcaggtggccatctggttccagaacaagcgcgcccggtggcgctccaagcagctcgagcacgactacgccctgctccgcgccaagttcgacgatctccacgcccacgtcgagtccctcaagcaggacaagctcgcactcaccactcagttgagcgagctaagcgagaggctgagggagcgggacgaccgggccgccgccgccggcggcggcggccgcgagacgatggctagcagcagcagctgcatcggcggtggtggtgaggaggaggcggaggacgacaagaggaacgtcctgctgttcggatgcgtcgacatggagccgcccgccgagagctgtgtgctcgtcgggtcgacgtgcgcggcgctggccgacgtctcggtggagtccgagtgcgacgaccagcaccttcactacgacgacgagttcccggagtcctactgcgccatgccggagctgtgggagccctggccgcttgttgagtggaatgcggtggcctga

SEQ ID NO: 2794 - DNA, 314 bp, Zea mays
  Peptide Sequence Number=SeqID_44573
ataggaagccaccaggtgttggccgtggaagaggaaggggggacgtcggtgctaaacctggaggcagaggcattggacgtggccaagatgatggaggtagaggcagtggtggccgtggaaggggtggagttggtgccaaaggtggtaacaaagttggctggttgtattggggcacaaaccagaatggttcctgtgatctagacaccgaggatgcggcggcaaccaggcttgttgctattccccaaaactgtttggttgatatcttgagtatgatccaatttgttcatttgcttagagttatcccggttagatga

SEQ ID NO: 2795 - DNA, 1827 bp, Zea mays
  Peptide Sequence Number=SeqID_44574
atgggagttgtggacttctcggtgctgggcgctctgcagaaggtcagatccttcgtcgccggcgccacgccggctgaagccgcagacggccggctgcccgccacgccgaggtcgcgcagcggggggccctccccagagaactcgcccccgcccgcggcgacgagatccggaggcaggcgcgccatcgccctgcgccggcagatatcctcgccggagctgctccgctgccgcgctgtcaggcgagcagatgatgaggatgatgatgagcccggggttcagtttttcacccatgggaatgacttcttacatgacttctcagatacagaatctgttagtgttagtacccctaatgatatcaaccgctccctgaccccaagccccttggagagcccgacttggatggtgaagcagaacgacagctcaccaatatccaggaagaatggccgtttcagcccggattctcctggatatggtacaaaggcaagtttaggatctgatggttcgccgcaacagataaatggtagcgtcactgacagtggtgacggaagcaaaactcagtatcctgttgaatttggtgccaatatatggtgcccaccaccaccagaagatgagggcgatgatatcgaatcgaggttatttggattccaggacgaggatgatgaggctggggactcaagcgggcttcttgtttctggtagctttagtgctaacaaaatagctgctattgacgaggtcacaaacactgctcaggaagagtgtctgaagactgcggtgctcggccatttccgagctcttgtggctcaattactgaaggcagaaggcattgatatgggaaaggatgatgggtccaaaggttggcttgatattgtgtcatccttaacttggcaagctgcaagctatgtgaggccagataccaagaaaggaggcagcatggatcctactgattatgtgaaggtcaaatgtatagcatcaggggatccaagagatagtaattttgttcgaggagttgtttgctccaagaatgtaaaacacaagcgcatggtctctgagcataggaatgcaaaattgctcattttagggggcgcacttgagtaccacagggttcctaataaattggcatctattggcaggatacttgaacaggagaaggagcacatgaaaatgattgttggaaagattgagtcccggcgacctaatgttgtgctagttgagaaaactgtctcatcttctgctcaggagctcttctccaaagacatttcgttagttctgaatgttaagaggacacttttggacagggtatcaaggtgcacaggggcacaaattgcttcatcagctgacagtattgcttcagtacggctaggtcaatgtgaagcgttcaaggtgcaaaaagttacagaattcccatcagctaaacagacaaataggagatcaagcaagacactgatgttctttgaaggctgcccttggcgtttgggttgcacggttttactgagagggtcatgtcgggaggagctcaagaggattaagcgtgctgtacaacttgcagtctttgctgcttatcacctttctcttgaaacatcattctttgcagatgaaggtgcaacacttcctaaattgccctcgagacatgtggtagttgatccagatacaaggaattgtacaaatagcaattcagctgcattgaccaatgttggtatgcctcatggatgtaaatcagaacatgacaaactctcacagactgctatggtcaacattatgtttgaaaatacccctgtgtcacctagttcattgccatcgaatggagaaggccaagggcgaattcgttaa

SEQ ID NO: 2796 - DNA, 2673 bp, Zea mays
  Peptide Sequence Number=SeqID_44575
atggagatccccaccgctgtcatccaccgcctccagtccgctctccgtgaggccaccttcgccccttctgtagaagatgcacccgcccctcccttcccctccgtcgccgatgccgtcgcagccttcgactcgtgtgccgcctccgtgtcggcggagctccgatgcgtgcgctgcggggcctcgggagggctcctgcgcggtgtgcggtctgccctctgcacctactgcgggtgccccaggcgcggggaggaggctgaaggcggtggaagcggcggcgtcgccttccgtgacggcgtggcctaccagtggctgctcggctcgcttggactcgacggatccatatgtggtgaatttacgtgtattgatatcgttgtcctagttctctttaaattcaaagagattgtagaattcgatactgacactacagcttcgaataaaagcaaggatgtaccaccaccaaacagtgggatgatcatatctgatctactggacttaaaaatcacatgcctccctgaaaataaggaaacatctccaagttccataacaaaggagcaatcatcttctgtggatacactaaatttatctgctgctaacttagattcatttttcattgaaagaaaagaagagatgacttctgcttctcttccacaaactcattttttggagcaggaaaataaaagaacagatagcaaaagccatgaatctagattggaagtgcatgctgcacctaaaagcttaattagttctcaaagaacaaatcagattgaagctactccagcatttgcaagttgggatgctgattttcagtctgctagttcagaaaatgctgccaaaaactccaagcaacctgatctatttaagagcacttctgtggccgagtcttttagtttcccagcttcagagattgccatcaaacctgtagtaagtactgaaagtaaaacaaatacgagaagtgccatcctagaacatcactcagaagttttggcttcagcaagtagcacattatttggtgatgacctttctgatcaaaaggttgtccaccatatctttgagagcagcaacgctcctgggttcactgaatcctctctccccatggattttgctaaaagtgatcagttacatggaagggacgatgatggattcaatgatgatgaagcttttgatgaatggcaagaatttacaacaagtggcaatcaaggcagcctatcaaatgcggaacatattgaggaacctttaaagagagatttgtctgagaatgatgtaatagatcccttgcgagtaggcagcaaggaatcacccaacaatgttattgaaaaatcctctaatgaatggcaaggttttgcttctgtgtctggtcaaggaagagattttgtgacatctgtggaacgatcaacaagtgaccacagactaaatttggtgggaccagttggagatgaagagacaatgagcagcatctcacaccaacattcttcagaaattaatcctgttgatgtatggcatgtgggcaatgtgaaggctcaaaatactgcagaaatggttaaggaaaaaaatgattcttttgacgattggcaagattctactaccaccggtcaagtccaggacacttcgttgaatcaaactggggacatgatggaggtctcaaaagccagtcacaaagaaacagacatggactcatggttcattggacattctagggagccagcaaatacgggtaccatgaatgcaaataacatgttggacgattggcaaggtttcactggttcagatcaagcacagcaaaattcatctagcactggtgcagaaatgataagtgtgccatttgagcagcatggtggaactgtttctgccccatcatgggcaaatggcagcagtaatgatgccgcaaaaacatcctcaacaagtatagaaagcgacccatttgatgtttggcaaaattttactaaatcaggtcacctgcaagaaaatatgtctagtcttgggagagaaccgagtagtctgtcgcctgaaccagctaaaggaaatgattccttggatttgtggattaccagcaacttcaaggaatctaaaagcaatgatgttgggagaactaatgcctcatctgatggatggcaggattttgccagttttgatcaagctcagagaattactaaagttcatgtggaaggacatgttgtaaaagatccttcaggggctgaaactttggacttatgggcctcaagtcatgttaatgaaaagaaccttgaacagataagtgaacataatgatctattcgatgactggcaggatttccaaaactccaatccacagcaaacaaccttacaagtttcttcagatgcttcattatttgatataaccttggcatcaaggcctgatgcttttggagagcaggaaattgggagtgttttgcaggtagcttcatccgaaaactcaaaggataaaaaggagggttctaatgaatcaaaagcatttccatctgatgaccacttgaaaagcacaagtggaatgcagcagatgggtgatgttgattcgctgtcttcattatggccagctaataaaccagagcctgcaaatacaaatgtggaacagttgcttgctcagatgcacgatctgtcctttatgctcaaggatgaactttctgtccctgataaacccatcgatcattcaaaaccctga

SEQ ID NO: 2797 - DNA, 180 bp, Zea mays
  Peptide Sequence Number=SeqID_44576
atggaattcaggggccaggaggaggaggaggagcccgtcttagaggacatgggtgccagctccgcgtcgtcatccgcccccacccccgcccctgccccgaggaaccagaaccacgccgccgaggcgagtttggagccttggaccactgaatccctacaactctcccctgtaagattgtaa

SEQ ID NO: 2798 - DNA, 1839 bp, Zea mays
  Peptide Sequence Number=SeqID_44577
atggaccttccaccactccccagcagttggaaacctgccatatacatccatccttcacatagctccgatccaggtccagctccaccaacccggaagcagcaagcctcttgtctcctgcacgtaactccagcctccagcgccacacgtacacctccgccggatcggaagaagatggtgtcgcctacggagccgcaggccgagacgacggtgttccgctcgacgcttccggacatcgccatcccggaccacctcccgctccacgactacgtcctggagcgcctggcggagcgccgcgaccgcgcgtgcctcatcgacggcgccacgggcgagacgctcacgttcggcgacgtggaccgcctgtcacgccgcgtcgcggccgggatgcgcgcctgcctcggcgtccgcagcgggggcacggtgatgctgcttctcccaaactccgtggagttcgcactcgcgttcctcgcgtgctcccgcctcggcgccgccgccaccacggccaacccgctccacaccccgcccgagatcgccaagcaggcggcggcctccggcgccaccgtcgtcatcaccgagccggctttcgtcggcaaggtgcggggtcttgccggcgtcgccgtcgtcgccaccggcgacggcgcagagggctgtgtctcgttctccgacctcgcctcctccgccgacgatggctcggcggcgctgcctgaggcggcggcggcggccacggccatcgacgtggcgaacgacgtggtcgcgctgccgtactcgtccggcacgacggggctgcccaagggggtgatgctgtcgcaccgtgggctggtgaccagcgtggcgcagctcgtcgacggcgacaacccgaacctctacttccgggaggacgacgtcgtcctctgcgtgctgcccatgttccacgtgtactcgctgcactccatcctgctgtgcgggatgcgcgccggcgcggccctcgtgatcatgaagcgcttcgacactctccgcatgttcgagctggtgaagaggcacggcatcacgatcgtgccgctcgtgctgcccatcgcggtggagatggtcaagagcgacgccatcgaccgccacgacctctcgtcggtgcgcatggtcatctcgggggccgcgcccatgggcaaggagctgcaggacctgctgcgcgccaagctccctcgcgccgtgctcggacagggttatgggatgacagaggcaggcccggtgctctcgatgtgcatggcgtttgccaaggagccgttgccggtgaagtccggtgcctgcggcacggtggtgaggaatgccgagctaaagatcatcgacccggagaccgggctgtccctccaccgcaaccagcccggggagatttgcatcaggggcaagcagttgatgaaagggtacctcaacaacccggaggcaacggcgaagaccatcgactcggaggggtggctgcacaccggagacattgggtacgtcgacgacggcgacgagatcttcatcgtcgatcggctcaaggagctcatcaagtacaaggggttccaagtcgctccggcggagctcgaggccatgctcatcgcccaccccagcatcgccgacgccgccgtcgtccaaatgaaggatgactcctgcggcgagatcccggtggcgttcgtcgtggcgtccggcggctccgggatcaccgaggacgagatcaagcagtacgtggcgaaacaggtggtgttctacaagaggctgcacaagatcttcttcgtggaggccatccccaaggcgccatccggcaagattttaaggaaggatctgagagcaaagctggcgtctggattctccaacgggtcatcgtgttga

SEQ ID NO: 2799 - DNA, 363 bp, Zea mays
  Peptide Sequence Number=SeqID_44578
atgggcaatgcagataagaatgaggcgagacttgagagagaatggaggagcaacgtcgccacggtagccctttggagagggaggggagggagggaatggcggaagctgatccgagccgagagagacgtgctgctagacatctgtacctatacgagccccagggacatgcggtggaaaaggaggctagaagccgaccagaaatccattactttagatcagtcgcattccaagaaactacttattttctatactaggcgtgtgcccgtttttgacggatatttctatcttaaaagggttgaaacttcgcatccatgttatcctgtaatgcagcatgacaaaagtctatatcaaaactctacgtag

SEQ ID NO: 2800 - DNA, 315 bp, Zea mays
  Peptide Sequence Number=SeqID_44579
atggggtacaatgcgcggcaggagccagaggaattgtcaagcatagtgtcttcgccaagagccctcggtagtcctcgatataggaaaggggcaaagagccatgacctaggcccgactctttctctctttctcctagtagctagcaggggtgctcaacgaaacacatcactgcaccccgcctccctcccgcgggaccctcgatgggaaggggacccaggacaacgtaacccgaggcccccacaaccgaacccccaagtaagatttgaacatggagaccctacctttatccctgttaaagccggacctaatggatga

SEQ ID NO: 2801 - DNA, 207 bp, Zea mays
  Peptide Sequence Number=SeqID_44580
atggccgtgatgggttcaacatcggaaaagatgtacctctaccaggtaccaaattttgagattgaaaatgataaagacgagaccgggcggaggccaacacgcaatgggagtggagagatggcgagaatagcgtgtaccctccgtggcaagaggatcgccggtggtgtatctctggtctcggttggcgtgaacccggtctggtcttga

SEQ ID NO: 2802 - DNA, 2013 bp, Zea mays
  Peptide Sequence Number=SeqID_44581
atggccgtccgattgcggatcaatgtctttgagtttaagacgctgcaagccaatctggggaaacaatctgcacggtcagcgaagaccacggccatgcgcaacaacccgagctgggcgccgtgcccacaactcagtgtaccgagcggcgcgatcgaaggtggagccgtccagccggtgaaactgaccccgcgggcccatgagtcggagtttggccagacatggctgagactggcgggtggggaccgcctgtcagtgggcgtgaggcgtgagcggggcgcgctgggcagccccttgcgctgttgcttcttcggcggcatgacgaaggagactaaagggcaggaaatggttaggaagtatggagaagactatgattggcgaggagcacctaccatcgacgctgaagttgtgcattctattggaggaaaagcccatgaacggagtggcttgcaacaacagctcgcgagaggaagaagaccaatggctcttaggcggcagttgagagtactgtacgctctggatgttgccaggacacagctctaccactttaaggcaaccgtaatcgcaggcatgggtttcttcacggatgcctatgatttcttcgccgtctccctcgtcatggacctcataagttacctgtacttcgaggaacagattcgtcgaggcgtcaaagccatcatctacggcatcgctctgtgcggcgccgtgccggggcaactggtgtttggctggctgggcgacaagatgggtcgcaagcgcgtgtacggcgtcacgctggttctcatggtggtcacgtcgctcgcgtcgggcctttccctttccttcggcaccaacgacaacgaggcggcgaacgtggtggccgttctctgtttcttccgcttctggcttggcttcagcatcggcggcgactatccgctctcggcaaccatcatgtccgagtacgccaacaagaggagacgcggcgccttcattgcggctgttttcgccatgcaactgaagaccaatccaagaaggaacgctaacttcgtctggcggatcgttctcatgttgggcgcggttccggcgatcttcacctactactggcgcatgaagatgcccgagacggcgcggtacaccgcgctggtggccaaggatgcgaggaaggcagcatcagagatgtcctccgtcctcaacatggaaatcggccaagaggacgaagcggtcagggagctcgtccggcaggacgagtacggtctcttttcggtgcagttcctgcgctgccatggaacacacctgctcgccaccagcgtgtgctggctcgccgtcgacatcaccttctattcgcttaacctctacatgaaggacatcttcgtcgacgtcggtctgattgaccctccggaaaaaagcgacttgttcaagaggatgaccgtcagtacgttgctgcacatggccatcgcgttcggtggtacacttccgggatacttcttcaccgtcgcattcgtggaccgcatcggccgtgtcaggattcagctactcggattcaccatgatggccgctttgacagccagcctcgctgccacttatgatccatactggaaacaacagaaaacaaaacggcgcaagatagggttcgcagtcttgtatggcttgaccaacttcttcaccaattttggtcccaacaccaccactttcatagttccggcggagattttcccaacacggatgcgcgcaacgtgccatggcatagccggcgcatttgggaagataggcgctatcatcggcgtgtttggcttcatgttcacgatggaagaacaccacgtcgccccaagagcgctgtgggcactatttgcctctaacctagtcggccttgtgtttaccttccttctaccagattccaaaggtaagtcgctggaagagatgaccggtgagacggaagaacagcagctgcaacaagacgctgcagtagttgccgcggccgaccatatacatttgagggtctacgctgtcgaagatcctttgattagttgtgttacataa

SEQ ID NO: 2803 - DNA, 1773 bp, Zea mays
  Peptide Sequence Number=SeqID_44582
atggctcttgggcagcagctgagagtactgcacgctctggatgttgccaggacacagctctaccactttatggcaaccgcaatcgccggcatgggcttcttcacggatgcctatgatttcttcgccatctccctcgtcatggatctcataagctacctgtactacgaggaacagattgatcgcggcgtcaaagccaccatcaacggcatcgctctgtgtggcgccgtgccggggcaactggtctttggctggctgggcgacaagatgggccgcaagcgcatctacggcgtcacgctgcttctcatggtggtcacctccctggcgtcgggcctctacttcggcaccaacgaagcgtcgaacgtggtggccgtcctctgcttcttccgcttctggcttggcttcggcatcggcggcgattacccgctctcggcaaccatcatgtccgagtacgccaacaagaggagacgcggcgccttcattgcggctgttttcgccatgcaaggtttcggcaaccttgcagctggaatcgttgccgtggtggtatcagcctcgtttctgaggaccaatccaagaaggaacgctaacttcgtctggcggatcgttctcatgctgggcgcggttccggcgatcctcacctactactggcgcatgaagatgcccgagacggcgcggtacaccgcgctggtggcaaaggatgcgaggaaggcagcgtcagacatgtcctccgtcctccacgtggaaatcagcccagaggacgaagcagtcaggcaggaccagtacggtctcttctcgccgcagttcctacgataccatggaacacacctgctcgccaccagcgcgtgctggctcgccgtcgacatcaccttctactcgctcaacctctacatgaaggacatcttcgtcgacgtcggtctgattgaccctccggggaaaaaccacttgttcatgcggatgaccgtcactaccttgctgcacacgggcatcgcgctctgtggtacactgccgggatacttcttcaccgtcgcattcgtggaccgcatcggccgtgtcaggattcagctactgggattcactatgatgtccgtctttgacagccatcctcgcagccacttatgcgtactggaaacggcaggaaacaatacagcgcaagatgggcttcgcagtcttgtatggcttgaccaacttcttcgccaattttggtcccaacaccacaacattcatagttccggcggagattttcccagcacggatgcgcgcgacgtgccatggcatagccggcgcattcgggaagataggcgccatcatcggcgtgtttggcttcatgtccaacatggaagaacacggcgtcgtcccaagaaagctgtgggcactattttcctccaacctagtcggccttgtgttcaccttccttctaccggattccaaagatggagtctgacttcagtaggaccaaggatcctaagtcagcttccaagccaacatacgactatggtccacgccaacagtactgtcaagactcatcatgctcactgctacaatgaggagggagacaaagaagaagccgcattaacttgcactcaacaaggcttattcctcgatgctacatcagaaggaaagatcacatattggccaggaccactgatgatggggtcttcaactcttcgcttgaccacaatgaaggatgaagtcaagcaggggcctggtatgatcaacaccgaccaaggccttcgccacaacgccgtcatcgtggggcatgtgccatacgtttgttag

SEQ ID NO: 2804 - DNA, 396 bp, Zea mays
  Peptide Sequence Number=SeqID_44583
atgatcctgtcggcgctcacgacgtcggtggggatcaacctggccctcaccgtgctcctcgccgcggcctactcgttgctccgtcgcaggccaccgtacgtcgaggtgtactccccgcgccggccctacgcgccgctcgagccgtggctcgctgcggcgtggcgccgtgccgaggaggacatccacgccgccgcggggctcgatggcgtcgtcttcatccgcatcttcgtattcagcatcagggtgttcgcggcggccgcggtgctcggggtcggcgtgctcctgccggtgaacttcctcggtgaccagctgcgggagatcgacttcaccgacctgcctaacaaatccatcgatctattcagcatctccaacgtccaggacggttccagcaagtga

SEQ ID NO: 2805 - DNA, 273 bp, Zea mays
  Peptide Sequence Number=SeqID_44584
atggtggcgcaccggactttccggtgtgaagccgtcagactgtctggtgtgcaccgaatagcctgtgcaaagcgctccgcatatggactcttgggagctagagcaccggactgtccggtgtgcaccaaacagcctggccaacggtcagcaacagctttcccaatggtcggcaacgactcctttcaatggttggcaacaactttcccaacagtcgacaacgactcctttcaacagtcggctgacatagtgtcacacccggtttttagaaggtaa

SEQ ID NO: 2806 - DNA, 1770 bp, Zea mays
  Peptide Sequence Number=SeqID_44585
atggcaagagtgcaaaagaaaagtggctcaagttgtagtttttaccgaaacctaacaaaacaattgtggcttcacttttcagctgtgtatatcataactggaattacatgctacctactgtatcatgagtacaaatatatctctggcaagaggctagagtattttatgatctcaaagccattacctcagcacttcacagttcttgttcgagctattccagtatctgatggtgtttcagtgggtgatgctgttgataagttttttaaagagtatcatgcatccacgtacttatcacacacaattgttcgtcaaactggcaaacttcgccgtcttctgaacgatgctgagagtatttgtacaaagcttaccaacttaaaccatgtccgacggtcaactggagatcctccaagaaaacttggattatttagcagaaatgatcttgttggagaataccagaaaaggctggaagaccttgaagagaatgttagaatggaacagtcagatgctactaggagacaggaaattcctgctgcctttgtttcattcagatctcgatatagcgctgcaaatgcagtttacattagacagtcagacaacccaactgagtggcaaactgaggaagctcctgatcctcatgacgtttattggcctttcttttctacatccttcatggaaagatggattgccaagtttgtagtatttgtagcttcagttctcctgatacttgtctttctcctagttgtggcatttgttcaaggactcacctatctggaacaactagagaagtggttgccttttctgaggaacatactggaaattgctgttgtgagtcaactggttacaggatatcttcccagtgttattcttcacgttctttcatcttgtgtgccctcaataatgaagttattttcaactatgcaaggatttgtttctgttagtgggattgagcaaagtgcttgcaataagatgcttcggtttacaatatggactgcgttctttgccaatgttctcactggttcagccttagttcaattcgagattttccttaatccaaaggagctaccttcaaaacttgcagttcttgtaccagcgcaggcctctttctttattgcatatgtggtcacatcgtggacaagcataacatctgaactcactcaaattactgctcttttctgtcatctgtggggaaagtgtgcgaagtgttgcaagcgggattactccaaagctccatcaatgccttattatagtgaaattccacggattctcttgtttgggcttattggactcgcatattttattgtagccccccttatcctaccatttgtattggtctacttctgccttggctacttcatattccgtaatcagctttttaatgtatatgcgccaaagtatgatactggagggaaattttggcccgttgtgcacaacacaacgatattctctctggttgttctgcatataattgctattggagtatttgggataaagaagcttccccttgcgtccagtttgctacttcccctaccaccgctgacccttctgttcaacgaattctgccggaacagatttctgcctatctttgaagcatactctaccgagtcattgctaaagaaagatagagaagaacagagcaaaccagatatggcggagttcttcagtaatcttgtaacagcttactgtgacccagctctgaaacctttccaacgggcttctaactccgacgaacgcaccgcgccgctcttggcctctctgtctagctccagataa

SEQ ID NO: 2807 - DNA, 183 bp, Zea mays
  Peptide Sequence Number=SeqID_44586
atggtggttagggagaggttgttccttggggtcgtcgtctggcgcgcagcaggtgttgcagctccagcctactatggcaatcctaccactattggaggaaggggctttcgtctgagaaaatcaacaccggtcgccgttttagaaccggaatatgagcttttgatttatatatggtgcacatga

SEQ ID NO: 2808 - DNA, 219 bp, Zea mays
  Peptide Sequence Number=SeqID_44587
atggcagcagctccactacgaatgcatagcgcgcaggttttgctggcaatattggaacatagtagagagacgtgggaatcattgctctcggtccacgggaaagaaaggactaagagtggtcaaagagttagttggttgtttccatggcctggctggctagtaggtccgcttagtaaatttgttcaggagttcacttctagtcttttcttctccttctaa

SEQ ID NO: 2809 - DNA, 312 bp, Zea mays
  Peptide Sequence Number=SeqID_44588
atggctgctgataagaagaggaacctgggtgcaggtctctatcacttgtctccagatgatcttaacaaggtgctagaaattgttgcacaagacaatcgtagcttccaacctaaagcaaaagaagtggatcttaatatggatgcccagttacgcgtggcggctgatgtgtgggctaggtcacgaccagctccatgcgttagtcaaccagttgcagctatgtacctgtacaggatctcgtcggctcttcattatcctttgtttgagagagccatggaggaaggacacattggagaagatgtagccaatgggtag

SEQ ID NO: 2810 - DNA, 1410 bp, Zea mays
  Peptide Sequence Number=SeqID_44589
atggagggcgccacaggctgcggcgtccatgtcgtttcccggcgcatggtgcgtccgttcacgccgccgccgccgccggcggtgaacgggaacggctgcaatcgacccaaggaggagaccgaggtgattcacctggcgccgtgggaccttcgcctgctcagcatcgactacatccagaagggcatccttctgcccaagcctccatccgagggcgacgacaacgacctccacctcgtcaacgccctgcggtcctcgttcgcgcgcgccctacggatcttctacccgttcgccggccggctcacctccgaggagcgagccgacgacgggaccgtgtccgtgttcctgcggtgcaccggcgaaggcgccgagttcgtgcacgcggtggcgccagaggtcgccgccgccgacatcgtctcctcgctgtacacgccgcccgtggtctggaagttctacccgctggcgctggttcttggcgctgacgccgccatcgagcggcttccggtgctcgccgctcaggtcaccgtgctcgccgacagcgtcttcatcggcatgacgctaaaccactccgtcggcgatggcaccgcattttggcacttcttcaacacctggtcggagatcaaccgcgccaccggcggcggcgccgacctgtccacgccgccgccggtgttcgggagatggttccccgaggcatgtccggtgccgatccccttgccattccgcaggctggaggacatcgtgcgccggttcgagcgcacggaggtgaaggagtgcttcttcaccttctccgcggcgagcgtcaggaagctcaaggcgcgggcgaacgacgagatggccggcagcgccacggccaccatctcgtcgctccagtcggtcctcgcgcacctgtggcgcgccgtgtgccgggcccggcgcctccccccagagcacggcacgttctactcggtggtggtcgggtgccgcgggcgcgtggacggcgtgccgccgggctacgtcggcaacgccatggtgttcggcagggcggaggccactgccggcgagatcgaggagaaggggctgggctggacggcgtggctgctgaaccgcgccgtggcgtcgttcgacgaagcggccgtgagggagtcgctggagcggtgggtcggggagccggacttcacgtacatggacaacctgtcctccgccggcacggcgctagtaaccgggagctcgccgaggttcgacgtgttcgggaacgacttcgggtgggggaagccgctggccgtccggagcggctccgggaacaaggccgacggcaaggccacggtgttcgaggggccggagcggggagggagcatatcgctagaggtgtgcatcgcgccggacgcgctccagaggctcgtcgccgaccacgagttcatggacgcgtttgcctag

SEQ ID NO: 2811 - DNA, 1306 bp, Zea mays
  Peptide Sequence Number=SeqID_44590
atggatgaaataaagagattgatccctgcttccccgttttcccttaccttctccatcttcacgtctgcccctgtgttcctcgtcggccatcagcacggcacctcttcgtcgcccgtctctgaggccgcgaccggagatcttccacaagctggtgcttcgttagagtccttagccagaggagctgtatgtttttcccgtaaattcactcttcatgaaatacaggaccgctggaattcattgctatatgacccagatatctcaacacaagcagcttctcggatggctgaatatgagaatgaactttctacttccgatccagccaaggcacataaacttttcaactcaaaagcaaaggatttttcatttcagaaacggaaaatagacagtgtaaagaatctatattatgcgatgagaaaaagagtacgcaatgatccacgcaacagtggcgaccttggatttcttgtcccctgttcgtgtacggcaattggtagtgagtgtatctgtggaggcctacctaacaatattgaaccagagctgaattcagtaagccgctatgggcaagtaggttcaaggtacaccattggacattcatattctgaaatgaacgaacatgcttttcatacgaagcatactgaaagcatgacaagagatggggatggcaccagtaatgttgtgtatggctactcagatgtaggccaactatatgaacatcatgcgtacacagcgaataatcatgggaatagagaagggaacaatctttctctaaagagtatcacaaattttcaggattctatgcagtttcagcagttggacaacaatcaatgtggtaatggggtggtagactcaaaggctttggtgatccctaaccatttcagtggaagtgtgcaggaacctatgcctctccaaatgattggtcaacctgagggttctgaagcaccaggtggtgcaatcttgagtcttcagcgaagcgacaggctcgctcttgctgatgataaggatgtaaaatcagaagacagggaccctctcacatttgaagcgcatttagatggtgggatatctggtttagatcacgctactgagtttatggacttcccatatttcactaatagtgaagaccttgatatcctgaatagtgaaaatcttttgaattctccaagtgagggaatccaggaggatttagacgatactgcattagttgttcatggggttagatcaaccatgcaaaatctggttcatgctgatgaagccaatatgtcctgtgatcaaatagatcttggtgatgtgaaaaataatgtagatgcttctg

SEQ ID NO: 2812 - DNA, 621 bp, Zea mays
  Peptide Sequence Number=SeqID_44591
atgagcaccgagtcaggagagctgctcgggatcgaccccgtcgacctccggttcccattcgagttaaataagcagatctcctgcacgctgcagctgacgaacaagacagacaagcaggtcgcgttcaaggtcaagacaacgagccccaaaaagtactgtgttcggccaaacaacggcatggtggcgccccggtccaaagctgacgttgttgtcacaatgcaagcgcagcgggacgcgccaccggacatgcattgcaaggacaaattccttgtgcagagcgccatcgtggccaaggagaccatgccgaaggaagtcactggagacatgtttaccaaagattcaggcaatatagtggatgaagtgaagttgaaggtagtttatacagcgccatcgtcctctcaaagcgagggatttgaggatggtaatctcggcagtttgagttatcaagaggaaacaaaagaacccaaagaatcagaaaaaataatctctgaggtgaacctcttttatataaacattgtcaagctgtacctactaaagatcctaggtgtagtacttttgcacttgaaatactcgtacctcaaaagtgatcaaatttgtagcgtcagcaatccatttgcttaa

SEQ ID NO: 2813 - DNA, 207 bp, Zea mays
  Peptide Sequence Number=SeqID_44592
atggccggcacagcttccccgtcggctagaccgtcgtcaaggagtccaacggaggcacatggcccatgctcacaagaccaactaaacaagtggagcttggtgatgaaggagatgaagtcgtatgccgacaacgacatcgacgaggagaaactcattgagaagttcctctgccttgtccccctaagaaatacacgcaggtcgccttag

SEQ ID NO: 2814 - DNA, 252 bp, Zea mays
  Peptide Sequence Number=SeqID_44593
atggagatcaaactcggctgcagcataagccttagggtcgtcttggggagcatcactacatcactggagggaccaaaccccgtggacctcccttgtctggaaagaagcccagcccatgaaaaaacgtgcattcggttaacccccgtatggaccgtatcccggtatttcctcttcgttccagactgggaaccacgcccggtccctgcggggtggaaaatatcccacgcgaaggagctgaggcatcacaaatga

SEQ ID NO: 2815 - DNA, 625 bp, Zea mays
  Peptide Sequence Number=SeqID_44594
cgcgcgcggccccgccgcggccaaggcgggcctgtgccgcctcctggagacgatcgccacggccgccgcgacgcgggacctggcgctcgccgccgccgcgtcgccgcgggtgtggcaggcgcttctgccgctgcttcggcacgacgacgagcgcgtctcggtcgccgcggtgcgcgcggtggccgcgatctgctgcgcggccgagcccgcgcgcggcagcgccgtccaccacggcgccgtccccgcgctcctcggctgcctggcgtgggcgtcggcgggcaagggccgtggcgccgcggcgtggagcgcgctcgcggcgctggaggcgctcgccgcgtccgaggcagggcgccgggccgtggcgcgcgatcccggcgcggtgcggtcgctgggagtccagggcggcacggaccgaggctgccgccgcggggctggtgacgcaggtgctgctgctgctgcagagccagtgcggaaccagggccaagaccagggcgaggtcgctgctcaaaatgttcaagtccatgtgaaacaagcgcttagtttaggtgtcaatgctggatgttcttggcttcaagcttttcttggaagctgctcgcaaccaggtgtgatgactgatgagccgtag

SEQ ID NO: 2816 - DNA, 321 bp, Zea mays
  Peptide Sequence Number=SeqID_44595
atgggcaagatgatcgtgttggatgaagaggaggagaagaccgggctgccgcagctcgaggggaagcacaacaagttcatctacaacagtaacggcgagatcgaacgagaggaggtggcagatgtggctgagacgagggcggagcttggcgcactgatgctaaggggctgttggggccggaggggcggcacctacgcttccacaatgacgaggatgacgaggaataagactgctcatattcagattagatatcgacagtggttgtctttctttgacaccagccaaaattcctttttgggggcctctatttctaaaatctag

SEQ ID NO: 2817 - DNA, 684 bp, Zea mays
  Peptide Sequence Number=SeqID_44596
atggccgccgccgccacaatcatgttcgctgggaagttggccgggagctcggtggcaaatgcaaccatctccttttggatcaacaaagctttcacctgcctgactgactactggaaggctgatggcttggaagatgtcaagggtagggtgctgcagtcagtgaagaaggtccaggttgtatttgatatcgttgaccctgaatacatcaaggaacaaagctctgcccttgatctttggctgtggcagttcagggatgcagttgaggaggcagaggatgttatagatgagcttcactacgatgagcttagagagaaggcaaaggatcataaggtcagtgactggggctcctcttctgctaaactgaagcataagtttgtcaagtccgttaaacatgctggtgtcatgggtaagactgtgaaagaatttactcaccgtggcacactcaagaggctgaggaaagtcttggagggattagaaaaggcagccaccgaaattgtggctatcctcacagtcacacaacatctcaaagacattggttcaggtagtaaaaggcaggtgaattttgtgatcaaggatcatgacactggttcaacattaactgaaccttactttgttggacgagaagaggagaaacaaaagattgtgcaatggctgattgaggcgccagtggaagcatctgaaatt

SEQ ID NO: 2818 - DNA, 345 bp, Zea mays
  Peptide Sequence Number=SeqID_44597
atggcatcacgctccttgcatagaaggattgggatccagccggcctgtcgtctttctggcgaccactatggtctgcagctgctccgcttcaacgacgtgaagattgaactatcggggagaatgcagaaacaatttacagatgatagacagatgaggcaactgtccatggtgtatatgctgcttcgacctgtgcagtttatggacgaagacgaagctgacctgcagatcatgcttcagccacatgagcttccaatagctagagaaagctcaggccaaatgtgccatccggttgagccggaccaggttcggctgtctataaaaacagcccagacccctagggattag

SEQ ID NO: 2819 - DNA, 540 bp, Zea mays
  Peptide Sequence Number=SeqID_44598
atggatctctccgctgtccaggctgccctctccgacaagtcctactccaccctcgcctccctctgcgacgaacttctcctccagtgtggttgggacttgggagtgagcaggaacagcgcgcggttcttctggaagtcgttgccgcaggaggtcaaggacacgcggccggagctcgccgctgtctggaggattggtcagtgcctctggaaaagagattatgctggcgtcaacacggctgcacaggggttcgagtggggtcctgacctcgctgacttcatcactgccttcctagagagctacagacagaggatattcaagctgttgacttctgcatattccacaattagagttgctgatgtggctcatttcatggggatgagtgaggaggatgcgacaaactatgctgtgcaaaacggttggagtttggatgcagcggccaagatgcttactgtcaaaaagccaaagtctcagaccaaccagaagcttgatgctagcaaactgcagcgtttgactgagtgtgttttccaccttgagaactga

SEQ ID NO: 2820 - DNA, 711 bp, Zea mays
  Peptide Sequence Number=SeqID_44599
atgaaagttaatgagcttgttaaatatgtgtattatagattaaatcttgttattaatgggctcaattctattggcattaataagctaggtgatgaggacattgtgtggaaccacatctccttactaccacaacataaatatagaagcatcatcaccatccttcataatatggaggacttgagtcaaatgaccccggggctactgattggcaagattgtggcatttgtaatgtcacaaaagatgggtaaaaaagaacctacttcattaaggccatattctttcatatgcgaagagcataaaaagatgaatggtaagaagaaggttgaaaggtcaagttcctcaagtgaagaagaggaatctaaatatgatgatgaagaggaagatgatgatcaaccctctatatcatcctccgaggatgaaaaaacagttcgacgcgtcagaaaggtcgaggatattttctttaaaattaacaggaaagaacaaagaaaaagaggatgctttgcatgtaggagaaggaccgcttgtggtattttttcccaaacaaagtcgcgcccaagaagaggagcaaaggcaaagcgctcacttcagtcaaaacgtaggatgattcatcaagtaaagatgacaccccacctaagagtcataagcatcgatcttcatcttgctcatctcacaaatgtcttatggcacgagatgaacttgcaaatgccataa

SEQ ID NO: 2821 - DNA, 279 bp, Zea mays
  Peptide Sequence Number=SeqID_44600
atgtcgggagaacatgccaagagggagatggtcaccggcgataagcctaaagtctcgggaaggaagaatgaggaacgaactccatcaaaagaggccgacgacaaccacaaggaggaatccacttcctccatcaagtcacataggaagggtgataagaagaaaaagaaaatgaagaagacatcacaggtggacgatgaggactatgactccgatgaggccgcccaaataaggtattttaattcccatgcagcttctatactcctcgcctccttatgttga

SEQ ID NO: 2822 - DNA, 597 bp, Zea mays
  Peptide Sequence Number=SeqID_44601
atgcccttgcccaatgccacccccagatccgcgctcgccgagacaaccccccatccccctcaagaagcccagcgatggcgccgtcatcgaggtcaaggagatcagaagatcgcctacgccaagatctgtctccagcgccatcggcctctcatccaaccccggcccaatcgctgctccaatgctccttcgaccaggttctcctgtagaaggtacgagcccaccatcctttcgacctatccgtgcgagatctccgtgcttgagatgtcgttggcattgagaagcacatacatagtggcttacgctgcatgtactcgtgcaaatctggtggcaatagtcgggcagaaggtagtgaaggggagaggatgtggttcatcctctgaaggtttccctagaggacttgtacaatggcacatcgaagaagctttctctgtcctgcggtgtcctctgcttcaagtgcaatggtatgggttcaaaatctggagatttattgaggttcctgatgaaacctttctatttctagatacaatattgtgtgctattgagagcaacgccgtactcaaatgcaaatcaaatgaagaaacaatttcgacgggatga

SEQ ID NO: 2823 - DNA, 159 bp, Zea mays
  Peptide Sequence Number=SeqID_44602
atggcgggcggaattgagctcgccggagctaagggaaagtggctggccggtgaggagaacgcagatgatctttgggaagaggtctgcaattcagaaattcagaaatctgaattcctccaagggttcatagatcaagggctgatttggggatttatttga

SEQ ID NO: 2824 - DNA, 306 bp, Zea mays
  Peptide Sequence Number=SeqID_44603
atggccagacgtctgcagactaccctgagtcatcatgaacacatcaaaatgttctcggttgccgctgtcatcgtggacagggagagtccgactcggatttatggaattgatggaggggaaatggccgccaaagaaaacgaagaggaaatagaagttgaagaagcgaggacttcaccaccaccaccacctgaagaacctcaggcaggaaactgcttctacattgatatctgtggagcagaacctgactcaccagtgataggagttgtgtgcaaaaccaattcctgcatttccttccttggaatttga

SEQ ID NO: 2825 - DNA, 1047 bp, Zea mays
  Peptide Sequence Number=SeqID_44604
atggttgagggggaggcggaggcggaggcggaggtgaagaagggcggggtgctgcagggccgatacgagctgggccacgtgctgggggcacggcaacttcgggcgcgtccacgaggcgcgggacctgcgcaccgggcgtggcgtggcggtgaaggtgctcgccaaggacaagttgctgcgcacgggcatgatggagcagatcaagcgcgagatcgccgtcatgaagcgcgtgtcgcaccccaacatcgtggagctgcacgagggaggacgtggcacgccgctacttccggcagctcgtctccgccgtcgacttctgccacgcgcgggggcgtgttccaccgcgacctcaagcccgagaacctcctcgtcgacgaagcgggcaacctcaaggtcgtggatttcggcctcagcgcgctcgccgaccacgcgcgcgccgacgggctgctgcacacgatctgcgggacgcccgggtacgtcgcgcccgaggtgttccggaacaggggctacgacggcgccaaggccgacgtctggtcgtgcggcgtcgtcctctacgtgctcctcgccggctcgctgccgttcccaaaggacagcatcgccgccatgttcatcaagatgagccgcagggactaccgctgcccgccgtggctgtccacggaggcgcgcaggctcatccccaagctgctcgaccccgacccggacacccgcatcaccgtcgcccagatcgtcgagacgccgtggtttaacaagccgtccgtctccagggccgttacagccgccgccgccgagccaccggccgaggctgcctgctccgcaaaggacagcggcggcggcgacaaggacgagctgccggagacgctaaacgcgttccacctgatctccctctccgcagggttagacctctcgccgctgttcgacgtggaaggcggtccggcgagggggcaccgggaggacgggcatgcggttcgcgacgcgggagcccgcgagcggcgtcgtctcctcttcagagaaaggggggccgcccgcagcggcgggcggggatgcgggtga

SEQ ID NO: 2826 - DNA, 132 bp, Zea mays
  Peptide Sequence Number=SeqID_44605
atggtggtgccgccttctgcaggaggtagatctgcctgtccggaagaggaaaggagaatcagtgcgcctgacttccagatctggaagctgctgttcgtacttgcggatctcaacatgtacgggattttctaa

SEQ ID NO: 2827 - DNA, 648 bp, Zea mays
  Peptide Sequence Number=SeqID_44606
atgccgagaactccggggaccgaaccaccaaggcgagatttgggctcgggttctgactacttcggccgtgctcctcggagtataaaatcggggcccctcctaccaatgccacgcaccaggagagcaaaagaagaacacgagagagagaatgaggaagttgcgccgccaccgtattccaggttcatcggcggagggcgagaaggggttgccgccgcgctgtcgtgctggcctgaacgaatcgagggggtgagagaaaccacaggccgcgtcgtcgggatcgactccagggaaccacatagtgggcacgccatttgcgcccgggaagaatggatttccgccgctacggctgattcgcgtgggcgtcgcgttgggtgtctcggaccaagcctgagggcttcgctgcgtcttcttgggagtgccagtgaccttcacgggagggggaaaaccactcggttgccggtgatttctcaccgggatcacagtacctccgccgggccgctgtccaacgttgccaaccgcgctctgtccgctatcaactccagttctctggaggacatggttgctggagtgacttggccgtccatcttgccaccgggctggacagtcgagtgggaccctacctcggctgaggaggagcatgagaagtga

SEQ ID NO: 2828 - DNA, 504 bp, Zea mays
  Peptide Sequence Number=SeqID_44607
atggcgcagttctgtacggatgcgagtagggagcatcgcgtgcagacgggtcgcgcgacatggacgagcagagacgacgaacggtgcgcgacgccgcagacagtagctgggcaaaggcaagcagtttggcgtgatggggagggcacgaacagggaggtcgacggcgaggttcgagcaccggcgaaccagctgcagcagggacctcggcaagacgtggccatggaggagagagagaaaagcaggggcgccatgagctgggaagcagggaggaagctggagccagggcacgactttggaagatggagcttggccagcgaactgtggacgacgcaggatgagagtcccgacgagcttggggagatgggcgcgttggagccgggcgccgggaagaagaaatccgagctgggcgcgatgagctggggaaggactccaggagagggagggctcggcagggaggagtgggaggctgcggcgaccatgggaaggggctgcaggaacgcgtag

SEQ ID NO: 2829 - DNA, 900 bp, Zea mays
  Peptide Sequence Number=SeqID_44608
atgcagacgagctacaacagtcccagtgcacagcacgacatcgagggtctgctgacacagctgctgttggaggaagcgcggatgcatagctcagtacaggacatggcgcagttctgtacggatgcgagtagggagcatcgcgcgcagatgggtcgcgcggcatggactagcatagatgacgaacgtcgcgcgatgccgcagatagtagctgagcacaggcaagcagttgggcgtgatgggagggcaagaacagggaggtcgacagcgaggttcgggcaccggcgaaccagctacagcagggacctcggcaagacgtggccatggaggagagagagaaaagcaggggcgccgcgagctgggaagcagggaggaagctggagccagggcgcgactatggaagatggagcttggccagcgaactgtggacgacgcaggatgccgattgccgaccagcgcgcaggggagcagggcgcgagctgggcagagggagctggggacgagcagcgtatgaggcacgactacaatagtgggcacacgagccaccgggaggacgcgataggaacagctctgcgcgcaagacacggccaagcatcatggcatgacggcgaaaacaccggcgaggcactggcgctggcgagctccaaggacagggaaggcgcggccaagattgggacgccgagagcagggagcagggcgcatgcagagctggaaaccaagcgacgacgagctggagatggagcacagggagatgagcggccgagcagggagccggccacgacgagcagccggagcaagggaggcacgcagatggcgtggttgcacgcgatacagggaagacggcgcacacagaggaggagcgaccggtgctgggaacttgaggagcgtgcgacgggaaggtga

SEQ ID NO: 2830 - DNA, 693 bp, Zea mays
  Peptide Sequence Number=SeqID_44609
atggagacggtgcaggtacatctggtcgagtggctcaaaatgatggttggcacgagaagagctgaggaggtggtggatcctgacatggagttgaaacctgccactcgggctctgaagcgtgcccttctagtggcactgcggtgtgttgatccggactctgagaaaagacccactatggggcaggttgtccggatgctcgaggcagaagatgtcccgtcacgggaggaccgccggagccggaggggccacagcggtaacgcagacagcgagtctaaggcaagctcaaatcgagctgatgctgtttcctgtgatatttctgaagatgttccaagcagggtggtaatttcctgtgacaattggaaagatgtagacgatcgctggctcattggttctaatcaatgggatgaatgtcaaatgcgaataaatcaaaatccgaggtacacagaagagctccggcgacggggaaagggcccgggagctccaaaggcttggcgatggcccggcggttgcgagcacaaagagaagcgcacggaggagggaggtgctagtactacgcatggcaaattgattctttgtaatgtttggcgtggagttgtaagagcatcggaggagggaggtgctagtactacgcatggcaaattgattctttgtaatgtttggcgtggagttgtaagagcatctgtaagagactag

SEQ ID NO: 2831 - DNA, 234 bp, Zea mays
  Peptide Sequence Number=SeqID_44610
atggcggatagggagcgagttagtcaggagaattggagtcatgttattgagactttggatggagttgcgaaggagagaaatgatttgggtcgtaaattgaaggagactggaagggtagtgacacagatgaggttggagcagatggggaaggaattaggtgaatcttctgagggttctagggcaccatcctctgatgatcagcgaagtgggtctctgtatatgaggctccactag

SEQ ID NO: 2832 - DNA, 225 bp, Zea mays
  Peptide Sequence Number=SeqID_44611
atgccagcattagcgcatggatgtacacccgataaatttgcggagaaaaaatggaagactcctgacaggtcaaaccaaagaaaaggtgagaccttgcacggttgcaccaaaaacttcaactctaagtttgaaatgcctttggaaacaagtgaactttacacttggggttgtgatgaaggtgatggtaggttggggcttgggaatggaggtggacaggtggtctag

SEQ ID NO: 2833 - DNA, 654 bp, Zea mays
  Peptide Sequence Number=SeqID_44612
atggacgaccaagacgccttcttcctttgcccaccgagttgtggcggcatccaccagcggcggcggcgccatggccgagacaccccaaacttcaactctgtgcactatgccctaaaccgaaaggtccactacgatgccaaaagcaagggaaatacgctggtcatgttcgtacctcagtgcgcatcagagggtcttggtcacggcgagcggcggatctccgacttcggcgaagaattcccatggcgtcgtgaacccccttccgattgcgccctcacaccgcttctacgtgagaaacccaagctttgggtgtctagatcggggcctgaaatgcgctatttgtggctatctacggcggcggcgatgggacttctccgcacggcgcgtggtggcgcagtggatggcgtggtggagcagcggctgcgggcaaggccgaggggtccgctatttgtagtcaaggtggttacggtagcgcagttagctagctccagcgaagatctcggcgatgccggtacaccgccggcgaccgcgtcggtaggaagatctacaatgatgatggcgcgtgggggtccacagggcagcaacctgaagcggatccgtgcgccccgaccccggtcccacgtgtcggacatggcaaggaagtggggcgtgcgataa

SEQ ID NO: 2834 - DNA, 435 bp, Zea mays
  Peptide Sequence Number=SeqID_44613
atggagaaccttcataagcttctaaagggagaacatatgttaggactaacaaatgtctattttgagaaagacagaacttgtgtagcgtgccaagtagagaagcaggtgggaacaagtcatccaagaaagaacgtgatgacaacgttgagaccattggaacttcttcatatggatctcttcggacctgttgcttatcttagcatcgagggaagtatggataaatctgaaacccaagaaaccctcaagcgcttgttaaaacaggctcaaaatgagtttgagctaaagatgaagaagataagaagtgataatggatctgagttcaagaacctgcaagtggaagaatatcttgaggaggaaggcatcaaacatgatctccactccctacacgccacaacaaaatggtgtagtggaaaggaaaaacaggacgctcattga

SEQ ID NO: 2835 - DNA, 654 bp, Zea mays
  Peptide Sequence Number=SeqID_44614
atgggtcgcgacgctctccagcagatttcactccagcggccaaggtttgatgtggttgattttcttatatgtgagatcgaggacacggtattggatggtcttcgtgcccggcgacaactgctgtatgctcattatctctgctacatcttcgcacagctgatccggccaccacagttccagggcactcttgaggcctcatgcctccactttggctcctatcgtccagcccctgaggaccttgtgccagtacctgatccaatgatagacactcaggcagaggatacgacattccataagttcgagactcagggcacaaccgttcctgatgatgatgatgatgattttgggattctgcctccacctcctatgcctccccgctcacatgatcatgaggccaggagttccagtgctgcccctgctgccccttctgccattgaccctgctttggctgcgatactccaatcccttactcagcactccgtcagtgctcagccgccagtgccaccagcgcctgctgttaccactgctgctgtggcggtgtctatgaccacttcagcttcgacagctcctggagtgcaacctcagtttgagtcagtaccagctccagcttctacgacagatcctgcatccgagactgactctgaccccaactag

SEQ ID NO: 2836 - DNA, 249 bp, Zea mays
  Peptide Sequence Number=SeqID_44615
atggctctcagggcgtctagggccctagtgacatctaggaccatagtgtcccttggaacagctggggcatcactcttaggccctgtttgtttcagctttgttcagcttctgatgtccgagggtgatgtgtcccttaggacgttcgaggttctttcaagggttcctgtgttccttgggacatctgggccctatggtcattgggtggtcgaggcggcccatggaagttatgactcggagtggcgcccctag

SEQ ID NO: 2837 - DNA, 1449 bp, Zea mays
  Peptide Sequence Number=SeqID_44616
atggctgaccacggcgtgaggtcacacgacgacgcgaaaaaccaatttgggggtaatcgcgaattgaggagctacgatggacgatcagaggcgagggatggtgcactgggcaccaaccatactcaaatagtcactggatccactacaagaaatttgtccttttatgacaaaatacttaatgacaaggagcacggtgtcacggcgctgctcaacctctccatctgcgacgagaacaaggcgaccattgtcgaggcaggcgcgatacggccgctggtgcacgcgctcaagtccgcggtgtcgcccgccgcgcgggagaacgccgcgtgcgtgctgctccgactgtcccagctcgatggcgcctccacggccgccatcggccgcgctggcgccatcccgctgttggtctccctggtcgagaccgggggcgcgcgggggaagaaggacgccgccacagcgctgtacgcgctctgcagcggcgcacgcgagaaccggcagcgcgctgtggagaccggcgccgtgcggcccctgctggacctcatggccgacccggagtccggcatggtggacaaagccgcgtacgtcctccactccctggtgagctccagcgagggccgcgccgccgccatcgaggaaggcggcatccccgtcctggtcgagatggtggaggtcggcacctcgtgccagaaggagatcgccaccctctccctcctgcagatctacgaggacaacatcgtctaccgcaccatggtcgcccacgagggcgccatcccacccctcatcgccctctcccagtcctcctccgcccgccccaagctcaaaaccaaagtacacaccacgtcgcagtgcccgcattcgacaaaaaaacgcggagtcgctgatcgagatgctgcggcagccgcggagtccgagcctacgcacgcggccagcggcagtcgttgccactcgcgcccaccaggtaccacgatccccaataccgtctacgaccccatcaggagggattcacttccactggaagaaataaaagatgtttaccttcttgactttgtgggacctcctggttttgttgaagatatagcccctaaagtcgaaagaaccgagttggaattgctttgtgtgagcaaacttagtgaagtcacctccattctcgatttctatctcactagagggagaaacaagctcttaacagaagttagcaccttacggggtaatgaaagtggtaaagatgtaggcgaggtcaaatatgtacctgacaataaggctgaaacagtacacaagctttttaagtttattgaagacggggacttatggagatggaaaattccaaatagcaaggccttcatcagtggacttaaagatttggacattgaattcaatgtcaatgcaaataataaattgtttgatcaggttcagcattgttcaattttgggttatatacagggcttggattga

SEQ ID NO: 2838 - DNA, 294 bp, Zea mays
  Peptide Sequence Number=SeqID_44617
atggagcgaatcgtgacgcgactgacggtgctgagctaccacatgtggagctacttctggctggactttcggcagctcaacgacatctacaggttcaagacggaggagtacatgcacacggccgttaacaagttcaacgtgaacccggagtccatcccgagctgtggatccgggagctggtacttgagcatgaaggggtggccgcccagcagcgaccgtgagaggcgcgcgtggacgtcagcgagcgacgcgtgccggtccacggccacgatccgggtctccccgcccaagtag

SEQ ID NO: 2839 - DNA, 696 bp, Zea mays
  Peptide Sequence Number=SeqID_44618
atgcattcaacgccacagtgttgcatggagccagatccgtggagtggaggtcagcgggccaatgcgaagctagctgcgctcggcaaacgacagacgatgggaagagtcaggggctcagcgctaatggcgcccggccaaagcggaggtaggccaccagcatggtcacgcgggcgcaacaagcaagaggcagtagagaagtggatagccgtccaggcaaccgagcggaaggcgacgaagcggagtagtgctcttctggttctggccggcccaaggtatggcgtgagccatacctggccatctcggaccctccgcccctggggggcgaggtggatgggggcgaggcgaaggggtcggctccgcctgatgtgcaacttcgggggccggatcaccccgcgcccgaccgataagtcgctctgctacttgggcggggagacccggatcgtggccgtggaccggcacgcgtcgctcgctgacgtccacgcgcgcctctcacggtcgctgctgggcggccaccccttcatgctcaagtaccagctacccaacgaggacctcgactccctcatctccgtctctacggacgaggacctcgacaacctcgtcgacgagtacgaccgcatcgccgtgacctcctccggcagcggatcctcgcgcacctcccggatccacagctcgggatggactccgggttcacgttga

SEQ ID NO: 2840 - DNA, 612 bp, Zea mays
  Peptide Sequence Number=SeqID_44619
atggccaccgacgagctcgcccacgccgtcgcccccgccccggccgggggagaccactccccggccttctcgttcagcatctggccgccgacgcagcgcacgcgggacgcggtggtgcggcgcctcgtggagacgctcgcgggagacaccatcctctgcaagcgctacggtgcggtgccggccgccgacgccgagcccgcggcgcgcgccatcgaggccgaggccttcgacgccgcggcctccacgggaggcgccgccgccgcctccgtggaggaggggatcgaggcgctgcagttctactccaaggaggtgagccgccgcctcctcgacttcgtcaagtcccgctccgcggacgccaaggccggtgacacgccgtcggaggaggcccgggctcctggcgcgcccgaggccgaggccgcccagcccgcggcgtatgccagggctttgaaagcgaaatcggtatctgtcggttgctatccgtctgccttccatccaccattcgtttacacggatcaatgccgcacgacggctcatgagttcaaacttcaaagggcatttgctgggacaaagtgtgtgataaactcgtatctatactcggatgaaggtgaatag

SEQ ID NO: 2841 - DNA, 369 bp, Zea mays
  Peptide Sequence Number=SeqID_44620
atggggttcaatgatagttcttcgtcggtggtccggttccatgggatcggggaggtgacgggaggagagagggagagctcaccggagaagaggaaggttgtggcgtcggcttcaattaagtttgagggaaggggagagtggccggtggtcggtgcgggttggagaggagcttcaggcgctccttttataggcgtccggggaggggagcggtggccagctggcctttggcgggtggagcatagcggcagtgagcaggggcgatacaacgacggtgatgagacgacacgacgaagggagagggatagtgtcgtgctggtgcacacgcacaacacggcagggacgaaacggtgcctaactccactggagtga

SEQ ID NO: 2842 - DNA, 318 bp, Zea mays
  Peptide Sequence Number=SeqID_44621
atggcgcttctctttctcagacccatctcaggaaaggaaaaccaagaaatgccttactcccgcgatgcccagaggccagaaccagagattgcgggagggcgaaccaagaaggcaaggaccaagaagcagagaatgttgcttgggtcagcgataatggaaagcggcagattcgagcggagggagcatccaatgcggcgtctcgggaagtcgggacgggagtatgacgacagtgtgcctgcggtggccatccctccggcgcctcttggatttattgtgcagggtggaaacggcgatctgctgctaagtcgttggcgttaa

SEQ ID NO: 2843 - DNA, 453 bp, Zea mays
  Peptide Sequence Number=SeqID_44622
atggagagtgagattggctctctagagtgcacacaagatctacaaaatctgctggagggtgagattgggcttggcctgacaggctttggaatattcttctcatttctgggaattgttttcttctttgacaaggggctcatcgcaatgggcaatattcttttcctgtcaggtttgggtttgacaattggtctgaaatcaactatgcagttcttcaccaagccaaagaattacaagggtactatctcatttggtgctggtttttttctggttctcattgggtggccgttttttggcatgctcttagaggcatatggctttattgtactcttcagtgggttctggccaacactttctgtgttcttgcagaggattcctatcatcggctggattttccaacaaccatttgtgacatcgttccttgaccgctacagaggaaaacgtgttccggtctag

SEQ ID NO: 2844 - DNA, 897 bp, Zea mays
  Peptide Sequence Number=SeqID_44623
atgtcgggcatggggtgccccggcggctccccctcgcctccaacgacgcccctggtggccccctcgcgggggttatgctgcacagaccgatcacatcgtcactcactgcttcgttcgttcatccatcaactactggaaattagagagccggatctctcggtcggagaagctagaattaaaaagtacctgcgaggaaggactaaggagtcgaagatggctgcggcggtgctgtccgtgcgcacgacgacgacgtcgctgctagcagcagtcgtcctgtgcctctgcgtcgtctccctctcctcccgtggcgccgccgccgcgcgggtctcccccggcgccagcccgatcgtggccacctgcatgacgggcccgtacccggagctgtgcgtggcggagctggggcagcggctgctggacgtgcagacgtcgatcgcgtccgcggcgcccgatcagcgcgcggccaggatcgcgggcgccccggggcaggtggacgtcagagcgctggtggccgtggcgctggaggcggcctcggaagccggcgccgtcgcggtgtccatcttcgagggcaagctccccgggttcaacaccggcgtgcccgacttccgccgctgcctcggcaactgcaccgtcaccatgcgcagcgccatgcagaagctccacggcgccaccgccgcgctgcactcgggcgacacgcaggtggccaggacgctcgcgatgcgctctgccgccgacgtctcgtcctgcaccgtcagctgcagggagctcaacggcgacgtgcgcctcatcgtcgtgcagagcctcaccgagttcaccaagatgctccagatcgccgtcagcttcatcagcaagatgaagccgcttccaccgtcagctccagcgcgaactgccacgccatga

SEQ ID NO: 2845 - DNA, 696 bp, Zea mays
  Peptide Sequence Number=SeqID_44624
atggcggctgcggcggcgcagaggctcctcgcggcgagcacgaaaatcatcggcgttgggcgcaactacatagcccacgccaaggagctcggcaatccggtccccaaggagcccgtcctgttcctgaagccgacctcgtcgtttctccacgctggtgtggccaccgccgccgtcgagatcccggagccgctcgagtcgctacaccacgaggtcgagctcgccgtcgtcatctcccggcgtgggcgcgacgttcccgaggcgtccgccatggactttgttggaggttatgcacttgctttggacatgacagcaagggaccttcagtctgttgctaagtctgcaggccttccatggactttggctaaaggacaagacaccttcaccccaattagtgcagtagttccaaaatcagctgtcactaatcccgatgatctcgagctctggctgaaggtagatgatgaactaaggcagaaaggaccgacaagcgacatgctattcaagattccttttctgataagctatatcagttccatcatgacattaatggagggtgatgtgatactaacaggtactcctgagggtgtgggtcctgtccgagtaggtcagaagattacagctggtgaatacaaagtgcagtactcgtcctcgaccttgaatcgcattactggacctggagccattgcagatagctcttga

SEQ ID NO: 2846 - DNA, 489 bp, Zea mays
  Peptide Sequence Number=SeqID_44625
atggggtgcgctgtggaggacgacgtctcttgcgtcgaaggtgagtggtatgtgggaccacttcatttgaacgactggcctggtgagggctacatgattgacccttcgatagtggtcttcttctaccgctttgtgtcgaatttggagctggatcctccggtggtggtggtaactgttggtttggatgctatggtggtggtggaggcggtagagctaggctttcttggtgttgctggtatatattgtggttttgttggtgaggatggaaatgttcattgtggaattggtgctggttgtactgatggggatgtcttcgccgtggaaaagacaatagaatctttgttgctgcgggtctcggcctctgcccctgcctctggttgcattactgccacgaccttgctgcggaggtcttatgtaccatgtgagagctgggccttcgacgactatgatgaaggatttggccatgctatcgttgtctcctccggatga

SEQ ID NO: 2847 - DNA, 1185 bp, Zea mays
  Peptide Sequence Number=SeqID_44626
atggcggcggcggtggtggtgaggcgtgccgctggccttatccctctcctctcctcgcggttcggtgctcgcatgcccctccaccgggcgctatcccagatccctccgcctcgcttctgtcgcctactatcgcagcaaaccaagcccttctccgcctccgcgtcgaatggcgcggctacggacagaacccgcgagctgcgtctgtacaacaccaagtcgcggaagaaggagcagtttcggccgcgcattccaggcagggaggtcggcatgtacgtctgcggtgtcaccccctacgatgacagtcacatcggccatgcccgcgcatacgtagcctttgacgtcctctacaggtacttgcgctatttggactatgaagttcgctatgttcggaacttcaccgacattgatgacaagataattgcaagagcaaatcagctgggggaagatccttttagcttaagcaaaaggttctctgatgacttcttgtcagacatggccaatcttcaatgtctaccaccatccgtggagccccgtgtttcagatcatgttgatgagattataaatatgattaaacagatccttgataaccgttgcgcatatgtagtgggtggggatgtttatttctctgtagacaattttcctgagtacggagaattatctggtagaaagttagatgataatagagctggtgagagggttgctgttgatgagaggaagagaaatccagctgattttgctctatggaagaccttgcgtgattgtgaagagatctgtcagcatcaacaaagcaacactggaaatccattgcctgctaataccttaaattacatccagaaacttcatgatgaatttgagacctcaatgtcagatgatcttcacacttcagtggcattggctgctatgtctgagccattgaaagttatgaatgatctgctgcacactcgcaaggctttgcaacagctgcgggataaagcactgagacgagcttccatcactgaggagcttgtggtacagaagattgaagagaggactgcagcaaggaaggcgaagcagtatgaaaaatccgacgagatccggaaggaattggctgctgttggaatcgccctcatggatggccccgacggaacaacttggaggccatctttaccacttccagaggaggaagcggtgcttgctaaaacatga

SEQ ID NO: 2848 - DNA, 375 bp, Zea mays
  Peptide Sequence Number=SeqID_44627
atggctcccaagaaagcaacttcgaaggctaccacctccatcgacgacgcagcgaaggcggcctttctcgccgagaagaagggcaaggcagtccttttggcgacatccctcatgaggccctcgaggatgggacaatcaacagcaagcgacaccactaagataacccgcccacctcagagggcactgttcacacatgtagctttgagggactacctcgggcccctccgccaggcttcacccccagaggttgacgatatcatcgaagacggtgaagtcctaggcatcttagtcaaggaccagctcaagttgcgcgcacttcgcatcaagaacaatcacctacaaaagcaaaaggaaatactcgcagccaagcgctag

SEQ ID NO: 2849 - DNA, 498 bp, Zea mays
  Peptide Sequence Number=SeqID_44628
atgtcctcctccgacccggacgacgcccccgacgggggcgaggactcgcccctcttccgtcgcagcggggggccgtcctccggcggcaccgttggcgacgtccccgtctcgcagtcgctcatcaaggcggcaagcaacgtgtgcttctccctcttcgtgctcgccgtcctcgtcgtcaccgtcgtcgccgtcacataccagccgccggacccctggctccagtcctccgccgccatcaccacctcgctctcccgcgtcctccccaactccaccttcctcgtccccgacgactcgctcctccccaccggcgaggatttcaactcctccaccgccgtcccagccccggtgcgggatgaagatgacgcggctgcggccgtcagcgccgcctccgccgcggccgcgggcaacaggacctgcgacccggacctgcgacccggattcgcggcggggggagtgcttcgcgcgggcgcttcgcggcgggcggcgtgcgtgtggtag

SEQ ID NO: 2850 - DNA, 1614 bp, Zea mays
  Peptide Sequence Number=SeqID_44629
atgtccaaggccttcgccaagtcgctgtcccagctgaacaaggccctggtgaggaggctcaaggccctcgtcgtcgtcacccgcgcgcagccgcctgcgccggcgaggccgacgacgtggtcggacgcgctgccgtcgccgtcgggcggcggcggcggcgtcgccgtgtgcaaggtggagggcggcctgctccggtcctcctccgccttcccgtacttcatgctggtggccctggagggcggcgggctcgccagggcgctgctgctcctgctgctctaccccgccctgcgcctgctcggccacgacaccgcggtcagggccatggccgtggtcaccttcctcgggctccgcaaggacgccgccgcgttccgggcgggcagggcctcgctgccccggctgctgctggaggacgtgagcgccgaggtgttcgacgcggccgtggcgccgccccgccgccggtgcgtctgcgtcagcgccatgccgagggccatggtgcagccgttcctggccgagtacctcggcgtcgacgccgtcgtggcgcccgaggtgagggagttcggagggtactacctgggcgtcatggaggacgagagcgaggtgctgcgtcggctggacgtggacaaggtgatcgccggagacaaaaaaggtggtggctgtggcgtcttcggcgttgctggactcggctcctcgttcgaccagctcttccaaaatcattgcaaggaggtatacgcgccgaccgagtcggcgcggcggcgatggcacgcgctcccgcggcggcgctaccctcggccgctcatcttccacgacggccggatcgccttccggccgacgcccggcgcgacgctggccatgttcatgtgggtgccgctgggcgtggcgctcgccgtggcccgcgtcgccaccttcctggccctcccgttctcgctctccgtgcccctgctcgccgccctcggcatgcacagccgcgtcatcgccaaccccgcctcggcgtccaagagcctcttcgcctgcaaccaccggtccctgctggacccgctctacgtggccgcggccgcggggcgcaaggacctcgcggccgccacgtacagcatcagccgcctctcggaggccctgtcgccgatccccacgttccgcctcacccgggaccgcgcggcggaccgcgccgccatgcacgcgaggctgcggtcgtgcggcggtctggtcgtctgccccgagggcaccacctgccgcgagccgtacctgctgcggttcagcccgctgttcgccgagctcgggcacgacgtggcgcccgtggcgctgcactcgtcggtcggcatgttccacggcaccacggcggccgggtggaaggcgctggacccactgttcctgctcatgaaccccacgccggcgtacatcgtgcacttcttggacaccgtcgacgtcgagtgcggcggcccggaggcggcgcgcgccgtggcgaacgagctgcagcggcgcatcgcggaggcgctcgggtacacgtgcacggggctcacgaggaaggacaagtacctcatgctcgccggcaacgaaggaatcgtcgacgtcagccacggcggcggtggcgccaagaagagaactacttgtgctacctag

SEQ ID NO: 2851 - DNA, 234 bp, Zea mays
  Peptide Sequence Number=SeqID_44630
atgcccaaacctgtcctcgctctgttcctctccttctccttctccttctccttctccttcctcctcgcgctatctgcttcttctgatcctaggcaatacagtgccatggctgaatcagtggtggatttcacagctccattcatgaaccatggaactcggggttcaagaaatgtaacgcaaatgctaattctcattcctaagatttatcccgaaacaagttacgatgcaccttga

SEQ ID NO: 2852 - DNA, 966 bp, Zea mays
  Peptide Sequence Number=SeqID_44631
atgggtatcaaaatccgccatacccatgccctaatagggtttttacccatcgggtttcgggtttcgggtacccattgccatccctacatggggggcctcggcattagcgatcagattctcatcgacgtgtacctccgctccaagattgccagcaaggatgttggcggcaactgcatccacgacgccgacgtgaacagcgatcacccctacgacctcgtgcacaagcacgcgcctggcaagctacgtccacaacgttgggaactcgaaggcgagtgcaccctgcggatctcggtaccgggcgcgaagcatcttcggcgccgacggcaagaagaaggggtcgtggcactcggagggcaagaagaagatggtgaaaggaagcactggcggccgggatggctgatgaccaagtatgctatcgaggaagagcacggcggcggcgccatggtcctgtgcaaagtgtacaggtcaccacgtggcccgggatcggaggtgtcgtcgtcgcggtgcaagaggaaggcgtgcgtcgttgtggaagaagaacagcccgccgaacagacgcaacgaccaatgaagcgaatgaacgaggaggacatgtttttgacgggcaatatagtgcaaccgagcgagttcaccatcgaagagttgttgatgggctcttcatcttcaacgcccggtggttgcagcagcatggcaatccctgcagcgtccgcggatgatcaaaacacagagaagacagacgatgaacgccaaccgctgaaccaagaagagcagctgatgctgccatgcgctcctcaggcagagaacgaagacgacgtgatggcgataagctttaaggaattaaggggtgcttcttcctcttcttcttcttcaccatgcgctgctcagtcgaactcgccgctgcatgtgcaaccgaagaacgtcggtgatgagatcgagttcacccttgaagagctaatgggctcctaa

SEQ ID NO: 2853 - DNA, 393 bp, Zea mays
  Peptide Sequence Number=SeqID_44632
atgaccatgacgtctcgtttcgttgcggcggcctcttcctcctcgtcctcgtgccccctcgcccgcctaatctctcgccgcggccttgccggtgccgcagacggccatggacctgcgaaggtgcccttgtggaaagatccgttgagcccgagcaagtggaaggaagagcactttgttctagcaagcctctctatgtggggggctcttttttatggtggtttcaagttttttggtggaaagaaggaagacaagattgagtggtcttcgttgttctctgaagaaatgataatatggcagcaaatgataagaaaatcagggaaaacaattaggaaatggggcccagatcagatctggggagagattgatatacacaaccgagcaagctcagcatga

SEQ ID NO: 2854 - DNA, 420 bp, Zea mays
  Peptide Sequence Number=SeqID_44633
atgatggaaaatgtctcaatagacagcgcaacaagttcagatgtagaggcgcctcttgggacagggataattgctgccatcatctccgtacaagatacacagttccacacggctgagactcggcggtggcggaggcaaccgttccgtgaaccactcgcgaccgacctggccgcccgtgatccacaggtcctatcctgtgccggccgattcgtggcttgtggacgacacatcactgcgtacgtctacgtcctgctgccggcatcggcggcgaccaccgaccggggccttgctgctgctggagtgctggctgccaatgctttatgggacccgccggcggcagcagcagctgtagcaaattttggtcttttttttttctttcttggagacgtcccttcaccttggcttgcacggtacttgtag

SEQ ID NO: 2855 - DNA, 969 bp, Zea mays
  Peptide Sequence Number=SeqID_44634
atggcggccgctgccgtggcgaccgtggcctccccatcccccgctgcctccaggcgtatgctcccctccgccgcaccgtctttcctccggctcccgaggccgaccagccggctccggcgcgccacgcaggtcgccgcggcggggggagaggcggacgtgctgcctggtccgggggccgagggtgaggcggcggttccggggaggctggaggagcagcgggacgagccgctggcgggaagccagctcgacatcggagggctcgccttccagggcgacgtcggcgggggcttcaccggcggcggagcgggctccggggcctccggcggtggcggcgacggcaacaagatgctggaccggggcatcaatacggccatcgttctcgcggccagcacctacgcgctcaccaagctgctcaccgtcgaccaggactactggcacgggtggacgatcttcgagatcctgcgctatatgccggagcacaactggtccgcgtacgaggaggccctcaaagctaacccggttctagccaagatgatgatcagtggtgtcgtctactcccttggtgactggattgcacagtgctacgaaggcaagccaatctttgatttcgaccgtgctcggatgttccggtctggtcttgttgggttcactcttcatgggtcactttcacattactactaccatatctgtgaggcactattcccattcaaggattggtgggttgtccctgcaaaggttgcattcgatcagaccgtttggtctgcaatctggaacactgacttggctgaactgaaatttgcatggcaggaccttgcagcctctacggatgaaggagacgttggcaagtttactgatgcagtaaaggagtttgacagcatgacacgcctggatccttggaaaacaactctccttctgaaggcaaagaacgagttgaagaaaaaggaggaggatgaggatgatctaacctag

SEQ ID NO: 2856 - DNA, 1086 bp, Zea mays
  Peptide Sequence Number=SeqID_44635
atgaacatctgtagaaaagagcgtgcatatcgcaccgcctacagagacagtactgttgtgatctgccgccgggcagaggtgtcagagacgcagacgcagccgcccccgccgcccgagcaggggctgcggtgcccgcgctgcgactcccccaacaccaagttctgctactacaacaactacagcctctcgcagccgcgctacttctgcaagacctgccgcaggtactggaccaagggcggcgcgctccgcaacgtgcccgtcggcgggggctgccgcaagaacaagcgctcgcgctccgcggccgccgtggcggctgctgctgctgcggcggcggcggcctcctcctcgcggctctcgctcaacctgcccccagaggccgccgccgccgccgaccagcaggcggcgcggctgggcttcctcggcgctcatcatccggtggcgtcgtcgacgatcgacggaggcggccccgccgcggccgactaccaccaccagcaggcgggcgccgccgccgtcgggatgatcgcgctgccgcggctccacgcgcccggcgtcgtcggccagtacgtgccgttcggggagtggcaccccgggacggccggggacgtggtgaccggtggcgcggcggtgagcagcagcagcagcagcatcgcgtcgtccatcgagtcgctgagcttcatcaaccaggacctccactggaagctgcagcagcagcggctggccaccatgttcctgggcgcgccgacgagcgccgccgcggccgcggccgcccacgccgacagcgcggcgcatgtgggcggcgccttcatgcagatgtcggtggcggagtccaccatgaccatgccgccgccgccgctggcgacgtcgtggttcatggacagctcctgctacgcgctcccttccccgacgatgaccgcgcacgctagcacggccgcggccgtagcagccgccaccggtacctgcaacgtcgtcaacggcgctggcgctggcgacgacgacagcgccgcgtcgaacaacaacaacaactgcgggccggggagcgcgatccagtcgtggggcgacatgtcggcgttcgcgatgctgccttga

SEQ ID NO: 2857 - DNA, 1551 bp, Zea mays
  Peptide Sequence Number=SeqID_44636
atggagaacaccaagccatgcagtgacttcgggatgatcatggctgatctggagtccgagaacccggttactaatgtggctgccatgaatcgtgcctcggagttgattgctgaaggtaaactcccggaaccccagcttctgcgccgcctaatctcttgtcttgcttccaatctggagaagcctgaccatgaatctgccgtcaagaggaaggttcacttaactctagaggcaatcagggaggccatcaccagcaaccgcgtgaacatagagtccccagctcgcggtgaggctctccatgccatctggtgctgttttatggacgaaggccttcgctgtcttcgtcagcacgaaagtatggtgaggatgtggacagtccaggatcaactggctgccgtcaaaacgctatgtgccaccttccgtcgctcgccggtaaacatcaagaacataaggtgtgtcacaacctttgccgcactgatgctgtcaccctacaccaccgtggcgcgcgcttgtgaagacgccttgctctctttgccctctattccaggatttgcatttgccattgcaagagcctactgccatattatcatagctatgccaccggagtcatcgcctgagataagtagcgcggctgcggttctgggcaggctgaaccagattagcatggccacggtggagggcgaccaccgagggttcggtgatctggccatggatgtgctaggggatgctttagcaaatcgcaatcttcctgttcggaagaaggctctgaacctggtggcgagcctcctcaccccaaggaacgtctgcgatgttctagggctcctcaacagtgagctggtcgtggcagcctccgccaacctccagatcgagtaccgacagatgctggagaaggcgattagagagtgccattctgctcatccggggagtatcctagaattcacgctagatcccaagtatgccgtgttcacggattgtatccgctacaccatggatatcatgaacagcaaccccttgctgcgagtccagcttctgaaaggtcttctaaggatgctccgccatgtcaggtcaccgccggtgtgcgccgctgctgtctggatcatctccgtcttctctgaatcaccggtagaggtcgacgacgccatcgctgcactctcgtgcctcttcaaggacctgctggaccggcgaaaaatcgagaaacagatacttgggagtgaaatggaggacgaatacgtactccctactgaatattatggcgtcactactgcacgaggtgcgcagggagagcgccagcagcggccatggctggtggagatggacgaactgctgtttgtgcgcatagggctcacacggcaggcagatgggagctacgacattgcctcgagttccaagcagagcagtagtagtgctcgtcacgcagataggccgccgtcgttggagcttacagacaatctagcattccttgtgcattctggagattccctcttggcggatttcgtgcaggacatgctgtccgagcttgtagtgaaggcccagagttgcagtgagtccgtttga

SEQ ID NO: 2858 - DNA, 693 bp, Zea mays
  Peptide Sequence Number=SeqID_44637
atggcggacgacgattacaacgaaatcgacatggggttcgactctccctcatccttcccccctctctgggtgccactattctatatttgtgtcacttcgaactgtgacagcaatgcaagctatgaggatgagcctccagaacctgagattgaggaaggggccgaagaagagcttgagaacaacgaagatgcccctgatgatgtcataggtggagagggtgaagataaggaacaggaaaagaccaagcgtgagcgcaaaacaacaaaatatatgacgaagtatgaacgtgcgcgcattcttggtacacgagccttgcagataagcatgaatgctccagtcatggttgagcttgagggagaaactgaccctcttgagattgcgatgaaggagcttagagcgcgcaagatacccttcacgatcagacggtacctacctgatggaagttatgaagactggggagtagacgagctcattgtggaggactcctggaaacgccaggagaggagcaaatccagatgggtagttcacagcatagctgagcggaaagtatgcagaccagagcatggcgtatttggtgtgttccatgctactgctctgtttaagactgttttgtatcagagtttgcaaagatggataccatgtatccagatcatcttgctcattgatgcgtttttactgtggtattctggctaa

SEQ ID NO: 2859 - DNA, 1188 bp, Zea mays
  Peptide Sequence Number=SeqID_44638
atggctgaacagtacaaaatgcatgtcatgaatgaaatacaatgggattatttttcagttgaattgttagacattcaacatgtgcatattaaattggtttctacagacacatgctttattgatctcaaccttgccaaacgcctctcatggaagctcagaggatatgtcaaggtcatgatcgacaaacagatggaggtgctccgcaagcagatctccatctatgccaccatctgcgagcagcttgttgagatgcatcgcatcctcaccgagcacgaggacaccattgcagttgtttatcacttcatgagcagtttatcacttcatgtaaaactggaggaagtcaaatctttttttgctcagtgtggcaaggtaaatagtgtgaggctaccgcggcatgtttctgacaaaaggcatttctgtggcactgcgttagttgaattttcagaagaagatgaagcaaaaggcgtttttgagaaaaatctcatttttgctagggaattatcaaagacagtagctaaattagctgaagatggcaaggttgctataaggaacataagaagagatgcaatcaaagcttatgataaactagagaaggaaaagaagttttctgaggacaacgtgaaagatttatcagctgatctacaaaaagtcctagacgactacatgaaaaagatcgaatccatccagaagcagaaggaacagtgtttgctggttatacgctataacctgaggcgaggaactgatgaaaatttagacctcaagctgactgtatggccggttcttgaggaaggcgtcctcaacccagaatcaactgttgttgcgatctttccctctctaatgcattatgctgggccaactgaggtgcagtggcatgctaaggctcgtattaatgctggtgcaaatttctatattgttggaagggatcctgctggtatgagccatcccacggagaaaagggacctctatgatgctgaccacgggaagaaggttttgagcatggctcctggcctcgagaggctcaacatccttcctttcaaggtggctgcatatgacacaaagcaaaagaaaatggatttcttcgatccatcaaggaaagatgatttcctcttcatctctggcacaaagatgtgcactcttgccaagaaccgcgagagtcccccggatggttttatgtgcccgggtggctag

SEQ ID NO: 2860 - DNA, 219 bp, Zea mays
  Peptide Sequence Number=SeqID_44639
atgagggactgggcgccgtcgatcatcgccacggcgctgttcgcgctcctgtgcccgggcggcgtgctgcagatgcccggccggcaccgccccgtcgacctcatgaacatgaagaccagcttcccgtccacgccgtcatctacttcctgctgctcatgctcttcctcgtcatcctgcagcctcacctctacatctgacattcatatttctggaaattag

SEQ ID NO: 2861 - DNA, 312 bp, Zea mays
  Peptide Sequence Number=SeqID_44640
atggcgttggccgtattagcggaccgagacgcagagggtcttgaccgaccgaccgaccggccggccgtcgtcaggagcgagcgtggacagcgagcgccggtggccggtttggggagctcgggaaggaagaggaacatacgatacgatgctggcatgttgtggagtgtggactggaggtcagggagcggctgcgaagcacagcaaaaatgttggtacacagccggtgaaaactgtgagttggtatcagtcatcgctgtcagggtacctgcgcctacttctgagccagttgggccgagtgtcccgtgcgcctag

SEQ ID NO: 2862 - DNA, 255 bp, Zea mays
  Peptide Sequence Number=SeqID_44641
atggagagcccttgctgtgattatgctgctagttctgtcagtggtggggttgtgttttcttctccaactctctgcctacctgctgcagcagtgtctgcagacgataaggtgtacatttgggccgggtctgatgggccggcccgaagcacggtcagtcctgaacgtgttacatggacagcaggatggaacaagcagctcatagttatatgggagatagatagaaccatgggtctcaacctcaacttgcgtgtgtaa

SEQ ID NO: 2863 - DNA, 330 bp, Zea mays
  Peptide Sequence Number=SeqID_44642
atggcgaacttctggccgacatcgagtgacgcgtcgagggtcagtggaggtgaggtcgttcttattgcggacctgatcggaggaggcgagccccgcgaagtcgatatcggagatgccgttgatgtgcaggggcagaccgtctgggccaacagcgtagaccgcccgcggttggcagaaagtgggcaacaactaggaagtggttattggttgtcattggttttcccagttgtcccacaaccaaacacacccttagaggatcgtgatagaaatgttccttcactaagatatgactcttgtgtttttgcacttatccccttagatatcccttaa

SEQ ID NO: 2864 - DNA, 1728 bp, Zea mays
  Peptide Sequence Number=SeqID_44643
atggccggaaatcctgccccaccacttcccttgaagtccagttcctccgcgcccgctttcaaatcaaacgcctcgggctcaagccgcggccacgagcccgccaaggcttcgtccacctcgccagcggcggcagagctgccggtcccgatcccgtccgactcgttggtcgccgtgcttggcgtcgtcggcgagcttagtgctcgtggtcttctccaggggtttacgatcccggaggccggcgggctcacggacgagggcgcgtccgctgtgttcgacggcatgctcacggccttcctcgccgagcatggggtcgaccccgcggctgcctcctgcctcccgatccccccgccgccgctcggggacgggaagaaggtagagcttgtcagtctgttcctcgccgtgcgcgctcgcggcggcttctccgccgtcgagtcctgggctgccgttgccgaggcggtcgggcttgaccccaccgccgacacggccgtcaagcttctgtacggtaagtatcttgcgctcctggagcagagctgcgataaacccttaaagcaggaccacatggtggtgagcagcggcaatgccgacgtgctcatgggctccaagaaggaaaggttcctgtcgccgatcaagtgcctcaccagtactgctggatcggcgtcggcgcacctgaagcggaagagagaaacgctcgtggggatgcttgactgggttcatcttgtggcgaagaacccaggtaaacaagggaagaatcgtgctgctggccacaaacaggcagtggttgttgaactacggcgacagatgttcgcagacaaagattgccttgcccgagaggagctcgtgaagacgctcaactgggtccgccttgtggcgaagagcgcaggacacccggggatcatcgggatgaataatcgtccagaccacttagcgactgctgttgagctcaggagcgcgatgtcgctcgtggggatgctcgaatgggttcgccttgtggcgaccagcccagctgaaccggtggtcatggaggggaattccctcagctaccgctccacagcgcttctgttccgggagcagaagtttgcaaataagaagtgcagcaggtggtctgctgcatcgccgcagagtggaatttcaattcgtccttgtggccaagcagacattccagaatggaccgggaaacgttcatcgccttacgatgatccacgcacactgaggtttcttggagaacctattctgcttccaggaagtaccgaacatcttgatggcgcttccattggaaaagggaggcaagatgactgcaactgtcagttcccaggttccattgcttgtatcaggtttcatgtcgcagaaaagaagatcgaactgaagcatgagctaggctcagcatactatgaaatggggtttcataggatcggcgaggatttagcactgacatggacgaaggatgaggagacgaaattcaacagcactgtccaggacaacatgcctgcgtctaagaacaagctctgggacaagctgcttgccgtcttgcatgccaaaggcaaagaaggccttgtgagttattaccacaatgttttccaggtctggcgacgggcctaccagaaccgcctggctggaaatgctgatagtgatgacgattccatagagcctggtttcctatactttcgtcaaggtggtgatcggagccgctccaggtcagctgcttcttccaggaaacggaggagatcttag

SEQ ID NO: 2865 - DNA, 522 bp, Zea mays
  Peptide Sequence Number=SeqID_44644
atgacagagaaggatgcttcgaaaatagagcctagtttggttaggcttcggtacaaatacaagtttgaaactcaatttggagaacattgtgatgaatggttagttgctatcgaggaaaaatgtaacgagattcttgaggacgatgacgaagacaagactgaagcaaagggactagagccttttgcaatgactgtggtgacgaaggatagcagggtgcctcccatagctccagcagcaccaaccattacggagcccttcgtagtgtccccaacagcaacattttctctgaccaaagtggttgaggagaagagtgaatctgcaaggcccacactggcagatgagaagggcaaaggagccatggaaatcgaagaagctaaaaagacaatagagggtgatgtgtctttgggaaaaggtccttttggacaggaattcgggggccgacggtacagagttcaccacttagtcgggaaagccatgtgcacaaaacagatggccaaagcccttggatttgctgaacaataa

SEQ ID NO: 2866 - DNA, 303 bp, Zea mays
  Peptide Sequence Number=SeqID_44645
atggctaactggcacaacggtcgtctgcaaaagcaaacagggctgatattaagcaaggctttgaaaaatcaaaagaacattgagggcgaagctgccaacaaagaaatcatgaagctttggtcaaaggtatctaggcttcgtttcgacttcgatgaaaaagaaaggattcttactgttctagagaacgattttgttgagagccaaagtgaagtccagaagttaactgaggagaagaatgaggccatggagcttaaagggacgatgaatgccaaaatcacagagcttgagacattgaactcataa

SEQ ID NO: 2867 - DNA, 321 bp, Zea mays
  Peptide Sequence Number=SeqID_44646
atggctcctttgcccttctcatctgccagtgtgggccttgcagattcactcttctcctcagccactttggtcagagaaaatgttgctgttggggacactacgaagggctccgtaatggattggggaggattcgacacctgcaaacaaaactcaacgtcgggagaactcgatgcctgcaacctgaagattgccgcacaattgcgacagccactgtcaagaatcggatgcctacaagctgaaagttgccgccgcgacttcgacgtcttgtacgagaccgcttcgacggtatggagtcagatgacgaattcaatcaatttgtaa

SEQ ID NO: 2868 - DNA, 339 bp, Zea mays
  Peptide Sequence Number=SeqID_44647
atggcggcgctctgcgcactaagctcgcagttccgcgatctccgcatgagcctttctcaactcatcaagggtgtggtccagctcagtgttgagcacgacgatcaggttgactgtgaacctaggattgccctcaccaacagacggcgcaccaggcaggtgtgtcggtcaaaagccgacacagcaaggtgtcgagagcatcgtagaagtgacaaccacggcggtgtcacgggtgatgggtcgggtgacccatctcttcggctcctgctcctccgaaagctccatgttgtggctcgagctgccaccgtcgtcgtctccgtaatggtctcctctagcaactag

SEQ ID NO: 2869 - DNA, 543 bp, Zea mays
  Peptide Sequence Number=SeqID_44648
atggtacgcgtggcgtggccgggcggcggtggcggcgcgcgaggaggtggcctccggcggcgcgcggtgttggtggcgtgcggcgtcgggcgtgcctcgcggggtggcgcgcggcggggaggtgctggcgcgcggcgtggtggtgcacggcgtggtggcgcgacggtggtgagcggcggcgtggtggcgcgcggcggggaggagtcgagcgcgacggcggggagcggcggcggcggcgagggagttagtgagagtgggagtgagaaggagaaggagaagagaagggtctcggcgtcgtggcagattgtggagcactcgagggcggagcaggcggccgcgtggcctatcgtcgtgccgctgggcatgctgttcgagctgctgcgcaattgcgccagattctgccccaagctgcaggaggacatcgaggcgacactagacgaggccgacgtggagcgacaggagaatgtggaggtgttctggaccaaggtggcgctgttgctaggccgcgacgtgtcggaggtccgtcagttcaagcagatatga

SEQ ID NO: 2870 - DNA, 909 bp, Zea mays
  Peptide Sequence Number=SeqID_44649
atggccggtgacgtcgcgcgccgtgtgccgcggactgcgctgcagggaagccggaaggcgaggaggaagatggcggtggccaggctcggcgggagcggcaggacgcggcgcaggttcctgggcacggcgctgatccggcggctgcggctgcggtgtgtagcggccctgtacaggcgggctctgcggcggctgcgcgcggcctgcgccagcgacgccgtccagcgcgtcctggagagcgccgcactggttggcgccgtgcgcatggacgccgggccgccagcccactctcccactcttcctccctctcgctcctggttccctcctccctgcggccggcacacttcctgcagatcccgcgcgagtcctgagctcctggccggccacggcgcatgcagccgcgcagaccatagcacaggagcgccgtgcggccgcaccgctcccgtgttccgctctgggctcaggtcgtcggtgctgggcacagcaccgtgcgatctcgcgtctccgctccggctctgcgctcttcgtctccgctcctccatggtgggctcgtcgcggccggagctctgggctcatgtcgtcgcggccagcagcgcgatggccagcagcgcgaagcccagcagcgcggccaggaacgccgaacgcgcacgcgaaggccagcagtgcgatggccgccctcgccgcgacgaccgccgtgctcgggccggcacgggcttctccgtgggccgtgctttccgggccagcccggcacggatgggccggctcagtgccgtgctcggctggtgtaggcagcccgtcgggcggcacggcccggcacgattatctggccgggctcaaacgggccgggctggaacgggctcgggctgggccgggccgtgccgcccgtttggacatctatatctgaggctctga

SEQ ID NO: 2871 - DNA, 456 bp, Zea mays
  Peptide Sequence Number=SeqID_44650
atgcctttcaaagattttttagactgcctcaccaatacacatttgaaggtgttgatattgagcaaggcattgaagaatcgaaagaatattaagggtgaggcctctcataaggagattgtgaagcttcggtcggagctttctaagctttgttttaattatgttgagaaagagaagatgtttaacgtgcttggagaagacttagtagagagtcaaagtgaactaaaaaatttaatcgaggagaagaatgatgttgtggaatttgaaaaggcaatgcatgctaaggttttggatcttgagattcttaacctgcaacaagcaagatctcgcgagagaaattttgttgatgctgacatagtcagggctatgaaatggattgatggcgaagtagtggacttccaaggggttggctatgaccatgtaaaggcctatttggatcccaacttcatggtgccttaa

SEQ ID NO: 2872 - DNA, 1167 bp, Zea mays
  Peptide Sequence Number=SeqID_44651
atgcggatccgcaagagcgcctcccgcctcctaggctctgcgtattccgcctccgctgcatcgcccgttgattcgacgcctccgttcagcccgcttccgccgccgccgccgccgccgccgccacacctggcgccgtgctccgcgcccgaatactgcggagggctcggcttctcgagcccctcttcttcttctgcggagccctgcgagctcagccgctcgccatgggacctcatcgccgagctctccgtctccgacccacaggtggaggatgacatcgtagacaagtacttcgtccatgtcgcaacgcgttcgagctggctcttctcagccaccgttccagccgcctccgccaagaagaagagtagtagcacgagtggggatagcaagcacaagcagcagctgcgccgtgacgctgtgaataagtctgcaacgagtaaagagaaggttggcgaggctaataagaaggcaaaggtcaagaaagaggaggaggggcaggatggggataggggagcgcgggtctggctgtgcaagaagaatgacggcaaacggtggcactgcaaccggccagtgagccaacccaacaccctctgtgagtaccattctgtgcagaagcgctcctacttggaggccccctctgtggcaaaattggaggaggctccggcgccggcgccagcagctgcccccaagtcctccgcacgcaacaagccgaggaagaagaagcctggcagtgacgtgagtgcgactgagggcttctactactacgctgggttcggcccattccggtcaacgaagaggcagtgtaaaagcggcggcacgaacgaacctgcgcctgcaaaggaagacgacgagggtaatcaggcaaaacatgcttctccgggtcagaaggctgaggtcgatgagggtcatcatgatgacaccaccaccaaccagaccgccactgcagcctatggtgatacgtctagctgcgaagatgacatagcagggacgatcgccggcgtggatgaggggagcagcgacgacgacgacttcgatggacttggtatctctggccacagcatgaacgggaatggcgatcccaaagctagcagtggtgatgtcaagacgaagatcccgtggaagcggtggaggaagcccgtgaaggcgcggtcgctcaagtccttgatgtaa

SEQ ID NO: 2873 - DNA, 285 bp, Zea mays
  Peptide Sequence Number=SeqID_44652
atggccgccgccggcgccgcgtcctcctcttcctcctccgaggttccgatcgccgcccgcacctgcgtctccgtcggtgaggtagcggtgggcgcggtggctacaagcagcggcgatcgggtggcgacagattgcggggtgtgcgccatttgccttgacaggatagcgctccaggagacggccctcgtcaagggttgcacgagtgaccgtgtcacgcggctgctgggggttagcggtagggaccgcgaagtggggagggcgggaggcgggggcagtctacactaa

SEQ ID NO: 2874 - DNA, 279 bp, Zea mays
  Peptide Sequence Number=SeqID_44653
atggcaacgcccgcctccgcgccggccccactaaaccctaacctcgtctctggcgacccgccgtcgctgctgctacagcagcagcaggaggaagaggtgtcagagccggtcccggagatggcgtcgacgcccctcaccacctcgatcgaccccacccctccggtggcgaggagagcgagagcgatgactcctcgtctgtctgacggaggcaacggacgaggcgacgcctccgccgtccatcgcgccgccgccttggagcgtgagaggtgcgaggagtag

SEQ ID NO: 2875 - DNA, 396 bp, Zea mays
  Peptide Sequence Number=SeqID_44654
atgctcgcgcccacctgctcttccgctggcacaccacaaactttgagcaaccccaagggcctgtgcgccgtgtcacagcagcccgggtccattgtgcttgtttgccctgttgcccagaagggacaggatgggaggctcattgcgactgctagcaccaaggggactcttgttagaatctacaatgtagctgaaggcaatctcctgcaggaagaatatggaaagatcaaaatagatgtacgaattaaagagaatggaactcaaaaacatcgagagagtctgggtcaaacgacaaccatctatctgtgtgttcgctgcaagaacttgaaaggccctgaaggcaccatggtgctatctcatttgatcaggtttggttttgtcaaggactacacagtctag

SEQ ID NO: 2876 - DNA, 438 bp, Zea mays
  Peptide Sequence Number=SeqID_44655
atggccgtgtgtcacacccgggtttcggggcaccaaggcttgagcgcgaacattcaccagagccttccagagtctccacacgaacacaccgctaaagccttccagaaattaccgctacccgaatatctcatctctgtccgcctgctctcaaacgctctgcggtctctagcgacggcaacggcgacaccggatgccaacggccgtccatcgtcgctcctcgtgcactacgttcgcctcgacattttctacagtctctctatcttcgcggccgtcaatgtcgatcttgcccttgctcttcttcttgacccagacaacaacgagtcagcttgtgtcggaagctggttcgtcatcgatgtctccttcgccgtcgctcttctccctaacttcgaaaataggatgtcaatccatatcggatctgaaagatggagctacggcaag

SEQ ID NO: 2877 - DNA, 279 bp, Zea mays
  Peptide Sequence Number=SeqID_44656
atggcatgtcatggcatacatatatctcactcattgcattcattagactgcaacctcgctgacggagagtacgtgctcattcccgagcatggagctgtccacgaggaaaaccaggagccagctcccgagcctgctacagaggatctccccgcagccccagcaattgaaggcaagccccgctatggtgggtacaagtgcggtcactgtacggcggcggccggggtcaatggagcattgtatgccaaggcggtacgctataggatatggttgatggtctga

SEQ ID NO: 2878 - DNA, 4560 bp, Zea mays
  Peptide Sequence Number=SeqID_44657
atggcggttggcaatgatgacaacctcgattcggcagcgatggagctcaatagaggtgatatggacgagatgatggatggcgttgccagccaacgccagggaggcacggttgcagtgacaacgcttggattcacggtcgtggttggccaagacggatgtgggccagacacagcggcacaacacctggccaaggcggatgcagaccagacacagcagcacgacacacacacatacgcgccggaggaagcgctagggttcacgcggtgcggcggacgggctgagccagcagggtggcacgagtggctcaaagctagaaagcttgaagaattggcagaacaaatcaggagtgacagagctaagcatgatgccaagggcaagcaagttgagagcagtaatggaggagaaactgagaaaacaagtcaaaaccaaatcggtgataccaacaacagtgagggaaatgttgcatcgatcaatcaggagaaagtggatggaatgctggccgcatcgcttgctgcagaggaagacacagatttcactgacgagggaacacaccatcttacaagtgctccattgccagaaggagatgaaattgatgaggatgaagatgatgatgaagggatgatcttcttattagtttttttccctcgaacacgcaggagaactgcacatcattatattaaaaagagaaaaaggtccaaaatagacccaacaagctacaaagctcccttacggtggccaaaaacgaagcctatgacaactggtgacattgatcctgcagtattggcttcccttcctccatcgatgcagttagatcttcttgttcagatgagggagagagtgatggctgaaaacaggcagaagtaccagaaaataaaaaaggaacctgcaaagttttcagagcttcaaatacagtcctatctcaaaacagttgctttccgtcgagagatagaccaagttcagaagtcttcgtcagggaagggtagtggaggtgtccagacatcaaaaatagcatcagaagctaatagagagtttattttctcatcatcattcactggtgataaacagatgctggcacaaagaggtgaaaaggagcataatgttgaaaacactagatcaaaaaaggaaattcattcttctgtcttcgcatctaaccccacaagtagtttgggaacaatgaagcctcccaacagcaaaactttgagcgattttgggcctgatgttgagacctatcgtgatgagagaggacggattagagtaagcagggtcagagcaatgggaattcgtatgactcgtgacattcaaaggaatttagattttattaaagagaatgaacaggttaaaagtaagggacagacacagaccaattttcacaatggatcaacaggcaatgaagagcctccagattttccagaacatctttttgaaagtaacaagctccagagttcttgtagtcctgatgtggatctttctgaaactgacagagacaaccatcagacctcgtcacaaataggaacagatatcatttctgagagttcttgttatggaaacaaggaagcaatagagatatctttctcggttgatcaaactgaagtgaaggatggcgatgaagatatatttttgcaattagtgtccgggatggcacccaacaacatattttctggaaataattgtttggttaaaaagatggaagaatctgtagattctgagtgtatttgggaagatggtgttattgaagcaggaacttctcctgtgaaaattgacatgaaggatcataagtcatctctgccagagaattgcagcgatgatgagatggagtgggaggaaggtgatagctttgtacctggagttgcttctagtagtgaacataatccatgtaatgcaccaaagggggatctggaagaagcagctcttgtacaggaagcaataaggaggagtttagaggattttgagaagaaggcatctgagaatgtgagtactggagatatacaagcatctgttgaagatagatctttgcagttctccaacaatgttcctaagatatctgaatctcttggtgaaaatgattcacattctggagtacctgttgttgacgagataaacaatgaaacaagaacagaaatcaattatgataaggatgatatggtacaaggcactggactacttggaactgagagacaagaatctgaatcacaacccccactggtgaataatgattggcatgccgatatgcacagagctcatcctctggggtctgtgcctccatgtactacattcacgagtgatctggctgaaaaaccatctgtcagtgcagaaactaacggtgaagatgtaatgatatttacaacaaaaattcctggaacagctttaggcgattgtgataaaacttccaacctaaacattatgaattctgatcaatcaaaatgcagcaaagatattgcttcaactggagaatccttgtcacaccaaaagaaccttttaattgatgaactactagccgtcactgccgaacaaaaagaaaatgctacccaggtagatttgaagtttgccacatctgaggtagattatacacaaatttgtggcaacgatgacaaccatacaatatcagcgagttatgttgacgcggagctatctcgtcttagacaagaacagatatatcttggacatgaaaggcgaaaacttgaaagtcatgcagagtctgtaagcagtgagatgtttgccgaatgccaggagttgctccaaatgtttgggttgccatatattattgcaccaatggaagctgaagctcaatgtgcatacatggaaataaataacctcgttgatggagttgtcaccgatgattcagacgtatttctgtttggagcaaggaatgtttacaagaacatatttgatgataggaagtatgtagaaacatattttatgaaggacattgagtctgagcttgggttatcacgagaacagttaatccgcatggctctgcttcttggaagtgattacactgaaggtgttagtggtatcggcatcgtgaatgctattgaagttgtacatgcatttcctgaagaagatggactgcagaagtttaaagaatggattgaatcaccagatccatcaatatttggtaaactgcatatggaaataagtggtagatcgaagaaaagaaaactcgatgaaaatgattcagatggaaaggggaaaggcctggaacctgaatgcattcaaggttctgatgataaacaatcttctaatgaggatgaacatgtcaaggaaatatttatgagtaaacataggaatgtgagcaagaactggcatgtccctgcaacttttcctagtgagaaagttgtaaatgcatatatttctccacaagttgacagttcaacggagcctttttcctggggaagaccagatttaggcctactacgtaggttatgttgggaaaggtttgggtggggcaaagagaaagctgatgaactgctgcttccagttttgagagagtataataaacacgagactcagctgcgcatggaggcattttattcattcaatgagagatttgcaaaaattcgcagcaaaaggattaagaaagccatcaagggcattacaggcaaaagctttcttgacgcagatgaatctgagcaggataatcccagtactagcaagacgatcaagaagaaagaggccagctcctcaagccatgccagaggtagagaaaaaaggaaaaacgattatggagtcatgggaagtcaagaagataatataattgacaataccaacagtttggcagagacagttgagaatactagagaaaataacaatactactaagataaaaagagggagttcctgtggtcgccccaaaggtagaggacgaagcaggacaactgcgggaagtgatgcaacaataaatcaggaggattatgaaatagaatattctacttcagcttcagatgaggattcatgtaaaaggcattccaacagttacggatcggaaggaagggcattgcgaaggtcaagtaggaaacggaaacaggtgacatacatggaagatggtcacgaagcatatggcaatgatgttccaatgcatcaaaacgatgaaaataacccaggccaacctgctgcagccgcagacgtggctggagaagacacaggatttaatatttaccatcaggatacaagtgaactaaacagcagtcagatgcatacaggtgcaggcattaccgaagatatcaatgaagattcccagcgttttgagttacgggaggacaatcaggtggattcaacaccgaaagactatttgttcaatggtggtggtttttgtatggagggcgagggcgatgaacaagaaccagcgtgtgatcaatctggtgcagaagtagaacctggaccaagtggtccatgtggcgccatggatgaagtttcagagagtgcaagcatatcgacggctatggagtgtaccgagaatgcaagaatggaggcacgcggtgcatcttcgtcgcagcaaagacgcaaggcaagccgaggtttgagtgccatgccgacgcttatcaagcgtaggagaaaatcgtga

SEQ ID NO: 2879 - DNA, 444 bp, Zea mays
  Peptide Sequence Number=SeqID_44658
atggcttttaagccaaacactatcacactcaacgttttcctttctcatttctgcaagcaaggatttgggaatagagccctcatgtgggctgagaagctcagagaagattcttttgtttttgatggtgctacaagaaatataattgacggggcacgaagggaaatggaggatgacccccaggctaacaacgaggacataggaagatgcatgtttcttgagttcttaatgttcatgacatatgaggctatgctcaacagcagatcctcaaaggctacacatatgcttacagaaaaaagttttgatcctgctagcagcagcatgattagaaaggaggtgaaaatgagattggctgtaattgcttgtttattgctgaaccagaccttcctgattgatcccaaatacccctccttttgcctaattaacccctgttacgagcgcctataa

SEQ ID NO: 2880 - DNA, 1476 bp, Zea mays
  Peptide Sequence Number=SeqID_44659
atgccagaagcaaggaggctgttcgatcaaatggcccaggtggggatccaagtaaatacaatcacgttcaatgtttggattgatggatatgcaaagagtggacagatggatcaggccagtgcagcctatagggagatgcaagcgaggggattagtgccagactcctgcaccttcaacattattgttgctagagctcacaagttcgggtatgctgcccagttagtccatgaccatgacatgtttagttcacatatgtcggctgatgggttggatatgttggtctgtaggctttgttgggatcatcgattggatgatgcctgggagcttctgcttggtgctattgagcagggtgttccattgcgtgttactggatttaatgcattgatcgctgcttatagtaaggagggactccacgaagaagcttctgaactgtatagaattatgaacaagttaggactggcaccatcctcgtctacttttaattacttgataatgggactctgcaatcaagtaagacttgatgaggcacaacttattttagagcacatggttatcaaaggatattgtataagtacatcatttactatcagcttggatgcatacttcagagacggtaatgcagttggcgcactgaaatgctgggatgatatgggcaaaattggtttgcagactgattttattgccttctcagcatatattaatggcctaagccgattagattacgtgaatgaggcttatcaggcatttgctgagatgacgagcagaggaattgtaccaaacaatattacttacaactccatcatatctacactttgtagccaaacactatcttactcttattttgccaactcatacaatcagccaacagaacttatctttttacatacagctgatgaacatttattgtatcacggccagcttgcaaagaagggagaacaattcattgatgtcccttatgttgtgaagagtatggatgtgtcatttagtggcatattgagctttattgaagctgcggcgattgaaaagcttaaaaataatgagtgcacacctgcggacctatgctactcattgcaggaaactatctttgccatgcttgtcgaaattactgaaagtgccatggcacactgtgattcaaaggacgttcttattgttggtggcgtcggttgcaacaaacgtttacaggagatgatgaagattatgtgctcagaaagagggggtaggctgtttgcaactgatgaccgctattgtatagacaatggggcaatgattgcatatactggtttactggcatatgcacatggcatgaccactccccttgaggagtcgacatttacacaaagattccgaactgatgaagttcatgcaatttggagagagaaggagatgccggtgctaaaaaacacccattcagatgcaattgctgaagtttctatagatgaagcctccatggcgacaccaatcgttatagattactga

SEQ ID NO: 2881 - DNA, 594 bp, Zea mays
  Peptide Sequence Number=SeqID_44660
atggagcggcttataagcgtgggcgcggacttgatagtaagaagtctgttggtggctgaattggttatgttcagctcttgcgcagaggagccgttactggtgcgcgcggcgcggggcgaggatggcatcccacattggatgatgcgacaggcagggcggtacatggcggagtaccaggcgtcggctaaggggaaactcacattcggccatcaggttcggggagcttccagctgcgaggttttgaggaatagttttcagattcttacagcttcttctattttaggtacatcgccattacgaggatgtaattggagctctattgttgatcattttacactcactctcatccctctgatgaagtatgttttagttgtcttgcaagctaatgataatggtcaaggtccatgcaccgtgtcactatctgtcttagaaaaagaaggtgttgttttcagtgtgaggcctacaaagaaaagttggaaaaacatttccaatatatcttgtggtgagaagaaattatgggaaaatgaatacagtgaagacatgggcacacgagcaagaacagtttgctttaaagttcttcgccatcagttttaa

SEQ ID NO: 2882 - DNA, 489 bp, Zea mays
  Peptide Sequence Number=SeqID_44661
atgggaagcaaaattcagcatagcgttggagctactcaaagcaaaagcgagaccactgttgttgcatacttcactgccgtcccacaaacagcagatcagtttgccctaacggtcagatcagcgcttcagggaatgaggtcaggaggcagtggggtggaccttgggggcctcgtcaatggcagaggagagctcggagaggaggtcggagcagagcagcgcgccgtacacgttgagcagcaccggcgtgacggcagcgctgttccgggcgccgaggcagctgtcgcgccgatgaagggagggaggaggcgaggtcctccggcgcccgatgcagcaaggacaaagcaggaagcggagcttgcagacctcggcaaattgcaggaagtgaaagagagaggaactgcctcggacgcggcaccatatagcggcatcatccagcgcacgcattggaagtggaggtcgtggggagggaggatgcgagagtggggctga

SEQ ID NO: 2883 - DNA, 729 bp, Zea mays
  Peptide Sequence Number=SeqID_44662
atggcgcgcggcgctcgctttctccttgttctcgcgttgctcgccgcgctactcgccgtcgtcctccagctctaccgccacaggaagccgtctgcggaagcagacaaggcgtttgcaatcagtggcaaccagtcgtcgcttaggcgtgttcatcgactaatagcttatgtgaggttgtggatggtggaagagctatctgtgtacaatggaaccaacgaggagttgcccatattactcgcgattttgggctcagtgtttgatgtcacgaaagggaggtcacattatggtcctggaggaggttatcatcactttgctgggagggatgcatcacgagcatttgtttctggaaattttacaggtgatggtctgactgattctttacagggtttatcaagtagtgaggtaaacagcgtagttgattggaggaaattttacttcgaaagatacatatttgctggtaaacttattggacgttactacgacagtgaaggaaatcctacgaaatatctgaagggtgtagaagtgaaggcaaagagaggtacacagcttcttgaaaaacagaagagtgatgaagctaaaatacctggctgcaattcaaaatggagccagcaagaaggtggtgaagttgaggactgtagtagaagatgcaaagcagctcatagagttaggcccacaaaagctttttttcatggccacaactcaaccaaactcaaccaaacggacccttag

SEQ ID NO: 2884 - DNA, 1347 bp, Zea mays
  Peptide Sequence Number=SeqID_44663
atgagccgccaggatcgtcaccagtggcctcgccctaaccacggatacgaccctcgcgccgccgccgccgccgcgcaatggtatggcgccgcttcgatgctgtttcccgaccccggcgcggcggcgctgcacgggataaacccctacggcttcgcccctaaccctttcttcaataacttcctcccccagaactccgctgccctagctgcctaccaactgcagcagcagcaggctcatcacttcgcctcccatgcctaccaccaagcccctaccggtaacaccatgcaccgctctaccaaacccgccgccgctgccaaacctgcgccgccaccgggcaaccagcaggccgtgctggaccgggctcaagaggcggcgaggaaggctcgggaggagctcgtgaagggtggggacggcgtcacggcgtggaaggtggcgcaggcggtgctggtggcgctcaaggctgattcgtgggactccctcggcgtccagccccaggatgtgcctctcctgcgggatctcttcctaatcgagggcaaggccaagcaaacagaagtgtctgctgcgaagcttcgagcaaatatgagtggatctggtaatagtagtcaggagaaggatttgttgaaaaatgcaagtttccatactcacaagaaggctttggacaagaggttcatttctttaactaatcgtataaaagagttaccaggcatcaataagcatatccattttgattcgaccgatgatgaaactaatagttgtactggttctgaggatggtaaatctgatggcaatgagaatgagaatgaatgttctattcttgacaaaaaggatggtgataagcgtgtgaatagctgcccatatccgtcaaaaactgaagaactggaaaggcttggtttgaaatctgaaattaataaaaggcaatctttagagaatagcaagccaagagacagtgggaaaaaggggaaaaagcacatacttgaccaggaagcacataccaacttgacaaggaagcacatacttccacttaccagtgatgctactgctcggtacgttggtgaggcacaatgcgttctcggcaacgcgaagtggctaccgatatccatggcagtggtgagcgcgttggtgggtggactgcggtactcgcttgtggtgttccccatggttggggaggacacggctgccggcttcctcggcggcgacacgaggcccgtcgagcgcgcgggggatggagctgcttcacggcatcacgacgctattggggggggggtgaatggagctcctggaagcttctcgttgcgtcaacgaacagagaggctagctgggaggtttggcgccaccgtcgagacgtga

SEQ ID NO: 2885 - DNA, 588 bp, Zea mays
  Peptide Sequence Number=SeqID_44664
atgatgctgggcggaggcgccggagggctgaggaccctggaggatttcaaggctcatgatcccttccaggacagcaagagaagggtgcccaatggccctgatcctatccacaacagcttgcgttacggaatgaagggaatgttcttgtttcaccagtttctgactggtggtatgcaaagcaaaagcaaccacacaagtcctattcccccatgcatcacctgccgaaacaaagactgtgctgctgtctcagtccctgcttcagcttcagcttcagcttctaacccggtttcaaatcctgcagaggaaccggcaagtcaggacgatcgccgggacgagcatgacgtcgggagcgcgcatgccgaggcgtggaagcttccgaacccgaagaggccggcgatagcgacgtgttgggagcggcggctagcaaacagaagatgcgttgcgttgcatacttgcattgcatggaggaagaggaacagacaagaggtgcatcgtggggtggtgggtctggctgggatgctgggtgtaactagggggaggtggcctgccctatcttcttctaagcactgctatttaagacggttttaa

SEQ ID NO: 2886 - DNA, 1161 bp, Zea mays
  Peptide Sequence Number=SeqID_44665
atggccgaatctggcactcatgctgagcaaatagagacttttatcgttaataatcagaatgtgcctgagttacctgagcatgaagctatctggtccttctcttccttgtctgcagccaaacatggttcagcgaaccaaggtggtgctgatacccagggggttgatttccaacctgtccatgaatttagtattcccaatcatcagaaggcacaggtgatggtttctagttggcctctaaactattggagaacagcacccgtcttcagaacacctctcataaaccagcatgcaagcatgcaagaggcaaaggtgaatgatgctggaccttcatcaaacttaaacatgcctgctatgtatggacacaccgaagatagtttgctttctgctgatcttgaaagggattggattatagaagagaatccaagaactgaaactacattgtttggagatagttcatcggaaatccttgatgagcctcagatggtgatgtctgctgaacctttccatgcacctgcttatttgaacttggaggctggaaattcaagcccaacggttcatgtcgagctaacaaattccgatgagaaactggccaatcttgcagaagacaagaatcggcgactttcagatgcaagccagttaagaacaggttcaaacccaatggttgatgttgagctaacaaatttcgatgagaaactggccaatcttgcagaaggcaagaatcagcgactttcagatgcaagccagttaagaacaggttcaaacccaatggttgatgttgagctaacaaatttcgatgagaaactggccattcttgcagaagacaagaatcagcgactttcagatgcaaaccagttaagaacagggaggcttggtgaagaactggtcgagaaatatttggccaaacagctaggttccaacaatgttaggtgggtgaacaacagaattgaaaccggactgccttatgatattgttataacacacccagagggtttcacagagtatgtggaggttaaaacaactgtatcttcaagaaaagattggtttgacgtctcagcaagggaatggcagtttgccttggagaaaggggattcatttagcattgctcgtgtcatcttagggcgcggcatctgcccggcagcctgctcgccggctgctcggtga

SEQ ID NO: 2887 - DNA, 144 bp, Zea mays
  Peptide Sequence Number=SeqID_44666
atgagctccgtaggatcattacgcatccagccaccaagtattgccctcaatcgatcatcagtgagctccaattttggatttcccccaaaaatactcaagaacaccgtagcaaggacctcaccatggccagctcaattcaggtga

SEQ ID NO: 2888 - DNA, 1197 bp, Zea mays
  Peptide Sequence Number=SeqID_44667
atgcgggccctcgcgcgcgccgcgtcgctgctccgccgcgccgcggggtccgcgcctactacggcgtcgctgtaccatccgccgcggaacgtaggcccttgcctcgtgaagaatctgccaggtttctttttcaatgggtattctactcttttggctccaccaaatgaagtgttgattccaccagaactcctttctagcaggactgtgtggacaccagatcgggagcttgggcagtatgaagacctggtagctagggtcacaaacttccataatgaggacaagggcttcatggttttggatggcgatgtttttgatgttccaattaggaaggacattgttcaccgagtagggacacactcaactaaaactatcagtgaagttagtggcactggaagaaagccttacccgcaaaaaggaaccggaaaagcacgacatggaacactgcgcggtgcccagtttcgtggtggtgcaaccatgcatgggcctaaacctcgaagccatgcaatcaagctgcagaagaaagtacggcggctggggcttaagattgccttgtctgctcgaactgctgaggggaaggctgttctcttagatggggcattacaatcatcttacattcctagaatcatgttttcacgacaggttcaattgttgccagattttactagtaacccaggagcaggagtgtgcttctccactgtccagccactgccatgccacccagagatcgccgctgcccaggagattgcaggttgcagccatatccctgacggggctggatccggatctcttccacaaatctccattagcttcgattgttgcaggtatggtggtagcctgacctggcttggccgaattgtttgtaaaaacgttaagaacatatatctgaaatcggttggttggatatttgaattaagagatatgctcttgatctttgaggacttggaagttcctagccacaagacgaaaaacattgtgcaatacattagacagatggatgactcaaagaaggttctgttggtggatggaggcgacattgataagaagctaaagctggccactcaaaaccttcactacgttaacgtacttccttccattggcctcaacgtctacagtatcctccagcatgacacccttgtaatgactcgggccgctatcaacagaatcgtcgagcggatgcatacccccatcaaccgctag

SEQ ID NO: 2889 - DNA, 285 bp, Zea mays
  Peptide Sequence Number=SeqID_44668
atgactccatccacctaccttgatgtccgcgatatcttcccacctgtatcaagggtttccttcgccctcttgtcgctgatgttcctcgcttccgagttgatgcttctgaggttcatcttcctactgctgatggtgtttcaggggatgacccagaggacatgcatccctaaaggctcgacattcagcatgctgccatgcaagacaccaaacgatgaggccaccaccaaggagaatttcgttgctagcgggactactcatacgaaggtgatcagactctggaattag

SEQ ID NO: 2890 - DNA, 288 bp, Zea mays
  Peptide Sequence Number=SeqID_44669
atggcagagatcataggcgcggagtcccacgccccgccacctttaccactttacagggattgggaggaggaagaggtcgtcaaaggctggtcgacgtcggcagtcgccgttggcgcagtcgtcaacgtcacccgcggccgagccggcgtcgccaacaaaaagaggctgtcgaagcagctgtccatgaaggaagaccaccagggaggtctagtggggagaagcggaagcggcagatacaacggcagaagaagcagcatgcgcctgaaccgaacccgaacaacagggtag

SEQ ID NO: 2891 - DNA, 276 bp, Zea mays
  Peptide Sequence Number=SeqID_44670
atggtgaatatggtttttgggaagcactcatctatgtggttgctcgatcacttcgtcgtcctcttcaacatcgtcgcgtgggcatttcacatcgtcgtgaagaacaagatggtgttgaataacaagtccccaacattggcgcccacctccggtgaaccctttttcgactaccttcggcaagtactgaccttcgtcatgccaccgaagaaagcttcagcgccaggggctgccgcactgcagccactggacctgaaccaggagaccctttctctttga

SEQ ID NO: 2892 - DNA, 807 bp, Zea mays
  Peptide Sequence Number=SeqID_44671
cacgagcggcagctgtcggagcacgacagttgcagcgtccttcaggggaggaagaaaggggacgacggcacgagtttaaaccaacaatctctcgtcatatatatcataatagagagtaggacgacaaaagccatgggcagtaatggcagagatcataggcgcggagtcccacgcccgccacctttaccactttacagggattgggaggaggaagaggtcgtcaaggctggtcgacgtcggcagtcgccgttggcgcagtcgtcaacgtcacccgcggccgcagccggcgtcgccaacaagaagaggctgtcgaagcagctgtccatgaaggagaccaccagggaggtcaagtgggagaagcggaagcggcagatacaacggcagaggagcagcatgcgcctgagcgaagccgacgacagggcaggtggcagcactgctgtctgtcctgttgacggcgaggcgagctcgagcgcggagcgggtggcccactggttcgacgagcagaagggcggccaggacctctgcgacaccctccccgccctcgacttctatttcgccgtcaaccggcaggtgtcggagcccaggatgtcgtttcccacgagcacgagctcagggccgtctctgtcggccaccaagtcctcgcccaacctctgcggcacgcccagcccaggtagccctggtgcgcactctagtaacgccttggagtcatggaagatttgcaacccaggagataaccctctgcttgtgaagacaaggctcaggcactgggctcaagtagtggcttgttcagtgaagcactcgagctga

SEQ ID NO: 2893 - DNA, 174 bp, Zea mays
  Peptide Sequence Number=SeqID_44672
atggccgtgatgggttcaacatcagaaaagatgtacctctaccagatttccactacaaaaatgtttgtgtgtgatttgtattacttaatcccgcggttctggttacatgggaatactgagaagtgtaatgtacttgtaatgacgcacctacgctcaagtaagaaggtacactaa

SEQ ID NO: 2894 - DNA, 399 bp, Zea mays
  Peptide Sequence Number=SeqID_44673
atgtcgacatcggtgaacgccaccaaggacagccttcacctcgaccggttgatttgtgcctgctccgaccaaactggcatgggcatcgtaactctgacacggtttaggagcggactagtccaactgaccttggggatgtacttggttagcctcgaggatgatgctcgagtgcttgctactgccggggaggtcgccgacgacgagcttacgcggcctgagccaagtgctcgactagagtccacgcgggggcgtatgtttgcgaatgagatagaagggaagggcctctttgtgattgtcagtgacacagggttctttgaacccaccattcaaggtgatgaaccttcgaagttttgttgtttctccaccaaggtcgtcccaaagcaagaggaggaagcataa

SEQ ID NO: 2895 - DNA, 219 bp, Zea mays
  Peptide Sequence Number=SeqID_44674
atggccttgggcacacttgtcatagacaccaagggtcttcttctacctcacgtgaacaacagccaaggagagaagcagtgggcattcataggtggtgggagcagtgaaaggggggagatcctctgtggcatgttcaggagctggctcctggacttcttcccgggcaactccttgctccgggatgaggacatactctccgttagtgaggttgcaatctaa

SEQ ID NO: 2896 - DNA, 495 bp, Zea mays
  Peptide Sequence Number=SeqID_44675
atggctacccctaaaatttttgctttgaaaatgaaaaatactgaagaagcttcttcagagagcaaaacctttggcttgaggcacctaggtggccaagagttgactgaagaagatatatttgaattgaaggaatttgctatagcggatagctatcaacctgggtccatactttttggcagcatagatgaagagatcttaggatgcattcctgatcatgctggagcaaaaatagttaacacgccgtcaaagagcatcggctttccaaagctagaaagcgaccttagcaactatcataaacaacatatcaccggtagcttggtgtactcaaattttaagagtttcttgttgagtaaagctttgaagctacaacaagagggggaagatcgaaaaactgagtttataatcccaggtttagagaaaaaggttgaggaccttgaaagtttgttgaaagagaaagatgccaggattgaatcgaccgaggcaaacttagcttaa

SEQ ID NO: 2897 - DNA, 192 bp, Zea mays
  Peptide Sequence Number=SeqID_44676
atgtctcacctcggggcggagctcggggtggcctggcgcggcttatggcgggcgggacgactgaaatggcgggcgtgggtctccggtgaggtcaagcggcatgggcagaacgcgagagagagcggggctatgcgaaatgggacggggaaggttttcaatccaaattcaaatcaagtttcaaattcaaactaa

SEQ ID NO: 2898 - DNA, 264 bp, Zea mays
  Peptide Sequence Number=SeqID_44677
atggcgtcgcggcgcccgtgcccggccccggctcaccgacgcgcggccgtggcgcccccctccccggcgtcctcgcgcagccccggccccggcgtggcctcggtggtgcgcgcggagccccgacgcgacccgtgcacgcacggtgcccccggcaagctcgccgcacccacggctcacggccgtggcgctcggcccggcgtccttggctcgaccgccccagcgcagcgcggcttcggctcacgcggccgtggtgcccctgcgtag

SEQ ID NO: 2899 - DNA, 387 bp, Zea mays
  Peptide Sequence Number=SeqID_44678
atgtcgctgacaccttcaaaaaatgtgccagaggcacaagctgaagaatctgttctggcggcgggagctactgcttccaaggccgaagtcagctcgctgaaccaatctgaagatagcatggacattgatttcaacgtggacaacacgaccatccgccctacaaagcctagccatgtggacttcgagaaatccaagatcaaagaagggcatatcgaggtgtctgaaggggatgcttcggacgctgagcctgggttagttcggcttcggtataagtatagattcaaagatgagttcggagaaccgagtgatggtaggctagattatattgaagtgaagtgcaatgaaattctggagccgaggctctacaacagaccttcggggatgtag

SEQ ID NO: 2900 - DNA, 222 bp, Zea mays
  Peptide Sequence Number=SeqID_44679
atggttcttgattcattgtcatctccgcacaggaggtcccaaaacatattcttcgtgtcatcatcaaaaaagcctcagtcatctcgtgatgacagttgtgaccttgggggcatcagatgcgtgcagtggtttgacaggaggggcacagaagatcgagtgccaggcaagatcagtgctgcaacatggaaagttgaaattccgctgacttcggagtctcattga

SEQ ID NO: 2901 - DNA, 738 bp, Zea mays
  Peptide Sequence Number=SeqID_44680
atggagacaagtgatggagcatcatctatgaagagagttatcgatcatcgtttgagagggatgatgaggatatctatgaaccaatttggttttatgtctagaagcaaaaagcagaaggtatctgggggtttccatgaacaaagcattgaccagcttaatgatgtcactgcagttagcggtgttaatctgaggagggttgaggttgaaaagtcaagacatcatttttatccattatcctcagatgttcgcagtcatattatgagagtgaatcgagaagcaagagaacagtgggagaaaaagcaggctgaagatgctgagagaattaggaaacaaaatgatggagatggcaatgcaaatgttgatcttgaaaaagacagaatcgagacccgtggtttgtcaaagcatgcaaagacttacaaggaggacgatgataagatgcgaactacagctgcaaatgttgctgcacgagttgcagcggggggagatgacatgctgtcaaagtggcaattactagctgaacggaataagcagagaagtgagggaggtgatggttcttctggctctgtaccaggtaacatgttgcaacacaggccatcactgaaatctgggaaagacttaagggaagaacatgaagttgaaaagagaggatactccacaatgcttggatctggtaagcctgatctcctttctcttgtattcttgctgttaaacaagagtgtgatcaaggtggtaccatga

SEQ ID NO: 2902 - DNA, 165 bp, Zea mays
  Peptide Sequence Number=SeqID_44681
atgggcggtggcaacggccagaagtccaagatggcccgcgagcgcaacttggagaagaacaagggggccaaggggagccagctcgagaccaacaagaaggccatgagcatccaggcactggactcccatccaatgcttggaattggaattcgaactgaaccttga

SEQ ID NO: 2903 - DNA, 534 bp, Zea mays
  Peptide Sequence Number=SeqID_44682
atgtggggaaacaagtctacacgcttccacgaggcatatacgatgcaaggcgacccaaatgctgtggttgctccaggaggtgagcccatgctcgcaagcacgttgttcctccagtggacgaataaagctgtggcagggcacaacgcaaatggattcgttcgctggaccaccgactatgtaaagaatcggatgactttgaatcgtctaagtgggcccacccacgcgcttgggcgccgcatccacggcgaggaccgaagtgcccccttggacccgctcgctgcccagcctgaacagttacaggcccgcccgttgagccagcccgagcacaaccgccctcccctcttacctctatacctcggcctcaaaggcgtcgacgccggtggctgtgaactggtgctcggtgcttcggatctgctcctgactgtgaggttgcagcagttgctggatattaggctcgctgttagttggctgctgctgccactcgaaaaaggccaaccgaacgacttgttctctttttccctagaagaatgctaa

SEQ ID NO: 2904 - DNA, 1659 bp, Zea mays
  Peptide Sequence Number=SeqID_44683
atgcgggaagcctcggtctacaccgggcgcacgcgcaacaccgcgcctgcggccccgggccgcctcggcaacgagcaccatcaccgcgaccgtcggacccacctcgacgagagggtgcgccgaggctaccaccccaggcgtgggggacgctacgacagcggggaggatcggagtccctcgcccgagccacccggtccgcaggccttcagccgggccatccgacgggcacctttcccgacccggttccgacccccgactactatcacaaagtactcgggggagacgagaccggaactgtggctcgtggactaccgtctggcctgccaactgggtggaacggacgacgacaacctcatcatccgcaacctccccctgttcctctctgacaccgctcgcgcctggttggagcacctgcctccggggcagatctccaactgggacgacctagtccaagcttttgccggcaatttccagggcacgtaccgcaccgagctgcccaacatcaccgactcggatgtcattggcgcgttcctcgccggcaccacctgccgcgacctgatgagcaagttgggtcgcaagacccccactagggcgagcgagctgatggacatcgccaccaagttcgcctccggccaggaggcagtcgaggctatcttccgaaaggacaagcagccccagggccgcccaccggaagatgctcccgaggcgtctactcagcgcggcgccaagaagaaaggcaagaagaagtcgcaagcgaaacgcgacgccgccgacgcggaccttgtcgccgccgccgagtacaagaaccctcggaagcccccgggaggtgccaacctcttcgacaagatgctcaaggagccgtgcccttatcaccaggggcccgtcaagcacacccttgaggagtgcgtcatgcttcggcgccatttccacagggccgagccacccgcggagggtggcagggcccgcgacgacgacaagaaggaagatcaccaggcaggagagttcctcgaggtccgcgactgcttcatgatctacggtgggcaagcggcgaacgcctcggctcggcaccaccagcaagagcgccgggaggtctgttcggtgaaggtggcggcgccagtctacctagattggtccgacaagctcatcaccttcgaccaagccgaccaccccgaccatgtgccgagcctggggaaatacccgctcgtcgtcgaccccgtcatcggcgacgtcaggctcaccaaggtcctcatggacggaggcagcagcctcaacatcatctacgccgagaccctcgggcttctgcgtatcgatctgtcctcggtccgggcgggcgctgcgcctttccatgggatcatccccgggaagcgcgtccagcccctcggacaactcgatcttcccgtctgcctcggaacaccctccaacttccgaagggagaccctaacgttcgaggtggtcgggttccgaggaacctaccacgcggtactggggaggccatgctacgcgaagttcatggccgtccccaactacacctacctcaagctcaagatgccgggccccaacggggtcatcaccgtcggccccacgtacaaacacgcattcgaatgcgacgtggagtgcgtggattacgccgaggccctcatctgtaacacccggttttaa

SEQ ID NO: 2905 - DNA, 849 bp, Zea mays
  Peptide Sequence Number=SeqID_44684
atgggcatctcggcgaggtggctcaagtcgttagttgggttgaggaaggtggggcggcagcagcagcagcggcgaaaggatgatgcagatgttggtcgaatgattcagcactctcaagatgacaatagcattgctgcacaagaaattccagaggtttcttatggaaatgatccacctgaagatgattctaatgtaccttcatgcttcgagcctgctcgtagttcagctcatatgccattttgtcaaactgaagaagcccagaaagagatctgggctgctacaattattcagacagcatttagagctttcctggcaaggagagcccgccgagctttaaaagggttggttaggcttcaagcccttgtaagaggtcatatagtaagaaagcgagcagctacgacactccgttgtatgcaagctttggtcagggttcaggcccgtgttagagcaaggcgagttcgcatggctttggaaaaccagactgatcggcaaaatacttcaccagagcacacgatcgaggcacgtgtcagagaaatcgaggatggctggtgtgatagtatcggttctgtgggagatatccaagcaaaacttctaaagaggcaggaagcggcagctaaacgtgagcgagccatggcctatgctctagctcatcagaccagattggccggtttgtgtggttcatccgcgttggagccaggctaccctaactccctaagccatccgtaccgatacagcctgtctatccctagctcacagaatcgggcgactaaggttcccctaacctcctgcttcttcactgctggggcagatggcgtgaacttatccctgtgcttcttatcaggtggctaa

SEQ ID NO: 2906 - DNA, 399 bp, Zea mays
  Peptide Sequence Number=SeqID_44685
atggaatcaaaaagcactaatgtttccaactcaatcaaagagcataatggtggcgactctactccatctagggatgccccaggtgacctgccaacccagagcgctctaaggtctcccccagggggcggatccagggcgctgcgaggaggaagacgaccttgcgccatcgcagaccatctagctccaggcgcggaccgttcgaacgtacacagggaatgcgccgctccagcgtccaagccgcagaccgtccgcgccgccgcagagggcaccgccaagcggtacacccccaacgaggcagcacaaggcaagtatgattgcagcaatgaaggaccaagatacggtggcagacagggttgcactgtgagggataagtgcacctgtgacaaggaagtagcttga

SEQ ID NO: 2907 - DNA, 504 bp, Zea mays
  Peptide Sequence Number=SeqID_44686
atgactggttttgccgaaccgctgaagccagaaaaattctctggtatgcacttcaagaggtggaaagtcaaggtcattctctggcttaatgctatgaatgtgttccatgttaatcaaggcaaacctaagggtgtactgactcctgaagaggagaaaaagtatgacgatgccaatcctatctttacgggagcaattcttagcgtccttgttgatcgtttggttgatgcgaatatgcaatacatagacgagaaggaattgcaggatgcacttactactaagtatgttgcatcggataatgacaatgacctatatgtcatggagagttttcatgattataagatggctaataatcactctattgtagagcaagcttatgcaatacagtgtattgccaaggagctcgaccagcttaagattgtcctccttgtccgatttgtgggtgggtgcattattgcaaaagtttccttctacatagaggaactgcgccacatatctgaaatataa

SEQ ID NO: 2908 - DNA, 1395 bp, Zea mays
  Peptide Sequence Number=SeqID_44687
atgaggagtacccttggtctgaatgactgtaaattattatgcataaattcgtctacagaagcaggtggtagtaatgctgacaattcatggctaccttataaagctcttgttttgaacaatcatgatggatcctgtattcttagtgtggatgatctgaatgagataaaggacttcatgcaagattttgtttcaaaccatatcatcccctacatggaacaaaagatccgtgtcctcaatcagcagccacaacaagaaagggttttagaaatcagatcaagaacttgtggtggagaaaaagagatgatgtcccagaagctccaaatgggccaatgcaagtatacattcacctccatagaatcacagatcagagtacttggtgatttcgccttcatgttacgggactacgagcttgccttgtcaaactacagactactcgctactgattataagcttgataaggcttggaagcgatttgctggtgtacagagcatggggaagaaatttgatgtgtacaagctccaacttcctgtttttaacatgtcatctctcaaagttctacatgaggatcatcgcacttatgcatcacatgcagatgttggcgttagtgaaagcacgtggcaggagctggaggaagaattgatcccatcatcatcaattgtcaaaactaattggctggatactcagccaatgagaaaatacaaggactcctgtatttgtgtggctggagaagcagtaaaattgagtgttgaacttaaaaatcccctccaaattcctgttgctgtttctggcatctctattatatgccagctttccagcactttggatgcattaagttctgatgttagtggactggacttggatggtggggaagataaggttaacacagagccatctatttcaatgttggagactgatggagataagtttacattgtcaaagcttgacattgtattaggaggaggtgaaagtaaaagaggtttaccaaaacttacaggatctattgatcgcatgcctacaaaagcgtttgctggtgatttaaagctgcttacactaaatctgagaaaccattccgaatatgctgtgaagggtataaaaatgaaacttagcaacccaagatttttaattcccggcgattcatcggacattggcctcaagttcccacactgcttaaagaggcacgtgcaatcagaaagcagtgttgtatcagccaaaactatgaaggacaatttcaagagtctgctctttgcatttcctcaggtcaagtggcttaaggcactagatatagaaattcaagcaggggcagcactctcttggcctatttggtttcatgcggcaactcctggaaatgacgctatatttgttactccctctaggcccaaatgcaagttgtcgtaa

SEQ ID NO: 2909 - DNA, 453 bp, Zea mays
  Peptide Sequence Number=SeqID_44688
atggagcatgtgaccctgttttggtcgtgcctgctgttgtttggtgccatcgagttcttcaagtggacgcagctcctctcgacatggagaggagtggcattcactgccgcagggatggcacttgtgatgggggtcatgcacgtcttcatcatgttctcccaggctgagcggtcgagctcagccaaggcggcacggaaccggacaacaactcttggccacaagattgtcaaaaccaaagaattccttaacacgagcatgagaagtctggatgaacacagtgggtttcaccgcaagttgaagcattttgcagagcagtgccaaattgatgtttctttgttgcaagaggaagaaaagaaaattcggtccttggtcaggggcactgttgattatttccatgggagtacagggaaggaggagggcctgccgttaggattagttgaagttccagtttga

SEQ ID NO: 2910 - DNA, 204 bp, Zea mays
  Peptide Sequence Number=SeqID_44689
atggggaaggtgcgtgctacggtggttccggggtcgccggagttggctagaaatgaaggggacaactcggcgaactcgctggcgaggttgtggccacgagactggggacagagaggggagaacagcggggaaaaggcttcgggtgggtcgggacaattccgggttttcaatccaaattcaaatcaagtttcaaattcaaactaa

SEQ ID NO: 2911 - DNA, 366 bp, Zea mays
  Peptide Sequence Number=SeqID_44690
atgggcaagaacaagaatggtgggagttcttcacaccattccggcgacaagcggaagcgcgagccgactcctccttcggaggacttcggcgattccgagtactcagaggaggacttctcctccgagtcagagggttcgtcggtccatgcctctcccccggtgtcgtctgacgactcagacgactcccaggggctcgtcgtggaggtgtggacctacatccgagctgtcgagcgtgccgggctcgagggctcagatgagtcggaggtctcctcggacgaggagaactcctcggactcgtccgaggagggcggcggtgacggcgatggcgagggcgacttcgacgacggaggcaacggcgattggtga

SEQ ID NO: 2912 - DNA, 522 bp, Zea mays
  Peptide Sequence Number=SeqID_44691
atgggcgagctcacggctggcgctggggaaggagataagggagaccaaggagtagggacgcgcggcgatgggagaaggcacggctgggcgcgatgcaggaagcgcgggccaaggcgaactccagaggagggcgacgacgaccagcaccatggcgagcaggaacgcagggaggatctcgcagggaagagaagctgcgagggagagagaaaggtagggcgcggctggaggagcagagaagaagcagcacgcgcagggagcttcgacggtggcgacttgggcgagcttgcaggggatccgacgccatggagggccaagcttcggggaggaacaggggctggagcgaggcatggggaagccgccatggggagctcggtagaggtcctggcgcgcagggagcaggcagtgggcgcagtaggcagagggatgtgcgcaggagcaggcgcgcctaggagaagaatggagcgcataggggagggaggaagatgcacgcggcgtggaagaaactcggcgcgcagaggataa

SEQ ID NO: 2913 - DNA, 462 bp, Zea mays
  Peptide Sequence Number=SeqID_44692
atggtggatgtcgtgcgatgcgttatcgggtcagcgctggggtcagggcagcgtccgtgcacaactctgtggagtgcatgcgcactagcttcgatgccgccgtcgacaagcgttatcaccgccattgaaggtgcggagttcatccaagttgctcccctacttctcgaggaaggcgcccggtgccccggcggtgaggttcggctacacgggcaagcgcaattgctcgtcgtcgatgcaatgtcgtggcggaaccatgcgaccacgggggcggggcagccaaccacctcaagccaaggtatttccgctctccatctcttcgccggatccccttggaggtttagcctccgtaaatttcaagtttggggcattggggaactggttggcgtgctcgccggtggaacgccgccggtgtgggcttcggttggtgcgtgctggagatggaagacgaatcgtgggtcatag

SEQ ID NO: 2914 - DNA, 357 bp, Zea mays
  Peptide Sequence Number=SeqID_44693
atggagcgtgaaattgtggagcgtgatagggctattcactgggctataaattcacgatctatagcctgggattgcgaggtgactgcccgagcccgggtggaagagttcaacgtggccctagaaaatctgcaagtgtataataatgctcagtatgaagaagtgcatgtgttgtatgaacagctacatctgaacatgttgccggagtttgtggcgatgggagctggtgcagaaggagcagctggtggaggaccttatggggagttggacctctttggagaccctccttccatgaatatcgtggatgatcgtcctcccaaagctagcagtggagtgggagcagacaaggatgaggactag

SEQ ID NO: 2915 - DNA, 177 bp, Zea mays
  Peptide Sequence Number=SeqID_44694
atgacgtcaaccggaaaccatcatcgtgcttccgactatcgcgtcgaattagttagggtcttcaagggagaagctcaaaagatacaaaggttgacacagcgccgaagctgtgaagcaggaaagcttcggcatgttcgcagaaaagggaaccgacttaaagatgaaaaggccatttag

SEQ ID NO: 2916 - DNA, 462 bp, Zea mays
  Peptide Sequence Number=SeqID_44695
atgacggccagcgccatggcaagcaggcgtgcagggaggagctcgcggggaagagaagctgcgagggagagagaaaggcagggcgcggctggaggagtagagaagaagcagcgcgcagggaatccgacgccatggagggtcaagcttcggggaggagcaggggctggggcgcgtcatgaggaagccgccatggagagctcgatagaggtcctggcgcgtagggagcaggcagtgggcgaggttcagttcatctcgccaccggcgaccacgcgctcggattcacgcctaacgctacgatttgtgctcaacggagtactgatagttgctcggggtagtaaatatcgccttgtggatgaacttgagccactgtttcactctggccgccgtgtcctcctgaagacccacctgccgggaactgtttttattttgatatttgtggagcagagcctgactctcctatga

SEQ ID NO: 2917 - DNA, 168 bp, Zea mays
  Peptide Sequence Number=SeqID_44696
atgtggaacactgttgataagttttatataagcagtggcaaggttactgatccgcagagcctgacttatgtcagtttgagtgcatttgcattcttgttctctgagttggttcagtacaaccagactcaagttgacaacattactgagctagaacggaggctagaatag

SEQ ID NO: 2918 - DNA, 933 bp, Zea mays
  Peptide Sequence Number=SeqID_44697
atggcggccatccccgtgattgacttctccaagctggagggctccgagagggccgagacaatggcggccatcgccgccgggttcgagcacgtggggttcttccagctggtgaacaccggcatccccgacgagctgctggagagagtgaagaaggtgtgcagcgactgctacaagctgcgggacgaggcattcatggactccaacctcgcggtgaaggcgctcgccgagctcgtggacaaggaaagcgagggcggcgcccctatgagaaagatcgagggcatggactgggaggacgtcttcaccctccatgacgacctgccatggccttccaaccctcccgccttcaaggagacgatgatggagtaccgcaaggagctgaggaagctggcggagaagatgctgggcgtgatggaggagctgctggggctggaggagggacacatcaggaaggccttcaccaacgacggcgagttggagcccttctacggcaccaaggtcagccactatccgccgtgcccgcggcccgacctcgtcgacggcctgcgcgcgcacaccgatgccggcggcctcatcctgctgttccaggacgaccgcttcggcggcctgcaggcgcagcttcccgacggcagctgggtcgacgtccagcccctagacaacgccatcgtcgtcaacaccggcgaccagatcgaggtgctgagcaacggccggtacaagagcgcgtggcaccgcatcctggccacccgcgacggcaaccgccgctccgtcgcctccttctacaacccagcgcgcctggccaccatcgctccggcgatccccgccgccgacaactacccgagcttcgtgttcggcgactacatgcaggtgtacgtcaagcagaagttccaggccaagacgtccaggttcgcggccatggcgacgacgacgaccaagtga

SEQ ID NO: 2919 - DNA, 471 bp, Zea mays
  Peptide Sequence Number=SeqID_44698
atgggcgcggtggcgccatggttggagcatggtaaaggaaccagatttacttactgcggtgcagcagcggctctcaacttgactcccctatcaccggtcgcccacccaggacgcggcaagccgagggaacggcggagtcgctcacgcccagcccgccgcgaccatgggttcctgcttctgtgcgattctgtttcaggctggaagaaccctctgaccgatcagacccacacctcagtgagagtaagggcttgggtgagcgaggcccaccagaccgtgactgatggcgtggagagggggaaagtgggctgcgcggagccaccgccgtcgtcgttggagttcgtccacgccatcgtcatccgcctcgctatcagtggagccccgccggagctccgtccgcgcagcacgatgatggcgctcgttcccctgcccaccgagccatccctgctcgtcaaccatcatcactgcgcatga

SEQ ID NO: 2920 - DNA, 681 bp, Zea mays
  Peptide Sequence Number=SeqID_44699
atggctacaggcctacagcgagcgggcgaggaggcgtgcgcgacctccagttccaatctgagcgactttggtggcatggacttcctgttcaccatcgccggcttcctcaccatcatcagctttggtggcggacatgagaggagagaagaatccttcgaggtggatcttgatttaactcttaatgagcttggagatggggaggacactcaaggatctgaagaaaaggagaaagaactccatgctctgaagtgcctcgcggttgagtcagaacaaggcacagatgggtgcgacagagctgtgggatctcttggcctccggctcagagcaattcgtggagatgtacagggtgtatcaacacctcaggctgaagaactggtttgtaaggccaggcagccagcgaaccagccattctcgggtttcttctatgcgcgctccactataattcaccggactacccggtgtgccactggactatctggtgagccagcggagcaacggctccctgcgccaacggtcgactgctccgatgaacagtgccgccgcagaagtcagaggtcaccagattgtccggtgtggcacgggactgtccggtgcagcaaaaagacaaagcgctccaactgtcaacaacttcaaaccctaacgggcgcgctgacgtggcgcacatcggacagtgaaaagtga

SEQ ID NO: 2921 - DNA, 414 bp, Zea mays
  Peptide Sequence Number=SeqID_44700
atggcgcaaagtaaattggaggaggtggtgacgtcgcggcgagaaatccttgctcctccagttacggttctcgccccacgaggatccggctggaagaaccctctgaccgatcggacccacacctcagtgagagtaagggcttgggtgagcgaggcccaccagaccgtgactgatggcgtggagagggggaaagtgggctgcgcgggtgaattacttgggccgcatagagaagaagtcagggttttagtgggccgagaactaggctttacaaatcctaccccccttaacagaaatctcgtcctcgagatttatatatatgcagatgtaattgtggacattgatccacaacccatcacactcaatcaaagatccaaattagacaaatatcataagaacaagcattcaagcatatag

SEQ ID NO: 2922 - DNA, 2697 bp, Zea mays
  Peptide Sequence Number=SeqID_44701
atgcatctgtcgctatggaagccgctgtcccactgcgccgccgtcctcctcgccaagaaccaccggcgccgcggcggcgggggcggcagcaacggccgccgtgacgactcgtccgccttcctccggcagctgcgggacgcgctggacgcggcgtcggaggacggctccctctgcccgccgccggacgccggcggcgccgacgcggacgcagccgtgtcgcgctcccgctccctggcacgcctgcgcgcgcagcgggacttcctccgcgccacggccctcgccaccgccgccggcccgttccggtccctctccgacctcccgctgctgccccacgccatcgccaccttcctcgccatgtacccggactacgcctccaccgccgacgtcgaccgcctccgcgtcgaccattactcccacctcgacgcccccggcgccggcagggtctgtctggactactgcggcttcggcctcttcgactccggctgggactcctcgtcctcatccttcacattgcacgagctcaacgccaatctgagcaaccacgcgctctatggcggcgctgagcccggcaccgtggagaatgacatcaaagagcgcatcttggagtacctgaacgtgccagccagcgagtatgcgctggtgttcacggtgagccgtgggtcggcgttccggctgcttgctgagtgctaccccttcgagaccaaccggaggctgctcaccatgttcgaccatgagagccagtcggtcaattggatggcgcagagtgcgcgggcaaagggtgccaagacgcgcactgcatggttccgctggccaacactgaagctttgctcaacggagttgcggaaggagatcgtgggcaagaagaagggccggcgacgggatgccgcggttgggctgtttgtcttcccggcgcagtctcgcgtgaccggtgccaagtactcctaccagtggatggcgctggcgcagcagaatgggtggcatgtgatgcttgatgctggtgcacttggccccaaggacatggattcactgggtctctcgctattccggccggacttcattataacttcgttctacagggtctttggtgcagacccaactgggtttggttgccttctgatcaagaagtcagtaattgggacactgcaggggagaaacgggtgtaatgcatcgggaatggtgaggattgttccggtgtttccacagtatctcagtgactcggttgatggctttgatgcattcgatgggtttgaagatgatccaggcgttgacaaagatgaaaagccctcttctaatgctcaaaatgggtcgcagctgccggcattttcaggtgtctacacgtctgctcaggttagagagacttttgagagtgatcctggtcgggacagcagctcggacagggatggggcaagcaccatctttgaagaaacggagagtgtctctatgggtgagatcatgaggagtccagcattcagtgaggactgttcatcagagaactctttctgggtagatgttggccatagcccattggggtcagagaagtctggtcagttcaagaaagggaaactgggttcaccattaccatcttcttggtttaatggaagaaagtgtaacaagaggatgtccccaaacttaagttccaggatatctagaagtccactttatgatggtcatgtgatttcctttgatgcagccgtgctatcagtctcgcaagatgcagactgcctcaaggaagaccctgaagaagaaaattttgagaatgggcggagagctcatttcaggcaggttagtgaaattcaagaggagccagaggccgaagaggtggcatgccaacgtgctatgaatggtggcgcggagcacaaagaaagcgcaataagaagggagactgaaggggagttccggctactgggaggtagggatggcaacaacagatttaccggggggcgactcttcggtgttgaagagattgatggaggtttaagcatggggcgcagagtttctttcagcacagaagctaatatcattgctgacaggctgaatcgggcctcagatgctgctgaagcttctggatatacattccctggtgatgatggttgtgcaagtgatggatatgatgatgctcaggactggggcaggagggagccagagataatttgcaggcacattgatcatgttgatatgatgggactcaacagaactactcttaggttgagatacttgatcaattggctcgtaacttcacttttgcaactgaagttatcagactcaaaaggtggcgatggagtccctcttgtacacatctatggccccaagattaagtatgaaaggggagcagctgttgcttttaatgtgaagcaaaatgatggaacatttgtgaatgctgaagttgttcaaaagatcgctgagaaaaatggcatatctgttggcattggttttctcagtcatataaaagtagacatgaagcagaaacagttaaatggcacgctcgatataccggaggcttcattttataagaatggacgcagagacaataaaaaggtgaccataagagttgaagtcgtgactgcttcacttggcttccttactaactttgaagatgtttacaagatgtgggcttttgttgccaagttccttgatccttcatttcttgaaagtgaacgccttaccattgctgctgaccactcagaagggcaaacttga

SEQ ID NO: 2923 - DNA, 504 bp, Zea mays
  Peptide Sequence Number=SeqID_44702
atgggcgtgcctgacttctgcgcgcgctggcgcgcattcaatgtgctgcagcggagcagccgatgcaaattcccgaagctggcgagttcagagccgcgtcctcttggagcaccggacactgtccggtgtacaccggacagtccggtgaattatagcgcgtcggctctgagaattcccgaaggtgcgaagttcagcttggagttccctggtgcaccggacagtccgttagtccaattatttgtgttgggcaattcaaccaccaaaattagtttaggaaataggtgtaagcctaattccctttcagggctgctttacttcgggggtctgggttgtgcgcacagggatcctgagcctactgggcccgatggcgtcgtctccgagaacgccacattaactgcccacgagatacccctggagctgttcttcgtgcggctaagtgtaaccgcacaggcatcgtgccttcataccgtagtaaggggtatccctaatccagggtaccgataa

SEQ ID NO: 2924 - DNA, 318 bp, Zea mays
  Peptide Sequence Number=SeqID_44703
atgggtcggatcacacgtgggcctccatgttggatgaggccgcaagacaagatgacctcgccacaggtcttcgtccggcgacgcgtaggccgaagggtaaatctgccagtcgtcttgtctccgttggtacagcgagcagtacaccctattaaggagtggaagccaaaatcgacaaagaagtcaccgaccatcaatgcagataacagtgtagctgatgctacatctccttcagctagcaactgtgaaagtgccaacacactgaatgtggttgatccgttgatggtttccttcccatggagactattgaagaaaaactga

SEQ ID NO: 2925 - DNA, 654 bp, Zea mays
  Peptide Sequence Number=SeqID_44704
atgtccaacatctacgatgcaaaaccaaccaagcaaataagcgacaccgacctgttcacttgtgttcttgttttcacttttccgatccgtgctctctgcgctgcttcgcacaaaggtagtgggatggttccactggctggcgcccagggagcgcgccgcgccgcggtggtcatcacggaggaggagcggcggcgcaaccgcatgacctccaacaggctgtcggcgcgcaagtcccgcatgaagcggcagcggcacgtggacgacctggccgcggaggcggagcgcctgcggcgcgagaacgaggcgatgcgcgctggcgtcggcgacgccgtgctgcggagccgcgcgctcgagcaggagaaccgggtgctcgccgcgcacgcgcgccagctgtgcgccgcgctcctgctgcgcaactcccagctcagcctgctcggcgacgtcgccggcgtaccgctcgacgtgccgggcgtgcccgaccatctcgtgcagctctacggcggcgtgcaggtgccagtcatgccgctctcgccgtcagtcatgccgctctcgccgtcgccgccgccgcccctgcatctgcaattgccgctggagatccagctgatgttgctccagcccgacgtcatggacgccgtcggtatgctcgagctctga

SEQ ID NO: 2926 - DNA, 693 bp, Zea mays
  Peptide Sequence Number=SeqID_44705
atgctgctgcttgggagccactgcacgacttcaagtacctactcggacgttcacctcgaggatgagctgtttgaagagatggggagagatgttatgatcgacatcttctatgcgcgccggaaaacgagccacgcaggtctttcatctggggatatgggctaccgccttcctccaaaagaaatacaggacattgttgatgcaccaccacttcctgtcttgtcattctctccaaacaaagataaaattctgtttctgaagcgtcgagcactgccaccactatcagacattgcaaagcctgaggagaagcttgctggtctaaggattgatggaaattctaatactaggagccgaatgtctttctacactggaataagtatccataagctgttagacgatgggactttgggcccagagaaagaggaagacagcaaaagtggaaagctgagagtgtggattgctgatgtggagtctggagaagcaaggccactttttaaatcgcctgaaatatacctaaatgctatttttgacagctttgtatgggttaatgattgtacactgctagtctgcactattcctgcgacacgtggagatccaccacataagccatcagttccatctggcccgaaaattcaatctaatgagtcaaagaatgtagtcccaagcgagaactttccaagatcttctgaaagatga

SEQ ID NO: 2927 - DNA, 1257 bp, Zea mays
  Peptide Sequence Number=SeqID_44706
atgaaggtggagacacaagatggtggagatgcaaaagtagaagtctcccctcgtgacatagtttacatggaaaatgctgagcctataaatgaaatactgggagtaaagagcgtatatgggagagcgacagggaaaagtactatgaaactgtttgttgcactgatgtcagacaaaactgacggggaactgctccttgatcagttaaagatacttacgtcgaaagaatcaaaaacagaaaacacacaatattacttgcagacttggccagaaaagaatcaagttaagataacaaatttcccccacccatatcctcagcttgcttcattgtataaggaaatgataagataccagcgaaaggatggagttcaacttacagcaaacttatacctgcccccagggtatgattcatcaaaagatggacctttgccatgtctagtttggtcctaccctggtgaatttaaaagcaaagatgctgctggtcaagttcgtggttcccctaatgaatttccagggattggtgctacatctcctcttctttggtttgtgattctgtctggtccgacaatcccaattatcggtgaaggcgatgaagaggccaatgacagtattacaaactattgcagatatgtggaacaactagtaacgagtgcagaggctgcagttgaggaagttgtcaaaagaggggtggctcaccctgataaaattgctgtcggtggtcattcatatggtgcattcatgacagctaatctgctggctcacgctcctcatcttttctgctgtggaatcgctcgctctggagcttacaacaggactctaactccatttggttttcagaacgaggatagaacactctgggaggcaacaaacacatatgtcgagatgagccctttcatgtctgcaaacaaaatcaagaaaccaattttacttatccatggagagcaggacaacaattctgggacattgacaatgcagtcagaccgattcttcaatgccttgaaaggtcatggtgcactgtctcgtttggtaatacttccttttgagagccatgggtactctgccagggagagtatcatgcacgtcctctgggagaccgataggtggttgcagaactactgtgtaaatggtactagcaaggttgactcagtgtcagaggctgacagtaaaaacaaaacattgtcagctagtggtggcagtgcagcccgtgaaggtctaaaccctgaggaactctcatcattaccaagatcgcttctgtggtga

SEQ ID NO: 2928 - DNA, 144 bp, Zea mays
  Peptide Sequence Number=SeqID_44707
atggagaagagccgggtgctggtggtgggcggcactgggtacatcgggcggctgtttttgtcatgctcgcctcggctctgggattcggataggtggtctgcagactaccatcagaaacttgggcttggtaacgtcacagtctga

SEQ ID NO: 2929 - DNA, 498 bp, Zea mays
  Peptide Sequence Number=SeqID_44708
atggcaaaaattgaaaggggaggcatcagaagtcttcaaggaaagggccatcaaagaaggcacttagaagggagaaagcaaacatgtgggagatgtcaacctatattcggaaggtggcctcagagtgtggacaacacaaagaagtacgacgtagcaaagaagaatgcaaagggaactttgccagagagagaggagggagtcgccgcgagagagagagaggagaatgagcagggaggtcgtcgcccgcccgagagagagagggaggacccacgcaacgccgtgaccatctccgacccgcgcgacgctgccgcgaccatctctgactcacgcgacgccaccgcgatctgcgccgacttgcgagacgtcgcgtcttccccgtacaacaccccaaggcgtcctcattgcgtcgccttatacctcaccaaggcgccgaggcgacgtcctaatggccgaagtggacgccttatgctcctaggtaaggcgaagcggacgccttga

SEQ ID NO: 2930 - DNA, 495 bp, Zea mays
  Peptide Sequence Number=SeqID_44709
atggagacatcagacaccacgacatgcaaggtactcgatgaattgcagatgatggaagcgcgtcttacagagaagattaatggctgttgtgacgacgtcgagcgccatgtggacgcgcgatgcgatgaactccacaaccacttcacggcacactgcgacaccatccgacagcaaatggatgtggtggctctatgtggcgaggagcggttgatggcgttggaggtgatgaagacggaggtcgatatctggaagccagatctggagaagaaacgaccatgcgtccacctgctcggaggtcatcccaccaacaggctgttaggccatcgtgctgacaaatatcaccgggaggatgagccggggctcagctttgtccagggctccaggctcacgaccctgtcaagggatgctcaaactgaggatgaaaagacacatcaattcggacctcttgagagcaacgcgctcagtcgtcaatgccggtttgaagtggcgcaatag

SEQ ID NO: 2931 - DNA, 792 bp, Zea mays
  Peptide Sequence Number=SeqID_44710
atggaccagagcggcaccggctgggcggactcaccggtggccaaggctggcggtggcggggctggggctctgcacggggtggccggccgggctggtgccacgccatgggaggtgctgagcagcgcacaaggactgggaagaacccttcgatcgcgcctcgacggtgccacgaagcctctcacccagcctatccggctatccgttcgtcaacttaacgcgaagcttccatctctgactaaatgccacaacgtcgtcgcccgccatccttccctgcgcaacttcgcgaccctgtcctcccaccctccctcccgagtcccgactgaggcagtgctcgtcgagctgtcggtcgcgctgtggcaactgggcgagggtgccgaggcagtggggaaggagggggcgctgacagagttggagaaccagcgcatcatagaggacgcggatgccatcgatgccgaggtcgcgggggttgagcaaagggtcagggagtcagtcagggagctcgaggttgcaagggcgtcaagtcacagccatggcgaggctctgggccgtcgtcgaggctgcgagcccgcgacgctggccagggctaccatgatggcgcagcagacgtctaggaatgtgacgaactcaatggcctgctgctcctcccgctcctcctccagccagtgcggtgtctggaagcagactccgccgcgtttgccaatagcttggtccacgcgcatgagctattcgatgttacgccgcagcggattgccaatgacttttgtccatacactggagctatttatttggtga

SEQ ID NO: 2932 - DNA, 447 bp, Zea mays
  Peptide Sequence Number=SeqID_44711
atggctggtaaccaccatcagcacaagctgcagagactgatgggcgcaattcaggaaaacaacgccactcgcccctctccgactgttgtgccacccgccagagtgaggctgacaacagctaagtccagcctcaggcgcaacaggaaactccgtcttgcccgaccttgggcctcgacctcaggaggaggtctccgcctcgcccgaccccagggctcggcctcggaaggtggtctctgcctcgcccgaccccaaggctcggcctcaacctcgacctcggaaggtggtctccgcctcgcccgaccccagggctcggcctcaacctcgacctcgggaggaatcgcgtcctcgctcgaccccggcctcggcctcaggaggagtctccgcctcgcccgaccttgggctcggaccgaccgcgccacgggggatacatcattaccctacctctag

SEQ ID NO: 2933 - DNA, 558 bp, Zea mays
  Peptide Sequence Number=SeqID_44712
atggaggcgggcctcgtcgccacgggcctgcctgtgcggcggcagcagctcggcggggccgcgccggacagggacggcggctgggcgggcaacgaccacagcacgctgatcgtggtggccacgctgatcacggcgctcagcttcctgctcggcctcagcatgcccggcggctactggcagaacgaccagacgttcgtgagcaacggcggggtggtgtaccaccgcgccgccggagaccccatcatgcgcgacctgcaccggccgaggtactgggtgttcaggggggccagctgggtcggggtgacgagctcgatggtgatgacgctcagcctgctcgtgcggatggccgtggactcgcgccacgtgctgtggtccttctcggtggcctactccagcctcatcctcaccttcatcgtgtcgcagtccaggacgcacctgtcgctggacatcatcatctggctggccctcctcgccttcatctggctcgtcatcagcctccacccggaccaccgggcgcgcgtcgtccgggtgctcttctgcttcaaccgcgacaactga

SEQ ID NO: 2934 - DNA, 1278 bp, Zea mays
  Peptide Sequence Number=SeqID_44713
atgagacgccgatggggccaagccgagctcacgctggcagtggtggacgccggtcgacggagaggggacctacgaggctacgacgaatggacaggagaggagtggagaggtgaacgagatgtcgcggagagcgaggcaagcgagagcgcttcgaagctggttgagagacgagaaggggagcgattgctggggagtgccggagtggggagcgagcatcgcagtctcgtggagggagaggaggagaatgggacgctgatacagggaccacctgtcagagtggcggggtgggcagaacgaagaggaggcagaactgaaaagggacggtttgatgctcaaaagtgtttacaaccaagtttttttgttcacaaatccatgaatcacatcaggcacacttctgtgttcaaagtgtcaagtatcacaacacataacacggaagctcacgatcaggtggccgatgcgactgaggctgcgaaatttgtcgtgaggcagttgcgttatgtggcatctggcgccttggtccattccgtgacctcgcggttgcgtgctgagaaggctgagctaaaaaataaaattgagcgcctccgaaccgagaacaccaatgatgtgcgggagaaatcggcagccgatgtaaggagccaatgtctggcggataaggcaaacaatcttgaaaaagagaatgatgaactgagtcggcaactaggcgagacctgccgtgagaagctagatgcgggtacgcgggctagcgtgaagcgggcacactcgttgttcgtcgaggcctatcgcgatctaggtgctgagacaacccccttcgataggtccgatgggctgatgtcttatgcctcccttgtcttctatgaaggtgccgccaacgccctatcccacgaagggtgtcaccattttgaggtctttgaacgaagcaatcatgactttgactgggaggttttccagattgaagacatgtccctgaagcaatctgctggaacactatttgaccgaatgtggggtactcacgattgctctgtggttagggagaggactgcccaggcgatggagcaggtctcgctaactactgtggactatgttggtgttgaaacgggcatggaggagcagccttcgtgggtaggggctgctattggtgagcccagcgccagggagacttcacaccattctgctgacgatgttcgaggagagttgagtggagttcacaattttgccagtgatgaggagttggagcttaggtcgctctttgaggacaaggaccttgaactgctactataa

SEQ ID NO: 2935 - DNA, 159 bp, Zea mays
  Peptide Sequence Number=SeqID_44714
atggctgacgcacagacgatcccacacccgagtctaaatcttgagccaagctggtgttatagggagagaaggtctgagcttccgactactgtggaacatcgtgaggtccttgatcctaaaactaccaccaagatacatgctcttgggagcaaatattaa

SEQ ID NO: 2936 - DNA, 198 bp, Zea mays
  Peptide Sequence Number=SeqID_44715
atgtcgtgcgcgtccgacgactactatatcaaggactatggtgtcatcttggcgccagagcctagccaagagtcatcggtactcgccatgtcgtgcgcgtccaacgactactatatcaatgactatggcgtcatcttggcgccagaggtgacacagatgaggaccaacaacaatgaccactcgccatcatcggggtag

SEQ ID NO: 2937 - DNA, 690 bp, Zea mays
  Peptide Sequence Number=SeqID_44716
atgtcggcgtttcgagacaggggggtccctaagccgacgagtgagtgtgctgcgtgccccagcccagatgggtcgagcgcgtgggcgagcgcgaaggggggagaggcgaggtggccggagtcgagcgtgagagaggtcccgagccaaggggtcgggcgaggcggaagtcgttcggccgaggccagggcggagtccgagccctggggtcgggcgaagcggagtttcgtcgtcttccgggtgctagcccgagtccgagccctggggtcgggcggagcggagttcgccgtcttccgggtcttagcccgagtccgagccctggggtcgggcggagcggagttcgccgtcttccgggtcttagcccgagtccgagccctggggtcgggcggagcggagttcgccgtcttccgggtcttagcccgagtccgagccctggggtcgggcggagcggagttcgccgtcttccgggtcttagcccgagtccgagccctggggtcgggcggagcggagttcgccgtcttccgggtcttagcccgagtccgagccctggggtcgggcggagcggagttcgccgtggcgcctttggcaaggcctgactgcctgttagactcactctgtcgagtggcactgcagtcggagtggcacaggcggcgctgtccttctgtcagactggccagtggagcagtggagtga

SEQ ID NO: 2938 - DNA, 336 bp, Zea mays
  Peptide Sequence Number=SeqID_44717
atgatgcccacaacaattgaccctggattaacagagttctggtggatcgacaccagggctatccctaaggtgtcgagcccgcgttctgtcgaagctaagaccgtaaagatcaaacggacccctgggcaaggaaaagatcaaaggggctggattcttgaacttgcagcaaggatagctatgaacactagatgcagtcgtggctcccacaagaagatccatggaggttcacagggtatggtcatgcagggtgaagtttatccatggccaaaagagaggggttgctcatcagatttcttcctttctgacagggacattttgggcaccattatctcctga

SEQ ID NO: 2939 - DNA, 222 bp, Zea mays
  Peptide Sequence Number=SeqID_44718
atgatgcccacagcaattgaccccggattaacagagttctggtggatcgacaccagggcaatccctgagggaaaagatcaaaggggctggattcttgaacttgcagcaaggatagctatgaacactagatgcagtcgtggctcccacaagaagatccatgcaggttcacagagtatggtcatgcagggtgaagtttatccatggccaaaagagagggggtaa

SEQ ID NO: 2940 - DNA, 1380 bp, Zea mays
  Peptide Sequence Number=SeqID_44719
atgcctctcgccacccttctgctcccctcagtctctacgcccaccgccggcgaccaccgcacccacagccggcggcatgaccaccaccacggcagcaagcgcaagaagaagccgccgccgccgccatcaccacagccgtcgctcccgttggcaccgagaaccccgccaccgccaggcgcaccaagccccaaggtccgtgcggcgggcaagaacaaccacgcccagtaccagtaccagcagcgccgaggccagccgacgaagaacagggccgcggcggcgtcctcgtcctgggagcaggtgaagagcctgctgagctgccggaccgcgacggcggcggcgcgcgtgcacgacccgtcggcgctggcgcggctccgcggcgcgtcgctctgcgccatgcgcgacgtcgtgctctcctccgcgtcgggcgaccgcgacacggcaccgctgaaccgccgccgcgccccgtcctcctccgctgcctctggcgccggcagcagcagccaccactcctccctgcggggcctctccggctgctacgagtgccgcgccatcgacgtggagcccatgtcgaggcggcggtacccgaggccgagggagctgtgcgcgtgcccgcagtgcggcgaggtgttcaccatggccgacagcttggagcaccaccaggccattcgccacgcagtgtctgagctgggtccggaggactccgggcgcaacatcgtggatatcatcttcaactcgagctggcagaagcggggccgccccatctgccacatcgaccgcatcctcaaggtccacaacgccccgcgcaccgtcgcccgcttcgaggcctaccgcgacgccgtccgctcccgctcccgctgccgcgccgccgcccgggtagcggccgacggcaacgagctgctcaggttccactccgcgccgctcgcgtgcgcgctcggcctcggcggcgcgaccgccctctgctgcgccggcggtgcttcgtcgccctgcggcgtgtgcacggccatccggcacggcttcgcgccgtgggcgggcgcgcacccgctcggggtgcgcaccacggccagcagcgctcgcgcgcacgactgcggctgctcggcttctccatcgtcggtgcagcagacccagcagccggcgaacgacgctgctgcctgccgcgccatgctggtgtgccgcgtcatcgccggccgggtccgtcgcggcggcggcggcggtgccacgtcgaacgctgccgatgaggatcaggaaggcccgttcgactcggtggccgtcgaggacgccgtcagcagcagcatgtacgggaacctcgaggagctcttcgtggccaaccccagggccatcctgccctgcttcgtcgtcatctaccgcgtccttgatgcttga

SEQ ID NO: 2941 - DNA, 219 bp, Zea mays
  Peptide Sequence Number=SeqID_44720
atgtcggggactggggggggggggggggcgggccaggagttgtcggtggactactacctggtgggtggtgtcaccatgtttgatgcccagactgggctgccacctgctggggcggaggctgggcagctggcggtggtaccgtcgactgtgcccgccggcctaatgggtacaacgaagggcgacatagggacctcgctggacccttggtcgaaattttga

SEQ ID NO: 2942 - DNA, 360 bp, Zea mays
  Peptide Sequence Number=SeqID_44721
atggtagagggcaggaccaatgtcggtgttgggggctggggcgccatgggaacgagtttgagggggagagggtgtggggagctgtcaacggttggccctgctgtcaccggcgagcgatgctggggagggcgagctggagcagggaccaggggcgcggtccgagctggggaagatggagcagagaaggagcgctccatgggagatgatgcgagctggagggagctccggccatggagggacgttgagggaggagcgcagcagggagcaaggcaaggtcgcggtcgagcgagcggtagcagggagaagcgcacggctgggggagaagacgagagagagaaacacggctggggaagaagataa

SEQ ID NO: 2943 - DNA, 273 bp, Zea mays
  Peptide Sequence Number=SeqID_44722
atgggagtgattccgagcagagcaaacgcacaaccatggaagatagggcagggcggcggccatgaaaactccaagccggcgcgacactggaggacagagggaaggtcgccagcgagcaaggagacgaacgccgagcaggaacgagatccgggctgggagatgggcagggatggagctgggccgaacggctgccagcagggggaagtcgccatagacgagcagggtaggagggagctgggcgcgcgaccatggagatggcggccaggagagtga

SEQ ID NO: 2944 - DNA, 282 bp, Zea mays
  Peptide Sequence Number=SeqID_44723
atgggcgacaagaagaaaaagaagatgaagaaggtggtctactatgagatcgactcatccgacactcaacctccgatgtcaagtcaacatcttcaaagcgccaagagcgtaagaagtatagcaaaccaccaacttttttatgttgaatactattctatgtggagtgataaaatgaggcaccatctaacttcactccacgaaagcatttgggatatagttgaatttcgggtgcaagcaccacaggtgtgcgatgaggactatgactctgatgaggccgcctaa

SEQ ID NO: 2945 - DNA, 276 bp, Zea mays
  Peptide Sequence Number=SeqID_44724
atggcgtctgcgtgtggcgcactacgtagatcgacgtttcttgcatcgaaggtgattgtgtcaaagctgatccgtgaagtcctcttatttgggtgctggtggggggtggtggaggattttggtgatgtggaggtggaggtagggcttggatctcttggtgttgttggtacatatggttgggctggtgggggtggagtggttcattgtggtatctttgctggtggtattgttggggatgggcagtccctgttgggatgtgcggactcttcacagtga

SEQ ID NO: 2946 - DNA, 282 bp, Zea mays
  Peptide Sequence Number=SeqID_44725
atggcccccaagagaccaaattcaaaggccgccacttccatcaacgatgcagcgaaggcggtccttctggctaacaacaaaggcaagactcccattgcggacgacatcactcaagaggccttcgacgatgaggcagtcaacatcaagaggcaacaccaaacaatttgcccacactggagggcaccgcgtgcacctgcagctctgagggggtaccgcaagcacctccgccgggattcatccacccagaggcagaagacatcgtcgaagatagcgaaatcatag

SEQ ID NO: 2947 - DNA, 636 bp, Zea mays
  Peptide Sequence Number=SeqID_44726
atggtgccctcactcctcgccgccatgtccacctcgcccttcctagccagcagcggcagcagccgcaggccgctaggcgctgcccacacccgacgggctggactgcgcgtggccgcgcttaagtacgaccctgccaagaaatctgctggcggtgtattgctaccaaaatctgctgttaagtttgagagatatctgatgggtgagattctatcgatcggtgctgaagtcagtgaagttgaggctgggaagaaggttctcttctcagacatcaatgcttatgaggtggagcttggtactgatgacgagaagcactgcttctgccgcgtccacacagtggtgttctgcctcccgacgctcccctcccgggatctcggtcgcgctttcgtcgccgccatcatcggccccgacatcctcccctccgctccctcccgggatctcggtcgcgctttcattgccaccacgcccatgcccctccattctctgtgttgtgcccttccattctccgcacagtgcccctccatcgttcgtcccctcgcccccatccgtcgtctccctcgctccgctcggacaatcgccgccttccccaacgccatcgagacaatcgccgccttccccctcgctgcccccacgatttga

SEQ ID NO: 2948 - DNA, 894 bp, Zea mays
  Peptide Sequence Number=SeqID_44727
atggctgcattgctttgcagccccaacaagctccggcgaagcgtacttctcgtcggcgtagcgctgatgctagggatgcacctgagcgcggcgaccatggacaaggacatcgagctcatctggggcgcaagccacacctacttcttcatggacggcgagaccgagtcgctggcgctgtccctggacgaccagcagggctcctgcttccggtccaaggacatgtacctctacggcaccatcagcatggagatcaagctcgtcgatggcaactccgccggcgtggtcgccacagcctacacgatctccgaaggcccctggtcgtatcacgacgagatcgacctggagttcctcggcaacgaaaccgggcagccaatcacgctccacaccaacatcttcgtcaacggcgtcggcggccgggagcagcagttctacctcccgttcgaccccgccgccgactaccacacctacaccatcgagtggaaccccaagtacatcctgatcaaagtggacgggaaggcgatccgcgcgttcaagaactacgaggagtacggcgtggcgttcccgacgtggcagcagcagcgggtgtacggcagcctgtgggacgcggacgagtgggcgacgcagggcgggcgcgtcaagaccgactggtcggaggcgcccttcgtcgcctactaccggaactacaccttcgcctggtgccagccgtcgcccggcgtgtcgtggtgcggcgccgagcccaaggactcggcgcgcttcgacctggaccagcggacgctggacgacctgcgggcggcgagcgaccagtacatggtctacgactactgctccgaccacaagaggttcaacgagtccgagttccccacagaatgctcgctgcaacgacaggggatatga

SEQ ID NO: 2949 - DNA, 1194 bp, Zea mays
  Peptide Sequence Number=SeqID_44728
atggccgttcctcctcctcttctcttcttattcatcctgttatgtatgttcagatgttgtcatgtaattatcactgtatctgacatggatgagcacatgggaagacgaacagtcggcggcctcctcttcaccaagggaggatccatccttctcttcagagaagacggctcgcgccccaaggccaagaactgctgcacgcgccatggctgtagcggtcagcatcctgctgacagagccaagggcaaggaggtgcacagggcagcagcggtgggcagtgaatcgacaccggctacccctcggagatcacaagcttttaggaagcccaacagaaggcctccacatgaaggcagtgcctcaggcagcatcgtcagggatgtaggaggcccttgtagcgaaaccggcagcgggtcaagagatgctcctgggcgtgatctgcttgctcggcttaaggagagggtcaacacatcaaggaaacgatcgttgaacagggagaacagcccgcagtcgccgagtggactcagtgtctgtgccagttccccgagcaacagtcggtcagtctcaaggccgtcgcaccggacagcttcgaggataagagaagctgacgaaggcgcgaatgcaggagctgacagtgtagtgcgcagaaatgctgctaggaggggttcagagaggagtgacgatgacttgctgctggtcgagcaggtaacaagaaaccaagcgccttctgaagggtttctctctggattcatggctagatacagaagcgatcttcagggagagctttcgtccctggacgacagcatggaggatccaaatggatacttgcgctttgatgtgggcgggattgaagagctcgagaactatttcatattcaatgatcggcatagaggaatgaggatggatatcgacggcatgtcctacgaagagttgcttgctttgggggagcgaattggtaccgtaaacacaggtctttcagacgacgcgttatccgcgtgcctgaacaggaggctctacatgcccacagcttcaggttctcatgaagattgtgaaagaaaatgcagcgaggagtatttagcaggcgaggaggtgggcgagatggcatgtaaacactactaccacctttcctgcatagatcactggcttcggcagaagaactggtgtcctatctgcaaatctgtcgccctgaaaatcaactag

SEQ ID NO: 2950 - DNA, 1314 bp, Zea mays
  Peptide Sequence Number=SeqID_44729
atgaccgcgcgcacgggcgccgggatcctcgcggcggccagcctcgacgacgcgctcccctttgggttcccctggccgcctctgcttctgacggccgcacggttgctctgctctctggtggtgacaagttttattggcctgagcgccgccgacggctgctgctcagaatttcctgcgttctggatgggcgggcgggcgggctctgctttttatcccgtgcctttttgcgagaatgcctcgtgcccgtggcggctcgccagtccaactcgaacacttgtgggcggcagggcgcgcacgcgtacaggtacaggagagtgcctctcggtctcggctccgacagggaaatttgaccccgagcgcgacccgcaccgcccatgccgcggttacgtaggcatgcccacacgagggctgggctgttgcccggccggcgacggcgacctaaccttcggccgcatgctggtgtcacggtccactctcgttccgtcagggttaggtatcctgctaaagttcgacttcgacacggaggctgtttccacggaccacggaccgtcaaattctgagcaccgtgctggtcgcttcaatggcatctcgggcgcgcctgccgggctcgccggcctcgatcgccatcctcatcctctccttcttccaaggtacgtacgtggtggctctgattcatttcgcggcagcccgtgcctggtgttctttcccttctgccagtaccaatcgatcccgcctgttcggattcgtgggggaggaagggcaagtgtgactgaaccggtgtccgtttccggtgcggtgctcgcgtccgtcgcgcagggtcggtatgcggcatcatgttcaccttcaccaaccgctgcgcgcgacacggtgtggccgggcctgctgtccggctcggggacgccgccgctggagaccacgggcttcgcgctcgcgccggggcagtcgcgcccgctgtacgcgccgcaggggtggtcgggccgcttctggggccgctccgactgcaccttcgacgcctccggcaaggggtcctacaccacgggcgactgcggctccggcgaggtcgagtgccgcggcgcgggggcgtcgccgcccgccacgctcgccgagttcacgctcgacggcgacggcggcaaggacttctacgatgtcagcctcgtcgacggctacaacctgcccatgctcgtgcagcccgccgcggccggctgccccgacacggggtgccttgtcgacctcaacgagcggtgccctgatgagctccgcgccgacggcggccgcgcctgccacatcgccttttcacctaattttggtctataa

SEQ ID NO: 2951 - DNA, 1806 bp, Zea mays
  Peptide Sequence Number=SeqID_44730
atggccatatacttcgccccgcttccccaatccctacccggatcgttctctctcctaagtatttcccaatttgatcggcaagtgcagccctctagcctcagttatagcggtttgatggtatggcgtattgagaattttaagccagttcctgtgccaacatcattacatggaaaattttatatgggtgattcatatatcatcttgaagacaacagctttaaaaaatggttcctttcgccatgacatccattattggcttggtaaagacactagtcaggatgaggctggaactgctgcaattttaactgtggagcttgatgctgcgcttggaggacgtgctgtccagccttgcatcatgccacaatcaggaggggtagtttctgggttcaaccatgtagaagtcaatgatcagaagcatgttacccgattatatgtgtgccgaggaaaacatgttgtccatgttaaagaggtgagctatctaaagcactatatttttccaactagaaaggttccttttactcgttcatcccttaaccatgaggacatatttattttggataccaagtcaaaaattttccagttcaatggttctaactcatgcattcaggagagagcaaaagctcttgaagttgtacagtatatcagagatactttccatgagggcaagtgtgaagttgcaggggttgaggatggaaaattgatggctgatgcagaagctggtgaattttgggctttgtttggtggcttcgctcctcttccaaagaagacactttcagaggataacggggaagacaaggaaatcatcatcaaattgatgtgcatcaaccaaggaaaattggagcaaattaattttgaatccttggcgcgtgagttacttgagccaaacaaatgctacttgcttgactgtggtgctgaaatatatgtatggatgggcagaagtgcttctttgcaagaaagaaagggcgcgagcaaaattgctgagaaactactcattgatgctagtcgaacaaaatcacatgttatcaaagtgatcgagggattcgagacagtcacgttcaagtcaaaatttattgagtggccacccacacctgatttgaagttatcatctgaggatggaagagtcaaagttgcagccctcctcaaatctcaaggattagatgttaaaggcttgatgaaaactgcacctgtaaaagaagaaccccggccttacattgattgcacaggtcatttgcaggtatggagggttaatggaaatggcaagactcttctttcatgtgctgaccaatcaaaattttacactggagattgttacatttttcaatacacatatagtggagatgataaggaggaatgtcttattggaacttggttcgggaagagaagcattgaggtggagagggtttcagcgttgtcactggctagcaagatggttcaggcttccaagttccaagctatccaggcccgactttatgaagggaaagaaccaattcagttctttgtcatatttcaaagttttcaactattcaagggtggacttagctctggatacaagaactttgttgttgaaaatgatattgtggatgacacttactctgaaggtgggattgccctattccggattcagggttcaggatcagaaaacatgcaagcacttcaggtagatccgctggcttcgtccttaaactcgtcctattgttacattctacataatggaaacacagtgttcacatggattggcaatgttacgacctcattggatcatgacttggttgagagacaactagatgtaattaagatttcctcatga

SEQ ID NO: 2952 - DNA, 204 bp, Zea mays
  Peptide Sequence Number=SeqID_44731
atgaggcccaatacaacggagatttcccttttcttgcaaggctcagtcagtggttccatgaaggaacgaaagggccaaatgtctctacttgcctggcgtgctttagctggatcacacatgcaggaagtactgctcaagaagggaaaaactggaagcaccgctcaagacagctacagcctacagctgcagctattttttacatag

SEQ ID NO: 2953 - DNA, 243 bp, Zea mays
  Peptide Sequence Number=SeqID_44732
atggcccatgggccatggcctctcggcgacccttccgcgggccatgacctctcggcgacccttccgccccggctctctctcaggtggtgccacctttgccgtcggatgcggaacggacgcggggaatcggggtggtcggcgtctttcgtggctagattaccggggtggctggctgggtttcctttggccacgcccacgcgccacagccggacgacagtaccattattagcgtcaactgtataa

SEQ ID NO: 2954 - DNA, 816 bp, Zea mays
  Peptide Sequence Number=SeqID_44733
atgggcaggagtgtgagtgatcctgtcaggacagtggaaaagctgctgctgcttctgctgctgagacgacgggtgcgatcgaaagaaagcggcgcgctgcgcctgtctgccactgcagccggccttcacggaatcacggacacggggggaaacgacggcctcgccaccccgaagaagagaacagcatcagcctccctccccttcgccgctgctgagcccacagttttagaagtgacacggcgtgccgctgccgggtccttgctactgaccaccggccccgtggtgcgtcggtctcggaccgtgacagccgcgacgccgtggccgcgacgccgggtggggtggtggacgagcgccggagcccgcgcgcccgggaacacgtcggcagttgcgcacaggcggacgggtagaggtgaggcacagcgcgcgggggcgatactagggagtagggaagaagggcgcgcgcctaggtgtcaccggccggttcagatgcctgagcagacgcgccgaatggaaacaggcagaggcatcagccgcggagtagacgaatcggactcggttttggcgtcgtccggggaaacaggcagaggctgtgagagcctagaggacgggacgacacacgcgattctcacccgcttccttgcctcgtcgtgcgtgccttgctttgtcgatctccggccgcaggcggcgtactacgggtacggccacggcgtgccgtgccgagccagccgagctgttcgtgtcggcggcccacccaacccatgcggtcacactcacacatacgacggatgcgccgtgcgcgcaacagtccgtgtgtaa

SEQ ID NO: 2955 - DNA, 339 bp, Zea mays
  Peptide Sequence Number=SeqID_44734
atggacgacaagatgtcacgcccgaagtacattcagaacaccatcttgcgcgttgcgaccaactttgtgactactagttcggaacttgcccagccgttgttggctgctggagccaggcctagtaccgtccatgatctgtggcaagaagaaggcagttccagacagacagagatagctctggttctacggcccccagcggcgtaccctgccaggttgcgggtcgccaacaggagccaatataaaactgtgcccacatggccaagaggtggtggtgtgccgcgaccgcgagccacctgctgtccctttcctcttacttcccgtgacgtcttcaccgtgtga

SEQ ID NO: 2956 - DNA, 141 bp, Zea mays
  Peptide Sequence Number=SeqID_44735
atgggcccaagtgccgcggtagcagcccaggcatggcccgttgccttgctcgccgtgccggcccgatacatagggaaattaagtaagggtgatactgaagccgagcatcaaagcctcaatcctcgcccaagccggctctaa

SEQ ID NO: 2957 - DNA, 1641 bp, Zea mays
  Peptide Sequence Number=SeqID_44736
atgtcctcagaggccagcagcgtcgtcgtcgccgacgagaatggagcggcggagacggtcggcgtcgggcggtacgtggaaatggagaaggaccaagagtcgagcgcagccaagtcgcggctctccggcctgctctggcacggcggctccgcctacgacgcttggttcagctgcgcgtccaaccaggtggctcaggtgctcctgaccctgccctactcgttctcgcaactggggatgctgagcggcatactgttccagctcctgtacgggctgatgggcagctggacggcgtacctcatcagcgttctctacgtggagtaccgggccaggaaggagagggagaaggcggacttcaggaaccatgtcatccagtggttcgaggtgctggacgggctgctcgggaggaaaaaaatttgttgcagccgggctgcaaacggcctggtttgcagcccggctgcaacaaatttttttccgctcgggaggcactggaggaacgtcggcctggccttcaactgcacgttcctgctcttcggctcggtcatccagctcatcgcatgcgcaagcaacatctactacatcaacgacaagctggacaagcggacgtggacgtacatcttcggcgcctgctgcgccacgacggtgttcatcccgtcgttccacaactaccggatctggtcgttcctgggcctcgtcatgaccacctacacggcgtggtacctcgccgtcgcgtccctcatccatggccaggttgatggcgtgaagcactccgggccgaccaagatggtgctctacttcaccggggccacaaacattctctacactttcggagggcacgctgttaccgtggagatcatgcacgcgatgtggcggccgcagaagttcaaggcgatctacctgatggcgacgctgtacgtgctgacgctgacgctgccgtcggcggccagcgtgtactgggcgttcggcgaccagctgctgacccgctccaacgcgctggcgctgctcccgcgcacggcgttccgcgacgccgccgtcgtgctcatgctcgcccaccagttcatcaccttcggcttcgcctgcacgccgctctacttcgtctgggagaagctcgtcggcctgcacgactgccgcagcctctgcaggcgcgccgccgcgcgcctccccgtcgtcgtccccatctggttcctcgccatcatcttccccttcttcgggcccatcaactccgccgtcggctccctcctcgtcagcttcaccgtctacatcatcccggcgctggcgcacatgatcacgttccggtccgcaacagcccgtgagaacgcgatggagccgccgccgcggctgctggggcgttggacgggcgcgtacatgatcaacgcgttcgtggtggcgtgggtgctggtggtcggcttcggcttcggcggctgggcgagcatgacaaacttcgtccgccagatcgacaccttcggcctcttcaccaagtgctaccagtgcccgccgccaccgcccctgccgttccccggcggcggcctcggcaacatcacgatgccattcaacggcgacgggctccctcctaccccggctccttcgccggcgcattacttcttccgccaccaccggcatcacagccaccaccgcgggctctga

SEQ ID NO: 2958 - DNA, 756 bp, Zea mays
  Peptide Sequence Number=SeqID_44737
atgggccagacgcgggacccactcgagtggtttccctttggcacgccgagttgtgagatcgacgcccctagatctcgatttcttaaaataaaatcatacagcgcagcagccaacacgggcagcccacagacaaagttgacaaagggcgcccaacccacggcggaaagcgacgcgcgccagataaatggcgggggagccagcagcaacctacttcctgcttcctccagaatcggtcagccgcaatccttccaccccgtaccacgcctccccctacccccaccaccaacaagcatgatttccccacgccccgcgctctcccccagcttcctcgccttccggtccggctccccggccgcgtcgccgccgtcctccccgcgcctccacgcgccgccgcccctctccgcctccttctccaccgtcgccaccgcggcaccgggccacgcagctgccagctccttctacgacgtcctcggcctccgccccggggccagcgcgcgggaaatcaaggccgcgtaccgccgcctggcgctcgccgtccacccggacgccgccccgcaccccacatcgtccgccgaggacttcatccgcgtccacgcggcctactccacgctctccgatcccgacaagcgcgccgactacgaccgccgcctcctcctttccggcgccacagtacggcgcaccgtcgctctaggacgctcgccctcgttcccagcgcaccgttcccgccggacatgggagactgaccagtgctggtga

SEQ ID NO: 2959 - DNA, 687 bp, Zea mays
  Peptide Sequence Number=SeqID_44738
atggccatggacgactcatcctccggctccgagcccacctcctcgtcctccgcggaggctcctgcgtccccgggtaccaccgcgtcgtcgtcctccgactcctcctcctcctcctccgccacggcggccagcagcaagaagcgccggcgcaccacggacgggcagcaccacccgacgtaccgcggcgtgcgcatgcgggcctggggcaagtgggtgtcggagatccgggagccgcgcaagaagtcgcggatctggctcggcaccttcgccacggccgagatggcggcgcgcgcgcacgacgtggccgcgctggcgatcaagggccgcgccgcgcacctcaacttcccggagctcgcggacgagctcccccgcccggccaccgccgcgcccaaggacgtccaggccgccgccgcgctcgccgccgccgcagacttcccggcgcccgccgccaataataatgcagccggcgccagggaccccgatggcggcgcctcgccggcggtggcaccgctggacgacgacgcgctgttcgacctcctccccgacctgctcctcgacctcagacacggggcctcctcgtgccagctctcgtgcgcgccgtcgtggccgtacgacgacgtgtccttctccggcaccgccgccgccggcgcgttccgcctggaggagccgctgctgtgggactattga

SEQ ID NO: 2960 - DNA, 813 bp, Zea mays
  Peptide Sequence Number=SeqID_44739
atggcgcctcctgttgacgtggtcggtccgtgccctaggttgggcgaggtggaggctcctccgaggtcgaggtcgactctgtcttccaaggtcgaggtcaagtccgagcccccgggtcggacaaggcgaagaccgtcggctgaggccagggctgagtccgagccctggggtcgggcgaagtggagttcgtcgtccttcggggctgagcccgagtccgagccctggggtcgggcgaagcggagttcgtcgtcttccggggctaagcccgagtccgagccctggggtcgggcggagcggggttcgtcgtcttccggggccgagcccgagtccgagccctggggtcgggcggagcggagttcgtcgtcttccggggccgagcccgagttcaagccctggggtcgggcggagcggagttcgttgtcttccggggccgagcccgagtccgagccctggggtcgggcagagcggagttcgtcgtcttccggagccgagcccgagtccgagccctggggtcgggcggagcggagttcgtcgtcttccggggccgagcccgagtccgagccctggggtcgggcggagcggagttcgtcgtcttctggggtcgagcccgagtccgagccctggggtcgggcggagtggagtttcccatggcgcctagggccggacttggctgctgtcagcctcactctgtcgagtggctcagcagtcggagcggcgcaggcggcgctgtcctcttgtcagaccggtcagtggagcggcgaagtgactgcggtcacttcggctctgtcgactggagggcgtgcgtcaggataa

SEQ ID NO: 2961 - DNA, 165 bp, Zea mays
  Peptide Sequence Number=SeqID_44740
atgggagcatcaggcgaagggtacttcggattcgacgtgcatcagtctccgctcgactcccgacaggagagtcaagcgcagggtcccgacaataagggggctcgttgcagccccagttgcaccccgaaggccttccctccaacagcgaaggtgaaagtcgcctag

SEQ ID NO: 2962 - DNA, 423 bp, Zea mays
  Peptide Sequence Number=SeqID_44741
atggggaccctccctggcgggctctttgccgagtgtcccaactggcactcggcaaagaggtcggctttgccgagtgcttacgggcagacactcggcaaagatatcttcgttgccgagtgcttcgccgagtgctaccggcactcggcgaagctattgattccggtagtgcctatcaccggttcaccacccgagcccatctccttgcacacaccgccgccccatcccggtcctcatcggcgagatcctctccctcctccacctcggcttcgcgcgcgtcgccaccccccatcccctcacgcgagccgccccaccatctcggtcctcgtcggcgatatcctctccctcctccacctcggctccgcgccgttgtcggctcttgctctcacctccttccattcccctgaaacgcaaagcggagtctag

SEQ ID NO: 2963 - DNA, 3207 bp, Zea mays
  Peptide Sequence Number=SeqID_44742
atgcccggcataccgagggatgtcgccgagcactcgctggatattcgggccggagcccgacccgtcaggcagcctctgcgtcgattcgacgaggagaagcgcagagtgataggcgaggagatccacaagctaatggcagcagggttcatcaaagaggtattccatctcgaatggcttgccaaccctgtgcttgtgaggaagaaaggggggaaatggcggatgtgtgtagactacactggtctcaacaaagcatgtccgaaggttccctaccctctacctcgcatcgatcaaatcgtggattccactgctgggtgcgaaaccctgtccttcctcgatgcctactcaggttatcaccaaatccggatgaaggagtccgaccagctcacgacttctttcatcatgcccttcggcatgtactgctatgtcaccatgccgttcggtttgaggaatgcgggcgcgacgtaccagcggtgcatgaaccatgtgttcggcgaacacatcggtcacacagtcgaggcctacgtcgacgacatcgtagtcaagacaaggaaggcttccgacctcctctccgaccttgaagtgacattccgatgtctcaaggcgaaaggagtcaagctcaatcctgagaagtgtgtcttcggggtgccccggggcatgctcctggggttcatcgtctccgagcgaggcatcgaagccaacccggagaagatcgcaactatcaccagcatggggcccatcaaggacttaaaaggcgtacagagggtcatgggatgtctcgcggccctgagccgcttcatttcacgcctcggcgaaagaggtctgcctctgtaccacctcttaaggaagaccgagtgtttcgcttggacccctgaggccgaggaagctctcgggaacctgaaggcgctccttacaaaggcgcccatcttggtgcccccagctgatggagaagccctcttggtctacgtcgccgcgaccacccaggtggttagcgccgcgattgtggtcgagaggcaagaagaagggcatgcattgcccgttcagaggccagtctacttcgtcagcgaggtgctgtccaagaccaagatccgctacccacaagttcagaagctgctgtatgcagtgatcctgatgaggcggaagttgcgacattacttcgagtctcatccggtaactgtggtgtcatccttccccctgggggagatcatccagtgccgagaggcctcgggcaggatcgcaaagtgggcggtggaaatcatgggcgaaacgatctcgttcgcccctcggaaggccatcaagtcccaggtgttggcggacttcgtagccgaatgggtcgacacccagctgccggcggctccgatccaaccggagctctggaccatgtttttcgacgggtcgctgatgaagacgggagccggcgcgggcctgctcttcatctcgcccctcgggaagcacctacgctacgtgctacgcctccatttcccggcgtccaacaatgtggctgagtacgaggctctggtcaacgggttgcggatcgccatcgagctaggggtcagacgcctcgacgcccgcggtgactcgcagaacgtcatcgaccaagtgatgaagaactcccactgccgcgacccaaagatggaggcctactgcgatgaggttcggcgcctggaagacaagttctacgggctcgagctcaaccacatcgctcggcgctacaacgagactgcgaacgagctggctaaaatagcctcggggcgaacaacggttcccccggacgtcttctcccgggatctgcatcaaccctccgtcaagctcgacgacacgcccgagcccgaggcaccctcggcacagcccgaggcaccctcgacccggcccgaggcgccctcggttcagcccgaggtaccctcggcccccgagcgcgaggcactgcacgtcgaggaggagcagagcggggccacgcctgatcgaaattggcagaccccgtacctgcaatatctctgccgaggagagctacccctcgaccaagccgatgctcggtgggtagcgcgacgcgccaagtcgttcgtcttgctgggcgatgaggaggagctctaccaccgcagcccctcgggcatcctccagcgatgcatctccatcgccgaaggacatgaactcctgcgagagatacactcgggggcttgcggccatcatgcagcgcctcgagcccttgtcgggaatgctttccggcaaggcttctactggccaacggcggtggctgacgccactagaattgtccgcacctgcgaagggtgccaattctatgcgaagcagacccacctgcccgctcaggctctgcagacgatacccatcacctggccctttgctgtatggggtctggacctcgtcggccccttgcagaaggcgcccgggggctacacgcacctgctggtcgccatcgacaaattctccaagtggatcaaggtccgacccctaaacagcatcaggtccgagcaggcggttgcgttcttcaccaacatcatccatcgcttcggggtcccaaactccatcatcaccgacaacggtacccagttcaccggcaaaaaattcttggatttttgcgaggatcatcacatccgggtggactgggccgccgtggctcatcccatgtcgaatgggcaagtagagcgtgccaacggcatgattctacaagggctcaagccccagatttacaacgacctcaacaagttcggcaagcgatggatgaaggaactcccctcggtgatctggagcctgaggacaacgctaagccgagccacgggtttcacgctgttcttcctggtctacggggccgaggccatcttgcccactgacctggaatacggctccccgaggacgagggcctacaacgatcaaagcaaccaagctagccgagaagaatcgctggaccagctggaagaggctcgggacaaggccttactacactcggcgcggtaccagcagtccctgcgacgctaccacgcccgaggggtccggccccgagacctccaggtgggcgacctggtgcttcggctgcggcaagacgcccgagggaggcacaagctcacgcccccctgggaggggccattcgtcatcgccaaagttctgaagcccggaacatacaagctggccaacaatcaaggcgagatctacggcaacgcttggaacatcaaacagctacgtcgcttctacccttaa

SEQ ID NO: 2964 - DNA, 1797 bp, Zea mays
  Peptide Sequence Number=SeqID_44743
atggacttgtgtggccatggtgggaggtgttggcttgccagagaacgagaaaggaaagaccgaggaaggaggggggcctttgattctttattggctgccctcgatacacgtggcacccgggaggcacagctgcattcaatgttgcaagtgatcgagccaaccttcaaggaagctattaaaagaaatgtgagtatagaattatctgctggaaggtatccaaagaatggagctactgacatgataagggcaaattatcacagtgaggttggaagctcaagcagtactcctagtgctacatctgacagtataacagcatattctgattcttttaaagtagagcttgggcgtaatgattttgagaagacagctatctcaaaaagggcagatatatttttaaaatggatgtggagggaattctacaatcaggaattgacatgtgccatgaaatacggcaagaaaagatgctctgaattgttgcattcgtgtaattgctgctatcagatttacctagcagaagaaaggcactgttcttcttgccataagactttcaaatccatttacaatttttctgatcatacaacacaatgcgaagagaaacagagaacagaacctttctggaacatgcaaaacactgattattctgtcccaataggaatggcatatataccatcagaagcacttcaaccattttggactgatgtgtatcgaaaatcttggagtgtgaagctgtacactaccaaatctattgctgaaatattccagcttttgactgttctggaaggtgcaataagaccagattgcctctcttctgattttgaaacaagtgagtgtctaaactcacaggttggatctgcttctgtccttccatgggttcccgacactacttcagctgttatgctccgaatgttagaccttgactcagctattttgtatgttcaaaatcaaaagatggatagagatgatggaggtttcatgaaatttccgtcaaggtatacagttgctaagagcaaacaagaaacaacacctgaaacagctggtttggatctgtatgatggaaggtggcttcctggtagtggccgtaggggtcgtggacgtggaagtagaggaggtagcaggggaggcagaggtcgaagtcgaggtggaaggatcccaagaggtgttagcagctcatcaaggatcgagttcaagggtggtattgttgcttctgataaagcgccaaggaagaatgtacgccgagggcgtggtcgtggtcgtggtcgtagacgtggacgtcgaactgtgaggcctcggcagccatctgttggcagagccagatcaattccaaaggaaaatttgttgggaagctttagcatgcttagcagctcaaaggctgctaccattgaggagtctccacgaagctctggcgcagacgagtggggcttggagaccagaacgacatacactgaatgtgatgagaacagctctggatcacagtcagaagataacgaggaaaatggccagcccatggatgatgattatgaagatcaagttccagattactcaataggctattctaccggctcgaggcaccatgtaatgatgtccatgatggaccatgatagtgacgaggaggatgaagatgctgaaggtgatgagaatgtggaagaagatgcagaccttgcagttgacgatgccgatgttgagatggacgaagatgatgaaattggtgatgatggagaggatggtggcgttggaggggagatgaatgcggatgaggatccggatgctacttcatattcatccgattacagcgactaa

SEQ ID NO: 2965 - DNA, 477 bp, Zea mays
  Peptide Sequence Number=SeqID_44744
atggagagagttggatgggacggaataattagcagcgtgggtagctgccctggtgctcggatttcttggggtttgatctttgcggagcggtggtgggctttttgtgcttttgactggctagctgggttctggtgggaaatttgcgacctggatttggtgctttgggggtggatggatttggacgtttgggagccgggagcccgggaccgggacggactgacggacaccaccactccagcttctgagcctgtgcctgtgggcacgtggctggtggcggggccgtccttcggaggtttgccagccgcgctgcagccagaccgctggtgggtcagtgcacaaacaaaagttcggccctcgaatcgaatgcccgacatgaacgatgaacccgacaccgggtccgggtgtatcatgctccattctcgattatcagtgctggagttgaagacaaacaggaaaaattgtcaaactgattgttag

SEQ ID NO: 2966 - DNA, 1011 bp, Zea mays
  Peptide Sequence Number=SeqID_44745
atgcgctccgaggattctgatccttgtccaacttctcttgtcatgtcgtacgagatgaagacgccaggaagaagatgtttaccagaaaggatgtttggacagtcgcagttacgagatgaaaatacccacacttgcagctggactgtgattctgaaagagttctgctcgcgtgtgtcaagcgacaggagttctcccccttttaacctcatcgcagaagggaagctgaaagagaaagcagcattacgagtcgcagttcagcgacagcgatccgtcctggagactggagaagagtggtctcccactgctaacacagagccgtctgtccgtctgatacacaccagcgcggctggcaaacctccgaaggacggccccgccaccagccacgtgcccacaggcacaggctcagaagctggagtggtgcagcagcagctcgactgctcgaccacaacagcagctgccgcgcaacacaaaacacactccagactccactctcccacggagaaaaaacaaaacaaaacaaaagaaatacgaagcctgagcctctcagccagcaccccccaggcgaaaagggaacgaacgggggcggagaggaaaaaagggggtttggtttttattggctgcacacaatggcagcagcgatccgaacccaatccccatctccgcagcgcgtgggtaataatcccagttcgagcagtcgccacacgcccgttgctgctgttcctggcttgcggcttcgccaatctccgccacacccctatcctttcccttcttcgtcgcctcacccaccaccccatccgctgcggcggtgttcgtggtgttcaagtaattgtttttggtggtgtcattattccttttcctcctcccagttcaagccatcggtgctgggtattcttcgccacggggatccagccgcacatcgattctcctttttccaccccctcgctccgcgacgcggggtataatagcgactgcgaggcatttggtgcgggcagacgctacgaggtggggtga

SEQ ID NO: 2967 - DNA, 2277 bp, Zea mays
  Peptide Sequence Number=SeqID_44746
atggacgccggcggggacgaggacggcgccgggaaggcggcgctggagagcactgccgaggccgcgaccctgccaccggcgtcaacagtggcggtcccgtccccggtcccggcttctgcgcctggggcggccacggggacctcagggtcgggggagaagccggtgaagcggatgatgaagaccccctaccagctcgaggttctggagaagacctatgcggtggagcagtacccgtcggaagctatgcggctggagctgtcggcgaagatagggctgtcggacaggcagctgcaaatgtggttctgccaccgccgcctcaaggaccgcaagccaccgtccaagcggcaacggcgggaggaagagtccgcgctagtaccagtgatgcctccaccgccagtgttaccagcacctgtgatgcctctggcaagcagtgaccttgtggtgggtgctcctgggccgtatgatgagccgctgcacccacttcactcgcgaaggggtgctgggcgtgggcggtcctcagcagtccccaggatttccatgccggatattgggaggaggtattacgagccaccaccaattatgatagcgccgcctatcccgtcgatgcagctcacgcaatatgagctccgtgtgattaattctgtggagtcacagctcggggaaccattgagggaggatggtccagcgcttggcgttaattttgatccccttcctcctggcgcctttggtgcaccgattgcttggcatttccttgctcatgcacatctgaagcgcctaaaaatctcaatttcaacatttattttgcggaaatgctccacatatgtcacaactataccaaatctccagctctgcaaactcgtggaattcgtagagctagagatacccggcttcataaattcttggaactggagctctctcaaagagacccatcaagcgacatcagctgccactaacatctacttcatactggcaactgaagatgtgatgattgttccagagcaacaaaagcagcctgtgcgatcttatgatgcggagatattttcttggcatgatcaaaaactcttaaaggcttcagcatttttacctaatatggaatccccatttgttccaaattcgtttactgggaagagaaaatcaccagttggtaattcagccatagttcaacctcatgttggatcacgggctgttcatgagtatcagttccttcctgagcaaccaagtgatacatatgagagggcaacccgatctcactactatgacactccagtggaagtttcaaatgctaggataccttctatcacatcaggatcacaacttctccatggatctgaggaggctgcgcctagttatgcttttcaaggtcacacatctggttctagcctgttgcctccgtccagcaggccccaagtgtttccagcagcaccaacagattatgagatgactcagtctaatagcaaccttagttctgttcctgttgaaggacagtttgatatttctcaggttgctgcatttgaaaacccacctgtatcatctgaaataatagcttatcatgatgaagatacttctcgcgtggaaagaaaacgaaaacatagtgaagaagcaaagattgcaaaggaagttgaagctcacgaaagacgaattaggaaggagcttgagaaacaagatatgttgaataaaaagagagaggagcaaaggcgcaaggaaatggagagacttgatcgtgagagaagaaaagaggaggagagattactgcgtgagaggcagcgagaagaagagaggttccaaagagagcaaaggcgcgaacatgagcgtatggagaagtttttgcagaagcaatctagacgagcagagaaacaaaggcaaaaggaggaactccgaaaagaaaaagaagcagcaaggcaaaaggctgccaatgaaagggctactgcacgtaggattgcacgggagtatatggaactggtggaagatgagcgtttggaatcaatggaattagctgctcaaaacaaagggttgccctcaatgctgtatcttgacagcgacacattgcagcagcttgattcctttcgaggcatgctaagtcaatttcctcctacaacggtgagaatgaagttgccattttctataaagccttggactggatccgaggataacgttggaaaccttttgatggggaaatcctccggccgggtggcggaatgcacccgccccgatcctaagatgaggggccctagaggtttgcctgaccgaatggatgaacacaagaacacaaggatttag

SEQ ID NO: 2968 - DNA, 2094 bp, Zea mays
  Peptide Sequence Number=SeqID_44747
atggcggtccagcctaggaaacgagcccagctggcccgtggcttcatatggcgggacttagccttaagtcgggcaagccacctgaaaatggaaaaatctgacctctgccaccacacagccaggtcttacaacgttgatagaaaattagaaattaagaaaaagagtgcacccaaatctaagaaaattgtgtggaaattcttaattactttcactgatgttctgggtctttgtccagttacacttgatgagtttgttcagtctcttcatgattatgattcaaggttgttgggggaactgcatattgctctgctgagatccattataaaggatattgaggatgttgctagaactccatcaattgcactgggggtgaatccaggaggtggccatccacaaattgttgaaggggcatatgcctggggattcaatatacgtagctggcaacgccatcttaatcttcttacatggcctgagatattaagacagtttgctttatctgctggttttggacctcaattaaagaaaaggaccgtagaagattcttactatcgtaatgataatgagggtcatgatggtgagaatgttatattgacgattcgaaatggtacagcagcagtgaatgctgctgctaagatgaaagaaagaggttacaccaatcgccgtagatcccgccaccgtctcactcctggaactgtaaaatttgccgctttccacgtgctttcgcttgaagggagcaatggtctcacaatattggaagtagcagaaaaaattcagaaatctggattgagagacctcacaacaagcaagacacctgaggcatccatagctgctgccttgtctagggatacaaagctttttgagagaactgctccttcaacatattgtgtgaagtcgccttatagaaaagatccggctgattctgaggctgtgttgtcagcagcgcgtgaaagaattagggcttttcagaatgtgctttctgactctgaagctgaaaaggaggtagatgaagctgagagggatgatgattctgactgcgatgatggtgatgatgaccctgatggtgatgatgtgaatactgaggtggaagacgacaaggatcctcttcttgctgtcaagtcacaagatgaagtaccgagtacaactacagttattggcataaaggccaatttagatggtgtgggtaatgcattgaactcatcaagtagttttactaaatcagcaaaaggcgctcctctcccttctttaggcaggtccaatgcagcagatacttctaatgatttgcctcttggagtctcatcagctaatcatgaagtagtacctgatgattctgaaaatacacaaattgatgaaagcaatcaagccgagccttgggtacgtgcactagcagaaggtgactactgtgaccttagtgttgaagaacgccttaacgcactggttgctcttgttggtgttgccactgaagggaactctattcgtgctgtacttgaggagcgtttggagttagcaaatgccttaaagaagcaaatgtgggcagaagcgcaacttgacaagaggcgtttcaaggaagaatttactagcagagtacaatataactctgacatgggtttgaagcctgatatatatcaagaaaacaacgtgacagagattacttcaactccagcgtgtgatgcttatagagagaatgatgaacatgtcgggacaatcaacaattgtgagatgcttgatcagcataatcagggtaatgctggtagtctaccttatgagagaaatggcgtatgccaggaaatcctcgcaaccccagatacttcgtatgttcagcagtatgcttatgctgataaaaggcgatctcagttgaaatcgtacattggtcaccgggcagagcagctttatgtttacagatccttgcccctaggtcaggatcggcggcgaaacaggtattggcagtttacaacttcagcatcaccaaatgaccctggctcaggaagaatcttttttgaatccaaagatggatattggagagttatcgactcagaggagaaaaagtcaaaagggagcagcagattgtcttacaagtaccagtgtacttcacgctaa

SEQ ID NO: 2969 - DNA, 396 bp, Zea mays
  Peptide Sequence Number=SeqID_44748
atggcggccacctccatcaccaccaccgcccacttcgtcctcctgacgccgacgcacacaaccccctctgtcaccccgcctaccacccctcaaccaaactacccctcaccgctggcattgtctgtgtctatgcctcctcaacaccttggacctcatcgttgtgctcgccataaccctcatggtcctcttcctcacgatgctcaaggccctggacgggaccacctcacgcctaaccttcccaactatctcgtctacctcaacgtggcgctcctcctcgtcgtggccgtgtacaatctgaacccagcctcctttgcctacactagaggggggcacacggatgtcacctacctcaatgtcgaagtcggggtcaccaagatcgacccaggcacgtgctaa

SEQ ID NO: 2970 - DNA, 1911 bp, Zea mays
  Peptide Sequence Number=SeqID_44749
atgccgcttctcgttctgcgcgtgccgctcgcctcgaccaacaatactagtacatgcagtggcgctgcacctcctgtagctgtagcaccagcggcagagcattccgacggcctactgttcgacggccttgctctgggccacggtgacgacgtcgacgataaggccgaggcggacggcgacgacgcagcgaccgtgaagctggagtggctgaggtcgcagatcatcggcgcggaagcagagttcgcgtcgccgttcgggacccgacgcatcacgtacgcggaccacacggcgtccggccgctgcctgcggttcgtcgaggagttcgtgcttcggaacgtcctgcctttctacgggaacacccacacgacggacagctacgtgggcatgcacacgagcaagctggccggggatgcggcgcggtacgtgaagcgcagcctaggcgcggggccgcgcgacatgctgctgttctgcggcacggggtgcacggcggccatcaagcgcctgcaggaggtgacgggcatggccgtggcgcccacgctgcgcgccgcggtgctggccgcgctgcccccgtccgaccgctgggtggtcttcgtggggccctacgagcaccactccaacctgctcacctggcgggagagcctcgcggaggtggtggaggtcgggctgcgcgccgccgacggcctcctggacctggccgcgctggagtcggagctggcggcgcgcgcgccgtcggggcggcccatgctgggcgccttctcggcgtgcagcaacgtcaccgggctgcgcaccgacacccgcgccgtggcggcgctcctgcgccgccacggcgcccacgcctgcttcgacttcgcgtgcagcgcgccctacgtgcgcgtcgacatgcggtcgggcgacgcggacggctacgacgccgtgttcctcagcccgcacaagttcctcggcgggcccgggagccccggcgtgctgctcatggcgtcgcggctctaccgcctccgcgccaccgcgccgtccacctgcggcgggggcaccgtgcgctacgtcagcgcctacggcgacacggtgtacagcgacgacgccgaggagcgcgaggacgccggcacgccggcgatcatacagaaggtccgcgcggcgctgtcgttccgcgtcaaggagtgggtcggggaggcgtgcatcgaggcgcaggaggcgcgcatgctggcgctggccctccgccgcgtccgcgcgggggccaaccccagcctgcgcctgctgcagggcgccgatgccgccgcgagcgcgccccgcctccccgtgctctccttcgtggtctacgctcctccgcgagacgggaccgagcccgagggcaggctgcagctgcactgccggttcgtcaccaagcttctcaacgacctgttcggcgtgcaggcgcgcgcgggttgcgcgtgcgcggggccctacgcgcaccggctcctcggcatcagtccggcgcgcgccaaagccatcagatcagccgtcgaacagctcgcaaatgagttcggtatcgatggtaacgtacagggctaccacggggttctgcccgggtggacgcgcgtcagcctggcatactacacgtcgatgcaggaggccgagttcgtgctggacgccgttgccttcgtcgccagcttcggccaccggttcctgccgctgtacacgttcgactggaaaaccggagactggcactacgatcacagctgcgcccgtgggctcgtgccgaacatcgtcggcggcaatcccagtgggcgagtcaaagccgagaactgctaccagagctacatggcatttgcgcactgcctggcggagtccttggctaccacttgcactgggctcagcagcgatcctgctatacgtattcccaagagcgtcgacccacagttggtgtatttcctcgtatga

SEQ ID NO: 2971 - DNA, 323 bp, Zea mays
  Peptide Sequence Number=SeqID_44750
ggagggagctgggcgttcctggcgcgcatgcacaggaaaacagaggggaggagaagctgctgggatatgggagcggctgcttgcttgaggaagaagaaggggaggggatggagaggggcgctgcacttggagccgagcacgccagcgagcaagatcccggcgaggagtggcgccatggatccaaggagaaatttctcctgttcctgcagagaagaagggcgcggcttggagcaagggcgccatgggaggctgctgctccgagcagggagcaagcaggaggcgaggtggtagagggcaggggctgctgcgcggcttgcctttaa

SEQ ID NO: 2972 - DNA, 396 bp, Zea mays
  Peptide Sequence Number=SeqID_44751
atgggcgcaccggacagtctggtgcgccaccagacactgtccgatggatggaactttgaggttgcatcggaatccgacggcgacctcaccgacggggatgacctccagttccttgttgacggggaactagactccgacaccagcactgactggtcttggacgtatgacagagaatcgtcgaatgtagagtcctttgacaacgatgacgacctgatgtctggacattggatgggcatcggctcctcggacgacgaagacaagaacgacaatggtagcagtgacgaggacagcgacgacaatggcgacgatgacggcgatgatgatggcggggcaagccaatgcgatgagatgcctcccagcaagcgtcgtcggttgctgcatggtagcttattctag

SEQ ID NO: 2973 - DNA, 183 bp, Zea mays
  Peptide Sequence Number=SeqID_44752
atggagacggaccctgcttggcacagggatcactcacggctgcacactgacactgcacagcatgcatgtctcgctaggctggcactggcgctccaccgttgcgtttctgatggtaaaagaagtcttgattacatcttcttcatccagttgaaagaaaacatctcgctcaatatatgtgagtag

SEQ ID NO: 2974 - DNA, 885 bp, Zea mays
  Peptide Sequence Number=SeqID_44753
atggcgccgccatctccatctgatgatgcgtccctcactcttgccttggaaaaccaaacccgggagatcgaggtggataccggctctcgtctcaccgccatagagtccgcagtccagctgttcgactgctggcgcccccgagtggactcctccctcgacgccatgaagacgaacctggatcggctctgttcggaggcgtccaggatggaggtcgtaggcttccaaggtgtgttcggcgggtttccgggcgtactcggatctcccggttccggcgcgacttcgtcaggcctcctcggatccccgccttccttcgctcctaccggagcggtaccggtgcgcccatctgccaccgtcgaccactccgacgcctatcgttttgggcccagctacgaaaactatctccgagacagtgggcttcggtatcctgactgccgatggccgcttcccggtcacgggaagaggcggattcttctcgccgtcgtgacttttgatgtgccggttcaaaacggcatctacgagcctatccacgtcgctccaaaaatcgtggccgtccaatggtggatcgtccgcctgctctctcgtgcgccatcctgtccacgtcaccgcaatttctctcagccgcccgatctcccagcaacggacatagatcgcccagtagcaacttcctctatactcttcttcctcgcctttgacgggtctcctcgtcacgcgatgcttccaggaggatctctacttctccacccagatttccaggctcccatcttcacctccgacactacaccccgtacctcgtgcccaccgccaccatctttgctcccggtgctccacggcttcgccttggcacgcgccggtcgtgcccgcggcctcgctcctcgactagcatag

SEQ ID NO: 2975 - DNA, 903 bp, Zea mays
  Peptide Sequence Number=SeqID_44754
atgggcattgggaaggatggggtcttgccatggaagcttcctggtgatcttaaattctttaaagagcttacactaactacatctgatcttgtcaaaaagaatgcagttataatggaaaggaaaacatgggagagcattccagttaagtcaaggccattgcctggtcgtttgaatgtcatacttactcgatctggtacttttgattttgcaacagtagagaatgttgttatctgtggaagtatggagtctgccttagaactgctagcatcaactccatattgcttatcaattgagaaagtgtttgttataggaggcggacaggtactgagagaatatcttaaaggacctgcatgtgaggctatccatctaactgacattcagtcgagcattgagtgtgtcactttcatccctccggttgacttctcagtgttccagccatggtattcatctttcccggtgatagagagcaacattaggcatttgtttgtgtcttttgttcgtgttagaaagtcagtggcagaaactcatgagtcaaatggcaaggaatcaaccgaggttgataccaagaatgacaaatttgaaaaagagaatttctcttttctccccaagatggtatatgaccgccatgaggagtaccaatatctcaatcttgttgaagatattataaggtctggtgctcagaaaaacgacaggacaggaactggaacattgtcaaaatttgggtgtcagatgcggttcaacttaaggaaaaaaattcctctgctgaccacaaagagggtattttggcgtggtgttgtcgaagaactcctttggttcatcagtggctcaacaaatgcaaagctgcaaaaagaaaaaaaagcttccgaacaggccccgggggctgcaattgctcatgctccttag

SEQ ID NO: 2976 - DNA, 774 bp, Zea mays
  Peptide Sequence Number=SeqID_44755
atgggcgacttgggcgagctgggcgacgacgcgcgagcatgggcaagcacgggcatgggagggacaccgagggagctcgacatggccgagctcggactaaagcacgcgcggcaagacctgcacgatgtcccgatggtgttttctggtggccgcaagatgagcaagagcgccggaggtgcttggggcagaagcagggtcgagcagggagggatccacgaccatgggcgtcaagagccagcggcgttcgacgtcgaggaccgaggaggggcgggcaagcacgaagaagacgagcttgaggcggacaccaccggcgagaaaaggggcattagagggattcaccgagaggagctcagggctggagtggagggaggacgcggccatggcagggagaggaggaagctgcggccaacgaaaggcaggggcgcgcggcgatggaagctcagggaggcgagcagagatggctggaagatgaaagcgccgcgcggtgaagaagacaccgcgagggagagaaaggagagaccgcggcagagaaaggaggtcagggcggtggatatttctgcaaagatgaggggcgaacgaaaaaaatctccacgcccgtgggcggcagtaaaatatcagagggaagataagccaggcacgcatcgcaagaaaaagatccagcgcaggatattttcaggggagagagcggtagaaaaatcaagccgaagaaaatatccgcggcagaaactcatgtgctcggatatggacaaggaacggagagtcggtgggaaatag

SEQ ID NO: 2977 - DNA, 486 bp, Zea mays
  Peptide Sequence Number=SeqID_44756
atggtcgtggatccctccctgctcgaccctgcttctgccccaagcacctccggcggtcctgctcatcttgttgccaccagaaaacaccaccgggacatcatgcagctcgtcctggtggccgtcgatttggagctctgcgtggactcggccatgcccaacactatccatcttcctcctctccctgccatggccgcgtcctccctccactccagccctgagctcctctcggtgaatccctctaatgccccttttctcgccggtggtgtccgcctcaagctcgtcttcttcgtgcttgcccctgctcaatcgcgccctctactccatcgtcaccaacgtcggccaaagctcggagtccctcccatggcaagctcgccggtcatccctaccccatctcggatcccctccctcatccctttcccagccaagctcctcccctgcggctccctcatggcgcccagaatatcctcccacgcatctccctactag

SEQ ID NO: 2978 - DNA, 369 bp, Zea mays
  Peptide Sequence Number=SeqID_44757
atggagcagtgggcgcgattgagcaggggcaagcacgaagaagacgagcttgaggcggacaccaccggcgagaaaaggtgcagtagagggaatcaccaagaggagctcagggacggagtggagggaggacgcgaccatggtagggagaggaggaagctgcggccaacgaaaggtaggggcgcgcggcaatggaagctcagggaggcgagcagagacgactggaagatgaaagcgccgcgcagtgaagaatacaccgcgagggagagaaaggagagaccgcgacagagaaaggaggtcagggactcagactgtctccagcaacgtcctctatatacatcctctatatccgtcctttacattcttctctaa

SEQ ID NO: 2979 - DNA, 271 bp, Zea mays
  Peptide Sequence Number=SeqID_44758
atggaggaggataacatcggggagtacgacctactaggagatgatttagtcgactatggagcctcgcctgaacacccggttatggatgactcagcccctatcgcggacaatacaggccctgaggccggatgggttggccctctcctggatagtccgacctctgaggctgaacagccctttaagcagagaccaagatcattttcccgaacttactctcaaggatcaagtacaaaattcactggctctaatattgtgccggtggaggagtctg

SEQ ID NO: 2980 - DNA, 351 bp, Zea mays
  Peptide Sequence Number=SeqID_44759
atggattccgcccggagctggctccagaagctgcagccgcgggacaaggacatagagtggggcgccaagacgccgacgccggctccgacgtcgcccaagcgcggcgaggccttcacatccttcagcgcatgcttgctcaaaactaatgcccaggttgtcgacgatatcgatgtgatcgtcatctccatgaagcctcagattgtgaagcaagttctacttgagctgaggccacaactttcagaagaaaagcttctcgtgtccattgctgtcagcaccaagatgcaagatttgcaggcaatctctgtcatgaaacaacgtattcttgatgctccacaaccagatgctcgctga

SEQ ID NO: 2981 - DNA, 2880 bp, Zea mays
  Peptide Sequence Number=SeqID_44760
atgtcgccactgggtgccagttggctgcattcctgggcggtgctattggggtgggggtggcagcctccgacgcgcgggtacgcttcgacgccgaggaggaagtgcgtggggtccttcctgaggcgcgtgcgacggcgatgcaattgtcgttgcgggcgagcacgtggtcgaggcgcgtgtgggagcggagccggtcgacgccagatgtggcttctggatgtggaggcttgcatgaagagaagtgaggtggaggctgagatgagggaggccacggtgggcacgcggaggcaagggttgccagcacgggcgggcaggtacggcttgagcaggggcaggaagagcgaggtgacggatctgaagcagcagctgcggcagcttgccgggagccgcgctcccgatgcggacgcccagcgtcgtgatgtattcaagagggtgatctcctgcatgacggccggcatcgacgtgtcggccgcgttcggggagatggtcctctgctccgccacctccgacgtcgtaaccaagaagatgtgctatctctatgtaggcgcccacgcgcgcgcgcacccggacctagccctcctcaccattaacttcctccagcgggactgccaagatcaggaccccaccatccgcggcctcgctctccgcagtctctgctccctccgtgtccccaatcttgtcgagtatctcgtcacgccactcacgaccgggctgaaggaccccagcgcctacgtgcggatgattgctgctgttggtgctgccaagttgtatcacatatctgccaccgcctgcattgatgctgaccttcctgcttcgctcaaggcgctcatgctatccgatccagacgcacaggtagttgccaattgcctgcatgcattgcaagagatctgggccctagaagctgctaaatcagaagcagctgcaagagagattgagacattgcatagcaaaccagtggtattttacctgttaaacaagatcaaggagttcagtgaatgggcgcagtgcattgttcttgagttggcatcaaagttccttccatctgataataatgaaatatttgacattatgaatttgctggaggatagacttcagcatgcaaatggagcagttgttttggcaacaattaaagtttttctccatttgacaatgtctatgactgatgttcatcaacagttcgacgtctatccggagacgcccgtgaagtccggcggtgaagagttgcgcttgttcgtgtggtggtggcacgggcgcagtgtggcacaggagagccaggaattgatcctggtagtcctccactgtggagcggaacggcaggcgtgccacctcgcccaacgtgctgctgcgcaggggaggcccaaaacgttgttggcgcaaagttttaaagcacgactagtgcagcatgggctcttcgcgccgcagcatgaaggaccactgttgtgcagcgcctgtgagatgggggagacgtgggccggcgatgaaggatcaatcacagacgaggccgacgcgagctggacctcgatcacccccaaccgggcggtcagcgccgacaggtggttgaggatcaatgtctgggagtcctacatctgccgccggaatgctatgaaggagttctgcgacacgggcgacgtgctggtggctgctgctgccccggaggttgtcgggatggtggtcgtcaccggggaaaccgaaggctggggagggtcgtccgacatcctaggatcggtttatgaacgtattaaagcacccttgcttactctggtgggtgctggcagtcctgaacagtcatactctgtgctatgccatctacatcttctggtgatgcgtgctccaatgttattttcctcagactataaaagcttctactgccaatttagtgatccttcatacgtgaagaagttgaaacttgagatgttgactgctatagcaaatgaaagcaacacatatgagattgtcaccgaactgtgtgaatacgctgggaatgttgatgtaccgattgcaagggagtctatccgcgcagttggaaaaatagcactgcagcagtatgatgttaatgctattgtggacaggcttctacaatttcttgaaatggataaggattatgtgactgctgaaactctagtcttggtaaaagatcttctcagaaaatatcctcaatggagccatgattgtatagctgttgttggaaatatcagcagcaaaaacatccaggagcccaaaggaaaagcagctctcatatggatgttgggagaatattcacaagacatgcatgatgctccatacatccttgaaaatcttgttgaaaactgggatgaagagcactctcctgaggttcgcttgcatctcctgacagcagtgatgaaatgtttctttaaaagacctccagagacacaaaaggcattaggagctacattatcagctggtctatctgacacccagcaggatgttcatgacagagcacttttctactacaggcttttgcaatacaatcctaatgtagcagaacgtgtagtaaaccctcccaaacaagctgtctctgtatttgcagatacacagagcagtgaaaccaaagatcggatatttgatgagttcaacagtctatcagttgtatatcagaagcactacatcgtccataaaaagcatacatcaagggatcttccctttatgtctcttgtgacctcatccatcacaaaggcaaaaagcttggcctctgcatcagagatccaggcctccaccttcttcacctctatgttcaccacagacagccatgccaagctagccagccaccttcctgctccgctcctcatcctgcacagccgaccagagcttactacccagctcatgaatttcctcatcgatgctagtgaatatgagggttga

SEQ ID NO: 2982 - DNA, 126 bp, Zea mays
  Peptide Sequence Number=SeqID_44761
atggcgatcccgcagaactggatccaactccgactcgccgagcaaaaccctagggaggctgggggttttggggaatggcccgactggcgactggtggcctggaaacatcgggccgggctttcatag

SEQ ID NO: 2983 - DNA, 237 bp, Zea mays
  Peptide Sequence Number=SeqID_44762
atggccttcagcgccacgacaactgttgcggaggtggaacacattggcagcctgccagaccaggcaccaatcaacttctccatgaacttcggctatgtcatcgtcgacgcgatggcagggcgagccctcttatactggctcatcaccacatggacagcggctagcgtgcccgtagagtccatgtcgctcatgttgtggctcaacggtggccccaagtgctcctccattgacgtgtga

SEQ ID NO: 2984 - DNA, 129 bp, Zea mays
  Peptide Sequence Number=SeqID_44763
atggggacgcctccggtggagaagcggccaccgcaaaacggtcgaacaccgagcagccccattggcgaaggccaccgtggctctaggctgaagcttggaagtatctgttacagggggctgatgttttga

SEQ ID NO: 2985 - DNA, 1521 bp, Zea mays
  Peptide Sequence Number=SeqID_44764
atgctgatgctacggtggggtttcgtctcctcctgtctttttcagttattgctgctggcattgcggcgcggtaagaggagaggagcgaggagggatcggcggagaatgaagatgaaggcgctggcgtgctgccggcggcggccccaggacttgagcatcgacatggaccaagagcccgacagggtgatgacatataatggcctggagacctgcattatcaactgttccgcctatgacgatgatagtggcatcagtgcaacaacatgcggagatggctgtgtcaccgctgattcccttgatgatgaagtctctagctgctttagtaaagatgcttctggttcttccttctcttcacactgccttagcaagcaggaggagcattcgctagatgagttgggtacacccatcgcaattcatctactccctttcaaagcgaagaaaccaatcacatataccttgagtgcttcagatattgaaaacatgaagaaaaaatttgcgaagcttttgctcggttatgatacttcaggaggcgctaggggcgtttgtgcggctctggccttgtctaatggcataatcaatctctctgctactgtttttggagaactctggaagctggaaccattgtgcgaagataaaaagatcaggtggagaaaagaaatggactggttgatgtctcctacaacttatatagtggagctggttccaaggaaacaaagcggagcagatggatgcacatttgagattatgactccaaaggcccgctcagatgttcatgtgaaccttcctgcccttcagaagcttgatacgatgctcattgaagtaatggactctatgatagatacagagttctggtatgaggagagtggtagcagagctgatggtccgtctgggagagctagcttgggtgaagatttgtaccaggctataacgaccgagtatattcccatagaggaaatatttgtttccctcagtttgaaaactgagcatagtgtgctcgagactatgaaccagttggagggggcaatgtttgcatggaaccaaagaatcttagaggagcgaagcaagaggtcaccgggacgtcattcctggagcttcatgaaggacagctcgtcagaactcgacaagatgtctgcatgcatcgaaagggtcgacacccttgtgcagcttctgaaagccagatatccgaacctgcctccaacttttatagatgttctaaaggtccagtacaatgtggatgtggggaatgcaatcgtggaggcatactctagggttcttgtcggggtagcattcagcatactgtcgcgcgtggcggagatactgctggaggatgacctggtcaagaggcccaacacccccatggcctcactgaagttcgacctctcctccgacgtgtacttggccggcataacagagacgccgccgggacacgtccggaggtcccttatggatcagatcagcatggtcgacgggcgcttcaacgctgctgtgaagaagaaaggagcgaagcagctgaggtggtga

SEQ ID NO: 2986 - DNA, 246 bp, Zea mays
  Peptide Sequence Number=SeqID_44765
atgaccatgatttatggagccatcgatgatgtctgctcccgacattccatcaagattctacagtgtgagtttatggtgactagccactatgggtacctgatcctcaagatgctagagctcaaaggcatcatctttgtcgcctctaaccgcgttgaggccatgtctatggccaagaagcaaatgccatcatgtcacaccgctcagaagctaagcctcgaaaatgattcctcatcatcagaaccttga

SEQ ID NO: 2987 - DNA, 495 bp, Zea mays
  Peptide Sequence Number=SeqID_44766
atggcgaaatacgtcgcgcaccccggagcacgttgcatggacttttccctttgtttccccggtagttataaggaggcgctggtcgcggccctctcgtttcgccttgtgcacaccagtagccacacttccgcgctcgccaccgctgtgagaggagaagtcagagggagcagcgtggtcgttccaccgctggtgaagatcgtcatcgcggggactctgtcctcggagtggggcctagcagggtcaccaacatctagggtggccgtctgcgacctcaattggaaggcgggccttggggagcgtggtcaatttctcacctttatcccggcaccgtcatgtttctgcccgtcgccgtggactgccatccctactgcgcgcctggagattattattatgtattttgtttacatgtttgaagagcctgtgactgaggatcctggtgcccagcagatagaagttgctgagcaggagctcattgaaggcaagttgtgcccttga

SEQ ID NO: 2988 - DNA, 834 bp, Zea mays
  Peptide Sequence Number=SeqID_44767
atgcacgcgacgctacccttggatccaaatcgtgcggtccagacgcgcgatcgatctgggccgtcggtcaatacatccacggacccgagctatcttcgttctctcgccgagcgccgagcgtacaggagatcaaggcgaagcaggtgggggaacacatacctcggattgttacctaggttttggtggtcacgctatgatgttggttcggcggaacagcttgactccgacaagaaatctcgggatcaccgcaggcctcttcttccttccgcttccagggacgcgtccgccacgccgcgcgcactggcaagcaccggaatgccccgagcgcggcagtgtcgaacacccgcttggcgacagccctcacgttctctctctacgttctctctctgctcccgctccgcactcggctgcagcaatggtgatgtctcgattgtcctcgccgatggccagctggaagaggtgatcggtattaatacacaagggcaaggtcgcgatggttgcaacggccccgggttttcctccgtgcattccggcaacaggaccaccggcgcccgcgcgttctgttgtgcccccgcacaagaggaaggagctgacgagatggccccatcggcagcgacacttcgtccctcgccaagcgacagacaaatgggcccccatgctttcgctgcgctagtcacagttgaggcacgcccaggggacgacaaggccgatatcccaagtgggccgccacagcgaaatttggcccgggcgcagggtacaacctctgcagagtgtaaaactggtatactagccgagctcacggtcatgagcagctcaggactctcgcatgattaa

SEQ ID NO: 2989 - DNA, 429 bp, Zea mays
  Peptide Sequence Number=SeqID_44768
atggcatacatgtatcttattcattgcattcatttagattgcaacctcgctgacggagagtacgtgctcatccccgagcaaggaattgcccaagaggaacccatcaatctgccggcgcctgcctgtggtgttgagatatgggcccggcgcgtcagctgccccagccctggcgacacgctagctgaccccgcttccgcttctaatgatgcctggcggcgcctcgagaccgccgcgctcgtcgtggtgaacaagatcctgctcaccgccgcctccgaactcctcgtcgtcgttcctcaccgcggggaaatccatgtttcgcggtgtatcggggtggtggcgtccgccgtgctgcgcggctgcgctgccgtcctctgccgtacgtatagagggcgaagagtggttatgcagtgtagccattggatcagctaa

SEQ ID NO: 2990 - DNA, 462 bp, Zea mays
  Peptide Sequence Number=SeqID_44769
atggcggaatacgctgcgcaccccggagcacgttgcgtggacttttccctttgtttccccggtcgttatcaggaggcgctggtcgcggccctctcatttcgccttgtgcacaccagtagccacaccaccgcgctcgccaccgttgtgagaggagaagtcggagggagcagcatggtcgttccgccgccgctgaagctcatcatcgcggggactccatcctcggaggggggccaagcagggtcgccaacatctagggtggccgtctgcgacctcaattggaaggcgggccttggggagcatgggcaatttctcaccgtgatcccgccaccgtcgtgtttccgcccgttgccgtggactgtcgtccctactgcgcgccttgagggtacaacctctgcagagtgtaaaactggtataccagccgagctaacggtcatgagcagctcaggactaccgcatgattaa

SEQ ID NO: 2991 - DNA, 255 bp, Zea mays
  Peptide Sequence Number=SeqID_44770
atggggttacaggtgcacgctatttatactccaaaggcgaagtccgagcccaagaaaggagatgaggtgattagaaaagcatgggtatatatgggtataaacactttattatgcaggataaatgatatctttaaagcatttataggtttggtcttggtctttggtgtcttcatccgggtttgggacaagaggctaagatacatctgttatgtaggtcaagttgttgggtatggccgagttgatctaggtcactag

SEQ ID NO: 2992 - DNA, 264 bp, Zea mays
  Peptide Sequence Number=SeqID_44771
atggcatgggcgaactctggcgatggcggcggtggctcaaacggcgaggagaggcggcgtcctggcgcggggcaggtgcggggctcagccgtcctggcgtggcgcggggtagcctgggcgcggtcggggtcggttcctggcacggtcgcgggcggctcggtcgcggggtcagggcgcggcatcctgcgggctcctggcggcgtgcctggaagagagaaggagagagggaaggagagagatgggccgagtggggcccgcgcgtaa

SEQ ID NO: 2993 - DNA, 375 bp, Zea mays
  Peptide Sequence Number=SeqID_44772
atggtgaggtcatcaacggactggaagctcttgtgggtgaactacagcagcagacatgacttgtcaacgcttgcagcaaagcgaagcagaggaaggccatcaacatcatctcgagcgggcaagcagcagattggatctctatcttgccgcggcgacggcagcaaggatccaatcggggaacagaggaatgaagaagggcgatgggatgggacgtacctgttcatcgatgatgatgtacttgaagaagcaggcgtacaacatccccgttggtggggttggtcctctagggacgaagagctacggaggggattccgcgcgcagcacgtggacctcgccgttgtccgctgcgcggacctcagccaacctagggcatag

SEQ ID NO: 2994 - DNA, 369 bp, Zea mays
  Peptide Sequence Number=SeqID_44773
atggttctccagaacgacattgatctgctcaacccgccggcagaactcgagaagctcaagcacaagaaaaagagactcgtccagtcgcccaactccttcttcatggatgttaagtgccaggggtgcttcagcatttatactcattgttttatcaagttctcctatgccttctggtggaaagaaccactgttttcagccactcccagactgttgttgtgtgccctggctgccaaactgtcctctgccaacccacaggaggaaaggcaaggctcactgagggctgctctttccgcaggaagggagactagagcggatgtggtcttcaagttttgctctatgccagatactagcgtcatgaactgcctttag

SEQ ID NO: 2995 - DNA, 459 bp, Zea mays
  Peptide Sequence Number=SeqID_44774
atggcgtcggagatgaacaagaacgtgaaggccctcgacgagcaggaggtctccttgcagcactcgcgcgcccagaccagcgacgtcgccgaggagcaacagcagcagcagcaggcggtggatccgctggcgcggcagtcgtccatcatgtcgctgacgctggaggagctgcagaactcgttgtgcgagccgggccgcaacttcgggtccatgaacatggacgagttcatggccaacatatggaacgccgaggagttccaggccgccacggccggctggaacaaggagggcgtgtatcgggagccggtgctcgtggcgacgacgatgggcacaggtgagaacggaggaggagggaggggactggttcggcaggggtcgttcgtgctgtcgtcgccgctgtcccggaagacggcggaggaggtctcagccgagatcagccagggcccagcggacttctag

SEQ ID NO: 2996 - DNA, 216 bp, Zea mays
  Peptide Sequence Number=SeqID_44775
atgaagacacggcagatcgatgtggggcgactccggggagaggttgagcgcgaaccgggaagaggagttgaggaaagggtaaactgccgcgggttcccggtgcgccaagctcaggcgaagctcactgtggccaaagcgctggcagatgtccaggcgtccagcggcgatggcagaacggcgaagcaacaacggcggggggggggtgcagctgggtga

SEQ ID NO: 2997 - DNA, 519 bp, Zea mays
  Peptide Sequence Number=SeqID_44776
atggcgtgccgcgagcatgacacggcaacgcgcgtaggggtgggaactcgccacgctggggctacgcaggatgcgcgtgaggctgcgccgagggcgcgaacaagcgagtcgcgggcgagccgcgagcacgccggccacgcgcaggccaagacggtgctacgggcacacgcagccgcgccaggggcacagctggccacgccgggagcatgccgcaccgagcgccgctcgctggtccgcaccacggcgaactcgcgcgtgccagggctgaccacgcaccacaccgcgagccgagctggctgcgttgggcgctggcgttcccacgcgcagcgcgcggctgggcgagtggatcgtgggggtgcatgcaggcgcgacgtgcagcagggcgggcacgcgcgggcgacgcgcaggtggccgagcgagcgcgcgcaggtggcggcgctgagcgcgacgacacgctctagggttgggggcgtggagtgtgctgcgcgctgggcctacgggaggggatgcgccacctag

SEQ ID NO: 2998 - DNA, 438 bp, Zea mays
  Peptide Sequence Number=SeqID_44777
atggcagaaccaccagatacgccagccaccaagtcgtggtcacaacttgtagccccacgtgccatagagacaccagcacctccgttgagacatcatgactccgcggcgcagctagggcgacacatcatgctaggacagacaacgaggggcaaggataaggatagatttctgatgaagacgcccatgaagccaatggacgacgcgagtgagaagaatatagaaaatcttgtgaaggtcggccaaaagctgctgcagatgccagtggctgagacggacatcgcctcggggtactaccattaccgcaggaagctcccagtcagaggtactaggcaaaagctccccacaaatgggcaagagctgcaccgcttcgccaagatgctttccaaggagcgcaagctgcgccttaagaatcaaagagaggggagaacaagctcttaa

SEQ ID NO: 2999 - DNA, 495 bp, Zea mays
  Peptide Sequence Number=SeqID_44778
atggcggcggctctgggactgcaccagggaacgacgggtgaccgagggcagagcaaactagagggagaaagggtaattaggggcaagtctgagcgactggcaccgagggagattgaaagggaaatgggctttaatatatttcagtacttcttttggtgcttgatgaccatcacaactgtttgggctaactactttgccaagtatatggtcatagacctttgcatcggtggcactccgtacctatcaggattcaactatcggttttggttccaacaactagatgatgtggcaattgatgtggcatggtctggtggtgcaccagatcagtctggcgaggctctaacaagactgttcccgttagaatggtcacctgctacatcttatcagaggtacggtggtgcaccaaaccgacattgttcaaggtctggtgcacccgcagactgtgccgatttacccatccactccaatggctatatttgtagttggcggctataa

SEQ ID NO: 3000 - DNA, 882 bp, Zea mays
  Peptide Sequence Number=SeqID_44779
atgggcggcggcggcagcaaggcaccattcagcaacaccaacacagatgccgcgtcgccggaaaagctcccgccgctggaaaggctgccgccagcgaggtacgggaagcacatcacgatgctgagcatcgacggtggcgggatacgcggcctgatcccgttggtcattctcgaatccctcgagaaaaagctccaagacttggatgggaagcaagcccggatagcggactacttcgatgtgatcgcgggcaccagcacgggcgggctcatcgccgccatgttggcggcgccggacgaggagaggaagcggccaaggttcagggtccaggagatcaccagtttctataaagatcacgggcataacatcttcaagagcccttgcggtagcatcgagactcctaagaggaaggggtcaaatttccgaggctctggccctctcctcatcactgttaaggttcccgaagcgaaatgtcgtcttggggatccgatcggcgtcatggacggccatccggagcctggaaagatcgtcgagaatacgcaaggctcctacctggcgtgccaactaccggcgtttcgaacctccgctccgacaactaaatatctatgtgcgcgttctaggctccggacggtgttttaccctggcaaggctgcattgtccgtatgcgtcttatcgtctctgctcatgctcattatgacgggcgacctgcaattcatgaagacaaaatattgtagaagctgtagccgtattaaagccacagcaagccacaacgaacaagttgacctctgcgccatgacatcccctggcctccgtagcttgggcctcagcatggctcgtcgcattgcgggccctatggatggtccgcgtactcaggcctatgcttga

SEQ ID NO: 3001 - DNA, 807 bp, Zea mays
  Peptide Sequence Number=SeqID_44780
atgcccgttctgatggggcccaagtacgacggcgtgtacctgcgcgacaggatcgaggagaaaatgaagggcctcaccatgggcgacacccgcaccaacatcgtggtgccggcgttcaacgtcagatcgatgatgcctgtcgtcttctcctcgttcggtcccaggcgaggaccatggtccagactggcggacatctgcatcgccacgtcggccgcgccgacctacttcccagcgcacaacttcccgatacgttcttccaccaccaacggcagccagtaccaccacgacctcgtcgacggcggcctggccgccaacaaccccaccatgattgccatggcgatggtcgcgcaacagataaatcactacaggaatcgctacttcccgccccggctggactacgacaagctcatcgtcgtctccctcgggaccacgtatgccaaggagatagatagctacaccgcgggggatgttgcccagtggggcgccctccggtgggtcagagacgggccccgccgcaccccgctcttcgacatgttgtcctgcgccaatgactacctggtcaacgtcaacatcgccttccttttccatagtaaaaaattccagaacaactacctccgcatccaggatgtcactctggccaagcgtaaggacaatgtgttatccttcgccgacaaatacatccgcatcaagtctgttgtgcctctggattggagagattggggagggggaattagttcattcctctccaaatcccctcccatcacagaggggattgaagtttatgaaagtcgcctagaggggaggtga

SEQ ID NO: 3002 - DNA, 183 bp, Zea mays
  Peptide Sequence Number=SeqID_44781
atgaaatcaactaagtgccagtcacagcggattccaaatttcatggaaaagcatgtgagtgtgagaggttcctatgcagaaaagcaatcagaagctaaagacaccggtttcgatcttgcactacactgctcaagttcatccaaaagtgcaaatggaagcagtctcgatacagtgatgtggtga

SEQ ID NO: 3003 - DNA, 450 bp, Zea mays
  Peptide Sequence Number=SeqID_44782
atgggcaagaacaacaaatgcaagcacgagccgactcctccgtcagaggactttggcgactcggaatactcagaggaggagttctcctctgagtccgaggggtctccggctcccgtctctcccccagcgtcgtccgatgactcggacgactctcaggggattgccgcggaggtctggacgtacatccgagccgtcgagcgctccgggctcgagggctcggatgagtcggagtactcctcggatgaggaggactcggacggcggcggcgaggatgaggacgacgacgacggcgacgacgacgacggtggcgacggtgacggtgacggcagcggcagcggcaggggcagcagcggcggcggcagcagcaggggcagcaaccggggtggcagcagcaagggcagcaccaggggcggcggcggcggcggcagcagcaacagggccagtggctag

SEQ ID NO: 3004 - DNA, 312 bp, Zea mays
  Peptide Sequence Number=SeqID_44783
atggtggctgacacctgggacatgcactcgcgcgaggacgtggtggagtggatcgtgttaccagcatggtcgaggactggtgggacacttccgaaaggaactggtggtggcatgtggcatgatcgtggagggcgtgtcaaggcgaagcaactccgtgtgaaggacgtggctgtcggatcaaaatcccaggagttggtccattttgccctcggtggagtggataggctctatactctttggatcactacatatgccctcgcgatgcagttcttggttgtggtccgagttgattctcgtttgagttcgttttga

SEQ ID NO: 3005 - DNA, 240 bp, Zea mays
  Peptide Sequence Number=SeqID_44784
atggaggtggcggcggctaccgcagggaagacactgacgtcagaggcgctctggagcagcattgactcagccctcgggatcctggtggcctttgtcggagataagccaggtcgcacaatccacactcaagcagactacaggggctgcttgacccatgaggaggccatcgctctcgcgctcccagtcctcatcagtgagcctggtgtcgacaagaagaccgtcgtggacggcctcgcgtag

SEQ ID NO: 3006 - DNA, 282 bp, Zea mays
  Peptide Sequence Number=SeqID_44785
atggagaggagactccatgcacagtacaggagaattgcaagcgatctaaaagctcaaatctgcccggacactacaactggcaacgaatcaaagggagggcgcaggagcagaacgccggacgatggtagcaatggagcggacgccgggagcagtggaggcgtggagcggacgccgggaggcgggaccagtggacggcgggctgcggcaggcggcggccgagcagtgaacgaccaggtgactgggctgtggctggctaagtgggccaagtggctcttgggctga

SEQ ID NO: 3007 - DNA, 1440 bp, Zea mays
  Peptide Sequence Number=SeqID_44786
atgtttttcgacgggtcgttgatgaagacgggagccggcgcgggcctactcttcgtctcacccctcgggaaacacctacgctatgtgctacgcctccatttcccggcgtccaacaatgtggctgagtacgatgctctgatcaacggattgcgaatcgccatcgagctaggggtccgacgcctcgacgctcgcggcgactcgcggctcgtcatcgaccaagtcatgaagaactcccactgccgcgactcgaagatggaggcctactgcgatgaggttcggcgcctggaagacaagttctacgggctcgagcttaaccacatcgctcggcgctacaacgagactgcggacaagctggcaaaaatagcctcggggcgaacaacgcgatgcatctccatcgccgaaggtcaggaactcctgcaagagatacactcgggggcttgcggccatcacgcagcgcctcgagccctcgtcgggaatgctttccggcaaggcttctactggccgacggtggtggctgacgccactagaattgtccgcacctgcgaagggtgtcaattctatgcgaagcagacccacctgcccgctcaggctctgcagacaatacccatcacctggcccttcgctgtgtggggtctggacctcgtcggccccttgcagaaggcgcccgggggctacacgcacctgctggtcgccatcgacaaattctccaagtgggtcgaggtccaacctctgaacagcatcaggtccgagcaggcggtgacgttcttcaccaacatcatccatcgcttcggggtcccgaactccatcatcaccgacaatggcacccagttcaccggcagaaaattcttggacttctgcgaggatcaccacatccgggtggactgggccgccgtagctcatcccatgtcgaatgggcaagtagagcgtgccaacggcatgattctacaagggctcaagcctcgaatttacaacgacctcaacaagttcggcaagcgatggatgaaggaactcccctcggtggtctggagcctgaggacgacgccaagccgggccatgggtttcacgccgttcttccaggtctacggggccgaggccgtcttgcccactgacctggaatacggctccccgagaacgagggcctacgacgatcaaagcaaccaagctagccgagaagactcgctggaccagctggaagaggctcgggacaaggccttactacactcggcgcggtatcagcagtccctgcggcgctaccacgcccgaggggtccgaccccgagacctccaggtgggcgacctggtgcttcggctgcagcaagacgcccgagggaggcacaagctcacgcccccctgggaggggccattcgtcatcgccaaagttttgaagcccggaacgtacaagctggccaacagtcaaggcgaggtctacgacaacgcttga

SEQ ID NO: 3008 - DNA, 501 bp, Zea mays
  Peptide Sequence Number=SeqID_44787
atggcgcacggcggctacccgcgccgcggcgctgccgtacgcaggcccaagtcctcggcctctgccgctgttgccgaccgcaagcggaagcggaccgccgccgccgccaagaccacctcccttaagaaccagatccgctccaccgagcgcttcctccgcaaggaccttccggatgagattagggttgctcaagagaagaaactggaagaactgaagaggcaacaagagcttcagaatcaacttgttgtccagcggacattacagtttagagatagaaagataaaattctttgagagacggaagattgagaggatgataaggcgactcgagaagcaacaacgttcaaatggtgacggtgtcaacaataatctgtcaaaattgcgagaagatcttgaatatgttagagtaagcttcctacattactgccctgcccatgatgatatgacatataagtatcattacaactttgttttctgtgatgtatcattctctttgcattag

SEQ ID NO: 3009 - DNA, 681 bp, Zea mays
  Peptide Sequence Number=SeqID_44788
atggccggcaagatcgagatcttcaccatgtaccagcacgacaggctgaacgagaccggcatctacgtcttccgcgacgacctgaccctgcacaacgacagcgactcccccgtggccggcgtgatggagggggcctccatcatgacgagcttcgacgggctccacaacctgctggcggccaagatctcgctccgccaccgcggctacaggggctccgtgtccgtccttgggggctcccacaacaccaaacccttggtgtacccggtggtgggcggcaccggcgattttctgtacacggaggggggctccgtgtccgtccttgggggctcccacaacaccaaaccctcggtgtacccggtggtgggcggcaccggcgattttctgtacacggagagtttgctcatcgggctccttgctctctcgcagctgttttctctcatctatcgacggggaggaagccacgccgatggaggctacggctatcagcagagtaatttcaaaatcaaatcaaaaggcaaagcagttgttccaatttctgatgatgacagtgattttccaacttcactagaggagaagaagggaaaaatagcatctgcctgggaggttgcaatccaaactgcccattgtgcctcatgtgatgtgaagcaatttaatatgttctttgttgatgatatttcctaa

SEQ ID NO: 3010 - DNA, 1098 bp, Zea mays
  Peptide Sequence Number=SeqID_44789
atggagcgcgtcttctccatggaggagatccccaacccctactgggccccgccgcaccctcaaccggcggccggcggcgctgttgctgcaccaggtggagtaggaggagcgggggacgcggcgggcgcgatgaaccggtgcccatctgagtggtacttccagaagttcctcgaggaggccgtgctcgacagtccgggtcccgtcgccggcgtgggtagaagcagcggacaagctggagttgaggcggcggagagcaagccgctgggcgccgcggcgccggcgtccgtctcgagctcggtcgttgaccccgtcgagtacaacgcgatgctcaagcagaagctggagaaggacctcgctgccatcgctatgtggaggcacctccagatctttctgcgactgctgcttccttgccaagtgtcggtgctccgcatgcagctcctcttaaacccgtcggagtcagatgatgatgacatggaaggcgatgctgagacaaatggaaatggaaaccctgttcaacaaagacaacagagaaggaagcaatccaaccgggaatcagccaggcgttcgagaagcagaaaggcggctcacttgaatgaactggaggcacaggtagcacaattaagagtcgaaaactcttcgctgctaaggcggcttgctgatgttaaccagaagttcaatgaagctgctgttgacaatagggtgctaaaggcagacgtcgaaaccttaagagcaaaggtgaagatggcagaggactcggtgaagcgggtaacaggcatgaacgcattgtaccctgccgtgtcggatatgtcttccctcagcatgccattcaatggctccccttctgactccgcctctgatagcaccgtcccggtacaagatgacctgaacagttacttcgccaacccaagcgaaatcggatgcaacaacggctacatgccagatatagcctcctcggttcaacaggacgacaattttgtcaacgggtatcaggctgctggcaagatgggcagaacagactcgctgcagcgggtggcaagcctggagcacctccagaaaagaatgtgcggaggcccggcttcatccggctcgacctcctag

SEQ ID NO: 3011 - DNA, 456 bp, Zea mays
  Peptide Sequence Number=SeqID_44790
atggcaggcctgctgcagcacgctagtacatcaggccgaggacgtcgtcgtgggctcgtggcactcaacctcaagatggccactagtggctccgccaaacatgctttaacctatagcccctcctttgatctaatcctgaatccgccactgatgacacacgatacaacggcgggattggattgggagatgagaaactataaagcagaactgtccgaaactgcaaccggtgtatggtatttggcagccgcgacggcgagcagggccagcgccgccacgctgatccccggggcacaccgcccccgccacatcccctacgcagcccacgcgcaaccaggtctcctcgacccagatctctgccccgggagcggaggcgacgccgaggattcaggagttgcttcggcgcgagggagtgggaacgaatgggaagagctggagcagcggggcgacgaccgatga

SEQ ID NO: 3012 - DNA, 1779 bp, Zea mays
  Peptide Sequence Number=SeqID_44791
atgtggcgggggcggtgtgccccggggatcagcgtggcggcgctggccctgctcgccgtcgcggctgctgcaggagccgccgcgggggatcccgatcccgacgacctcgagcgcgcgtttccaatagtggagccagaccacagacacactaaacttcgtctctcagagcaaggtctagaagcaattcgaaggatcgaaactcctattgctgttgttggtgtcattggtccctatcgatctggaaaatcatttctcctcaaccagcttctctccttatcttgtgataaaggttttggagttggtcatatgcgagatactaaaactaaaggtatttggatttggggtactcctgttgagatggatgttgatggttccaaagtttctgtcctttatctagacactgaagggtttgaaagtgttgggaaatcaaatgtgtatgatgataggatatttgctttggcgactgtcttaagctcggtccttatctacaaccttcctgagacggtacgtgaagctgatatatctaggctttcatttgccgttgaaattgctgaagagttctatggaagagtgaaggggcaagatgttgcttttgagccagcaaagcttctctggcttatccagagggatttcctccgtgacagatatattaatgaggtcaatcaaatacgagattctttggcagttatgggcaaccacagcactgcttttagcttgccccagccacatcttcaaagaacaaaattatgtgatatggaggacaaagagcttgaacccttatatgtaaaacggcgggagcaactaaagcagcttgtttcgtccattgtaaaaccaaaaatcgtgcagggtagaactctaaatgggaaggactttgtgtctttcttgcagcagattcttgaggctttgaataaaggcgaaattccatcaactggatctctggttgaaatttttaacaaagccattcttgatcgctgtctgaaggtgtacagggagaaaatggatagcttaaacctaccagtgccggtagacgaactgcagaaacttcatgagatgacaaatggtgaagctagaattctctttgataagcagcactttggcaaacatcatgctgctcagtcggccctcaagcttgaagatgagattaaagaggtgtacagaaacttccttctagctaatgaatatcaatcgtcaaagctatgtgaagctcgcttttctgagtgtgaagataagatggatcaccttcaagtcttgaaacttccttcaatggcaaaattcaatgcaggctttactcactgcaaccaaagtttcgtaaaggactgcgtgggacctgcaaaagaaagctacgaacgtagaatgtcaaagatgcttgccaagtctcgtgctcttttcatcaaggagtacaataacaagcttttcaattggttggcgacattctctttggtcatggtggtgatcgggcgctttgtcatcaagttcttcctacttgaaattgttgcttgggtgatgtttatcttcctagagacgtacacgagaatgttctggtcagcggaatcactgtattataatccagcttggcacatcattgtttcttcctgggagatgatcgtgtacagccctattcttgatctggacagatgggccatcccaattgtcataatgctatcattgggggttctttactggaggtgcttcggccgcagaaggaagcgggtaaagggttccctcctcccattgtacaagaattcttacaagaactcgagtcgcccgagatcagattag

SEQ ID NO: 3013 - DNA, 2004 bp, Zea mays
  Peptide Sequence Number=SeqID_44792
atgtcgtccgcgcctctgaccgccacgccagcccctctccttcccgccaacaaacccaagagcgcagcaccgcagcacccgctcctctcccacctcccgcactgcaccagcctccgcgggctcgcccagctccacgccgccgccgttaaggccggcctcgccgcgcaccccgccttggtcaccaggctcctcacgctctgcaccggcccgggcgcgggccccgcccacctcgcctacgcccgccaggtgttcgacagggtgacccaaccgtcggacgccgtctggtacaacaccttgctccgcggctacgcgcgctcctcctcctcctcctcctcctcctcggcggcggcggtgcgggtgttcgtgcggatgctggaggagggcgtcgcgcccgacacgtacacgttcgtgtcgctgctcaaggcgtgcgccgcggcgcgcgcgggggagcacgggcggcaggcgcacgccgtggcggtcaagctcggcgccgcgggccacgactacgtccgccccacgctcatcaacatgtacgccgagtgcggggacgcgcgcgccgcgcgcgtcacgtttggcagggcggacggggactgcgtggtctcgtacaacgcgatgatcgccgcggccgtcaggagcagccggcccggggaggcgctggtgctgttccgggagatgcaggccaaggggctcaacccgacgcccgtgacggtgatcagcgtgctctcggcgtgcgcgctgctcggggcgctccaacttgggaggtggctccacgattatgttcggaagctagggctcggttccctcgtcaaggtcagcactgcactggtcgacatgtatgccaagtgtgggagcctggaggacgccattgctgtgtttcaggggatggaatcaagagacaggcaagcttggtcagtgatgatcgttgcgtacgctaaccatgggtatggcagggaggccatttcgctgtttgaggagatgaagaagcaagggatgaaacccgatgatattacattccttggtctgctctatgcctgtagccactctggtctcgtgagtgaagggcttcggtattttgacgatatgaaagatcatggcattgttccagggatcaagcactatggttgcgtgacagatttactagctcgctcagggcagctggagagagcttataagttcatcgatgaactgccaataaatcccacccccatcttatggaggacgttgctttctgcttgtggaggccatggagatgtcgaacttggcaagcgtgtctttgagaggattcttgagctggacgattctcatggtggtgattatgtaatattctcgaatttgtgtgcaaacactggatactgggaagagatgaatagggtaaggaaactgatgagcgacaaaggtgtggtaaaggtgcctggctgcagctcaatcgagatagataacacggttcatgagttcttcgcaggagatggaaggcaccccaaatcacaagaagcacggaaaatggttgatgaagtgatcgatcaactaaagcttgttggttatatccctgatacctcacatgtgtttcatgtcgaaatgggtgaggaggagaaggcgataagcctaaaataccatagtgagaagctggcaattgcttttgggcttctaaatactgctccaggggctacactgcgtgttgtcaagaatctccgcgtatgcccagattgccattcgatggcaaagtttgtctcaatggtcttcaataggcgaattatactcagagatctcaatcgcttccatcactttgaaagagggatatgctcttgtgctgcctctccagtctccccacatcgctgccctcgtccaccatggatcggcgtcctgtgcgggccgctgccgacaagttcgtcctatgccaagctcttgaccctctgccacaatgtcgccgcaaagggtgccaaggaacccacctccacggttgttgctgctgtcatgctgcaagcctgcgacacattcatgtcctag

SEQ ID NO: 3014 - DNA, 606 bp, Zea mays
  Peptide Sequence Number=SeqID_44793
atgacgctcgcgcccggcgagagcgggcggtatcgcctcgctctcgcccgcgctggagcgctcggccgggcgagagggaggcgagagggaggcgaggcactgctcctcagccctcagtgcaagattcaacctgctacagttctccttgcttccgcagttatcctgcacagagcttcccgtactcccccattcccgactttgatgaggctctcccattgtgagagccactgcgccggccccttccgcttcatcccctgcctcctcccatccaaagatgccagccgcgacgctgcctccgcgccggcgccgcgcccggccgccgtcgccgaggaggagccgcctccggttcagaagatagaggtgccggaagccggaaaggacggcgacgctgagaagcacgaggatgacgagaaggcgacggcgccggctaagagttgcctgaagagaaccagctgcggcgatgacaggtgtgccgacaaaggcaatgtaaagtggctggatttgctggggaaagatctgacagagattaaggagtacgagccaaggtccgatgacggctggcattgtcgctctattctagggatagaacaagtctacttgtactaa

SEQ ID NO: 3015 - DNA, 2754 bp, Zea mays
  Peptide Sequence Number=SeqID_44794
atgggagtaccggcgttctaccggtggctggcggaccgctacccgctgacggtgtctgacgcggaggaggaggagcccgtggagctcgagcccggcgccttcgtccccgttgacctccgccgccccaatcccaacggcctcgagtttgacaacctctacctcgacatgaatggtatcatccacccatgcttccaccccgagggccggccggcgcccaccacctacgacgaggtgttcaagtcgatttttgattacatcgaccacctcttcggcctcatccgccccaggaagcttctctacatggccattgatggtgttgctccaagggcaaaaatgaaccagcagaggtccaggcgattccgggctgctaaggacgcggctgatgcggcagcggaggaagagaggctgaggaaggagtttgaggcagagggtaggactctagcccagaaagagaagtcggaggcaattgactccaatgtcattactccagggacggagttcatgtttgtactatctacggcgcttcagtactacatacagctgaggctgaatcacacgcttggatggcagtctgtaaagataatactgtctgattccaatgtccctggagagggagagcacaaaattatgtcatacatccgcctgcagcgcaatcttcctggctttgatcccaatacacgccattgcttatatggcctggacgctgatttgattatgcttgctctagcgactcacgaggttcacttctcaattttaagagaggtgatctccatgccagggcaacatgaaaaatgttttctttgtggtcaagttgggcatttggctgctgaatgcagaggtcctagtcagcctgataattctgtggagctacctcctattcataaaaagaaataccagtttcttaacatatgggtgttgcgtgaatacctggcaaaggatttggaaattatagatgctcccttcaagataaactttgaacgtcttattgatgattttgtgtttatgtgtttctttgttggcaatgactttcttcctcatatgccaactttggaaattcgtgagggtgccattaatcttctcatgagtatctacaggtcggagttcacatcaatgggtggttacctaactgatgtgggtgaggtgaagttaggagagccaggatacagggagcgttattatgctgataagtttaaagaagaggcagaatcaaaacccattgttcaagttcggagagatgttagcctaaggcggctgcgagctgcagcacggctgctgctgcagcgcatcggagggcggcgcgacgacgaggtcggggtgacggcggtggctgcgagagagcgggagaagcggggagagggagggaggcgctgctccaatgcactgccaaaatactatggggatttgatgagtgatccagattcaccgttgaagtctttctacccaaaagattttgagatagacatgaatgggaaacgttttgcatggcagggtgttgcaaaattgccttttattgatgaaaggcgtctgcttgcggaaacaagaaaacttgaagatactttgacagaagaagagaaattcaggaataggactatgcttgacataatttacgttagagatactcatccattgatcactcagattatcttcctgtatcagaactattaccatctatcaagaacagacccttatgttattcccattgagcctgctgctagtggtggaatgaatggattcctatgtttatctgaaaggaactggtatagtgtcactgtcacttctccagttaaggggttcaatggcattgctcagaacagagttttgaatgctgcctatctcaatcctcagtatcacaaacacatcccagagcctccagcgggggtcatcatacctgcgaagatactgaagcctagtgatttcaaaccctttcctgtgttgtggcatcaagataatagtcgtcgacaagtaagagaaaggcctcaggtttctggagccctgtccggttctctcttaggagaagctgcacaccgactggtgaaaaactccctccagatcagatctggcaatgctgctgggttactttatatgccatacagaggtgcaccctatggccctggaaacagaccaaggcctgctgggccattggggtatgagaggggttttgtggataatccataccatgcacacatgtctagaagtgttccaaaccctcacgctcaattctttggtgattctcaagctaacagacagcccatgcggatactagaacggccagactcccgaagtcatgatgctggtatccgtgcatcaatgtctaaactgacaatccaagaagggccaaggcctcatcaaaataacaggatgcagaattccgggtactggcccaatcaaccacatcctactcactttactggacccccagcccagcggcctatgcagaacatcagttttacacctcagcgacctttccaaaccgggggatttccgcagcagagacctgtaaatggggctccaccaccattacctcccagtaactggattggtaagcaaccaagtggatgccacatgagtgtatcacctgcaaaactcgatccaaggacagctccagacagacagcccaagcaggataacccaagatctcaacaggataagaggcagcaggcgaccaagagggtttccatgtatccctcccacaatttacctttcgatgttgaattgtttgttgtattacccggaaaggagtcggctaaattttag

SEQ ID NO: 3016 - DNA, 228 bp, Zea mays
  Peptide Sequence Number=SeqID_44795
atggacagtggtgtgcatggaccacaggcaggcatgatgaaattaggggcctccggtcgcggagcaaaggtttacacggactcgtccatgggaatttgggattgggatcaagaccgctacatttcacacttttcacggatgcagaagtgctcctgctttgcgttagtgtcgtggcttggcttcactggaggttctgtgctcatgtttatccgcaagccatctgagtag

SEQ ID NO: 3017 - DNA, 1512 bp, Zea mays
  Peptide Sequence Number=SeqID_44796
atgacgaggatgagcttggcggtgtcggcgacgttctttgtgctcgcggtcgcctcggcggcgcagccggcgccgagcatgcccccgccggcggtggccgtgaacagctcccggctggagaaggcgtacgtggcgctgcaggcgctgaggcgcgccatcacggacgaccccaagaagctgacggagaactggtgcgggcccgacgtgtgcaactacttcggcgtgtactgcgcgccggcgcccgacgacccctgccagcgcaccgtggcctccgtggacctcaaccacggcgacctcgccgggacgctccccgaggagctgggcctgctgtccgacctcgccgtcttccacctcaactccaaccgcttctgcggctccctccccgagtcgctccggtccctgcacctcctccacgagatcgatgtcagcaacaacaggctgtccgggcccttcccgtcgcagctcctctgcctccccagtgtccagtacgtcgacatcaggtttaacaacttctgcggcgaggtgccggcggccatcttcgacaagaagatcgacgcgcttttcatcaacaacaaccacttcgagttcacgctgccggccagcttcaccaactcgacggcgtcggtgatcgtgctggcgaaccttccgcgggtgagcggctgcctgccgagcagcatcggcgacatggccggcacgctcaacgagctcatcctcctcaacagcggcatctcctcctgcatcccgccggagatcggcaagctggacaagctcaccgtgctcgacctcagcttcaacagcatcgccggcgcgctgccggacacgatcggcggcatgcgggcgctggagcagctggacgtcgcgcacaaccggctcaccggcgagatccccgagagcatctgcgagctgccgcacctcaagaacttcacctactcgtacaacttcttctgcggcgagccacgccggtgcctcgaggtgccgcgcgtcgacgaccggcagaactgcatcgctggccgccccgaccagcggccaggcgaggagtgcgtctcattcctacaccaaccgcaagtccactgcgacgcccacgggtattcaggtcactgtagaggctctaatgctgaggtcccttcgaccggggttgactggtcccaccgacgtggtttggtgatggttcattttatcgtgctgacgtggcttgatagtattgtgtcggctcttcctccttgtagatgtgctcgccaaagagtcggttgtcgtcttgctgggttgctcggcgggcgagttggtcggcagtcccgcttcgccggatcgctcgacagacgggttggtcggctgtcccgccttgccaaatcgctcgacaggcggttggtcggtagttccgcctcgccggatcactcggtaggcgggttggtcggcagtacaggtgtacttctgggccaggctaaaagggccagcacgaggcacaacatttttggcccaatccgagcacggcacgacacgaagtttggcgggtga

SEQ ID NO: 3018 - DNA, 351 bp, Zea mays
  Peptide Sequence Number=SeqID_44797
atgggtctagcgatccatccctctggctcctgctcctctgagagctccatgctgtggctcgaactaccaccatcgtcatcatctccatctcagtcagggtctcctccagcagctgggataccctatagtggtgtagaggcatctctggttgaggtgcaggggaaggctgcctcccagactccacctcctactgaggcgaggggaagagtcctgctgctcctgctcctggtgtcggtgctcctactcctcgtgcaggcagcgatgcagtctctccaggtggctagattgacctgtcaccgtgcgacgcagtgggcgctccacaagccgagagggcaaaaaggggatcactga

SEQ ID NO: 3019 - DNA, 459 bp, Zea mays
  Peptide Sequence Number=SeqID_44798
atggccggccggccgccgccccctccttccgccgccgccgccaccttcccccctctccctctctcctaccgagcagcactcgtcgcgcccctagcggccgcattcgaccaggcgcgcgccgcccccgctactggcgtgccgccgggactcgtcgcgcccctggagctgtccgccatcacctcatccctacgtgctccttcggatgacgctgcatccattctcaccgccacccgggtagccgttacgatggcttgccaaaaggcccaggacgtcgcccgtgctcttgagcaggagcaggtagttgttgacgctatcaagcgccagtacaccgagacctaccgccatctcgccgtcaagggcgtgtcgaatggctcccccacattcgctcgtcacagtgccgacaccttcaagcctgcgcccaccctagcctcaactcttcgtgcctctcttcacgcttag

SEQ ID NO: 3020 - DNA, 246 bp, Zea mays
  Peptide Sequence Number=SeqID_44799
atggccggcctgctcgtctccggcgaactctcgtcgcaggaccgagcggcgccactgcgcccaagccagccctggccgttagatcttggtcgtctgttcgagatcggatggttcggactcaacccgaacaacgagcagctcatggttcctgagtgtgttgccaaagatccctctcagcaacaacctggaggtgaagctggcaacatggaggacttcgaggagttccaggactacgacgagttctag

SEQ ID NO: 3021 - DNA, 270 bp, Zea mays
  Peptide Sequence Number=SeqID_44800
atggcgaggagcttttcacggtgccagaaacctgatatgggggagatgagcaattcgtggtctctggtgaacaattggaggcaagtgctggtgctttggatgggtaattaccctacggagctcatggcgtactcaatttataggtctcctgagcggtggctagtgaatttgaaggagacgcgcggcggccggagagggggaagagcattggcgcaagcgattggtggcatttaccgtggcgggctcaccggcgatgaccggatgtgctag

SEQ ID NO: 3022 - DNA, 2229 bp, Zea mays
  Peptide Sequence Number=SeqID_44801
atgcacgaggccacgagagagagccagagagggttgcaacttgcaagtaatactccagcggacgacctcggatcctctgacgatgtggcgggtcctgggaatcagtcgttgaccaagaataagaacgggggcacagctttcgccgccgctccccaggcctgcagccggccaggtgcgggcgtccgtgcgtgcgtgctccggatgggggcgtcccacgacgacgaggcggggccgctggcgagcctcctggcggcgcgccgcgcgctgcgggccggcctggacaagtcgcgcgcgctgagccgcgcgctggcgccccggctggaggggatccaggcgcggctgccggccatggaggcgtcagtgcgcccgatccgcgcgccgccggaggcgctcgccacggcggggcccaacatcgaccgcgccgtgggccccgccgccgccgtgctcaaggtgttcgacgccgtgcacggcctcgagccgccgctcctcgaccgcgccgccgccgccgccgacctcccgggctacctcgccgtgctcgcgcagctcgaggccgcgctccgcctcctctccgacaactgcggcctcgccacgcagtggctggccgacatcgtcgcctacctcggggagcgcaggctcgccgacgcccgcttcgtggccggcctcgccgccgcgctcgaccgcctcagggacgacgcctccgccggcctcgacgccgggctgctcgccgccgcgcttgacatgctccaggctgagttccgccggctcctcaaggaccactccgcgccgcttgctatgaaggaccccgacggctctggctccgatccgccccccgtcgtcccttctcggatccctgccgcagtcgtgcacaagctcagcctcatccttgaccgcctcgctgccaacggccggcttgaccactgctcctcggcgtatggggacgcgcgaggggataccgtgtgcgccagcctccgcgcgctcggccttgattacctcaaggagacgtcgggggacgcgcaggcgctcagcccgagcgtcgagcgctgggcccggcatctggagtttgcggtgcaccacctccttgaagctgagagaaagctctgtgtcgcggtgtttgaacggcggcctgaggccgcgcccttgtgctttgctgagattgcagctcgtgctggcattcttgatttcctcgactttggccgtgccctggctgatgccaggaaggaccccatcaagctattgcggctgctcgatgtgttccattgtttgaacaagctgaggctggatttcaaccgtttgttcggtggaaaggcctgcgtagagatccaaagcaggactagggagctcgtcaagagggtcgtggatggtgctgttgagatctttgaggaattgcttgttcaggttgagctgcagcgcactataccgccaccagttgacggcggggtgccacgcctagtgagctttgtcgctaagtactgcaatcagcttcttggggagcagtatcgatctgtgctaacacaggtgatcaccatccaccgcagctggcgcaaagaagtgtttaatgacaagatgcttgttgatgcggtgcttaatatcgttaagacacttgagctcaactttgatacatggtcaaaggcttatggagatacaacactgtcgtctctcttcatgatgaacatacactggcacttcttcaaacacctaaagggtactaagctgggcgagctgttaggtgatccatggctccgggagcatgaacagtacaaggattactactcagcgatgtttctgagggagagctggggaacacttgcacccctgttgagcagggagggcctgatcatgttttccaagggccgggctactgcaagagatttagtgaaacagaggctcaaatcattcaatgctagcttcgacgagatgtttcaaaagcagtctaaatgggtgatatcggatagggatttgcagcagaagacatgccacctcgtggtgcaggccgtagtgcctgtttacaggagcttcatgcagaattatgggccgcttgttgagcaggacgttagtgcgagcaggtatgtgaagtacagcgccgaggatctggataagatgctcaacacgctcttcctgtccaagccaggcaggccaatgagagctggaagcttccaaatcaaaaattcgaatgacaagattaccagtgcaatgacaggattgtatcggagtgcttctactctgaagtag

SEQ ID NO: 3023 - DNA, 192 bp, Zea mays
  Peptide Sequence Number=SeqID_44802
atgtgcgtactgcgtagcagcttggctgtttggatctccgaagtgccgcagggagtcagcttggatctctggactgcggcggggcgggactgcgggagtctgggaatgggagaggacagaggagagatggagcatggagttgggcggcggctggagtcgctggactctggagagtggccgggaagagactag

SEQ ID NO: 3024 - DNA, 2967 bp, Zea mays
  Peptide Sequence Number=SeqID_44803
atggcagatgccctcttggtcgttctcagaaaagttgctctgttcctgggagaaggagcactagaaaagattggcaaagaggtagtcgaagcagcacccctcatgacagattttgagcatagcatgaaacaaatagagggtgaactctcggttctgcaggcctttattaaccaagttagtgcacagagagtcagtgacaaggcatttgatgcatggttgaaccaagtcagagatgctgcccatgaggtagaagacatcattgatgagtacgcttaccttactgcacaagccgttgatacgagcagcttcttcaagagaaagttccaccagatcaagaacattgcagcatggcagaagttcccaagccagatcagtcaagtagaagcaaggattcagaggctatcagaaatgaggaaccgatatggtttctcgctgggtgaaatagacaggaataacaattttcagctctccagtcacttttgtctgtcagattctgagatagtaggaaatgccgatgaaatcggaaaactgacacaatggctacttgaggagaaacaagatcggtctctaattgccatccttggtatgggaggtttaggaaaaactgctgttgcaagcaccgtctacaagaaccaaaagatcataacatcttttgactgtcacgcatgggttattgtatctcagacttaccaagtcgaggaactactaagagaaattataaatcagctaataataaaggaaagagcaagcatggaaagtggcttcatgaccatgagtcgcatcagattagttgaggtaatacaaagctatttgcaggacaaaaaatactttgttgtcctggatgatgtatgggataaagatgtttggttaattttgaactatgcatttgtcagaaacagacatggtagtaaagtgctgataacaagtcggagaaaagatgtgtcgtctttggcagctgacaaatatgtcattgaacttaaaacccttaaagatgctgaatcttgggagctgttttgtaagaaggcatttcatgcttcagaagataacatttgtcctgaaaatataagatattgggcaaataaaattgttgcaaagtgccaaggattgccactggccattgtaactattggcagtattctgtcataccgtgacttaaaggaacaggagtgggcatttttcttcaaccaacttagctggcaattagccaacaatccagagctcaactggatttcccgtgtattaaagttgagcttgaatgatctaccaagttatcttaggagctgcttcctatactgcagcatctttcctgaagattacaagattagaagaaagatgatttccaagctatggatagcggaaggtcttgtggaagagagaggagacggaacaacgatggaggaagttgccgagtgttaccttatggagctcactcaacgttctctttttgaggtcacagaaaggaaaacatgtggaagagctagaacatttctgatgcatgatcttgtgcgagaggtaacttcaatcattgctaaaaaggagaagtttagcattgcacttgcacatggtggtgccagtacaacccaagttgcccatgaagcacgccgcctatgcatccaaagaggtgcgcagaccattaattctttaagaagctcgcggcttcgctcattcattttgtttgacgctgaagtaccatgttcttggatacatgatactgtatcatgtttcagactactgagagttctatgcctaagatttgtcaatgttgaacaagttccaagtgtagtcacagaactgtataacttgcgttatctagatatgtcatacacaaaagtgaagacggtccctgcatcgttcggaaagctcgttaacctacaatctttggatcttagagagacctacgtggaggagttaccactggaaataactaggctaactaaattacggcagttacaggtgtatgcactctatgatattctacaaagatcatcaaaatttctcagtgctacaaaaattcctggtaacatttgtcatctaaaggatctccaaactttgcatgttgtttcagccaataaagttttggtttcacagctggggaacttgaagttaatgagaagtttggctatcgcggaagtgcaacaaagctacattgcagaattatgcaactcgctgacaaagatgactaacctgaaaacactatttatttccacgtgcaatgtgaatgagactctcaacatagaaatgctaaagccgctgccaaatctgacatcatttctcctatcaggaaagttggagagaggcttgcccccgtcgatattttctatgaatttaaaacagttaaaattgttcgggtctagtctgaagaaggatcctgttagctcgttctctcatatgctaaatcttgttaatctattcctcactggagcatatgatggggaacagctaactttttgcaccagatggttccccaatctcaaatatctgcaattagctgatatggaacatctgaattggattgagctagaggatggaacaatgatgaatctacaatatttgtcacttgctggtttaaggaatctaaaggctgtacctgagggcatcaagtacattagggcactccatgagatgcttctgacagatatgccaaatgagttcatgctaaaactgcatggaagtgacaatcacattgttcaacacatacccaacataaaaaagtatgactcttctgattctcaagcagtaaacaacctggcttatctgccgtggcttgccaataagtttggtcctggtgctgcaattaaaccagaatcattcctagtcaaggcactgtacacggacttaacagaaaaaattatcatcctttctgagtttccaactaactatatcagcgtctgtctgcctggaggacgaagtgtctgcattcttgtagcgtacatgagccaagccacgcttgacagcgttgatgcataa

SEQ ID NO: 3025 - DNA, 669 bp, Zea mays
  Peptide Sequence Number=SeqID_44804
atgcaaaggcctgatgggcgcaatacaggtcaaagctccgtccactcaagggacacgatctcgcctcgcccgaacccagcctcgggtaggaacaatagacccaggtggattcacgcctcgcccgagggcctcctcaagcaacgggcgcaccttcgactcgcccgaggcccagctcgggcaggcttcgcggagaagcaaccttggccggatcgcctcgccaaccgaccgtatcgcaggagcattcaatgcaaggatcgcctgacaccttatcctgacgcacgttcctcagtcgacagggccgaaccgagtccagcctcaggcaccataggaagctccgcctcgcccgaccccagggctcggcccccacctcgacctcggacgatggtctccgcctcgcccgaccccagggctcagactcaacctcgaccttggaagacggtctccgcctcgcccgaccccagggctcggactcaacctcgaccccggaagacggtctccgcctcgcccgaccctagggctcggactcaacctcgaccccggaagacggtctccgcctcgcccgaccccagggctcggactcagcctcgaccttggaggagtcaccacctcgcccgaccttgggctcggaccgaccacgttacaggggggccatcattaccctacccctag

SEQ ID NO: 3026 - DNA, 174 bp, Zea mays
  Peptide Sequence Number=SeqID_44805
atggagagctgggagctgctgcttctgcataatctgcaatttcagtttggaaaccgccaagatgaaggtgtggttaacaataggttctttagtaacctcttttatgtgcaaagcactaagaatgcactgaccgacatatcaaaatatgccaaccagattgcggtagacaggtga

SEQ ID NO: 3027 - DNA, 516 bp, Zea mays
  Peptide Sequence Number=SeqID_44806
atgtccgttgtggcggccgtggggcccgcggcggcggcgtcttacgggcagccgctgtgcggcggcggggcgaggaagaggaaggacgcgggcgtggtccaggaccaggaccaggaccaggatgcagggtcgtcgttgcggggtggtaagaacgccgcgctgttcgtgctggaaacggtggaggaagaggcggacgcggacactgagaggtcgtccatcggcgcggcgtccgaggacggcgacgacgaggaggaggaggaggtggctagcggcgggacgaagggcgccggcgccgcgctcgcgtgcatggacatgggcgccctcgacgacgcgctcccccatcaagctaaaaagagcctcgctgacggtccggccctgaagccggatggtccgcggttcggacagttcgcggtggtggcgcggacggtccgcgcgtacacagagtcagttagggttactagtttatcgcagaatttgttacctaagaccgcgggattaactcagaaatcagtttga

SEQ ID NO: 3028 - DNA, 276 bp, Zea mays
  Peptide Sequence Number=SeqID_44807
atggtcgtgcccgtgatcccgtcaacctttgctcgatgtccgcatcttgtgttcgtatcggagaagaatcctaggattatggggaaaggaaagctccagcgcatcatccatcaggtgttctgtgatttgggtgaatcggtggtcgtcgtcgttcttgttaataccaaatcgatatgtgatgtgtttctttgtggtttatatatgctgttctgtggcgagggtttgtcgtttggtcgtgttcgcctggggatagctgacaggttgtttgatgattaa

SEQ ID NO: 3029 - DNA, 207 bp, Zea mays
  Peptide Sequence Number=SeqID_44808
atggagaaagggcatgtcggctacgggttgcggcggtcttatagtggcgaggtggggcggttagtggcgctggccccggcgaagttctcagcccacaccattgcggcgcgcgcggcaatttcgcgcgagtctgttgcagcggaggggaacgagctgacacaggtgtctttggttatttacttttttatggtgttcattcacatgtga

SEQ ID NO: 3030 - DNA, 330 bp, Zea mays
  Peptide Sequence Number=SeqID_44809
atgccgatggacgcggtgcggtctacgacgatgcgcggcacggccccctccccatcgaccgacgagaaatcacgcgagcaccagaggcgcttggtccgtcctgaggacacgggcggccacccaaggtcccgacgcactcccacaacaacgcgcagagaccagaacatcgtcacagaaggcgatcgccgtccgctcctgctcctcatgcaagcgacgatgcagtctctccaggtgactggtgctagaactcttcaaagtcctccatgttgccatcttcacctcctgagcactgtgtacagtggggacaacctggggtggggtggtttgtaa

SEQ ID NO: 3031 - DNA, 1002 bp, Zea mays
  Peptide Sequence Number=SeqID_44810
atggagcaggggaggaatcaacagcacccgcagcagttgtcgagtccgcctgttttggccgccgcgagcgagataaaggcccctgcggtgccttcgcaacagcccaagccggcggcccccgtgatgtcggtgcctagacagtggccgatagctttcaaccccctgaagtcctccactgaagaaaaaagtgttactccaaagaaaaagaagcattgtaattgtagaaactcaaaatgtttgaagatgtactgtgaatgctttcaagaacttcaatactgtgatggctgcaactgttcaaattgtggaaacattgttgggaatgagaatgccagaaacgaagcaattgaggcaattcgtcagcgtaatccgtctgcttttcagcctaaaattggaaatgactcaaatacactcaacgttcgaaagctgatcactgcatcttttccatcagagcatggtattctcttcatgaactcgaggagtgaaatcctggaggataattctggagcagtccctctcgtagcaaagcaccataaaggttgtcattgcaagaagtcaggatgcctaaagaagtactgtgaatgctaccaagcaaatgttttttgctccaaaaattgtagatgcatgcactgtaagaactctgaaggaaataaagatacagaaacttcaattcaaagggaccatgcatctgacagaaatcatattgaacaagcagctaatatagcattcaatggtagtgttggatcatcaggatatatttgttcccttagtagaaaaagatctcatgaagacacccaatgtgttaggataaactctgaaggaagcatgccagagacacaatatcaacagggtaaccatgcagatgtttcaatgcttccaccctgttccacaggatttgatgggcacaatgctgccaatactaaaccgtataacccaaactacagtccttcagggatgaacgtcacctttggtgctttgtgggagcaagatgtttgcgatctttag

SEQ ID NO: 3032 - DNA, 519 bp, Zea mays
  Peptide Sequence Number=SeqID_44811
atggcgcacggcgcggcgttgcagcgcgacccgggcgggaaccagtggctcgtccaccggtcccaggctggagggaggagggtgaagttcacggtcgaggcgcgatgcagaaaggggatggtgtggcagagcgattcgcgcggaggtcgtggggtctgtttacgccgcgctattcttgcggggaagaagaagaccggacggcgtgagggcccactagcagcggcagtagcggtagttgatgcgtggggtgagtggctccggggcagcgactgtgtttgtttacgcgagatccacgggtggacgacggaaattcattgtgtcgtggactcaggggagaagacgacctccgacagcacggacccacgcgtcagagaaatagataacggtacgcgcagcgggcgactgacaactaggacccaccagccagtgacgcgtgagacggcgctagatggccacatacgtcggtcggcgctgtttccaggattgggctgcgcagaaggagatcgcaagatgggctga

SEQ ID NO: 3033 - DNA, 738 bp, Zea mays
  Peptide Sequence Number=SeqID_44812
atgcagtgttttctcaggtctccactggcaaacaccatccacctcagtgaggtcaatgatctagtcaagcagttggtgatggtttgcagaatggctgcagcgacaatagctgatgatgaaacagatttgattgctgaagagaagggatcccagtcaaataatgggttaagcaatggtaactgcaaacagcaggacttcaaagaagcctcctccatggtcatccttagcgaaggatgtagtgaccaacccaacatcgatgaaacgggctcccatcggtctaaaacattggatttttctaggcctgcatctccaacaacacaagcactaatgtgtgatgaacaggatgccacatttggaaatgagcctgcatctccaacaacacaagcactgatgtgtgaagaacagaataccacatttggaaatgattatagaagttcatttcctttggtttcgtgtgatcaagatatttctgagataaatgctgcacaagaaaacctagtattgactgggttgcgagagtatctccgggtgattatcacacgtggaaaaataaatgaacacaaatcctcattagaggcagcaatggaattggatgcccaacagcatcatggagcaccacctgccctttctgcaacagaagatgaagaaaaatctcctccttcaagcactattgaaaccccaagaactaatcaacagcctacaccaaatggtggatcgaaagatagtattggaagctaa

SEQ ID NO: 3034 - DNA, 456 bp, Zea mays
  Peptide Sequence Number=SeqID_44813
atgaggtgcctgcctttcttgcatggagacgtcagtgagaaggatcctgtcactaagtcggcctctgtacggtccatgagcacaacatcgcgctcccgctccggttcagacttcacctccttgaatgtttccgacatgagcgccgagtcaataaggaggacacagtaccccagcttcactgactgcccgtctaacctgagggtgttctcctttgctgaattgaagagtgccacacgcaacttcagccgatctctcatgcttggcgagggtggctttggctgtgtgttcagcggcatcatcaagacctctgacaaacctaatgaacgaattgagattgctgttaagcaattgaaccgtaaaggacttcaggcaagtgattctcgccatgtttccttttttttgtccgacaatatgtatgagagctcgacatctttgtattcggtagaaaataattaa

SEQ ID NO: 3035 - DNA, 582 bp, Zea mays
  Peptide Sequence Number=SeqID_44814
atggcggctgcggcggccgccagcatggtggtggtgcgggaggtcctgggcctcgatgtcgtcgacgaggtggaccagcccatcatcgactacatcgccaacgtcctcgccgacgaggacttcgacttcggggccccggaagggcacggcatcttcgaagcgctcggggagctcctcatcgactctgggtgcgtctctgaccaggagcactgccttcaggtctgcagtaagctttgtgaaaagtttggaaagcatggtctggtgaaaccgaaacaagctatgcgcagccttgtcacaccattacgaatgaatgcggggatggacgatgatgtcgctcccaaaaagccgcagcctgaagttcaatatcaaatgcatattgcggagatggagacacttagggctggaatgcctcctgtttatgtaaaccacagtaatgatggtgggccagctgttagggatatacatatggagaacttcagtgtcactgttggtggtcgtgatctaattcaagaagccactataacacttgcttttgggaggcactatggtgagtactctgtggtgtttggtagttttcagtag

SEQ ID NO: 3036 - DNA, 384 bp, Zea mays
  Peptide Sequence Number=SeqID_44815
atggtggagtacgtcggtgagccctcccccaatccgctccaattagcgattctcgactctaatcaaccctactcgaagcggacgaggttgcgaacatgggagcacacacgtaccggagatggtgacgacagggacccttctccatggcccgtggtggcttgcgacggtggtgaatcccgactgtcgattcctggagccccggatggttcccccgcacaacgacgctacaagtacgtgcggcgcggtcgagtaatggtcccaggtgccagagatcgccgcagagtcttccccagtgtggcgctgcccgaccacggcgatggttctcccggggcggtgcatagggcttcccccggtgttaaggcggtcttggattttagatgctag

SEQ ID NO: 3037 - DNA, 153 bp, Zea mays
  Peptide Sequence Number=SeqID_44816
atggcgaacatcatccgcaagtgctgggacccgaacctggataagcgccctgacatggatgaggtggtgcggttgttggaggccctcgacacaagaaagcgcggtggcatgacaccaaaaggccaggcgggcggcatgttggaggaactctag

SEQ ID NO: 3038 - DNA, 660 bp, Zea mays
  Peptide Sequence Number=SeqID_44817
atgttggagctgctggtgctgccgccggcgctggacctcctcctccacagctgcctcatcgtgtcggtgtcatctctactgatcatgctcgcgctccagccgctactgcccggcggcaccgacgtggcctcagcgagcaggggcgtgcgctccgcgtcgcgggcggtcctcgcgcgcctcctgccgtcgtcgtcccgcacccgcagcggcgtgcccgtggcgccgcctcctcctcctcctcccccgcggcattgcgagctgtgcgccgcgtcgtcgtggccgggcaccgtggcggccgtgacggcgaccctgcacctggacgccgacgccgacggcgacacggagcgctcctccatctcctccgccgaggaggacggcaccgcgtgcggcgggtgcgcggcgttggcggcggtggaggagctgctgggaagcaaggaggcgacggagcgcgagctgcgcgaggcgttccgcgtgttcgaccgcgacgaggacgggttcgtgggcgccgccgagctctggtacgtgctgcgccgcctcgggatgggcggctcgagctcggcgcgggaggactgcgcccggatgatcgcggcgcacgacgccgacggcgacggccgcatcagcttccgcgagttcagggacatgatggagcgcgcggtctga

SEQ ID NO: 3039 - DNA, 1380 bp, Zea mays
  Peptide Sequence Number=SeqID_44818
atgggtcctgaatcagctgacgtcgcccgtgacgccacccgcggtcccgtccaatcccgggtcgctgaggtggccgtccacgagcctgtcgcaccaccacgtgccctttccctcccgaacccacacccacctccgctttcccgcggcatcgcactaccgcccgcccgccgctatatatccttcctctgcccgcggttctcagcttcaatgacagcgcagaacccgcccacaggacaggacacacagagccgagccaccccacccaccatcggcgaccagcagccagccgcgggagcgagctgtttaaagacaccgagtcggagtcggacggaggactggcaggcacaaccgaagccaccgcttctagttctcgggttcatcgccagcaatccagaccacataatgggacagccggtgacgaggaggagggagagggacgcggaggcggagctggacctgccgccggggttccggttccaccccacagacgacgagctggtggagcactacctgtgccgcaaggcggcggggcagcgcctccccgtgcccatcatcgccgaggtggacctgtacaggttcgacccgtgggacctgccggagcgcgcgctcttcggggcccgggagtggtacttcttcacgcccagggaccgcaagtaccccaacggctcccgccccaaccgcgccgccggcgacgggtactggaaggccaccggcgccgacaagcccgtcgcgccgcgcgccgccgccgccgacgcccgcacgctcgggatcaagaaggcgctcgtcttctacgccggcaaggcgccgcgcggggtcaagacagactggatcatgcacgagtacaggctcgctgacgccggccgccgcgccaagaaggggtcgctcaggttggatgactgggtgctgtgccggctgtacaacaagaagaacgagtgggagaagatgcggctggggaagggggcagccgccggcgcagtcaaagaggaggaggccatggacatgagcacctcccactcgcagatcacccactcgtggggcgagacgcgcacgccggagtcggagatcgtggacaacgacctgccgttcccggatccggcgatgatggtgcccaagaaggagcgggtggacgacggcggcagcgccaggaccagcgacctgttcgtggatctcagctacgacgacatccaaggcatgtacagcggcctcgacatgctgccgccggccggcgaggacttgtactcctcgctcttcgcgtcgcccaggggtcagggggaaccagcccaccggacccgcggggttgggccccttctgagtgagctcaggcgaggatggaggcatggagatcaggagagaagacggacggcgttgccaactctgtaa

SEQ ID NO: 3040 - DNA, 1173 bp, Zea mays
  Peptide Sequence Number=SeqID_44819
atggagggggcagtacaactacgtacaacgtactacaagcgagtgggagcagcgcaagtccaggacacggacacgcgggttccactgccgcaactgcaacggcggcagcagccgcaaccacccaacccaacccgcgcccgtcaaactatcacggacggaaacaccgttccggaactattaagttcatatatatataatagttccacaaaggtgtgtgtggaaactatgatgcacctgacatgtacaaacatgccagtagagaagattgaccatgccttggaaaccatcaaattcaatgggattcataatgttttggccctcagaggggatcctccacatgggcaagacaagtttgtgcaagttgaaggcggatttgcttgtgctcttgatttggtgcagcatattagatccaagtatggtgattattttggcattactgtagctggttatccagaggcacaccccgatgcgatacaaggcgagggaggtgctacattggaagcatatagcaatgatcttgcgtatttgaagagaaaggttgatgctggtgctgaccttattgtcacacaacttttctatgataccgacatctttctcaagtttgtgaatgactgccgccaaattggtattacttgtcccattgttcctggcataatgccaataaataactacaaaggtttcatgcgcatgactgggttctgcaaaactaaaataccttctgagatcaccgctgcactggatcctattaaagacaatgaggaggctgttagagcatatggaatccaccttggaactgagatgtgcaagaaaattattgctagtggcattaagactttgcacctttacacactaaacgtggacaagtctgctctaggaattttgatgttcacaagaccacgtggacgtggtaaaaagctccaagaggaatgggccgttccactgaaatctgtggagggcattagtgagcgctttacaaacttctgtcaagggaaactcacaagcagcccatggtcagaactggatggtcttcaaccagagacaaagattattgatgaccagttggtgaagattaaccagaagggtttccttaccattaacagcgaacctgctgtaaatggagagaaatcggactcgcctactgttggttactcaacactgagagcagtattttaa

SEQ ID NO: 3041 - DNA, 378 bp, Zea mays
  Peptide Sequence Number=SeqID_44820
atggttggaggagctttggcagacaaatatggcgggaagaaggtgatggcaggtgctgctgcactctggtccttggccacaattctcactccttgggctgcctcccgctccaccctcatgttgcttgctgtacgtgcactctttgtccttgcagaaggtgttgcgtttccgacaatgagcactttcctaccaaagtggttcccaacacatgagcgtgccactgttgttgccatttccatgggtggattccatcttggaaatgtcataagcttcctagcaacaccgatcatcatgtcacacataggcctctctggaacattcaccttcttcgcgtcacttggttatttgtggctctctgtatggatggtgaacgtataa

SEQ ID NO: 3042 - DNA, 426 bp, Zea mays
  Peptide Sequence Number=SeqID_44821
atggacctcaccccgccagcgtcagccggcccgcccccggcgcctccatcggcggccgggccggactctgacatatgcagatctctcgatctcgatcgggttgcgcgtttggtgactggctggctagttgctttcctcctcggccagggacgcaaacgcaacttggtggtggaccacgaggcagagccggcgaaagcgaaaccgacgtggttgtaccgctacggagctgcaggaacgaagcaaggctcacatttattcacctatgggccaaacagggccgtcgtgatcctcgcgctgtcgctgctccgctcagcccagcccgtccaggcggcgctgtcgctgctccgctccctgtcatcgctcgggcagttcagcatcctcgccgacgcctgcaccgtgctggctgtggcctggccaccgtggtga

SEQ ID NO: 3043 - DNA, 477 bp, Zea mays
  Peptide Sequence Number=SeqID_44822
atggacggcgcgccggcgcgggcgcggctgctgctgcgggccctggcgtggctcttctccctcctcgccctcgtcgtcatggcgtccaaccagcacggcggcagccaggacttccgcgagtaccccgaatacaagtcagtacactactgcctgggcatctcgatcgtggcgtggctgtacgccacggcgcaggtcctgcgcgacgtccaccgcctcggctccgggcgggacctcatcgcggcgaggaaggcgtcggccgtcgtcgacttcgccggagaccaggtggtcgtcgcttacttcttgatatcggccatgtccgcggcggcgccggtgacggactacatgcgccaggcggcggataacctgttcacggactcggcggcggcggcgatcagcatggccttcttcgcgttcgtggccattggcctctctgctctcgtctccgggtacaacctctccatggaggctcttgtatag

SEQ ID NO: 3044 - DNA, 408 bp, Zea mays
  Peptide Sequence Number=SeqID_44823
atggccgaccggagcaggttccgccccgtgctcgtgcaggccatcgccggcgtcacagtcgtgtacatctgcttcggcgcctgtggttacctcgcctacggcgacgccaccaaggacatcatcacgctcaacctaccgagcacctggtggtgctgtgcagcatcgcgccgtggaccgggcggccctgcacgcgagccgcgtggtggtgctggtggcgctgtccgctgtggcgtgcttcgtgccggcgttcgggtcgttcgcgtccttcgtcgggagcacggtgtgcgcgctgctctccttcgtgctgcccgcgtgttgtttcacctccgcgtcgtggactggggcatcctcctcttcggcctcgcgttcgccgcgcacggcctgtatgccgtcctgtcgcggcactga

SEQ ID NO: 3045 - DNA, 405 bp, Zea mays
  Peptide Sequence Number=SeqID_44824
atgacgttcaagcggaggaatggcggacgcaacaagcacgggcgcggccacgtcaagtacatccgctgctccaactgcgccaagtgctgccccaaggataaggctatcaagcggttcttggtgaggaacattgttgagcaggctgccgttgaccagagaaattgtcctaacatgttcatttggacaggatatgttctacccaaattgtatgcaaaggttcatcactgtgtctcatgtgcaatccatgcgcacattgtccgggtccgctctcgtgagaacaggaggaaccgtgagcccccgcagcgcttcagacgccgggatgatggcccaaggcctggtcagggcccgccgcgcccaggcggtgcagctcctgcagctgcagctgctgctgctcctcgtacctaa

SEQ ID NO: 3046 - DNA, 378 bp, Zea mays
  Peptide Sequence Number=SeqID_44825
atggttggaggagctttggcagacaaatatggcgggaagaaggtgatggcaggtgctgctgcactctggtccttggccacaattctcactccttgggctgcctcccgctccaccctcatgttgcttgctgtacgagcactctttgtccttgcagaaggtgttgcgtttccgacaatgagcactttcctaccaaagtggttcccaacacatgagcgtgccactgttgttgccatttccatgggtggattccatcttggaaatgtcataagcttcctagcaacaccgatcatcatgtcacacataggcctctctggaacattcaccttcttcgcgtcacttggttatttgtggctctctgtatggatggtgaacgtataa

SEQ ID NO: 3047 - DNA, 399 bp, Zea mays
  Peptide Sequence Number=SeqID_44826
atggctaatcttcctctcctctccctctctcgctccaccctctccatgaactataactctctccatctctacctctctcgtccggtcattgtaaccctaaccctaattctcgatctgctgaagttgtgcaccaagctcgctcctctgcctctcttagatggatctggtgctccgcttcttgtttttgtcttccgattcattgaggtcgttggcctgtggactagattccacaacgcgtgtgtcgcgcgccgtgaggagccgacgaagccgactgaggcagtggccatgtccatggacagtgattcggctgacgatgagctcaatctagatgtcgtgatcaaagtcaaagacaaatgggtgatattgacccaaatgtggaaccagaacaagattctctag

SEQ ID NO: 3048 - DNA, 450 bp, Zea mays
  Peptide Sequence Number=SeqID_44827
atgagtccgcacgccctgctacccgtcggatcaaggatccacgacccacagtatgatcgcacgcggatcccatcagagccccaggatgttgatctaacggttactaacttcgaatcccgcccaaaacacccgaccgttcgatcttatatcaacggtccaaatctaccagcccccagatctaatcttaaccgcacctttaccatccaagggccaagcgccctcttccccctcctccagccattgccagcggcaatgtccaggaccgcggccgagcttggccggagctggcccaatccgacccccaggcgcgcccaaacaccgattcgacgaatgcttcgcaaggcagtaatgacggcgaacatggccaagggcatcttaccggcaaagacgtcgcagaggagtcgggctacggcgcgagcaggttctacgacggggcagcaggtgtggtga

SEQ ID NO: 3049 - DNA, 1230 bp, Zea mays
  Peptide Sequence Number=SeqID_44828
atgcaggacacctcagctcggattaattgctaccatccggacatcgggagccttccgtttgagctcgcggggctcacgaagggaggcctggcctccatcttctcctcctccaagcactccaagcccagcgccggctcctcggcgagcgcgccctccccgccgtggccgtggccgtcctgcgcgaccaagccgcagacggcgtccttccgcgggcatgccggcggcggcgacgaccggccgtgcaccacgtccgccgcggggcgcttcgaggaagcggcagcagcaccgtgcggcggcgggaggctgcggccgcggccgtggcgcggggccgcgccgggcgacgagatgtacaagaccgtcaactcggtctacttcgacgccgccgactcccgccgcttcttcttcttcgacgacgacgacgacggaggggacgatgacgcggcggacgacttgctcgacctcgaagtcgggagcttctgcacgacaacggcctccgaggagtggtcagaggccgtcatccgcagcctcggccggacgtccacggaccgcttcttcttcgacgcgggcccggcgcccgggcccgccgcggcgtccaactccgtcctcgccgcctcgccgtcgccgtccccgtccccaggccgggcactggcgccgcctccgcgcgtggaggctcccatgtcgctgcaggcggcgctgtcgccgtccgcggcggcagcgatgacgctgtccgacgaccccgccgactctggctccaacgacggggtcagcgaggccgagctgccgccgccggcgtcggcgtcggcgtcggcgtcggcgctggtggaggagagcgtggcggtggcgctggactcggaggacccgttccgcgacttccgcgcgtccatgcacgagatggtggccgcgcacggactccgtgactgggcggcgctgcaggagatgctgctctggtatctccgcatcaacggcaagcacaaccacgcgctcatcgtcggcgccttcgtcgacctcctcgtcggtctcgccacgagcacgagcagcagcagcagggccgcctctccctccgccaccacgaccacaatgacgacaacgacagcctgctgctgctgtagtagtagcagcacaagcagctccagtactagcagtagcgccgccagcggtggcgatggctctagcacttccgccgctgcagctgcaatgcaaccacggatgagcgatgcggcggtggaataa

SEQ ID NO: 3050 - DNA, 375 bp, Zea mays
  Peptide Sequence Number=SeqID_44829
atggtgctggcgcagtgtttcgttgtgaagccgcccgacaggacgatgaacctgatgatctggcacagcaccatccccggcaagcaaggggtaatggagcaagaggttcacagtgtcgacgaggtgtatgccgtgactaaggcctgggcgccaaataatggcattctgatcagtgggtgccagactaaccaaacaacagccgatgcaactacaccacagggtgtctccttcggtgctctaagcaatgctatccagatcattcttgcaaatgagcacgagaaggtgacgaatgctatccagaccattcctgccgacgcgagcacgaggcacacgagctgtgctgtgtcatgcatggcaagcgaaacaagtgcatga

SEQ ID NO: 3051 - DNA, 249 bp, Zea mays
  Peptide Sequence Number=SeqID_44830
atggccctagaccccaattcggcccaccagaggaatccaggtcagccgcgcgcacgttttcttcctccccgttacgccgactcgtggggcccgctcggcagtgctactcgcgcccacgaatcgaaccggtcgtctcgctgcgctcggggggcacacctgtcaccacttcatcacacgaccgggacaacggcgctcgcgagatccgctacgagcacccgccacgaccccatcaatgccgccactagctga

SEQ ID NO: 3052 - DNA, 759 bp, Zea mays
  Peptide Sequence Number=SeqID_44831
atggcggagtccgatttgccggggatctcggcgagcagttggggaaagatggagctgacgccctgggcccacgtggtagaggctggcgtgaggcaagcgacgactgccgcacggtcccaccaccagcgagcacctggccatgagcagcgcggcccgcggtggaggataactccgacaagcaattccccattccctggactctacccatatacgacaaggacctggacgccctcggtaagcaccagcgaacgccccagatcacgcacatggacccgaagagcattatctgaggatttcctagcgtggcggctgaggagggagctggacacggagggccgtgggttcgcggtccccggtaaagaaatcccgagctcgggcgcccccgtagatgcaatcgcaagcttcggtgtgaccccgcgaagcttcccaaccagatcacggcctccaattacagatgtcggcaaggttctatggtggcggcggctccaagtcctctgtgctctcggtgccgtgcttgtttgcgaggaccaggggggtcgcaagcatggtttatatcgccacaaggattcgtggtggccgacggattacgcggagtccaaccacccagcaaacgcgcgaaggtcggtgatggcggagtccgatttgccggggatctcggcgagcagttggggaaagatggagctgacgccctgggcccacgtggtagaggctggcgtgaggcaagcgacgactgccgcacggtcccaccaccagcggtag

SEQ ID NO: 3053 - DNA, 516 bp, Zea mays
  Peptide Sequence Number=SeqID_44832
atgtctatccgaattcgagctagcaggcaagatatcaaccttggtttagtgtacctcaccggggataagaacgccaccattgctgtattcactgctcggacttctggccgttgtgctgcctttatctcaccagaacatcccttcgacgccagaatactccgtgatccgccaccccaacgcggaccaccctctctgttcttcgtcccacccatcccactgtcgttccaagctcctgatgatgcttcatatgggatggggagttttcaaagaaaaagatttgatggtggatccatcatggccacaatgggttcaacatcggaaaagatgtacctctgtcagaccaatactagaaaggccaacatgcaatgggagtggagagatggcgagagtagcgtgtaccctccgtggcaagaggctggacggtggtgtatctgtgctctcggttggcgtgagcccggtctggtcttgagaaacatggcgccttaccttgactccctcaaaccagcatatccttga

SEQ ID NO: 3054 - DNA, 312 bp, Zea mays
  Peptide Sequence Number=SeqID_44833
atggtgccgccgttgccagcccacaccactgcctgtgcacgggagatcgggcatcataaaatccgggccgttcagtcgcgatccaaggattccgagcccataccggttcagtgggagtctgatctaatctgcgccatcagccgtggatcggacgactcagatagtgccgcaacccttcggcctcgcggattttgtgaaagaacccctaagggctgtgtcggtagattttacagaataaaccccgaccttctctgtattagtgcgcctagtccaggaattaaagaaaacaggaaaaagagagttagaaattga

SEQ ID NO: 3055 - DNA, 402 bp, Zea mays
  Peptide Sequence Number=SeqID_44834
atggaggtggccttagcatggatggcgacaccgagacgcatgcctacgacgagcgaccactctggtgtctgcgagattcccccccttggcgacccgggcgagcacgatgatggccggcagcagagccccgcggcggcggcaatagagctagtcgcgcaccaaaggaggcgtggtgtcaaggtcacggcgtcgtctctacctgctttctctctctcccccagggatctaccgatttctctgtatggcgcccactggtttgatgtattgctcataacggggcacgactgggattcgatttttatacccaagaatgaacagagtccgagcgcggatcaaggagttggacccactgtcctcgtggcgaattcgttgattcggttacggagctcgtgcgggggataa

SEQ ID NO: 3056 - DNA, 129 bp, Zea mays
  Peptide Sequence Number=SeqID_44835
atggcagcgccgccgcttctacggctgagaagtccggcgagttcccccaactcggcgttacgctactctgaatcactacggacagggctctacacccatcccaaattgctccaagccaagcacgcttaa

SEQ ID NO: 3057 - DNA, 117 bp, Zea mays
  Peptide Sequence Number=SeqID_44836
atgcggcttcatacccttagagtgatattagcagatgatgtggttttatactctcagaggtacttgattcatgttgagaatgagagaagtagcagcacgtccaccttcacattataa

SEQ ID NO: 3058 - DNA, 147 bp, Zea mays
  Peptide Sequence Number=SeqID_44837
atgacgaaggcatacccaagttttgaaagggatgatctgattttgctccaggagattgccagctacatgatttttgcttgtggagctgtctatgtgatctcggagattgtcagcgtattgcaagtcacaaattaccatccacactga

SEQ ID NO: 3059 - DNA, 321 bp, Zea mays
  Peptide Sequence Number=SeqID_44838
atgggtcatggcgatgctgatggaactgatttgttaccaaggtttaagttttcgctaccgttggacggcctgactgttccctattctattttcaatttgattgagggttgcaaaattcatggcgttgtgagggaattgattccagtgaaggcgatggcgactgaacgcttggttgtgaacacgaatattcataagatatatttatactttttaaagctcggtgaggtcatccgtttgactgctagcctaggtgtgctgtctcggatggatggtggttcaattccaccaagattctttagtgtctgttcggttttagcttag

SEQ ID NO: 3060 - DNA, 678 bp, Zea mays
  Peptide Sequence Number=SeqID_44839
atggcgcctcctgttgacgtggctggcctgcgccctaggttgggcgatgtggaggctcctccgaagccgaggtcgagtctgtcttccgtggccgaggccgagtccgagcccctgggtcgggcgaggcggaggtcgtcggctgaggccggggcggagtccgagccctggggtcgatcgaagcggagttcgtcgtcttctggggctgagcccgagtccgagccctgggtcgggcggagcggagttcgccgtcttccggggcttagcccgagtccgagccctggggtcgggcggagcggagttcgccatcttccgggacttagcccgagtccgagccctgggtcgggcggagcggagcttcctatggtgcctttggcagggcctgactgcttgtcagtctcactctgtcaagtggcactgcagtcggagtggagcaggcggctgtgtccttctatcaggccgttcatatgtgctaagtggttgagaagtaaaaatcaagaatcaagtgcttttcttgtgaacaactttgtaagggtgagaggctccaacttgtggagattcctcacaaacgggaaaacaagtctaaggaagaaaatcgtggtattcaagtggatcattggatcacttgaaaaggggttgagtgcaaccctcgtctattgggatgccacaacatggaagtag

SEQ ID NO: 3061 - DNA, 705 bp, Zea mays
  Peptide Sequence Number=SeqID_44840
atggctggagggaagaaaggcaagaaagggcaccgccccaccgatgggaagcgcaaacgccccctgagtcctcccttcgaggactcgaagtactcggaggaagtcttctccgactatgaccgctcgcccgttccggcatcccccgtggcggcgtctgatgatttagatgactccatggggttgtccgtcgtggagcaggcgtacgcccgatccatcgagcgtgtggggctcggtgggtcgaacgactcggaggaggccccctcagaggaggtggaagattcctcgaactccgaggaggggagcgacaacgagggcggcgacgacggcgacgagggcgacgacgacagtagcggtggtggcgatggtagcagcaagggcggtgacagcagcggtgatgacggcgctaagggcgtcccattccaccctcatggttgcactgttatcctgggtggtcactccacgaacagggacctgcgcgtacagtctatggatggcgagttctattcgcagaaagtcgagggggtcttaagcaaaacaaccacatcgaaagggaccgccgtctacctcggcagtgcgcacggcgcgaccgccatggccggagccggcgactccgcgcaggcgaacagggcacggggcggcggcgattggccgggcggactctgttcgacggcgcgggaccggaacccgacgatcaccggcgactaa

SEQ ID NO: 3062 - DNA, 829 bp, Zea mays
  Peptide Sequence Number=SeqID_44841
atggcgaaactgcagagaggggtctcaccggcgattgaagaggttgcgagcctgcccacggaggagagcggatccgcggctgcgcttgtactccggcgaggaattcaaccgcaaccggatatcactagcgtgattgcttccatccccagcttcgccaacctccagtcgggtctgggcgctggtctttgcacgctggagaagacaaatgggtccgaccagcagtccgtgcgtgtggggctcaggcaagccgagactagaggtcggtcgtgggtggctccaatggatcccgcgacgtgcgccagggccgagcatatccgagcagtgcagcgaagaaagggggaaaatggtagagctgacgtgaagagcccaccagccagtgaaatgggcgcgcgcgcggaggctggtttgcgggccccaaatgagcacttgggcgacaacggggacgtggggaagcctcgggtcgacagtggcggacttcggctgcacgaggaagactccggtgagcgtggacagggcaaaccagaggggctggaggtgaaccgagagatgttccgagttgcttatggagaggcggaactcaccgaggcaacgggcgcgacgcgggctcgacagcggtcgcagaacggacgacgggcttcggtgagctgtggtggggctacctggtcgcgtgcgcagagcgagagagggggcgagagagctcagctgagggcgcaaatgagcagggggaggtgggcgagcggggtgcaggttctaaaggggcgcgggcgtgaagatgtggccagagaacgcgcggtcgtgggcgcgtccacggtgagggtgtgggcgagag

SEQ ID NO: 3063 - DNA, 633 bp, Zea mays
  Peptide Sequence Number=SeqID_44842
atgggcgccgcccgtccccgactctggccggccgccgcgccccggcgtcccgcgccccagcttcacgcgccccgtccccgcacgcgccggccgccctcgctcggccccgcccggccgcgctccggcgaccccgcgcccgtccccgaccccgctcggccccggaccggccgccgctcccccgcgccgcccggctcggccgtccgccgccggcgtcccgctcgaccccgccctcgcgcccgctccggcgaaccgcccgcgcgcgcccgcctcccggcgagctcggcgccccccggttcaaccgcccccgtgccccggttcaaccgcccgtccccgcgctcggcctcgtccggccgcatcctcgctcgctcgcgctcgctggccccggcgtgcttgcccgctcgccccgccgtgccttgctcgcgtcgtgtcggcccctgcgtggcctcgagcttggcccagcgtgcctatggcgcgcggcttagagctcggctagcgcacggccccgacgtgcgtacgagatactttggtacaggtggttatgagatcgatggttctggttatgactatggtgctggcgaagatgaagctgtggaaggagacttccaggagttccaagattacgacgagttctag

SEQ ID NO: 3064 - DNA, 237 bp, Zea mays
  Peptide Sequence Number=SeqID_44843
atgattcgcgtctctgcctcgctctccaagcttagacgaacgccattccaggttgcccccgcagctggccccgcccctgctatcctcgcccccacccccgtgatcccttccatcagtgccccctacatcaccatctcgggcgaccgcatggacgcgtcggctttggcgaatatggttgtggatgtaccccgggaaggagtgattttgacatctgctgagtatgagtacatcagctag

SEQ ID NO: 3065 - DNA, 1398 bp, Zea mays
  Peptide Sequence Number=SeqID_44844
atgaaaagcttggttcagagccacatcaacgtcggcgtcatcgccggcgtgctcttcgtgctcctcacctacctcgtcgtctcgcagcagactgccatcagccgccccaacgttgtcactacggtagcacaatggctctcgaataagcagcagatcggaggaggtcccggtgaaaaagttgtcactacgggagagcaacagatcgcggataaacagctgattcaaggcccaagtaaaacagagaaggccaacaaggtagtgtgcagcacggaggagcggttgtctgactactgcgaggttgatggcgacgtccgcgtcaacggcaaagcctggtcggtggacatcgtgccgccctcgggctggtcggagcggcgggagtggaagatccggccgtactcgcgccggagcgcggccaacgtcgacaggctcaacgtgacgcagctgcaggacccggcggccgccccgccgtgcacggtgacccaccacgtcccaggcgtcgtgttcgcgctcggcgggtactcgggcaacgccttccacgaccatgccgacgtgctgctgccgctgttcctcgcgtcgctgcggtacggccgcgaggtccagttcctcgtcatcaaccgggtgcagccgtggtggctgggcaagtacaggctcgcgctgcggcggctgtccaggtacgacgtcgtgaacctcgacggcgacgcccacgtccggtgcttcccgcacctcaccgtgggcctccgcctgcacaaagacttcggcgtcgtccccgagtgggtgccgggaaagcggcgcgtctccatgcccgacttcaccaggttcctgcgcgaggcgtacgcgctcccacgcggcgcgccggtcagccgggagccgggcaagaggccgcggctgatgctgatccagcggcagcgctcccggaggttcctgaacggggaggagatggcgcgggcggcggaggcggcggggttcgaagtcgtggtgacggagctgatgttagacgcggccgtggacgagcaggcgcgggtggtgaactcgttcgacgtgatggtgggcatccacggcgccgggatgacgaacgaggtgttcctgccgcccggcggggtgctcatccaggtggtgccgtggggaaagctggacctgatggctaggatcgagtacggcgagccggccacggacatggggctcaagtacctctgctacaacgtcaccctggaggagagctcgctgctggagctgctggggcgcgaccacccggcgatcaaggacccggattccgtgcaccgcagcggctgggctgccatgtacgacatctacatgaccaagcaggacgttcgcctcgacatcacacgcttcgcgctcacgctcgcggaagccatggaccacctacgccgcctgcagtag

SEQ ID NO: 3066 - DNA, 303 bp, Zea mays
  Peptide Sequence Number=SeqID_44845
atgggcgtgcctgacttctgcgcgcgctggcgcgcatttaatgcacttgaagcctgcttgcccgagcaaagagcaacctacgatagtgttggtgtagggattcagttgcgtgctgactgccattatcttaatcgccctctgaaaacctcccataagaactatcataagcactggttctatatggaaaatcatgatcccaaacttcttgaatttataagatttcccaaattagagtggatgtgtgatggcccaccatttattgaggacgttctggtggtgatgaagagaatacatggcacatag

SEQ ID NO: 3067 - DNA, 168 bp, Zea mays
  Peptide Sequence Number=SeqID_44846
atggagggaggtgagatagagaggcggagaggagtatggaagattaaggcggtgctcgggaggtgccatcctggcagcgccgctacaaccctagaggatcctcagcctcttcgtagatctaaggagataggtggagaagcagatgtagaagggacaaagggaggatga

SEQ ID NO: 3068 - DNA, 183 bp, Zea mays
  Peptide Sequence Number=SeqID_44847
atggagcaaatggaaactctattggctgtcctgtgcgccaactgtgtgccaccggtgaaccaactttgtgccaccagtgagccaattgtgtgccacaggctcccgccgacctggcttatgcagtcgggctaccgggagaagccaaccaaacatgtggatagtgtcgattctggtcgccgttag

SEQ ID NO: 3069 - DNA, 423 bp, Zea mays
  Peptide Sequence Number=SeqID_44848
atggcggagatggagccgagcatcgggaaccatatggccgaagaccaaccgactccggccgcctccactgtcgaggaggccgctatggatgcagataccagcggcgagcggcgtagcgctgccgcgttggtgggcctgctccgcgggttcctcgccgtgcaacagcgccgggccgaggcctactccacgctacgaagccttgaacgcggtagtcgatacagtataggcctgtttcaaaggttcatcggaaacagttctgttcctgccaaaattggggaatttccagcaaaaacattagatatccatcctggagaggggattgttttggtaaagattctcttaggatttaggaagtttctagcattgaaccctccaaagttgttcattgtgtataatagtaggcctaaaattcttcggacataa

SEQ ID NO: 3070 - DNA, 168 bp, Zea mays
  Peptide Sequence Number=SeqID_44849
atggccacgcctacaccagatcccaagcgtccatcaacggatctatggacagattttaatgttgccaagagggcttataagctcacgcccccgcggatcacggtgggcaggtgcgcctatccacgagctgccgagcatgcggacaccgtcacgatcccgccagatgcg

SEQ ID NO: 3071 - DNA, 354 bp, Zea mays
  Peptide Sequence Number=SeqID_44850
atggagaccatgatcgtgggagaagtgatgggtgtcgaggcaccgggtcacaaagttctagatgatgttgccatggtcgaccaaccatggcatgtcgaagatgacgtcgatctggaacgtcttggtgttgatgtgaagccaagtgttgaggcaggcttcctggcgagcaatctcattgccactgttgacaagctttatggtttggatgcgctgttccgcaaggttggccggcttggcaaagttgatgtcgatgatgttgtgggtggtgcctgttttgacgaggatgagcaccaagttggcaccttccaggaacatggtgtgtcgaccacacgcacactagagtcttggggctga

SEQ ID NO: 3072 - DNA, 558 bp, Zea mays
  Peptide Sequence Number=SeqID_44851
atgtccacagaaatggagtggctcgagaccctcgctgctgatctcaccaagcacatggacaaggtgcaagagcaccttgccaaggtcgacgtctgcctgggcaacatgaagcaaggagggtccaaaaacgagatcgccaccgcagccaaggaaaagctggaatgtgaggctgtcaccaagcagctcgaagtggagaccaagcacgccatagatcaagctcgacgtgccttcctcaaggaggagacagcaaggtcattgaccgtcctcgagcttgtggaagaagtggcaaactggcaaaagactactgacatcgagcgattgcgtcaacgagtattttgggccgccaagacgacgcaaacactacgagagcttgcatccttgcagaagactagcaccatcgacgactacatggagcacatcttgacacacgtggtgcgcaccgagacacttgacgaacagcagcaggtgaacgtctacactgctgacctgctcgagccactgaagacatgtcgagctctagaaccccaagacatagagatggccatgtccctaccatga

SEQ ID NO: 3073 - DNA, 357 bp, Zea mays
  Peptide Sequence Number=SeqID_44852
atgacgaacgctatttcaaccactacaactcgacatacttataaacgtcacatccgcacccctgcacagaatgggctcgggcacgcgtccgagcccccgaacccggcctcggctctctacctggtcaaagtgcgggttacaaggatcagacatccttctcctgaccaaagacgacgccaaggacaagggccatctcgccgaccatactgctacaggggctcagactcatctcctctgatcacaacaacacgacacccttgtactcctaggcttcccccctacgactataagaggagtccagggtccctgaggagaggagacagaaggaggacaacacttcaccgcttactctcctga

SEQ ID NO: 3074 - DNA, 498 bp, Zea mays
  Peptide Sequence Number=SeqID_44853
atgaactctaggagcggcaggggctgcgccccctgtctcgtgcacttcttttgcggtgccagggtccttgaaataatttccctgctctcaatgccagaatttagtcgcagcgatcttgccgatttactgaagggtgttcaagcacatgagaaagagaagttgcatttgacagctaagattcaggtgctgaagaaagccggcaggccttcagagcgcctggtgaaccacgcagactgcaggtcgcgcagcatggcccagcacgtgtgcgtgcacgtcaaggagatcacggaggccgccggcaccgaggacgccgaggcggatgcggagtatgacgcggccctcaaggaggccatacagggcgtgcaggttgccgtgagcagcataaacgaacacatggaggaggtgcgctacgagattgacggactcgaggcagagacgatcggtagcaagtggagcgaagtcgaggaagcgttccctggtaccctgtctataaaatag

SEQ ID NO: 3075 - DNA, 252 bp, Zea mays
  Peptide Sequence Number=SeqID_44854
atggccacgcctacaccagatcccaagcgtccatcaacggatctacggacagattttaatgttgccaagaggtatcgctcgtctaatccatgccgcccaccgacagatctacggtccatagtctctctgacccagatcaaatcccagccgccagctactgatccagcggtcgcggaatcatcttcccacactaccaacaggcacggcggcgcgcctaaggcagcggcggatccctcaccggcgtcgcgctaa

SEQ ID NO: 3076 - DNA, 297 bp, Zea mays
  Peptide Sequence Number=SeqID_44855
atggctttcagtttcagttcagggcatcattccctctcccctgttgccatcggccgtttggtgccgcccacgcatgattcgccgggaaggcattgggcggtcattgttttatcgcaaagtttcgtccttgccgctggcagctggtgtgcgaggcttctgttcacttctgcttggagcttgttggctcccgctcgaaacattggcctgcagaacgattggtgccgcacgccacgcgccacagccgtctcacctgatcgccctctcgctcgcgcatggcatctgctccatgatgattga

SEQ ID NO: 3077 - DNA, 330 bp, Zea mays
  Peptide Sequence Number=SeqID_44856
atgggtatatggtccgtagatgccgcttcacatgactctacagatgtcgcctcagatgcctacgcagatgccacctcagatgccaacaccgatgccacagcaaatgaaattgtcgatgctgccaccacatatgtcttggggatatcctcctatggggccgtcacaaatgccttgggtgtatgctccatggccgacacagccaccaccatcaccaagagtgccaagccaacgtccttatgtctacgtcagatgtacgaccttcttacggccacatggcaatgcccgcggatggccgggtgtccatttaagaacgtcggccatagtggctaa

SEQ ID NO: 3078 - DNA, 219 bp, Zea mays
  Peptide Sequence Number=SeqID_44857
atggcagcttatgcagctggtggaggtgtgcgacattggaggtttcctatcggtgatgacattgtggatcgccaaagttatagtagatgtatggtagcggagtacttcagcaaggcattacttcgacttcgccagcggaccactcgtcttcacatggtgatggattacagggttctgggacatgtccccattgaaagtcgcctagaggggggtgaatag

SEQ ID NO: 3079 - DNA, 372 bp, Zea mays
  Peptide Sequence Number=SeqID_44858
atggccgggagcgagaaagaggccaccatccagactatgcccgagcctaggagtagagcccaaatatggtgccctggtgagtcgcgggagctctggagatcttcgtggagccttgtcaggcgtggtgatcgacctaggcctgctgaatcgctcgacgaagtaattgaggcacctcggatccgcaagctctcgtgtacagcaccaactgcgtctcaatcgccatcgttcaatcgggctttggtgcactgggttgcgatgcggttgcctccggcgatggcacggccgtggggaggctcgggcgccgccgcgtttgtacgcggatgtggaagtctgcgctcagtcgttggacagaaagagagtggtcaggattag

SEQ ID NO: 3080 - DNA, 354 bp, Zea mays
  Peptide Sequence Number=SeqID_44859
atggcactcagccccacaaaccggagtgttggaacttgctctcagttgcaaggggatccaacaagggtggacaatgacgcacgtaacacgcggcggccacgcagggcccgttacaatgggccagatcacacgcgggcttctgagctggacgcggccgcacggtgggatgacgacgtcgcaggtcttcgcctggtgcctaatctggcgaagggtgtccttgcccgttttgtctccggcggaccagcgactgcagcgaaggccttgagcgaagggtggcatctttgccttcgccccaacatttgccctccgagggaccagttcgacaaagtcacctggtgcggaagacgtcactag

SEQ ID NO: 3081 - DNA, 342 bp, Zea mays
  Peptide Sequence Number=SeqID_44860
atggaacctgaacttcgaccttacttcgagaggaagaagaaagagctcgtggacgacgacgcttcgggctcggggaccgtgacggcggcgctggggctcggggactcggcgctcgggctcggggacggcggacgctcgagctcggtgaaggggacggctgcgctcgggctcggtgaaggggacggcgttgcttgggcgctcggggacggcggcgctcgggctcggggacggggacggcggcgctcgagctcggggacggcggcgctcgggctcgtgctcggggacggggacacaacggtagcctggcggcgcaactgtgtcagctcgggcgggaagagttag

SEQ ID NO: 3082 - DNA, 210 bp, Zea mays
  Peptide Sequence Number=SeqID_44861
atggagcacactagggcacgactagatgggatggctgcaggagggggtagcgacgcccggtcttatacctgcgaaggcaccgcaatgacccgagaagagtggaaaactcggtcagcggagcgcgcgatgcgctcggcatccgttacggcagccagcgaaggagaaggagctgaccggggtggtccacaggaaagaattattcccttttaa

SEQ ID NO: 3083 - DNA, 372 bp, Zea mays
  Peptide Sequence Number=SeqID_44862
atggccgggagcgagaaagaggccaccatccagactatgcccgagcctaggagtagagcccaaatatggtgccctggtgagtcgcgggagctcgggagatcttcgtggagccttgtcaggcgtggtgatcgacctaggcctgctgaatcgctcgacgaagtaattgaggcacctcggatccgcaagctctcgtgtacagcaccaactgcgtctcaatcgccatggttcaatcgggctttagtgcactgggttgcgatgcggttgcctccggcgatggcacggtcgtggggaggctcgggcgccgccgcgtttgtacgcggatgtggaagtctgcgctcagtcgttggacagaaagggagtggtcaggattag

SEQ ID NO: 3084 - DNA, 1077 bp, Zea mays
  Peptide Sequence Number=SeqID_44863
atgacgacgagaagcaagcatcgtcgtcatgaggaggaccaggagatgacgatggtggagctgaggagaggcccctggacgctcgaggaagacaacctcctcatgaactacattgcttgccacggcgagggccgctggaatctcctggcccgctgctccgggctgaagaggaccggcaagagctgccggctgaggtggctcaactacctcaagccggacatcaagcgcggcaacctggcgccggaggagcagctcctcatcctggagctccactccaagtgggggaaccggtggtccaggatagcgcagcacctgccggggcggaccgacaacgagatcaagaactactggcggacgcgggtgcagaagcaggcgcggcagctgcgcgtggacgccaacagcgccgtgttccgcgacgccgtccgctgctactggatgccgcgcctgctcgagaagacgatggccgccgccgcggcatccacgtccggcgaagtgctgctgccgccgctaccgccgccgccgcaactgcacccctcgcgcgtcgccggcttattggcctcttcctcctcgtcgccagtccagcgggacaccagcgacagcgactacctgccgcagcggtaccaccaccaccccgtcgacccgagcccgagcgcgtcgtcgacggtttcctcgtcggccgcgctcgcgccggtgccctgcttctccgaactgagctgggtcgaccagtacgggtacggcccttattacagttacggcgccaacctcgacgacggcgccggcgtgttcgacgactcggcagcgctggaggaaggcctcggcctggacgcgctggacctgggtccggccgacgacagcgacgtcgcccactcggacgcgacgctgctggactacctcaactccgcgtgcgccggcggcggcaccatgatgatggctgtgacgggcggcggcggcggcgtccaaagcagcggctgcggcgccacgggaggtgccgacgccgactaccggccgtcgccgtgcacgtggcggacggacgagctcggcgatcctcgtcagcatcaatggggaggaggaatctag

SEQ ID NO: 3085 - DNA, 231 bp, Zea mays
  Peptide Sequence Number=SeqID_44864
atgggacagcaagaacatggggtgtctgatggcttgtacacttacaggcatcaccatgagggtggagctgatatccataccatctttatgaagaagagcaaatttaggattctgctgtcatgttctcgaaggcccaacgattgtggttcagctctgtttatcaactccctttcgagaagagatggccaccggcagcaacaactcatcgacatcagtggccatgggacatga

SEQ ID NO: 3086 - DNA, 201 bp, Zea mays
  Peptide Sequence Number=SeqID_44865
atgaatccactaattgttgctgcttccgttattgctgctggattggccatagggcttgcttcaattgggcccggagttggtcaaggtactgctgcaggacaagctgtagaaggtattgcgagacagccagaagcagaaggaattttgggaacatttcgacaaaggagatctttcacaggtcaaacaggacctaagacttaa

SEQ ID NO: 3087 - DNA, 513 bp, Zea mays
  Peptide Sequence Number=SeqID_44866
atgccgagaagctcggcggaagctacgccagccgtgcgcgaagaagtcggggatgacaagcgggtcccgcgactcagtgaagggttgagcagcgcgagagggagggctggccagtgggcccggatggcagcgagtacccgagacacacgcgcgaacggcgggagtgaggctaggattgctggatatgcactttcaggtggtggccgtggcattgagagagtggatgtatcagctgatgggggtaagacctgggtcgaggctcgtagataccagaaagacaatgtggcgtatgtgtcagatggacctcaaagtgataagtgggcttgggttctctttgaggccacattagacgtaccagcgaatcctgagatcgtagttaaggcggtggactcagctgcaaacgttcagcccgagaaggtagaagacatatggaatctgagaggaatcctcaacacgtcttggcatcggatcaaaatccagagatcttcgtgcgttgaaagatctaagctgtga

SEQ ID NO: 3088 - DNA, 220 bp, Zea mays
  Peptide Sequence Number=SeqID_44867
atgcagctgtgcctgcctggagcggtggtgcctggtgcctggtgcctgccggctggtggtggtggcctggtggagtggtggggggcggcggcggacctggggttggaacagtcaggtggtgaaagtctaaacggtgccgctgagcgcagccagacacgatatgctttgaatcctgttaatgtccacgacttcatggatgaattgatcattggaaagcaag

SEQ ID NO: 3089 - DNA, 243 bp, Zea mays
  Peptide Sequence Number=SeqID_44868
atgcagtacaatggatcaagcagtctcattagctgcgagaagcagacgattcgaatcgagtttttaaaccttgcaagggctcaccgccttggcgtacaatgcctcacggaccccgacagctgtcgtgcagtgaccgcacttgtacccaccataactggaatgggagaccacgtctcaggtcccgtgagggcaaagtctgctgccaggttcactcagtgggtaaacattgacctctgtgggtga

SEQ ID NO: 3090 - DNA, 297 bp, Zea mays
  Peptide Sequence Number=SeqID_44869
atgcagtatgacctgggcttttcagtgaccggcgtgcatgggcgcacggttgcggtgtggacgctgctgtcgtgcacgctctgcttcctgtgcgccttcaacctcagcagcaagccgctgtacgcggccaccttcctgtccatcgtctacgccatcgggcacctgagcgtcgagtgcgtggtttatcacaccatcagtgcagctagtctcgccccattcaccttcatcacagtcacaaccatggtctcactacaggaaaagcctaaattttcgtgggccaaaaacccacgaaaataa

SEQ ID NO: 3091 - DNA, 309 bp, Zea mays
  Peptide Sequence Number=SeqID_44870
atgccgccacctaagcatcgcgctcgcaccgcgcccggccaaaccggccgcctcgcgccagcctcgataggcgcacccaaagccgcgcacctggagccaccccggcagcctccccgcaccgtgccgtggagccgcctcggccctgccatccgcgcgagcgctgctgcgcacccgacgcgcacacagccgagccctgcttccctcgacgccttgaagccgaccgaagccaggaaccgaccaccgcacctctcccagaccccgcgaccccggcaccctgcagcccgacgccccgacgaagacctcgcgtga

SEQ ID NO: 3092 - DNA, 339 bp, Zea mays
  Peptide Sequence Number=SeqID_44871
atgtggtttcgaggtgagggagatacctggcaatgcgaccccaccaatcagcgaccgggtgcgcgacaaggagggatttcaactggccaacagggtccacacaacagcggagcaagtaacacgactgcgcgcgagcaagcactgtggcagtggggcccgaatggagtgcggctggcaaaggcgacgaggttggtgcagttggaagatacgaataagcgagtgctccaggcgtacggtagcacggcgtcacttttcatgcagatgggctcgtacaagatgctctcggactggggctatggctacgtctacatcgtcgtcgttgtcgtcaactgcacataa

SEQ ID NO: 3093 - DNA, 1215 bp, Zea mays
  Peptide Sequence Number=SeqID_44872
atgaagacccctttgctaactgaggaaatgcaagttaataatgaggcaccactagggtgcctcaagccaaatatttctcagtataactctccagagcagataggtggtgttgaagggtttcctgagaataatgaaaaaaggaatgatattgttgctgcggaaaaaatctgggaggcgactccaaaccaaggccttagcaggcccatctaccgacaagaattttatgcctggccatatatttattcagattatcaaatcgtgcgtcagccactaccttatggttttgacaaccaattttatcagataaatagggaccacggtttccctattgagaacagggttcaatatcttccattcaagatgctccctcaaggtcacccccatgatgcacagcttcaggaatttcagtattttgtggttattgactttgaagcaacctgtgacaaggtgaacaatccatttccacaagaaatcatcgagtttccatctgtcttggttaacagtgcaactggaaaactcgaagaatgcttccaaacatatgttcggccgacgtatcatcaatttttgactgatttttgcaaggagcttactggcatacaacagattcagagcgttggtcatgcggtgttctacttctcggcgacacagctcgtctgctacaacggcgccgagtcgtccttccgtgcagacgcagcacatgatggcggccatggaagatgtcgagaagaggaactgtccaagaagatcgatggactcggttcattgcacaacaaattggctgaaattgagaagagacagatgggtcacgagaaggaagtgcaatttctacaggccaagatcgatctctccatgaaatcattggcgcaggcggtgctgggagaatttgatttatacacccactctgataaaatgctagagttactgacattgaaacaaactggttcagctgcagagttttcaactcagtttacaactctggtggacagaggtgtgcctctaggtgaagccttactcatgcacgataaatggctagaggacaagggcatcaagaacacaaactttgctattgtgacctggtctaactgggactgccgtataatgctggagtcggaatgcagatttaagagaatcaggaagcccccttattttaacagggctatgggtcatgtaggatatgctaatgactactatcctgcttccaaatgtgctctatga

SEQ ID NO: 3094 - DNA, 669 bp, Zea mays
  Peptide Sequence Number=SeqID_44873
atgcagacgtcaccccaggtgacgtggatggacctccttgatagagaggcctggtggcggacagagcccgaggaaagcccggagtggggcggcctggaaaccttgatagggaggcctggcggcaggggagccacggcggccatgtggatcaacttgagggtaccgttccaggaagtgtacggggacgtccgctgcaacctgaaggaggcagtccagctggccgggctcacatgggaggggcgcgctcactgcgggctcgacgacgcccgcaacaccgctcgcctcctggcacttctgatgcaccggggcttcaagttctccatcaccaactcactggtgtggcaacctgccgccgctccgcagtcaaccgccgccacctgccacttctccccggaccgctctccggacccagtcgtcgtccagctccagcaccagcagcagcagcacaagccgaaggaggcgctggggtctcccgcgtcgctggtgaacccatcgtacgccacccccgcgggagggaaggacagagccatgtactgctactgcggggtgctgagccggtggagcgtcgtgcgcaagccgggacccatgcaggggcgctacttcttcgggtgcgggaactggaccgccacccggcgcgccatctgcccgtacttcgcatgggcctcgtga

SEQ ID NO: 3095 - DNA, 471 bp, Zea mays
  Peptide Sequence Number=SeqID_44874
atgtatgtcaatgctattgtggttaacatcgttcttgatgcttgtgcaactaattcatgcccggctcatcaatttattgaaaagttcttcacatacagatttatcatgggagttcggaatgaatatgacgctcttcgagctcgtctgctccacacctctgattctcatactatagcaaaggctttgtctagccttcttgctaaagagactcgtctcaagtcaatgtcttctgctactggttctggctctcacagtgtattggctgctgcacagaagtcatatgcacttaggagttcctttttggttccttgtgagcattgcaagaagaatactcatcggactggacattgtcttgctaaattcccagagaagttggctgattttcgtgcatggtgtgcagctcatggtcgtgatactggttctgcacctagaggttcagttgctattgcttctacttcaccagcagactga

SEQ ID NO: 3096 - DNA, 342 bp, Zea mays
  Peptide Sequence Number=SeqID_44875
atggagaaccagcactcacgaagacgactcccacgaagacgaggcagccctgaccggagcgaggtcctggaaccggcgctcacggtgacgacgcgcccgatcgcgcgctgccgaagacaaggcagcgcccgtggaggcgatgcggcatctggtgcccacggagataaagcggcgcgcacggagacagaggcgacagaatcgccaggcgttcctggcagacaagcagggggtaagacagcccccgggcattatattaagaagaccttctctcgcaggtcgagaaaacccccgaactcatgccccactcatacacagcggctctacaacccatgtgagaactga

SEQ ID NO: 3097 - DNA, 225 bp, Zea mays
  Peptide Sequence Number=SeqID_44876
atggggacgggggtgggggcagacgagaccggatccaccttcgcttcctacaacagcaatggtggtgaggtggtggccatcgctgaagaggagtatgaggaggaaggcgagcgggagcgtgaagacgatgttggtccccgccccgccgtcgtggccgtcgatctctcaccctgccatcgctccctgctccctgatgcctccctcactctcctcatggctacgtag

SEQ ID NO: 3098 - DNA, 279 bp, Zea mays
  Peptide Sequence Number=SeqID_44877
atggcccctccccgcgccctcgagttgtggtggtcggagtcagagaacgagcgatggtgtttgtccgtgtcggtgcgagcgtgctgctggggcgcgaccgacgccgatgagttcgagcgcacggtggagatcatcatggcagatgaagtacttcatataatcagttcctgtgaaactcggagatcaatgcaacttcttggagatgtcacgctgcaatggatgtcacataatcagatgaagtacctcctgtcggattctaaaagattaaaagtgctatag

SEQ ID NO: 3099 - DNA, 246 bp, Zea mays
  Peptide Sequence Number=SeqID_44878
atgtcatggggccttcatggtgtccttggggctcgcaaggagtatcaagcacttgagcacttgcactctctacgcactcgagcccttagccttccaaaaactcttcatcttcctcggagcaccctgctcccttttttgaacatcttccctagcgacaacgatgaagccaccaacgaagaagcttgtgctcccatggtcaagggtgaccaacaagaccactctagggatgtaccggacactacttag

SEQ ID NO: 3100 - DNA, 261 bp, Zea mays
  Peptide Sequence Number=SeqID_44879
atgacagttggcgcgccagggagccacatcacctttggcaccctcgacttcttcgtcatcgctgtcggcgagctcagcctcgtcgtccccgacatgcccgacatcatgggcacacaacctagacactccactaggaccaaggcagagaagcgatgcctaaaaaggcgtgtcaccgccctaaggtggcgcctcaataggcacactgggacaaaggtggttgaagcctcgtgctcgaccctagtggcagtcatcgatcgctag

SEQ ID NO: 3101 - DNA, 237 bp, Zea mays
  Peptide Sequence Number=SeqID_44880
atggccgagctctgctctagggccgagtctcttgagagcgaggaggccccacttcattctgagggcgaggagctctggaagatgctttctcaagctgatgacgccaagagaacaaccgaggatatgaaggcaacgtttgaggcccgggtgcgagagattttgcttgcttgcgatggcgccattaccacgtcggacaaggcagccattgtgctctctaagcgtagcgccaaactttag

SEQ ID NO: 3102 - DNA, 135 bp, Zea mays
  Peptide Sequence Number=SeqID_44881
atgatgccacctcaagttgaacgatcaccaccaccaagagcatccttcccctctggtgaagctccaccgagaaagatcatgggtcaaaggaaggaaactggagatgacaaaacaggaaacaaggacgaaagctaa

SEQ ID NO: 3103 - DNA, 444 bp, Zea mays
  Peptide Sequence Number=SeqID_44882
atgggaaccaatgggcatctcgacctcgacacgggaggtaaatccgtcgatcaaaagattcgccctattcaccccccctctaggcgactttcagaaggggaagttggtgaaaaggacaagacatcgttgaaggatgaggcaaacgatgaggagcccatcgactccaagcgaagaaagaaaggatggcaagaaaaatgcatcaagaagattgtctactatgagacacactcttctacattgccatctccttcaagcggcgaggaacccacctccgagcgtcatcaacaaaaaaatgatatctcatccaacgaaacagtgatgcactaccggaatcgacggctttgccgagtgcctgaagcactcggcaaactctttgccgagtgtcgcactcagcaaacagggctcgacacacagtgcatcggcaaagacttctttgccgagtaa

SEQ ID NO: 3104 - DNA, 1380 bp, Zea mays
  Peptide Sequence Number=SeqID_44883
atggaggacccaccagcgcttcctctgcctgagccggagtccgagcccgatcccgatcccgaggcctcccctgcgcctccgcaaaggctgctgcgattgcgctgcgcggtgcagcactacgagtggggccagcgcggagccgcctccctcgtcgcgcgcctcgccgaccagaaccccgacccggcccgcccctatgccgagctctggatgggcactcacccgtctgccccctccacgctcctcgacgacggtacgctcctcagtgactggctcgcgcggaaccccgacgcgctcggccccgccgtcgctgcgcgctggggagtcgacctcccattcctcttcaaggtcctgtcggtggccaaggcgctctcgatccaggcgcacccggacaagaaactcgccgaggtgctgcacgcgctgcggccttccacttacaaggacgataatcacaagccggagatggccatcgccatcacggagttccgggcgctttgcggctttgccggtatcgaggagctcaaggatgtcctgagggcatttcctgaaattgaaggactagttgggcatgaagatactggcaagctgatgaacatgaaggaagatgatggggttagtgaagtaaaatccagtttgcaatcagcttttgctaagctaatgacagcaagtaaagacatggtttctgaagcagttgcaaaactgatcagtcgcctgaatactaagagcaagaaatatggtagctcaccaggagatgaattggtgaagttctttggaaaattaggacttctctttttgattaggaccttaacagacaaagaacagctggttttgtccctggagagacaatatcaagatgatgttggtgttatagcagcacttttctttaactatgtgaagctcagtcctggtgaagccctttacattggtgcaaatgaaccgcatgcatacctctctggggaatgcattgaatgtatggccacttcagataatgttgtacgtgctggtttgacacctaaatacagagatgtgcaaactctctgctcaatgctaacatacaagcagggtttccctgaaattttgcgaggagttcctgtgcagccacacgtaaggcgctacacacctccatttaatgagtttgaggtggattggtgcttggtgcctccaggtggactggtcgtcatatccccggtaccaggtccatccatctttctcgtaatcaccggggaaggcgagattcaattggattttatgtcagatggggagaaagcagaggaaggtgatgttttcttcgtccccgcgtacaccgaggttaagatctctgcgtgtggccccgagtctgtgcagctgtacagggctggggtaaacagcagattcttcagctaa

SEQ ID NO: 3105 - DNA, 270 bp, Zea mays
  Peptide Sequence Number=SeqID_44884
atggcggcgcatcagccacagcgcgcggtggcgccattgccacgcacccgaatcccatctcccgcgcccgaagctctcatcggctatgctctattccatgcggagacaaaaacgaactggggcgaagagttcttaccacgattgagggcgcagagaccaccaaccacggcgcgatgcgaccccaattgctatcagagcccgcggcacccgcgcgacgcggacgattctgttgaggaagggcgtctgaccgcatgggcccatgtgttttga

SEQ ID NO: 3106 - DNA, 384 bp, Zea mays
  Peptide Sequence Number=SeqID_44885
atgcccctggccgcccggggggggcctcccctgcccggccccgtttccccgcccccggcgtggcctggctccctacgcccgcggccatggctcggccccctccctgtgcgtagttccgcccccggcgcggccccctgccgcgtcccagcacggtgtggtgccccagcacagcgtggcttcaactcgggcggccgcggtgcccctacgtggcgcgccccctgcccgcggctcggtcccggcgtgtgcgtggctcgttcgcggcgcgtcaacgcggccttgcgcgcgcgtgcttgtgtggtgcgcaatgctttggcgcgggctcgccgtgtcctcggcgtgacgcataacgtcctatcgcggggtgacgtgcccgtctacccctag

SEQ ID NO: 3107 - DNA, 243 bp, Zea mays
  Peptide Sequence Number=SeqID_44886
atggaggacaacatcacattgtgtggcacgatcgtggtgggcaccatccgtaaggctggcatggctggggtgggctccccgatgccttcggggtttctcaccactggtgtgcctattgtgtggaagaatacatccgaggttatcgggtcgctccttgatactgccttcgctaacatgtcggtctcttcattcctgctttctttctatatgttggagtgtgaatcctttgaactatttctctag

SEQ ID NO: 3108 - DNA, 252 bp, Zea mays
  Peptide Sequence Number=SeqID_44887
atggctgggaaaaaaaaggtcagggggttctggcgtaagtttaccgagactcagagaataggaaatgaggacggcgggttgaataggtacaacctcggggtctctttaacaaaatatacccgcgaaggggtatctacggtttctggtcgttggatcacctttggatctgaatctaacgatggcaactctatgcacgcgagatcggattggatccgtcggatcatatccaacggtccacggtccaagtcctaa

SEQ ID NO: 3109 - DNA, 213 bp, Zea mays
  Peptide Sequence Number=SeqID_44888
atgttgtgcttcccggggaagctgctcgtaggggagctcgtggcaaggcgccatgggaagagaggccatgtgagggagatagccagcgtaggaggagccgagagagataaggctagatgggagaggaacaaggtgtggcgactatgggagaagcagctggcggagtcagacataagctatgttcgacagtctctaagagccttcggcaattaa

SEQ ID NO: 3110 - DNA, 225 bp, Zea mays
  Peptide Sequence Number=SeqID_44889
atggggaagcctggcccatcactcctcatgctcctcctctgccgagtgaccacacttgtacccaccataaccggaatgggagaccacatctcaggttgtgtgaggagggcaatctgcgggcagcattattcctttgaggataatgggtctaggacaaaggttgataaaagtcttattacgaagttgaaccttcgtaatgaactttcaagaaacattgtaagataa

SEQ ID NO: 3111 - DNA, 255 bp, Zea mays
  Peptide Sequence Number=SeqID_44890
atggcagtcggggtcagtgaggcattgtacgccaaggcgcactggatagcgggggttttggtacccggaatcgccatgcgaggtttcgccggtgtgagcgctgccgcggatatctgctgcacccttggctaccgggaggttgatgatgtgttcgtggccgttgatgcggaatgggcggttgggattggtgctacgtaccggttcgtcccatggggatctgggacgtcgagatcggattcaacgtgcgcaatgtaa

SEQ ID NO: 3112 - DNA, 285 bp, Zea mays
  Peptide Sequence Number=SeqID_44891
atgttggggcgaaggcgtaacgtccccctcactccagaggcccgcactagaggattcaagacagaagacgaagaaggcctaaagattgagccacactgtgaagtgcttagggacaacacgcgtgcgaagactcatgagctacctttgcccggacaggccgaggcgaagaccatcaaggactccagagatcgacgaatcaggactatgaagaccatgcattgtaatcttccacattgtaaaagggggcccatgcatcaaaccgtttcctattcagccaccgtttga

SEQ ID NO: 3113 - DNA, 492 bp, Zea mays
  Peptide Sequence Number=SeqID_44892
atggccttgcggggtaactggcccgtgaccccatgcgaggccttcatggtaggaacaggagctaccctagaccacttgaggaaaaaatctttgaaaattttgggggacacacccaatgggtgtgcccaaggggtgtcttggggtaggaggggcagggattggcctcgccgcgctgatggcaagcgcaagcgcgctccgagtcctccctcagaggacttcgacgactcagagtactcggaggaagcctcctccgagtatgatcgattgcccgctctggcttctccctcggcatcatccgaagatttggatgactctatggggctgtccaccgcggcccgagcgtacttgcgctccatcgagcgcgccgggctcgatgggtcggatgagtcggaggaggtctcctcggaggaggtggactcctctgactcctccgaggagtggagcggcgacgatggtgacgatgagggcgacggcagcaaagggcaacagtga

SEQ ID NO: 3114 - DNA, 333 bp, Zea mays
  Peptide Sequence Number=SeqID_44893
atggacttacttagtgatgtcagtggacgtctcatggaagtggtggtggatggctcgtggaggcatggacgaccggcaaagacggaggcgcatagaggacgagggtgtcgtactcaacgcaagatctggtgggctagagccgagcgcgcggtggagggcgcggggcgcacgaagagggcgcaacaaagggcaatcatgagcagcgcctgcgcggtgcgcatgcgagggccgcgagcggcgtcgggtggcgagaacgcttccgactatcgtaggtgcaatctcaagctcgtcgtcaacctctcgcagccgacccgagagcagcactacagctaa

SEQ ID NO: 3115 - DNA, 1269 bp, Zea mays
  Peptide Sequence Number=SeqID_44894
atgggcgacgacgacgaccacaatgaggggctgagggcggggccgacggcgtcgtggcggctcaacgtcagcgacttccacatgccggagcggcccaaggagccgcccttcgtcgccagggtcttcctccgcagccacggtccagattccggaaccgaaccaccgtcccccgcgaaccacggaacagcgaagacacctgggccaggggcaggggcggagaccatggggagcccgcaccatggacacggcgttgacggtggcggccgcagcgacgacgaggagggcgacgccgggtcgtggcggctgcgcatggacagcggcttcagcgtcccggaccggttccaccgccagccgcccttctacgccaggatcttcggcggctcgcacgggaagcagaggaagatcgcgaagtactacaagaaacaagagaatctactgaaggatttcagcgaaatggagaccatgaacgaaatgggtggcctagatcagaatgctcctaccgaggaagagcagaagcagttggcgaagagcgagaggtttgccatcaacctgtcgaatgcagtcaacctggtcctcttcgtaacaaaagtcgtcgcttcagtcgaaagcgcgtccatggcggttatagcgtcgacgctggactctctgttggacctgctgtcagggttcatactttggttcactgcgtacaagatgaaaaagccgaacaagtacaactatccaattggaaagaggcgcatgcagccagtgggaataatagttttcgcatcagtgatgggcacacttggcttccaagtgctgatcgaatcagggcgccagctcataactcaggaccatttcttcgacgtaatcacaaactcggtcggcctggtctcggcgctgctcgctgtccggttcaaatggtggatggaccctgttggcgccatactgatcgcgttgtacacgatcacgacgtgggcgcgaacagtgctggagaacgtaggcacactgataggcaagtcggcgccggcagagtacctgacgaagctcacgtacttgatctggaaccaccatgaggagatccagcacatcgacacggtgcgagcctacaccttcggcacgcactacttcgtcgaggtggacatcgttctctcgggcgacatgccgctgagtcaggcacatgacatcggcgagtcgctgcaggagaagctggagcagctgaccgaggtcgagcgcgccttcgtccatgtggatttcgagttcacgcaccggcccgagcacaaggccgag

SEQ ID NO: 3116 - DNA, 897 bp, Zea mays
  Peptide Sequence Number=SeqID_44895
atgcggatgagctgcaacgggtgccgcgtgcttcgcaaggggtgcagcgacaactgcgccatccggccgtgcttgcagtggatccgcagccccgacgcgcagggcaacgccaccgtcttcctcgccaagttctacggccgcgcaggcctcatcaacctcatcaccgccggccccgaacacgtccgacccgcaatattccggtctctgttgtacgaggcttgcggccgcatgctcaacccggtgtacggctcggtcggcttgctctggtccgggaactggcagctttgccaggcggccgtcgagtcggtcctccgcggcatacccatcgcgcagccgccgcccaccgccacggctgtcccgcctctccggtcgtgcgacatccgccacgtcgccaggagggaggcaggccgcggcgccgtggatgccggcctccaccgaatggccaacagctcgcgggggcagttcaagcgatccggcgcccagcacagatccgcagactccggcagcatcgagctcgtcttctcccagccgtcggcggcttcgtccatgctggtcgacatccgacaggcgcagccactgaactgggcgccacgccatccaagcccccaccagtactactccgcaagccacgacgacgacgccgtgcgtgagagcgacgacagcaaagcctcggtggacaccgtggatgtctctcatgtcagtcagtccgaacccgcggagccaccgagagaaagcaatgagcgggcggatggtctagacctcacactaggtctgccaccgactgcgcacaaggtcgagagactcgagacgtcgtcagacgttgacgacgaccagacttctcacagaggcgagccgacgaagctcggcttcgccatggcggattctcgagctagataa

SEQ ID NO: 3117 - DNA, 417 bp, Zea mays
  Peptide Sequence Number=SeqID_44896
atgtcgtgccggcccggttggccatatatagaggcggtcgccacagaggaaggaacagaggaagaggaagacaagctggctgagaaagagctagcacaaacgtcgatgcaagcgacgaataagagaccgcagagaagataccctgtggcacccatcgtcatgtgcctggtcctggcgtgggcatcatgcctccacggcgacgacactaaattattagcggccgcggttccattgccgcggcgtccagcagcaacaagcagcgtggccgccgcaggggggatgcccgtcgtcgtgggctaccgcccgagacctcaagcaggcgccgccgccggccgctcagcaccgcgttccaccgcctggatcggagacgacaagcgccagattccaagctgtcccgacgctctccacaacaggtag

SEQ ID NO: 3118 - DNA, 1893 bp, Zea mays
  Peptide Sequence Number=SeqID_44897
atgccgcctctcctcttccgctccctcgcgtcgctcaacctcctcctcctcgtcggctaccttctgctcgtcctcctcgccaagctcttcgcgcgcctgcaccacagggccaccgccaaggacagaacaagtaattggtatgatggccgctgcgaccaccgcacggaggccctggccaccgatgaagcagagtacgccgccgccgccgccgatatcgtccaagcacaacaagcggacacgctgtcctggttcgacgaggccgcgttcgaggacagcaccctggtgcttggcgacgaaggaaaagatcacccgtacgccgctactgcagccactgcacgttgttgcttgcaggtggtggagagcaactttcccatgcaggaatctgcccgcatctcgccgcgcaaccagaaccgccgcgtcgatgtcgatgtcgaagccgaaccgatgcagcagcagcagcacgtgctggaggaggccaagggcatcgccgtcgatgtccagcaggcgacggtcctggaaccggaacggcggcggagtgctcctgctccagtcgtcgtatcaccggaggatgtctccatccaaggcagtctcctagggaacaagcaggaaagcaacagaccaggagaagacactcgtcgcgacgcccatgccgagcacgaggatgaggagggccagcaggggaagagcctcgctgaaggccaccataatgtcaagctgttcgtcaacaaccgtgcgctcgccgacgccaggaagctcctgctggagggcgcggtgaacggagcgcaggcgcagctgcagctgcagctgcaggacgacaaggacaataagaacggggacagctgccggctcgacgcgtcgacgctgacgagcgggtcgtcgacgtccaagagctcggtggagtggcagagctcgacggtgaccaaggactcggagacggagtaccccttctcgtgctcgtcgcgccggagctccgcgcggtgggagccgtacacgctcttccgcaagtacgacgaggacatggtctacttccaccgggtcggcgcccagaagctcaccgaaacagtcattcaggtccatcaagtaccagccgcggtcggtgtcggagaggatcgtgcacaagctgacgccgagctgggccgagcacccgcatcgtcggcctgcgggacccgtacccgggagctggagcgcgcgtacgtggcgcaggtgtgcctcacgtgggaggccctgaactggaactacaccagcttccggcggcacaacggcagcgacgacggcagcgtcgcggcgcggtgctgcccggcgcgcgtggcgcaggagttccagcagttccaggtgctgctgcaccgcttcgtcgagaacgagccgtacgagcacggccggcggccggaggtgtacgcgcggacgaagaactccacgcccaagctactcctcgtcccggagttcagagacgaggatgacgagaaggatgatctgatatcggcggtccagttcctgcttatactggaggagtccatcaggacgttcatggcgttcctccgcgccgacaagaggagccactacgagatgttcagggagacggtgaagaggagggcgagcgccatggaccagacgccggtcgtcacactcaagaaagccaacaagaaaaagaagagccggctcaaggacctgacgcggccgcggcggtgcctcaggaggacgaggctgaggcagcaggaggagctgtccatcctactgggcctgatcgacctcaaggtggtggcgcgggtgctgcgcatgccggagatcaccgaccagcagctgcactggtgcgaggagaagatgaacatggtcaggatcgatctggtgggcaagatgcagagggattctgcacctcttttctaccctgcacattga

SEQ ID NO: 3119 - DNA, 375 bp, Zea mays
  Peptide Sequence Number=SeqID_44898
tggcccccgggcccgcctcaggggagggtgcgagcctacaggtggggctagagtctgattggcggttggcctgctgctcctacgtgcctgttgacgcgcttacatgtgggtcacgttggtcagtacctctccccgtcgtcaactacggaccgagtattgcggcgaaggaactccacggatctcacgtggtcggtgtgctaggcccggccgcggactccgcgtcgtgggtgttcaagtatcgcccctgcgccccctttcttcgctgccccactccacgccaacacctgcgccgccgcgttccacacgaaggctgcccgctaccgccgccaagccacgtctccgcgtggattgagttctccgcgtcaccggacctag

SEQ ID NO: 3120 - DNA, 660 bp, Zea mays
  Peptide Sequence Number=SeqID_44899
atggagaactacaactacgaccaaccttcacaagcccctggagactatgtgccatgcacatacacagaaggcatagatttaacagaaatcgatgacgaaggaaacatgaactttgcctttactaagtgcatgaacatggaagacagccagcactcaactccaactgaccctaagcccaagaaagtaacaacttggaggcttggaaactacactcaggccgaggatgggatactggtatctgcctacatgaacatgtccaaagatcctacaattggaacgaatcaatcaggaaaggcttattggtgtcacatcagcgactactacaatgaacacaagaagacagctaatgctaggacacaacactccttggagcacaggtggagcgacattcaaagggacactacgaagttttgtgctgcgtacgacaaagtgataaggttgaagcaaagtggcaaaagcgaagacgacaaggcgaagcagggggaagacgaatttggttcaccgtctgatacctttgtgcgaccaatgggtagggaccgtgcaaagaaggctcgtagtaccagcacttcgagcaattcaactgcctgcatggcactgctggagaagttccaagaggatagagcaaggttcgaagaaaaggctacaaagtatgaagattag

SEQ ID NO: 3121 - DNA, 267 bp, Zea mays
  Peptide Sequence Number=SeqID_44900
atggagacacgaaaggatgttcaggaatgggccaatacaacagttggtgagacccacctcggaaagaggaaaacaaaaattggtccttctgaacgcaaacaaaaaagggtcaaatttgttgataaacgtgcgaagaggaagaggttgggactgaagaaagcacaactaaccctagtgaaggtgatggtggcaacaataatgatgatggttgccatagggatggtgcaggtgatgctggaatatatggtgctggagatagctatgtag

SEQ ID NO: 3122 - DNA, 531 bp, Zea mays
  Peptide Sequence Number=SeqID_44901
atgccgcccgtctccgcggtgaggtctcgccgaaggcgagggcacaaccccgacgaaggcctagggtacttgggaagcactcgggcgcattcagggcgatccggcgaactcaaccgtgggcacaacgtcggtgcgggggcaccagagggcgcaaaccgcggcagagtggcccaacggcggcacggacttgctccagcgagcaatcacgcgaaggacaggacaacaaacggctttatgggggttgctcacctcgagaggaaactctggagaactggagcaacgatggggacgcagggatgcctcgagtcgacgacggtggggcttcggctgcacgggggaaacgccggtgagcgtggaccgggcgaaacagagaggctgagggcgaaccagaaggtggcccgcgttgctgatgaagaggcggagctcaccgaggcaacgaacgcggtagacgctcgacgacggccacggaatggcggcggatcacggcggagctccacgggggcagtgcgcagagcgagggagttcatctga

SEQ ID NO: 3123 - DNA, 234 bp, Zea mays
  Peptide Sequence Number=SeqID_44902
atgtcgttcacccccggagaggaaccccgtgttttgcgtggaggagaaggcaagcctctcaacgctcgtcggatgtttggagctatgcacaaatcggattcaccatcgttcttacaaacaccgattgggtttgtttatggtcgtagtatggttgtgttcaagatttcgagtagacgcttcgggtggtcgagtagattcgtagtacaaattatgtgtgatgaggctatgctgtag

SEQ ID NO: 3124 - DNA, 528 bp, Zea mays
  Peptide Sequence Number=SeqID_44903
atggctgcaaaagagggatggcatgacatagcgcgcgggtgcgcagcgaggcaacgtagatggacagtgcgccggatcgagcccaaaaaattgacgacgatgtccaagacagtgctcgatggagtggaaggaagagggcagccttggggactcgacaatgatgaatggaggagcagaggagctgtccgacctactgtgttgaggggaggagacggggctgcacaccacagaggagcagagggtaaaggtgcagcgactgctgtagagaaggagctcgactccatggtgctggccacgagcaggttaggggaaggagcagagaagggagggaggacaccggcgtttgggaggaggggtgcagtggagcagagagctcgcagggggaagccggctggagaccgatgcagggagcgcggggccgagcgccatgggagaaggtccgagtgggggaagcgctggcgagctcctagcaggggttggctcggccacgacaagagcagggaaggggaggcgcgcgtccaggtgtag

SEQ ID NO: 3125 - DNA, 483 bp, Zea mays
  Peptide Sequence Number=SeqID_44904
atgtacaccaagcccaagaagatcaagaacaagtacaagaaggtgaagctcgccgtgctccagttctacaaggtggatgacgccactgtcaaggtcaccggccttcgcaaggagtgcccaacaccgagtgtgatgcgggggtgttcatggccaaccacttcgaccgccacaactgcgcctttgactgactgcctcttcggcgagcagcgagccggtctcggagttccgcctccgcctcagcgccttcaagctcccctgactacctctccgctctctggcttctctaccgactatggtgacctcaaactcgaaacacctgtcatcagcgacatcgcctccctctctgcctctcccttttccatctctctatctccctcttctccgccgtttgaggatggtaggctgaactctggagtagagtggtaccaagtgcttcctatagctgctcccaaaaacgcgccacgaatgggtgcctcggtctag

SEQ ID NO: 3126 - DNA, 381 bp, Zea mays
  Peptide Sequence Number=SeqID_44905
atggacggtggcggaggtcctcggtttgcgtgggcagagcgagagagagagagagctgggcagagggcgcaaatggaagaggggaggtgggcgagcagggcgcgggggctcggtcgtggccggagatcgcgcgaacgtgggcgcgtccacggtggggagatcttgggcgagagggtgttacatggtgccaaccacaggatgcagttggtggatgacctaaagaaggatggacatgaccagtggatgctcgccaaactttactcctcactggacctgagacagagtctcccatgctggatgatggtgggtacaagtgcggccattgcacggcgaaagccagggacaattggagcattgtacgccaaggccgtacctccttga

SEQ ID NO: 3127 - DNA, 375 bp, Zea mays
  Peptide Sequence Number=SeqID_44906
atgcacgcgttgactaccttctacgcatttcaccccttggagatggtaactcatcccattggtttattcctcgctgcaaaggaggatgacccgatgtggaaagaccgggtggaccacgccaaggaggtagaagaaaggaaccacaccatcgaggttctggaaaaccagctccagaacacccaacaacagcttgaagaggcaaacgagcacctagacatgcatcaccaggagatgcatcatgacatggaagaagatgaggacgtggatatcgagggggaggatcccgagctagcttctagcttggacaccgctagcacagctcactccggggggccaccatgtccagagtctagcgttgcctcgcatgcccgctaa

SEQ ID NO: 3128 - DNA, 540 bp, Zea mays
  Peptide Sequence Number=SeqID_44907
atggatgaggagcgaatgcacggatgggtcgaactaggactagaggacgacgaacgccatggcgggattgcgacacggtacaggaactgggcgattgggcgcggtgccaggaaggtcagagaaccgcggccatgggagataagggcctcggctgggaagcaacagaggaggagggaggagagcgggctgatcgcggcacaaagggaacgcggacaccatgggcagcgcccaggcgcacgcggcaagggagatccacgagtctcgggcgcgcgcagcaaggacggagctaggagagccgctcggctggtgtcctcgcagggagaagccacggcaagagagcggcatgcaggaaacagtgcgcagagggcgagccggaggcagaacgtcggtcagggagttcaaccgcctgcaaatgggtccgccatcggcgagtgtaggagcgagccaagagctccgcgagctagacgggaaatttcggtcgggcgccatggctgcaggagattgcgcacgggaaagctcgacggctggggctgggactag

SEQ ID NO: 3129 - DNA, 444 bp, Zea mays
  Peptide Sequence Number=SeqID_44908
atgggttttgacagcgtcgcagatggggctgcgcaacacaacaaacacctgacgggcatcacggtgtgctgctcactgtgcagcaccccacctagacatctcgccgaacacttggcatgcgcgcagtgctggcagagaggaagcaagatcggcatagggtctactcgcggcgggctgctgttttgtggggaagagaggaggagcaggggcctaaagttgggcggcatcggtctctcgccatgggtggagctcggatggggggatgttcccatgggagaggagtttggctgtcccccatggctgcgtagatctcaggcacggcagggagggagggtcgtgggtcctggccgttccctggctgcggcagggaagaacaaggcgaggcggctggagctacgccagcgccatggacgccagggaggggcgctgagcacaggggcatag

SEQ ID NO: 3130 - DNA, 213 bp, Zea mays
  Peptide Sequence Number=SeqID_44909
atggcgaaaaggcttataagcatcccttatttcagataccagaatcacaacgaagctaaatcagttgtattgactgcacttcctgatgtcctcagggctaacaggttgaggacaaggaggcaagtagacgacgcatgtggccaacgttggcggtatggacgtggagatggcactggccctcacgctcagcagcagcgacaagctccagaatga

SEQ ID NO: 3131 - DNA, 285 bp, Zea mays
  Peptide Sequence Number=SeqID_44910
atggcccgatcaaacataaagatccttgccattccagccattgacgatggaaagaagtcgaggaaggatgtaagaaagaactccacagtagattgtgggacatacaccaagaacattatctacaaggagtatttacttgtgtcatatgccactatcttgcagaatagcttcagcttgcaagctagtcttctgaaaaaaatccctagcgcatatgctaatggttccattaaagagcaggtgtttacacaaaatcttgcactcttcttcacatcaattttaaggtaa

SEQ ID NO: 3132 - DNA, 492 bp, Zea mays
  Peptide Sequence Number=SeqID_44911
atggcaaaggatagggcgtatgctgatctttacaaacttttgagtacgaaggaaggagaggacatatataggatggctacagtccatgagaggaagacagggggcttcaaccaagttaagtgcattaaggatgaaacggagcactccttggtgaaggaggacgagatcatacattgcagatttgtttccaagctttgggatttgatttctggcatcgagctgcagccggaggttgaagacaggcatatcttcagtattgccccgaatggtgtatactcagccaaatcagcatatgaaggaaatttggtcttcattcactcgcaccacagccgaccgcaaactccttcctgggatggtgggaagtggtggggggagcagtacttggactcacaaaaaagggccttaactctctcatcattttgggagcttggactttatggaatcatcgaaataaatgcatttttgatggctgcaacccaagtatgtccttaa

SEQ ID NO: 3133 - DNA, 279 bp, Zea mays
  Peptide Sequence Number=SeqID_44912
atggcgaggtcgctggttgttttcaacagtcaaccgacagcactcgctcgcccagaatactttcgctatcagatcctgcccctcgctcgccgcccaatcaacagctcagacgttgccgccacatccgagcaaaggtggaggcgtctgcctccacacacctcgccctcgccaccgccgtccctagaaaagacacgactgtgcagagaagacacggcggtgcatagaagacaaaggcggtgcagagaagacacggagatcgggcttcaggacaagaactga

SEQ ID NO: 3134 - DNA, 498 bp, Zea mays
  Peptide Sequence Number=SeqID_44913
atgacgaggttttccaaactccggatggctagcaacgatagcaacgtggtctacacccccaacatagccatccgtttcgggagtctggattccatcgtcaacaatgaaggggaaatgactagagccccagagactctagtcccttcgacgactgacttacccaacgttggcagaggtctcggcgacctctggctctgtcctcctcaggaggagcgcgggcttcagggctcagcacgacccactcgtaccgatgtcataggggtattggaccccatccgagattcattcctggacatcctcctattaggatcggaggatggactctcctcttcgcatagcgaggcaagttgcaaccccgtccaagagtgcctcgcagccaacacgacgagagatcactttccctacgcaggaagcttagggggacttctcctagtgtcacgatatgtgccacgatgtctgcctcaccctagctccttaggaccctccgttgggccctag

SEQ ID NO: 3135 - DNA, 753 bp, Zea mays
  Peptide Sequence Number=SeqID_44914
atggagaacatgagcagcgactgcggtggctccaagcgagggatccgattcggcttctcctgggctgacgaggtcgagcgtgaggagctggagcaggaggaggaggagcggcggcggtgggacacggagagggagcagatcaaggcggacccgttcggcggagcgcggccgctgggggtggagcaccggcggtcggaaatggagagggagaaggtcaaggcggacccgttcggcgcggcgcggccgcgggaggtggtgttggccgagaagggcgtcgactggcgcgcgcgcgactgcgagctggatctccgcctccgaaccgccccgcgcccgcgccgcagccagaagcacgcggccgctacggccacgagcaaggggaccgtcgcggcgcacggggcgacgcccgcgcgtggtgctccgcgggaccaggatgccgcgggcgccggacgaacgccgcacccgagggggcagcgcgctgccttctccacgccgttgccgccgacggttagccacagcgcttggggcggaagcaagaggaagtgtgccggggaagggcctgggccgtcgcggcgagtccagacggtggacaaccagaggaaggtcttcggcgagctcaacgtgggagagggctgcggctcctcgatcagaacctccaacaataagagctgtgactccggtggaagtcaagccgagggaatcaaatcaaatatgcccgcggttgcggacgaatgtacagttcttcctactccctaa

SEQ ID NO: 3136 - DNA, 231 bp, Zea mays
  Peptide Sequence Number=SeqID_44915
atggctgccctatccccacctgtggcctcactcgacatcggccgcccggccccacccgacgtcggccgcctcgtccttgcccacagccccgtctgccaccggcttcctgctggtgctgatgtgattaagggcattgataagtttaccccgttaacacttgttgcatactgcatacgagggattaacagatttttacgagtgtttactcgagcctgtagggttaatctctag

SEQ ID NO: 3137 - DNA, 858 bp, Zea mays
  Peptide Sequence Number=SeqID_44916
atggccaaagttgccaacaagtcgcacagggatcgcatccaggactttaaccagtacatggccaacctcagcaagcatgcgaagaggaagaggaagaggagcgccggagttgtaaagatgttcctggtggactggttctatggggtgctggcatcgcttgggctgtggcagaaggaggctaagatcctcttccttggcctcgacaacgccggcaagaccaccctcctccacatgctgaaggacgaggtcctctctacctccgacatccgccccttttccttgcgaattccagtcttatatgctttcgacttaacggggattcctgatctggttcgattgggttcatcgcagcggctcgtacagcaccagccgacgcagtaccccacgtcagaagagttgagcatcggcaggatcaagttcaaggcgttcgaccttgggggccaccagatcgcccgccgcgtctggaaggactactacgccaaggttgatgctgttgtgtacttggtggatgctgttgacaaggaacgttttgccgagtcgaagaaggagcttgatgcgcttcttgcagatgactcccttgcaaacgttcctttcctcatactgggcaacaagattgacatcccatacgcggcttcagaggaggagctgaggtactacctcggcctgagcaacttcacaaccgggaagggcaacgtgaacttggccgactccaatgtccggcccctggagatcttcatgtgcagtgtggtgcgcaagatgggctatggcgaaggcttcaaatggatgtctcagtacatcaagagggttgaaatcaagtctggtcgtgacatggcagctgcatggaaaggtttatggtag

SEQ ID NO: 3138 - DNA, 327 bp, Zea mays
  Peptide Sequence Number=SeqID_44917
atggaggttttacacggtgcaactccggtggctagcatggtgcttgtcgctctgttgctgcccctcaaccctttattgttgagcgtcgtggcaacgggggacgacaagagcctggaaactatcgagagcttccttggcaactttgacaaggcagtctctatagctcgcacgacgatgacgcgagacttgaccccttacgaccaggaggtggagcagttgcgtgcggaggtcgcctactctgaggagagggagcacaaactcgtcgtgctccacttcgaggctgactggcttcgcagcgaggcaatacgaccttggacgtggatatga

SEQ ID NO: 3139 - DNA, 486 bp, Zea mays
  Peptide Sequence Number=SeqID_44918
atggcgaaagagagaattgcagatggaggagcagcagcagcgttccacggccagaagacagacgccgcgagcatagtcgggagagccctgtcctgcttcaacgatcgctacatctacagcgggtgccagggcgcgctccggctgggccccgagggcgcgctggacgtgccgccggggtcggtggacgccttctgcggcgggccgtgcctggtggagacgcacctcgtgctgcgctgcgtcgacgacggcatcgtggccggcttccgcttctacaacggcgcctccgccgccgacgtccgcctcgtgctcgcccgcgggtggtgcggccgctccggcctccggggcgacttcgacgacgtgctgcagcgcctcggaggcgacgggcacttgtacggccgcgggagcgacgcccgcgtcagcagcctggcgcaagcgatgccgctgctgctgagtgcggccgctgctgtcgtcctcgtatggacgtga

SEQ ID NO: 3140 - DNA, 219 bp, Zea mays
  Peptide Sequence Number=SeqID_44919
atggcggggcgcggacggtctgcggctctaggccaaacggtccgtgacctgacgacaagagcgacgcctttcctgcgtgctgtccggacggtccgcgatggcgcagggtcgtcttcttctcacctagatcccgcccccttggggagagaccttagggtgctctgggtcagcaggtcacccggggcgttcccagatgacgtaaagtcgcctagaaattaa

SEQ ID NO: 3141 - DNA, 1581 bp, Zea mays
  Peptide Sequence Number=SeqID_44920
atgtcgctgcgcccgagcgagcgggtcgaggtgcggcggaaccgctacaaggtggcggttgacgcggaggaggggcggcggcggcgcgaggacaatatggtggagatccgcaagagccgccgcgaggagagccttctcaagaggcgccgcgaggggctccaggcccaggtccctgcccctccctcgggggtcgagaagaagcttgaaagcctcccagctatggtcagtggggtttattcggatgacaataaccttcagcttgaggccaccacacagtttcgcaagttgctatctatagagaggagccctcccattgaagaagttatcaaatcaggtgtagttccaagatttgtgcagttgctcacaagagaggatttgccccagctgcagttcgaagcagcatgggctctcacaaatattgcttctggcacttcagaaaatacaaaggttgttattgatcatggggctgttcctatatttgtgaagcttcttgggtctggtagtgatgatgttcgtgagcagactaagcctgctctgccagcacttgcacgacttatccattccaacgatgaggaagttctcactgatgcttgctgggctttgtcatacttatctgacggcactaatgataagatccaagctgtaattgaagctggtgtttgcccccggcttgtggagctccttctccatccatcaccgtcggtgcttatacctgctctacgaactgttgggaacattgtaactggagatgatcagcaaactcagtgtgtgggcttggctgccctttccccgggattggatgaaatgtgttttgaagattgctggagcagattggccgagcttgttcctaaagacctcaaagatggttttaattccttggtgactccaggggcttggtgcatctggaagcaccgcaatggttgtgtctttaatggtgctcggcctagtgtttgtatcattgatcatcaagctcttccccgcctcctgaatttattgacacagaaccacaagaaaagcattaagaaagaggcatgctggacgatttcaaatattactgctggaaacaaagatcagatacaggctgtcataagtgctggtattatcgctcctttgttgcaactgcttcaaggagcagagtttgatatcaagaaggaggctgcttgggccatctcaaacgctacctctggtggttcccatgagcaaatcaagtacttggtgtctgagggctgcatcgtgccgctgtgcgaccttcttgtttgccctgatccgagaattgtaacagtttgtctggagggtcttgagaatattcttaaagtaggggagcacgacaagaccatgggcgcaacaggtgacattaatgttttcgctcagatgattgacgacgcggaaggcctggaaaaaatcgagaacctacagagccatgataataatgaaatctatgaaaaggctgtgaagcttcttgagacttactggatggaggaggaagatgatgcaatggctactgctggggaagctgctcctgctgtttttgactttagccaaggtggcaaccctcctggtggtggtttgaacctcaactga

SEQ ID NO: 3142 - DNA, 747 bp, Zea mays
  Peptide Sequence Number=SeqID_44921
atggcgccaccacacactgtccacgtctctatgcttcggagccggaaggtgtcgcactacctcatgagcgtgggcggtagcaaggaccagctggacgtgtgcgtctacaacagcagcggccgcctcgcgctcgcgtacgccgtcggcgccttcatcctcctcgccgtcgccatgttcgccgagcacgcctacatgctggtcgccgtcgccgccccggagtccgcctccgccggcatggccgtcgcccaggaccacccgcgcgtcgcgtccaccgccgccgcgctcacctggcagacgggctgcctcttcttcctcacgtggatttgcttcgggcttgccgaggtgatgctcatgatcggcatcgccgtggagtccggccacatgagcgactggcggaagccgcggcccgtgtgccaccgggtgcgcccggggatgttcgcggcagcggggatcctggggctcatcaccgtcgtggtcggcttcgtggtctacatcacagctgtgcaggcacagcggctgaggggacagcagtaccagcacggcggcggtcacttcgtcggctacggcgctccccatccgggcgcccagcaccagcaccagcacctgcgcccgccagtgccgcacccacacgggccacaccctcatccggtgccgtccgcgccaggagcgccggagataacagcggcgccgtgccaagtgcaacccagctgtgcgtctttcatcaccaaggaggccttcgacgtgtga

SEQ ID NO: 3143 - DNA, 348 bp, Zea mays
  Peptide Sequence Number=SeqID_44922
atggatttcatttgtctcgcttaccttaggggtagccgtagcaggtcgaagcgaagccagatcagtcgcccgttgtcgaacgaccttgttattcccgtccactttgaagttgccggcagagtgtaccaagttggctcaatgatgttgctaggagagacgttagagctatcttttgaactggccactgagggacgatttgatagatattcatgcgatgtccccagcgaagttgctaaaaagtgtgttggcgccgatctaggcgccaatcactgcgacgagtatcggttggtgcactctgaggcagcggggaccgcgactgagggccagacggtctgcgacctggcatag

SEQ ID NO: 3144 - DNA, 201 bp, Zea mays
  Peptide Sequence Number=SeqID_44923
atggggattggttgtctacgagatgaaattggaataaggattaaggtgtggtaccgttctctggaggagatggttgctgggataacttggccgtccaccttgccccctaagtggactgttgagtgggaccctgcctcggctgaggggtccgtgaggagtgatgggacaggcttccccatctctctgaacgaatcaagctga

SEQ ID NO: 3145 - DNA, 222 bp, Zea mays
  Peptide Sequence Number=SeqID_44924
atgacaaagagcggtgctgcgggaatcgagcacgacacaacaggacaacggtcgggccatcgccgagccagtcgagcaccggggaggctttgtgggtacagatcggcgcacgcaacagagttcgcgagcatagggaggaaccttggctctgctcgggtggaggggcgccgcgtggaggaagatgagcagggacttgacacacgacgtcaagggagcgcgtag

SEQ ID NO: 3146 - DNA, 252 bp, Zea mays
  Peptide Sequence Number=SeqID_44925
atggcgtcgccgcggtacaccgtgtaccgggtcctacactcgaggtcaaccaaaatttgttgggaaattgagttccgggtagcatcaattataggtgaagagcccgtgactgaggattctggtgagcagcaggttgaagtagctgagcaggagctcattgaaggcaagtttgatgatggagttcgggaccccaaagcgatggatgatgttggtgaagaacgccaccgcctgttcggacctgatgctgtttag

SEQ ID NO: 3147 - DNA, 876 bp, Zea mays
  Peptide Sequence Number=SeqID_44926
atggagttcggggttcaccgaagcgtggctatggcttttcccatcgcacaacaacacttcggtggtgacccccacggtgctattagtttgcccaagggtggaccctacccctatgtcttgactacttgcactttccccatcaccccaaccctaactgaattagagggcaagcactgcgctagtagagcgaacgacggcgagcacggtgctggcggagcgaagcaaacgacggcaagggactacctacgggctgatggcgtagcacggtgcgacggctccccctctgggcaagctcgacggcggcaggtccggctcttccccatcgacggcgcgacggtgtttgggcgatgcggccagtggatggcgcgggccccaagcgatctctgggctgagccagcttccctctccccaagtgacagcactctgcccactggtgtcgatctggaggcgacgatcgatatagacactgggttgtcgttgataatctgcccagattgtagggacgtgagggtgtttgctgccactaccaagtttgggtctaatgagggaaagagatatttcaagtgtcctaggaagacttatggacatggaacatgtactaggtattggttcgaggaagaatatgtggtgttctttcattataacggatatctaccaatgacttcctcgatcgttgcagcagcttcgacaatagaagttcctaagattgtgagaagaattgttagcttagagaaaaatctgaatgaggtgaaggacaaagttggcaacaacagggaaggaatgggaagctgcatttgtcttgtgtgcggatgtgtgaatgtaacactattcctgttgttggccatcgttttgcttgtagttgtagtgctcaagtag

SEQ ID NO: 3148 - DNA, 336 bp, Zea mays
  Peptide Sequence Number=SeqID_44927
atggaggacatggagaagcgcctgacggagaggcaagttggtagagatggagaacaggcaattggaacaagccaaagtggtacaatacttgcaagtgaagatggatttgtctatgaagtctttggcacaggtttctcaagatcaaagcgaattggcgaccgttgtgtcgactatcaactgaggaggggcggtgataggagatggtttgatgggagcagggccaactctcagaccaggtggacatcagctaccaccagtaggaggacaacaggttccaccaatctcacccatgttgggttccatgtcgagtgggtctacaggagttttgccatctag

SEQ ID NO: 3149 - DNA, 191 bp, Zea mays
  Peptide Sequence Number=SeqID_44928
caatattgcttcccgagaccaacacagaggcggcagtgacactgacacgtttggcgagggctacccaggatggaaacgtcgtgggaccagagccagctcctgcttgtgatatcatcgaacgatactggaagagcccacgtaacgaagctttcctttcatgggacctcttcgggctctcgcccggaaagtga

SEQ ID NO: 3150 - DNA, 510 bp, Zea mays
  Peptide Sequence Number=SeqID_44929
atggctacgcacggcggggcagggtcggcggcacacgacacgacatcatttggtatgacgagggcactacgcacggttgcgagagaaggcaaggagagtgaggaactatatggggtggccgagggcctaacttcaacggcttgggcgagatcgtggcggtggtttccgtcttccatgcgcacacgccgaggagaatggcgtgacgcggtggggagtgcgctcgctcgatgcgtgtgggtcacgagcgaggcgtcgacgcggggttggccgtgtaggggcgcgagcggccacgccggggcgagctcgccagcgcgcgagggctgggccgcgcatagggtgataggggaagacagagggggctcacctcggcagacatgccgtgctgatggggcactggactatggtggcaccccggtgagcgcgctggtggaggtgggatcggcgtcctggcgtgggaagagagagagaggagggtggctggcggttttggcgagggaagaggcgacatga

SEQ ID NO: 3151 - DNA, 687 bp, Zea mays
  Peptide Sequence Number=SeqID_44930
atggcagaggagaggtgggccttggttggaggacaaggccttgatggggagaagcagacagaggcaggagaaaaaatgagtgcagggtggaaaaaggcgcgtgtcaaagtataccgtttggctgatggtgggaagtgggacgatcaaggaacaggttatgtttctattgattacattgagggttcaaaagaactaggtttgactgttttagatgaagatgacaatgatacactacttatgcacaacatcacatctgacgatatttacagaaaacaagaagaaacaatcatttcatggagagatcgtgaagcagcaacagacttagcgttaagctttcaggaagctgctggatgctcctacatatgggaacacatatgcgatattcagagaaaccttcagttcagtaaccttggtgatgattcattccgctctgccaacggcggcgaattcagggagcttcctcctgttgagttgtctaatcttccttttattttgaagtgtagctcagagtgtgaagactgtattggaggctggcattacagatcagatgcacgtggcagagttgataacacaagatgggcttcccctatagttttcccgtgcatggacttgtccaagagcgaccttctcgaggacgaagtgaatatctatctcgatatgcttggtgcgttggtgatgaacatgtag

SEQ ID NO: 3152 - DNA, 288 bp, Zea mays
  Peptide Sequence Number=SeqID_44931
atggagccggtgatcgttggtccagtggccgacactgaagacgccgccgggaggccgtacaagatgccgtggagacggtggccacgcgcttctagcgtgaccctgctgatgccgagaagctggataccagtagacctaagaaagagttggcaacggcccccaggaggtagcctcgactgggacctggacctgtacacagctttggctagggagcgcttagggtacgggaccatgctaagcggctacacagctccaggccaccccaagagacgtgtgtccattcgctag

SEQ ID NO: 3153 - DNA, 453 bp, Zea mays
  Peptide Sequence Number=SeqID_44932
atgggtagaggcaagagaggcaagggatggcctcactgtgctgacgggaagcgcaaacgtcctccgagtcctccttcggaggacttcggggactcggagtactcagaggaggtttcctccgagtatgatcggtcgcctactccagcatcccccatggcattgtctgaggactcagacgactccatggggctgtctgttgtgactcgggcgtactggcgatccattgagtgcgccgggctcggtgggtcggacgactcggaggaggcctcctcggaggaggtggaggactcctccgactccgaggagtggagcggcggcgagggcgacggtagcagtgacaacgacgacggcaaaggtagcggcgacggtgacgatgaccgcaaaggtggcgacggcaagggcgacgacaaaggcgacagcgaaggcggcaagggtgacagtaacggcaagtga

SEQ ID NO: 3154 - DNA, 282 bp, Zea mays
  Peptide Sequence Number=SeqID_44933
atggagctaggagggtggcgtagaaactccctggtcgtagacaacgccctaggagctgatcttgatggagtccgggatgtctgcttcatggccctcggtgaggccgtggagctaggagggtggcgtagaaactccctggtcgcagacagcgtgcacagcagtagccctaggcgcagggaagttagacactcgtggcgtggaagatgcagcttcttcctccacaaggaagtcctcagaagtctcggcgcggtgctcgacgatctggaccattgtgtcgagtga

SEQ ID NO: 3155 - DNA, 165 bp, Zea mays
  Peptide Sequence Number=SeqID_44934
atgccccggttcgcgccgacatgtgtggaccaagcgctgttgtccaccgttcaaggagccgaagccgtcaccaagctcaccttcgatcgccgctcctcaacgaccctcgccctgctcgactcaccatcggtagaagaaatgggaccaccgttagaaatagggtaa

SEQ ID NO: 3156 - DNA, 189 bp, Zea mays
  Peptide Sequence Number=SeqID_44935
atgaacgtcgacgagggggtgttcgatggtcaaggaacgagcgtggtcgtcgtgctgcgcggtcgcgtcgacgacggacggcgtaacaccggcgatgcgattggacgacagaacggaagggcgaggggagatgagagggcggccgtcttcaatcggccatcaatagcgttcatggaggagagggagtaa

SEQ ID NO: 3157 - DNA, 399 bp, Zea mays
  Peptide Sequence Number=SeqID_44936
atggccaccacctgggactccacggcgaccttgtgcagcttcatggcgtggtctaggtgccgtcgcgatctccggagctccctcggtgcgcatgaaatggcaggaatccccgtggctgcactcacagttcccaagcgctggaacaaggtggatgaggagagattgtattatatagccatgaggagagatcgattcctaacagaaatccctaaatcacgcgagcttgttatggcggctgttgagggtccgacgcgcgcgggatttgctccgttcacagatcctaacaagtttgcttcgatctgcgtcgatccaggagcctggagatgtctgcgaaggttggatgaccggatgaacatgggtgacatcccaacggcaagagcaataaagaaagggaaataa

SEQ ID NO: 3158 - DNA, 357 bp, Zea mays
  Peptide Sequence Number=SeqID_44937
atggcgtggtctaggtgccgtcgcgatctccggagctccctcggtgcgcatgaaatggcaggaatccccgtggctgcactcacagttcccaagcgctggaacaaggtggatgaggagagattgtattatatagccatgaggagagatcgattcctaacagaaatccctaaatcacgcgagcttgttatggcggctgttgagggtccgacgcgcgcgggatttgctccgttcacagatcctaacaagtttgcttcgatctgcgtcgatccaggagcctggagatgtctgcgaaggttggatgaccggatgaacatgggtgacatcccaacggcaagagcaataaagaaagggaaataa

SEQ ID NO: 3159 - DNA, 273 bp, Zea mays
  Peptide Sequence Number=SeqID_44938
atggaggcatgggcgacaccgcggcaaaattcacaggtcatggtggccgccggtgaaggctccggcagggctagggcggtggcgccactcagttggcctgacagtcaacgtttgaactcgatttttctctcaaatctttgtggcatcctgtccaaagatctgcatcaaagttatagagccacaatccagctacaactttgtcacagcaaccttgatcaatttctcaacaattcaagtttgaattcacacaccaagttggctctgttccactga

SEQ ID NO: 3160 - DNA, 117 bp, Zea mays
  Peptide Sequence Number=SeqID_44939
atggagctggactcggttgttgtgatgaacaagcgcatacgagatgaaggacctgctccttctgttagatgcatgaagatagtgatagaattgagacaggttggtgtcatcgaatag

SEQ ID NO: 3161 - DNA, 1518 bp, Zea mays
  Peptide Sequence Number=SeqID_44940
atgggcatccaagggaacaaggcggcgacgcacgagcacgacttcctctcgttgtacgccgccgccgccgcggccgccgccgccaaggacgctcctctcctgctccacgactccaagacgccgcctccttctcaaggtaattttctcttgaagacgcacgacttcctgcagccgttcgatcagaagccaggagcgccgccggagccgtcgccgctgcccgctccagccgcggagatcaggcaccggcagcaggtggcggtcgccaagcagcgcgcgctgccccttcccctgcccggcggcgtcggcaccttcagcatcagccccgcgcccgtgtcggtcgcgctgccgtcggccgtcgtcaagtcggagccgccgccgttcgtgctctggggccaacctgcagcgacgctgcagccgggcgcgcgagggcaccagcagcagtgggcgctccccttcgccggctccttgcaggtcagtccgccgccgcagcaggcgcaaccggataggaagggccgcggcggaggcggggtcatggattcaggctccagatccagcggcggagccgggttcgacgacgaagacggcctcaccacgcgccgcgaggtctcctcctcgctccaagacgcctccgtcctactcgcactcatcggggctagtccgctagtgtaccatgttcgtgtagcagagttaccgatacttagggagctgttgccacacaatgatcaaaagagagacaaagcaacatttctcttggaggttattgaatatatacgttttttgcaagagaaagcgcaaaaatacgaggcaacattcccagaatggaaccaagaaaatccaacgatgcttccgtggagtaaaggccaaatcccaggagattccccgcctgacccttcacatttcgtgagaaatggatcctcccctggatctaatttcactgggaaactcgatgataatcacacatctgcagctgcatcaggggcactggaccaggcagaaactaatcacgtggctagcggctgctacagatcatcagaaactccggcgaatattacaagtatgatcgatggttcacatatgattttgcattattctcagaagtactttctgagactagaagcagcactggttacttatgactcttctttacatgtagataatgctatatctcagtcccaacctcaatggacaggtccgtcccctgtggatgactctgcagtgaaaagtgaaatgcttaacagccaggagttggcaatagatgaaggaatgatcagtgtgtccagtacctattcccaagagttacttatctcgttgtctcacgcccttcagagctcaggtgtggatctgtcccaaaccagcatctctgtgcagatcaacctgggaaagcgtgctggcaagagatctgcatctgctggtggtgtatcctccaactccaagcccgacgggaggctctctcttggattggttgcacatcgcgtgctcggtgatgggctgagaccccggctgcttccattcatctga

SEQ ID NO: 3162 - DNA, 462 bp, Zea mays
  Peptide Sequence Number=SeqID_44941
atggctggtggtagcgctcgcgagacgctttatacgccaggccccgtcaactactcgcgcaccccgacgcagacgcagacgcagacgcagacccagagccagagccaggcagcggtggggactgggcaggcacatgaggccgggaactgcgggcatcccgtggatggagacgcccaccggctgatcgccgcctgcgccgcttcgactgctgagccactcgacagagtgaggctgacagcagccaagtccggcctcaggcgccataggaaactccgcttcgcccgaccccagggctcggacacgggctcagccccgaaagacgacgaaccccgcttcgcccgaccccagggctcggacacgggcttagccccggaagacgacgaactccgcttcgcccgaccccagggctcggactcgggctcagccccgaaggacgacgaactccgcttcgcccgaccctag

SEQ ID NO: 3163 - DNA, 288 bp, Zea mays
  Peptide Sequence Number=SeqID_44942
atggtgattccatacggcggctccatggtagacatcgacttcattgagcaaattcccatggcgcgaagcttccacgcccgacccgagccttcgaaagacaccaccgagtggaggcacttctcccaggacaccgaactaggccccggcgactacacaggtgatgggggaatggcagcgggcattggagtaaggaggctaggcgcccagcgcggcgagccgcacgaggagggccgcatagcttcggcggctatggaaggggatgtaccaaggggagagcgcgaggtctaa

SEQ ID NO: 3164 - DNA, 1020 bp, Zea mays
  Peptide Sequence Number=SeqID_44943
atggcgaactccgctccgcccgaccccagggctcggactcgggctaagacccggaagacggcgaactccgctctgcccgaccccagggctcggactcgggctaagacccggaagacggcgaactccgctccgcccgaccccagggctcggactcgggctaagacccggaagacggcgaactccgctccgcccgaccccagggctcggactcgggctaagacccggaagacggcgaactccgctccgcccgaccccagggctcggactcgggctaagacccggaatacgacgaaactccgcctcgcccgaccccagggctcggactccgccctggcctcggccgaacgacctccgcctcgcccgaccccagggctcggactcgggctaagacccggaagacggcgaactccgctccgcccgaccccagggctcggactccgccctggcctcggccgaacgacctccgcctcgcccgaccccatggctcggactcggcctcggcaacagaagacagactcaacctcggcttcggaggagcccccacggcgacgtcagcaaggactcgaccgctccaacagctgtccctccgccaggctccgtcgcacctccgacagccacgacatcacgccagcaaggtgccaagacctctccggctgccacattggcatggccttcttagagaaggttggccgcgcgggaccgaggacgggacaggcgctctcttggggccgctcgcttccctcacccgcgtggacgcttgtaacccccctactgcaagcgcacccgacctgggcgcgggacgaacacgaaggccgcgggacttccacctctctcacgctcggctccggccacctcgcctctccccccttcgcgctcgcccacgcgctcgacccatctgggctggggcacgcagcacactcactcgtcggcttagggacccccctgtctcgaaacgccgacaactctgttatgcgtaaggagaggatccaggtgtacaatgggggtgtagcagtgtgctag

SEQ ID NO: 3165 - DNA, 1758 bp, Zea mays
  Peptide Sequence Number=SeqID_44944
atgaaagagtccgacctgctcgcgacttctttcatcacaccctttggcatgtactgctacattactatgccattcggtttgaggaatgcgggtgcgacataccaaaggtgcatgaaccacgtgtttggaaagcacattggtcgaacggtcgaggcttacgtcgatgacatcgtagtcaagacgaggaaagcctccgacctcctttccgaccttgaaacgacattccggtgtctcaaggcgaaaggcgtaaaactcaatcccgagaagtgtgtctttggagtccccagaggcatgctcctggggttcatcgtctccgagcggggcatcgaggccaacccggaaaaaatcgcggccatcaccaacatggggcccatcaaggacttgaaaggagtacagagggtcatgggatgccttgcggccctgagccgtttcatctcgcgcctcggcgaaagaggcctacctctgtaccgcctcttgaggaagaccgagtgcttcacttggacccctgaggccgaggaagccctcgagaacctaaaggtgctccttaccagcgcgcccatcttggtgccccccgctgccggagaagccctcttgatctacgtcgccgctaccactcaggtggtcagcgccgcgatcaagctactgtacgcggtaattctgacgcggcgaaagttgcgacactacttcgagtctcatccggtgactgtggtgtcatccttccccctggggaagatcatcgccgagaggcctcgggtaggattgcaaagagcgggcgcgggcctgctcttcatctcacccctcgggaagcacctccgctacgtgctgcgcctccatttccctgcgtccaacaatgtggccgagtacgaggctctggttaacgggttgcgcatcgccatcgagctaggggtccgacgcctcgacgcctgtggcgactcgcagcttgtcatcgaccaagtcatgaagaactcccactgccgcgaccctaagatggaagcctactgcgatgaggttcggcgcctggaggacaagttcttcgggctcgagctcaaccacatcgcccgaagatacaacgagactgtagacgagctggctaagatagcctcggggcggccaacgcctgaggcgcccttggctcggcccgaggcaccctcggcccccgaggcacctcgagccctcgttggaaatgccttccgacagggtttctactggccaaccgcggtggccgacgccactaggattgtacgcacctgccaagggtgtcaattctacacaaagcagacccacctgcccgctcaggctctgcaaacaatacccatcacctggccgtttgctgtgtggggtctggacctcgtcggtcccttgcagaaggcaccggggggctacacgcacctgctggtcgctatcgacaaattctccaagtggatcgaggtccgacccctaagcagcatcaggtccgaacaggcggtggcgttcttcaccaacatcatccatcgctttggggtcccgaactccatcatcaccgacaacggcacccaagtcaccagcagaaagttcctggacttctgcgaggatcaccacatccgggtggactgggccgccgtagctcaccccatgacgaatgggcaagtagagcgtgccaacggcatgattctgcaaggactcaagccgcggatctacaacgacctcaacaggttcggcaggcgatggatgaaggaactcccctcggtggtctggagtctgaggacaacgccgagctga

SEQ ID NO: 3166 - DNA, 3097 bp, Zea mays
  Peptide Sequence Number=SeqID_44945
atgacgcctatcgccggctacattcatgaattggaggttgtcgcgttccggctcggggtccaccatgccctggtcaccgctcggcctctcgttgggccgcctttcattaccagattctggctgcctttcgctcttctgccttcttgcttggttgccccatccgacacgcctcctcttcctcgttgcccctcggccctcatcccctgcatctgctccccctctaggcctctaccgaaccctagccggccagctgagcttattgaaggcaagctaggcgagagcagcgtccgccgccgcgctctcatggcggcgcccaaaccgatctgggtgcgccaggctgaggaggcaaagctcaagtccgaggcggagaccgctgccgccgccaaggccgccttcgacgccaccttcaaggccctcgctgccgcgtctggtgacgactacaacgatgtcgaccccgccccaccctccccagccgagctcacctccaccgactcggacgacgatgctccggccctgccaggcccggtcgacccgtccaagtgctccgccgcggggcctggcatcgctggcggctctgccggaacgccctccactttcaccgtcgtcgccaaggatcgccacagccggaggctcaccgccggtggggcgcgcgtgcacgtgcgtgtctcgcccgctgcgggagtcggcggggacgatctcgaaggcactgtcaaggacaacggggacggatcctacacggtcacctacgtcgtccccaagcgcggcaactacatggtacacgttgagcttgacggcgtctccgtcatggggagccccttccccgtcttcttcagcggttccaccgccacaccatcagccgctttccccaccgcgctacctgctgtcagctctgcctaccccaacatggttaaccagaccatgcctaatatgcccaattacacaggcgcgccctccagtgccttccccagcctcctcggggccatgcctagttccaccgctgggtcctcgggcggagtcatcctgccaggggttggtgcttcactgggggagatatgccgggactacatgaacgggaggtgcacaaaggtggagactgactgtaagttcacccatccaccgcaacagctgctgatgtcgttgcttgctgccacgacttctgtcagtgctctcgggcatgcgcccttggcgccctctgcggctgccatggcagctgctcaggccatcatggctgcccaggcactgcaggcacatgctgcacaggccaaagctgcaggtggaacttcaggctcaacaaacaaagctgatgaagctgatgccctgaagagaacagttcaaattagcaacctgagtccacttcttactgtggattatattaaacagctatttggattttgtggtaaagttgttgattgtgtcatgacagatacaaagcagattgtgtatgttgagtactccaaacctgaagaagcaactgcagcattggagctcaatagcaagagtgttggtggtcgtccattgaatgtggagatggctaaagctcttcctcctaaagcaaataataacttgcctatgatgatgcagcaagccgttcagttgcaacagatacaattccagcaggcactaatgatgcaacagtcaatagcagcccaacaggctgctgcacgtgctgccaccatgaaatctgccactgaagcagctgcagcaagggctgctgagataagcaggaagttgaaggcagagggctttggtggggacaacatggaagaaaaggatgccaaagggaagtcaggatcaccatcttcccctactcgtagatcaaaatctcggtcaagatcacctatcaagtaccgtaggagcagacgatcccgctcctactctcccccagttggacgctcaagggagcatcgatcacgatcaccatcaagatctcgccactcaaagcatggtagtgatcgatcacatagggatgataaggatatgtatagcaggtccgggagaagggagagtgaacgatcccgtgatcatcattcatctcgttcaaggaggaacagaagcaaaagtagaagtccaaggcataagaagccctccagagttgactctaggtcacccaagaaacaaagactcgaaagtttaagcccatcaaaatcaaggtcggctcgggctggttcaaggtcaccacgacatcataagggaagcaaatcatcgccaactagtgatcgtcattctcgccatagcaggcattcaaggtccagatctcttgacagaaagcatcatcacagtgataaaaaggacagcagaaagtctgagattcaggacgacagaagatctcatagaggcagcagacgcgacaaagatgaaagttcagtgaaggatgatggggaaagatctcatagaggtagtagacgcgacaaagatgaaagttcagtgaaggatgatggggaaagatctcatagaggtagcagacgcaacaaagatgaaagttcagtgaaggatgatggggaaagatctcatagaggtagcagacgcgacaaagatgaaagttcagtgaaggatgatggggaaagatctcatagaggtagcagacgcggcaaagatgaaagttcagtgaaggatgatggggaaagatctcatagaggtagcagactcgacaaagatgaaagttcagtgaaggatgatggggaaagatctcatagaggtagcagacgcgacaaagatgaaagttcagtgaaggatgatggggaaagatctcatagaggtagcagacgcgacaaagatgaaaattcagtgaaggatgatggggaacgatctcatagaagcagtagaggtgacaacgatggaaggtctgtaaaagatccagtggaagataaaagggtggatagtaatgctgtcgcacataagaggagctctgaagatgaaatcctgaacaacaatagtagtaaccataagaaacatagacatgaagttggtttggaagttgatgaaggaaatgatgtgtgccctgctgtagcagaccctaatgggaaacatgaaactggaggcatgaagatcttcggagaactcgagtgctgttcggagcgctcatctgatatattaaaat

SEQ ID NO: 3167 - DNA, 723 bp, Zea mays
  Peptide Sequence Number=SeqID_44946
atgagggccgaggggcaacgaggaagaggaggcgtgtcggatggggcaaccaagcaagaaggcagaagagcgaaaggcagccagaatctgttgataaaatttggcttgacgaaccatttgacatccaaagcatactcaatccaaaacatactcaatttagtccttaccgagaggccgagcggtgaccagggcatggtggaccccgagccggaacgcgacaacctccaattcatgaatgtagccggcgataggcgtcatccgggaagtctaggcagacatctccctcaaccacaaaactccgagatgactgcacacgaggtctatggccgcaaacagaccacggtgctcagcgtcaagagctcagaggcggtcatctgcacgcgaaatctcctccagcaccatcgatggcgaaaaacggaaaatcccatgagaaaaccgcaggaactggaaggaccgaaaatcgaggaaggaagagcacgagcctcaccttctatcaagaaccatgacgagggtccattgacactgcatcttgatgttcacacctcggaaaggcctgactgggccgtcggagagctctccctcgctttgaccgcaagatgctcaggcccccaccatcttaccaagttcagaccctgccacggcaatccccttagtagtggcacctcgagcggcaacgcgagccctgtgcctcctctaaaggctaggctgccaccgaacaactga

SEQ ID NO: 3168 - DNA, 246 bp, Zea mays
  Peptide Sequence Number=SeqID_44947
atgaaccccttcttctgccttccgtccttgggattcatggggttttggagccgttccttggtcgagcaagctcgtcttgatgccctcatctctcgaggggtcctccatgagggggattacaagctcctcggctccgaggacattcctaagctgccgacaggcttcgtggatgactttggtgtaggcaccaaggacgtggttgacctccttccactgaggacgttatcaatggttcccccaagctag

SEQ ID NO: 3169 - DNA, 438 bp, Zea mays
  Peptide Sequence Number=SeqID_44948
atgcgcgacctagcgcggcgcctcggcccgctcatgctgctccgcctcggcgagctccgcgtcgtggtggcctcctccgccgacgccgcgcgcgaggtgatgcggacccacgacctcgccttcgcgacacggccgctcagccccaccgccatggcgctgctcggcgacggcagcctcggcctcgtgttcgcgccctacggagacgggtggaggcagctgcgcaggctctgcaccgccgagctgctcagcgcgcgccgcgtccgctcgttcagggtcgtgcgcgagaacgaggtccgtcggcttctccgctccgtggcggcaaaggcctcgccggtgcggcagcagaagcagcaggcgctggtcgaccggagcagttctcgccgcctctcccacctccttctcgctcctaccgtccgcgtgccgctgcaaggggagtga

SEQ ID NO: 3170 - DNA, 1668 bp, Zea mays
  Peptide Sequence Number=SeqID_44949
atgacgcccggcgtcgaggcgctacatgcatgtggaacagacagattggtgttcaaggcactggagatggtggtctacttccgcactggcatccgcccacggttgtggaatgaaaccgacgcctcatggagggaagacacctgcgctgaagccgccgcttgtatgctgctgctcgtgactgcccccgctcccgcatgctcgcgcgccagccaaaccgccgctcccgcacgcccgccaaaccgccgctcccgcaacgcccgcgcgccagcaaccccccgcccccacacgcccgcgcaactgcctcccgcgcgcgccgccgacctcgctcccgcaacggcctcccgaacgccccgccgttctccgctacctaaacgccctgccgtcctccgctacctaaacgccgcatcagccacgaaatccgtgctgtcgcactacgccgccaagtggctcccggacgtggcgcctcccacgtcgccgtccgcgtcggggcacttcctgccgccagagagccccacggccacgtggctgaagaagcggctcctcctggagtccctcgtggccgcgctccctctggacccgccggcgggcggcgacggctgctgcgccgcggccgtcgccgacgatggcatcacgtgcgacttcctgctgaagctgctccgcgtggggagcatggtgggcgcggacgcggcgctgctgcaggacctggaggcgcgcgcggcgaggcggctggaccaggcgacgctgggcgccgtgatgataccggcgttcggccacagtggcgagcatgcgtcggcgctgctcctggacatgcccctcgtgctgcgcctcgtgcgcgggttcctcaaggagggcggcggcgcggtggccgcacgcgtggccaagctcgtggacgcgtacctggccgaggccgcgctggaggccggcctgcgccctgttgagttcgaggagctcgcgcgcgccgtgcccgcccacgcgcaccccgccgacgacgcgatgtaccgcgccgtcgacacctacctcaaggcgcacccaggcaccgcgaaggaggagcgcaagtcactggcgtggctgatcgacgcgtgcaagctcacggtggaggccgcggcgcacaccgtgcagaacgagcgcatgccggtgcgcgccgtggtgcaggtgctcttctcggagcacgacaagctcaaccgcctcgcggagttgagcgcctccttcagcggccagcgcagccccagccctagccccaactcgacgctggagctccccagccgctgcccctccaagcgcgaggtcctcgtgcagcaccaggaggtgcgccgcctccgcgacgacgtcgctaggctccaggtccgtccgtcggcttgtcttgagttcccgagcccgcacatgtacaccaacttcggtggtgctccgactgacgctgaaacgtacgtgtgctctatgcagcgcgctgcaggcccaggtggacaggctgggctccgagaggcgccagcgcagcgggggcggcggtggcggcttcttcaagtggagcgcgttctggttcgacggcggcatggcgccgacgtcgctagggtcgatgactcagagagcggcatggagcgccggatgccacccaaggggaagaagagcgccacagcgacgcccaacgccaagtggcgcaagtccacgtcctga

SEQ ID NO: 3171 - DNA, 1197 bp, Zea mays
  Peptide Sequence Number=SeqID_44950
atgttgcttctagttacttccaaacggaccctacattgctggagcctggagcgtggtctttctcagccgggttctcgaggcaccgaacgccaacaacgaaaaactccgcagcagtccacccagtccaccagacatccgacagggaattgggaggtgttgataggactcatccgcctaattcttgtagtggaattcaaccaattgattgctatttgggacagcggatttgtgatcctgttaccacagtcttcttgcgggccagaaacgcgaatcacgatggttccaggaatcgccaccaagacggcggcgcgaccggtggcctgggcacctcagcctcggaacatgttcgtgttcggcgcaggtttcgtcggccgctacgtctcggagcgcctcctcgcgcagggctggcaggtctccgggacgtgcaccactgtcaccacgaagagggagctagagatgctgggcatgaatgcttccgttttcgatggcacagaggacagacatgtcacttccagcctggaaaatattcacagtttacgacaagcaactcacttgctcatctccatcccacccatccctggagttggtgatcctgctataatgctaactggatttcactttatggtaatttgcaccttttacccccagctacttattaatttagatgaagatctgaggagaatactcggccatggtaatcttgaatggctatgctacctttcgtcaacaagtgtgtatggtgattgtggtggtgtattggttgatgaggatcatacagtaaacccaaagagcgagtctgccaaattaagatataacgcagaaaaaggatggctgaatcttattgatgatccaaaactgtcagcttttgtattccgtttaggtggaatatatgggcctggaagaaggaaaatatttaatgtggtggatgacgaccctgccccaagagctgaagtttttgcgtttgctacgagtttgatacagaggagatatcctgatatgataactgaaaccattgatgccaagcctgcaggcttagattatcaagagatgatcgtacctgcagagaaacgggtttctaatgctcggatgaagcaggaacttggtgttaatctgcttcatccaacttatagatctggtctgcagagtatccttgatgcttggcaaattcagcctccacttcccaatacaagtcaatga

SEQ ID NO: 3172 - DNA, 1203 bp, Zea mays
  Peptide Sequence Number=SeqID_44951
atggggacaggagtggagaggcgcaagaaggtggagggaagacaaccatggccccaggtggcggcggcagctaggaggagttcaaacttcaaagagaatatagaaggtaggaggaagagggatggattggagtatgttaggactgggacgggggctaattccactgttttctttgttgatgtccagctcaaggttttaccagctagaggacaggaggcagttgatattgctctaaaagctgatctggttatcttaaacactgctgttgctggcaagtggcttgaccctgttctgaaagatcatgttcctaaagtccttccgaagattttgtggtggatccatgaaatgcgtgggcattactttaaggttgaatatgtcaaacatcttccctttgttgctggagccatgattgattctcatacaacggctgagtattggaatagcaggactagcgatcgcctgaaaatacagatgccacaaacttatgttgttcacctggggaatagtaaagaactaatggaagttgctgaagacaatgtcgcaagaagagtcctacgggaacatattcgtgaatcccttggagtacggagtgaggatctcctgtttgcaataataaacagtgtatcacgaggaaagggacaagacttatttcttcaagcattttatcaggctttgcagctcatccaacacgagaaacttaaagtgcctagaatacatgctgtagttgtgggaagtgatgttaatgctcagaccaaatttgagactcagttacgtgactttgtggtgaagaacacgattcatgaccgtgtccattttgtgaacaagacattggcagtggccccttacttggcagcaattgatgtgcttgttcagaattctcagggccgtggagaatgctttggaaggataacaattgaagcaatggcattcaagttgccagtattgggcacggctgctggagggaccacggagatcgtcctggacggctcgactggccttctgcatcctgctgggaaggagggcgtggcgcctcttgcaaagaacatcgtcagactcgcaagccacgccgagcagagggtctccatgggggaaaagggctatggcagggtgaaggaaatgttcatggagcaccacatggctgagaggatcgcggcggtgttgaaggatgtcctgaggaaatcacaggagcactccaggtcttga

SEQ ID NO: 3173 - DNA, 675 bp, Zea mays
  Peptide Sequence Number=SeqID_44952
atggctttcaggagtcactacacattacaagagatgctgtggcagactgccagggcaaaccaagaaccggaagattccacccagaacagctggaacaatcgggaaagtggccagagttctggccggttttgccaggatgatgggacatggagacgtgagctttataaggattctagaggaactcagacttcatctgaacttacttccagaaatctgcaatcaaacaaaaaatcccaagcgcagcaaaaggttgtgaagaaattaccagtttcagatcttcgtggaaagttatctggtgtcgcgagccagcgccctcaacttagcagtactgttcaggtcccaaaacctgtaaaagaggttattaagagcaacaaacctgttcaaaagagagaccccactccaactactacccctcctgacatcaagaaacccagtgcacctgcacccgtaccagcaccatctgcactaccaaagcaatcccagaacaagattgatgcttcgcttgacagtttactaaagtctcttgatctagagaagtatttgataaatttccaggctgaagaggcacattcgatatatgttgcaattttgtattgtgggtgtgactgttatcataaatttaaaccagatgctctaaagagaaaacttgaaattattagttcactttggctttga

SEQ ID NO: 3174 - DNA, 369 bp, Zea mays
  Peptide Sequence Number=SeqID_44953
atggagcacggacggcggcgctggagatgggccggcggcggtggagcggcggcgcgcactggagctctggtggcgacgcgcgcaggagctctgctggcggcgctgggccctggcggcggcgcgaccagcaggagcagtggcggcgctggagccctggcggcggcgcgaccagcaggagcagtggcggcgctggggccctggcgacggcgcgaccagcaggagcagagggtggcgcgaccaggggaggagaaggagcaggggaggagagggagcagggggacggccggcgctggtgcaggggacgcggcgcctgtgccggcggctgggagaagggagaaaaaaaactggctctataccatattggaataa

SEQ ID NO: 3175 - DNA, 426 bp, Zea mays
  Peptide Sequence Number=SeqID_44954
atggttgtgtctaagttggagaagttggcaaagaaatctgggaatggacctgatagatgcaaagctactgcccgtagctcatgggaagccatggtgacagctacctttggtctttggctggcaaatacttgttgcagatattggctcagcttgacagtggtgaagttcctcctgaaaaattataacattgacccaaagtgcattggacgtttggaagttggcagtgaaacagtaatagacaagagcaagtctataaagacatggctgatgcagatatttgagaaatctggcaataccgatattgaaggagttgactcattgaatgcatgttatggtggaacaatttcattgtttaattgtgttaactgggttgaaagcaagtcatgggatggtcgctatggacttgttgtttgcacagacagtgag

SEQ ID NO: 3176 - DNA, 435 bp, Zea mays
  Peptide Sequence Number=SeqID_44955
atgacttgcatcgggtttagttcttacttcgagaacaaaatagcttgtgagaattattgtttctcgaagagcgctgacagtgcatatgcttttggttcagcaacctccaccaaaaggcaggaggcatatgttgagcaacaaagttgccagacggacgattggagccgatgcaggagtccaagctctagtgatggcactcctgtcagtggcccactgtttactggagcttcgccgatgctcttcagtatctcaccttcacgaggcccgacattgcatatgtcgttcaacagggagactttatcaaggtttatgctaacgggcagaggaaaatttcatgtgtggtgtattggccatgggcaaaaacttgaaggcctcaccatcactatgtttgaagagtgggtaaagaaactatttgatcttcttgtatttccttaa

SEQ ID NO: 3177 - DNA, 594 bp, Zea mays
  Peptide Sequence Number=SeqID_44956
atgaagacggcgattcggccaaggggacgtcagatccacccggaaaaggccacaacaacggtggatccggctgggaaggccacgacaatgatggatccaatgatggcggcgatgaagaagggagagggtgactgggcgggtccagccaggcaggggcctgcgccgggcctagcaggggggtttgacgccagcgacaggagaggcgcgaagaagagggagatgctgctggggcgtcggtgcgggcagggaagaaggagcacgatggccagcgccgcgccgaggagagcacgacggctagggcaccgccggtcagagcaagcgcaacaggcacgacccggtggcgggggcgctagatctagggcgcggaagagagaggccacgagggccatggacgacgacgcggcgacaaagaagaggaggtggggctgcagcggcggtgctggccggaggagtggccgccgcgccaggctggggacggacgacaaaggggaggacggcgacgtctgggctggacttgaggtggacgacgcgggcgccagacctgggggtggtggacacgccgccggggaaggaaggggaggctcgctggcctag

SEQ ID NO: 3178 - DNA, 1113 bp, Zea mays
  Peptide Sequence Number=SeqID_44957
atgattggagagggcgccgagaactgttcgcttggtgacccgtcgcttagggatagtggcaaacaatctcggatcctaagtgttacttatggtactatccaggcagcccaacaagaaagatcaattttcttatcttctttgcttcctcttctgtccgaatatgatgatctccagccttcagttcttgatgctcagtcaattgttagtaatttaaaggaacgacttattgttactgaggacagattaagggagtctcgataccagattactccatggcatactgaattgtcgaataataccagcaatcctgtgtctactaatcctcctgctggaaaagcattggtgactacaagcaaaagcagccttgatattgtctcccagatggtgtatcctcacgtacaatccccaatgtcttcccctgttcaagctagaggtgattggggtgcatttggtaacaaaaaccatcaagatatttcaaatgaggttcctataagaaatgctggacatgatgacaagggagggacctctctttcaagcagaagccaatataggactgatgttcctcctcaagtatctcaaggtgattccagtgctgtccattttgactttgagactcagagtcaaaacccaccattcaagggtcttagcagaaatgatgtactggatggttcagatagtgctgaagcccaaaacacacaagaaccttctactcgatggggtctaggggactcatctaatttggcatctggccttgaggatgcaaacccttcatatccttatcttcctacagttcttgaggaacctggttcttctttctccgaagctgcagaggatgatccattgccaggcatagaagggcttcgaatcacaggtgaaccttttcctggacaagaacttcaagcaggtggatactccatcaatggtaccacaacttgtaattttgagtgggtgcgccatttagaagacggctcagtaaatttcatagaaggagcaaagcagcctagctatgttgttactgccgatgatgtggacactttactcgccattgaagtccagcccctagatgataggaaaaggaaggaagtaggtcttagaaaagggaccttactgtaa

SEQ ID NO: 3179 - DNA, 189 bp, Zea mays
  Peptide Sequence Number=SeqID_44958
atggccgccccgcgaatcgcccgtcccgtcgcattaactcctcggcagggcaagcgacgcccttggcaggcgaagcaggcgttgtttcacctcaccatgatgaccgcgtcaaaaaagggaccgggaaaggggatatttcgaaagggatccttctccacgaaggaagcgggccccgagccctcctactga

SEQ ID NO: 3180 - DNA, 1923 bp, Zea mays
  Peptide Sequence Number=SeqID_44959
atgatcgcgtcgcagccgcgccgggttcggcccctcgccgccgtctccctggtgttattcctcctcctcctgtacagccgctccgatgggggctcaccgcgcgccgcgcggctcttaggctccggattctaccctgtgcaccgcaggttcctctccgatgccgaccctgccggccccgcatccagcgccgcgaacccttcggcttcggggaccgttccgttaaatggcgagcagccggaggacccttccgtggcgtgcgcgggcatcgcgctgcacgaggggttcgggacgcagtgcgagttcctccgggcccacccgcagtgcagctccgatgggttcgtcgactacctaggcttcttctactgcagatgcgagaggttcagggtgctgggctacgcggtgctcggggtatgcctggccgcgctgttctatatgctgggcaatactgctgccgactacttctgctgcagccttgagaagatgtcggcactgttgcggctcccgccgaccttggctggcgtgacgctgctcccctttggtaatggagcccctgacgtgtttgctagcattgcggcgtttatggggagcggtgctggtgatgttgggctgaacagcgttctgggtggagctgtatttgtgacttgtgttgtggtcggggcggtgtcgttgtgtgttgccgagaagaatgtgcagattgacaggaggtgtttcgtgagggatgttgggttctttctggtgactcttttggctttgtctatagtgttgaccattgggaaggtgactgtttggggagctatgatgtttgtgtcgatttatgtggtctatgcatttgttgttgctgcaaatgaggtattgaggaagcatgccaggaggctgaagtttgatgtgttcacaccgttgttgcctgtgagggcaagtatatttgaacaaggagcagagcaggatgagtcagcatacagttcacttcttgaggaggatgcagatggtgaggtaacccaaatgaatacatccgtgcctcagtggatgtgggcttctcatgtagccatctactcaaatcatggaaatagagatggttcgcctgacagctcaaggccattatggggttggagtgagggagaagtggataactccacattcaatatttacaagctgttctcgtttatggagcttcccttgacgataccaagaaagttgacaattcctatagtggaggaggaccgctggtccaaagaatatgctgttgcaagttcttgcttggcgcctgttcttttggcatttttatggagcagtcaggatacagtatccacaaaggttagcatagcagcatatgttatggctgtcatgttggggattgcactagctgctctggttttcctgttcaccagtaatgaacgtcctccacggaggtttttgtttccatgggtttttggaggctttgtgatgagcatcatctggttctacatcatcgctaatgaactggttgcacttttggttgctttgggtgtgatactgggaattaatccttcaatacttgggctaacagtgttagcatggggaaattcaatgggtgacttgatgtcaaatgttgctttagcgatgaatggaggtgacggcgtgcagattgccatgtctggatgttatgcaggacctatgtttaatacacttgctggtttgggtatatcaatgttgcttggagcttggtcaacggcacccaattcgtatgttcttccacaggaccactctcttatttacacaatgagctttcttgttgctggattgatctgggctcttgttatgctgccgagaggtgacatgcggcctaacaagatacttggagttggcctcattgctctttactcaatttttctttttattagggtaggcagtgctgtcggcatattgccactgcctggatcgagttag

SEQ ID NO: 3181 - DNA, 1770 bp, Zea mays
  Peptide Sequence Number=SeqID_44960
atgtcccccgcgtgcgccacgccggcggcggcgcgcccgctcaacacggttccgacacgccgctcgccgccctctgccgcgcgcccgccatcggccatccccgcccgccgctccgccggctgctgcttctgcgcctcctcctcatcctcggcatcgtcgccctccacctgggactggacccgatggagccgccacttcgacgaggtcgaccaggccgagagctacgcatccctcctccagttccagctggaggaggcggtggagaacgaggatttcgcggaggccgccaagctcaagagggatatcatagcggccacaggaaacgacgccgtagcccacgtcatggccgaactcaagagtgctatagaggagcagcggtaccaggacgcctcgaggttgacaaggcttgctgggaccagcttggtaggttggtgggtgggatatgctaagggcattgatgattccattgggagaattgtacgaataagccctggtgttggcagatatgtggccaaaagctacagcccgaggcaattggtcactgcatcttcagggaccccattgtttgaaattttccttgtcagagaagatgacaagacatatacaatgaaggtagtacacttgcgaccaacaaaaggaactttaggtgcatcatccatatcatcagcaataacagaaagcccagcaacggtagagacaccagaaagtagtgctatatctgatagtattacagaggaggcaaatatagatactccagtaaaaggaaatggggatgctgaagagaaagagcaagatgttggtagcagcaaggatactagtgttgatggatttaaaagtcttttgaatttttttaagtctcgaattcctgaattcaaagttcaggtgataaatgttgatgtgtctgaggaaactgaattggctgcaaattcgtccgaagaatcagtgcaagacgatgtgaagagtactccagaaggctcattggaagagccaaccactgaggaacttgagcaggaggaggatgttccagaagaagatatggatgaagaaagtaaaagtacgaaagtgaagctttttatcagtggtgtggttcacaataaagaagatgctggaacaaaatcatacgttcgtgttccagctgaaataaataacatggaaaaagactcctttgacctgtacattcctggaaatggttctggtcatgatctgcctgaaacgaaggctgcaaaacagaaagttgcagatatggctgctaaattagcctcagagcttatgccgtctgatgttgccaaggcattatggggtacaaccaagagttcttcaaagttggaatgctgggctaacataggtctctatgtgggagcatttagtccatatggaccagaaattgtgcagctccgtcggaagttcggccactggaatagttccgatgacgttgagtttttcgagtatgtcgaagcagtaaagttgactggtgatctgagtgtccctgctggccagataacattccgtgcgaagattgggaagggcaagcgacttgagaatcggggcgcgtatccagaggaattcggtgtgattgccagttataaaggtcagggtagaatagctcagcctggattcaaaaatcctcgatgggtggatggtgagctgttggtgctcaatggcaagagtacaatcccacaccttggaggcgcagagctcggtttcctgtacagtgtacctgagcagagttttctggttctcttcgatcggcttaaccttcccgagtgttga

SEQ ID NO: 3182 - DNA, 960 bp, Zea mays
  Peptide Sequence Number=SeqID_44961
atgaagcggcggggcttgctcttggtgaccatcctcctggccgcctgcaccaccgccacggctgggaagaaaaccgccatccgtcggacgcacgagcagctgcagccccaggcgcgcggctcgtcgtgcgacgtgtacaggggcagctgggtagtggacgcgtcgtacccgctgtacgacgcggcgagctgccccttcgtccgcaaggagttcgactgccgccgcatgggccgccccgactcgacgtacctcaagtaccggtggcagcccgacccgccgtgctccttgccgaggttcgacggggtgaagcttctgaacctgtggcgcgggaagaaggtcatgttcgttggcgactccttagtggtgaaccagtacgagtcgctgctgtgtatgctgcacgccgccgcgcccggcgcacggaccaaccagtcgtgggcgtcgtcgtcgggggagaacccgtcgaccacggtgcgtttcgagaggggtacctcaatttttgttgttgttaacatgcctacaccaaacagggctttagaagaaaagctatgggatataaagagggtggtgagagatggaaaaatggcaagctcctctcagacgctccccaccgtcttcactattgagcttccaactgaaacgccgcaggtctcgttccatccggccttgcagtttgccaagtgctattacgacaaccgtcattatgatcttgagttcgtggtgcactactcggtgtcgatccgtctcctccaccgacttatgcactcactaagtcctgtcacaagggtgctagaacgcattagacaagtggcctaccgccttcaacttctagagagcgctggtctcgtgatgactcaactgcccatgccacctatacaggataaccaactactgcctgagccagagagtgtttaccgtgcccaactacaccatggcacctgtcacgtcgtcattcagtggtag

SEQ ID NO: 3183 - DNA, 216 bp, Zea mays
  Peptide Sequence Number=SeqID_44962
atgatcatctgcataggacgaggagatgcaacaactgcagcaggagatgcaacaaatgtgacaataaatgcaaatgatgcaatcacaaaatatgtatatgggatgcatcaacatggttctgggataggtccctacaaccacatgattgacccaactatgtcgtgggtatatgcaccacagatgccgcctcagatgactccgcagatgccaacatag

SEQ ID NO: 3184 - DNA, 372 bp, Zea mays
  Peptide Sequence Number=SeqID_44963
atggggagctcggttgggcgcgagcaggcaacaggatgcgcagcggggaaggagcggctggggaagaagacatgcgcagggagcagggcacgcagacacttgggcgcgcggcgcagtggagcagagggatgggcgcgtcttggggaagagccgcggccagggaaaaggttcccgccatggggagaaccacggctggctgggcgagttgggggagagtggagggaggagagaggagcggctggacaagcagccatgggagcaggggaaaagcaccgcggcgagctcgtgggagagaagcagagagtgagcgccgcaaagacaagcaggggcacacgcgccatgggagattcggccggatgctggagaggctag

SEQ ID NO: 3185 - DNA, 294 bp, Zea mays
  Peptide Sequence Number=SeqID_44964
atggtgtggaggctcatctccatgcattgccacaatgcctcggaacgtcgagagatcctcaagctcgcgaagcgcatcagcgagcagcacgagcatgcctccagggatggctcgccgcttcgtcgtcggcctggcaaggagaaggtcgacgaaggtggcgcggccgcgggagaacgggacctcgggtatcagtcccccgagcaagacctcaaggacatcttcactggagattccgactccggtgatgacaacgaccgccgcaagaagttgtacgtgatgtatggcggaagctag

SEQ ID NO: 3186 - DNA, 537 bp, Zea mays
  Peptide Sequence Number=SeqID_44965
atggcgcgtcggccccggacgggtgtgctcgggccccagcagcatagcgccccggcgcgggccagccccggccatgacgcgacctcgcgcgggcgtgacatcgaccgctacgacgcggacgctcgaccatccgcggcgcggatgcctagccgcgtgccttcggcacgacacggctcggctggcctccggcgcaggctgggtcgcaagtgcggcgcgcgtgcgctcggcgtggccgacctcgacgcgaccgactccggcggctcctcggcgtgggagcctggcaagggcgcgcgacatggggcccggcgaggacggctgggcgcggccggttcgcggtgcgagcgcgacccggcttcccggcgcggggcgctgctcggccccggcgcggaagccgaaaccggctatgggcgcggccggccttctggtgggccgcctgggccggccagcttggctggaccggcgtgctggccaccaggccgcttcctggcccgtcaagcaggcgcctgggccaccctcatgggaccagattggtcctaa

SEQ ID NO: 3187 - DNA, 462 bp, Zea mays
  Peptide Sequence Number=SeqID_44966
atggagttcctcgccgcaacacaggtgtgcttctcctccctgacgttggtttcctctccttcgtccaggcgtgagctagtgcaagcagccagcatactcgcaagatggctgtcaggatgcgaggcgttcaagttcctccgagaggacggcaagcagaggagaggtaaccctaatcccaaattccttcgagttttcctttcacttcccaacacccggcccacactctccttcaatccctccgacgacgccgacaacgcatccctgtggccatccttgattctcctcgccgaggaggcgttagccaagtcgtcgcggtcgcggcccgcaggccactcgagagtgttcctggtgagtagcaccaccacggtggggatcgggggtgggggaggcagcactggcgatggcagggtgcagctcgccgacaacctcgatctcgacgtctatgtgcagtccaagtgctag

SEQ ID NO: 3188 - DNA, 522 bp, Zea mays
  Peptide Sequence Number=SeqID_44967
atggcgctttcccccctcctccttgcggaaaggcaacagaggggcgaaaacagcgccgcctgcctcgctccgattgccgtgccactcgacagagtgaagctgacagcagctaagtccagcctcgggcgccataggaagctccgcctcgcccgacccagggctcggactcagcctcaacctcggaaggcggactccgcctcgcccgacccagggctcggactcagccttgacctcggaagacggactccgcctcgcccgaccccagggctcggactcagcctcgacctcggaagacggactccgcctcgcccgaccctagggctcggactcagcctcgacctcggacaacggtctctgcctcacccgaccccagggctcggactcagcctcgacctcggacgacggtctccgcctcgcccgaccctcgggcctagactcgacctcggaggagcctccgcctcgcccgacctcgggctcggacctgccacgtcacagggggtgccatcattaccctactcctag

SEQ ID NO: 3189 - DNA, 693 bp, Zea mays
  Peptide Sequence Number=SeqID_44968
atggatgaagacgtcgcggtagcgcttgagcgcgaggagcgcacgcctaactcgtcaggcagcgatgctctcactctgcaccctctcgttgcctccgctcccaccgcctccccatggcaccgtcataactcccacctcctcagtcgccctcctccgcggtgccgcggcacgtcaaacgacggcgcacttgatctccatcccacttcggcgtgttcggtgcccggggacctgcgcaacgaccggtggctagtgatcggtgacctatggccagtggagtccgagccctggggttgggcgaggcagagaccgccttccggagtcgaggccgagtccgagctcaggggtcgggcgaggcggagtccgtcttccgaggtcgaggtggagtccgagccctggggtcgggcgaggcggagaccgccttccggagtcgaggccgagtccgagctcaggggtcgagcgaggcggagtccgtcttctgaggtcgaggtggagtccgagccctggggtcaggcaaggcggagcttcctatggcgcctgagaccgatcttggcggctgtcagcctcaccctgacgggtggcacagcagtcggagcagcgcaggcgtcgctgttttcccgtcaggtcggtcagtggagcggtgaagtgactgcgttcacttcggccctgtcgactaaggagcgcgcgtcaggataa

SEQ ID NO: 3190 - DNA, 714 bp, Zea mays
  Peptide Sequence Number=SeqID_44969
atggcgtgcaacgacatggcgaacgggcgggcgagcggtcgagaggaggcggtggcggcgcgccggcgccgaacccaaacgcggagccgcggaggtcggcagaggatttgcaacgaaattcggaagggaacgcgaaaaggaaaaggtagatcagtgaacctgagcgggaagcccggaagcgcagaagtacggttcggactggaaggaagtagattggcagtgggcctgaaggaaaacagcgccgcctgcctcgctccgactgtcgtgccactcgacagagtgaagctgacagcagctaagtccagcctcgggcgccataggaagctccgcctcgcccgacctagggctcggactcagcctcgacctcggaagacggactccgcctcgcccgacccagggctcggactcagcctcgacctcggaagacggactccgcctcgcctaaccctagggctcggactcagcctcgacctcggaagatggactccgcctcgcccgaccccagggctcggactcagcctcaacctcggacgacggtctccgcctcgcccgaccccagggctcagactcagcctcgacctcggacgacggtctccgcctcgcccgaccgtcgggcccagactcgacctcgacctcggaggagcctccgcctcgcccgacctcgggctcagacctgccacgtcacagggggcgccatcattaccctactcctag

SEQ ID NO: 3191 - DNA, 213 bp, Zea mays
  Peptide Sequence Number=SeqID_44970
atggacccgtcctcggaagagcacatggataggaaaaggcttcgcatgtggacctctcactttgctggatcagaagctgacaaaatggtgtctctaagagtcaaagtttccctatccataagccttccaagccagggaaacgaaaaggtggaaaatcgaagaacatgggggatcaagatgagaacaaagaaggcatggggccaaagaacctag

SEQ ID NO: 3192 - DNA, 105 bp, Zea mays
  Peptide Sequence Number=SeqID_44971
atgcaggacgaggtcgcgaggtgggataacctcgtcataggtcttcgtccggcgccgtgttgggcgaagggactagtcaacacagacatacaagagcaaaaatag

SEQ ID NO: 3193 - DNA, 153 bp, Zea mays
  Peptide Sequence Number=SeqID_44972
atggtggaagagagacccttgcacatcaccgtcgaggacatccccaaagacatggagttcgatgaatggttctctaagactaaggatgaacctatggaggactatgagcctgaggacccacacaggttgcaccctgtgcctataaataggtga

SEQ ID NO: 3194 - DNA, 201 bp, Zea mays
  Peptide Sequence Number=SeqID_44973
atgccactcatgaggctccgattgacctcggtgatggtaacaccgggggatggtgatgtcgatggaagcacatgcgatgtagccactggtggtggtgcgaggaggaatgggaaatacacttctgacgtctgggaggacatggagagggtctacaccatgaaaatgatacgatggttgtccaatgtctttagacaaacatga

SEQ ID NO: 3195 - DNA, 183 bp, Zea mays
  Peptide Sequence Number=SeqID_44974
atgcccctcaaggacctgagcgtccacacacccgaggaggtgtcggagatgcacaagatagatccggaggcatgttctctcaactctctgaacttcggtatcgaataccttcagaacaggatgaggacaaagacgaagatgttaagcttcggcacaacagcacatagaaacgaaggtgaatag

SEQ ID NO: 3196 - DNA, 192 bp, Zea mays
  Peptide Sequence Number=SeqID_44975
atggcggccggcaggagggcgatgctcgcgctcttcctcatctgggctatggcaatgcttcttttcatggctacccacgctccggcagtactcggcgcccgtgaggacgccgtctgcttttgctgcgccgacaagatatggtgtacgttcgaccccaattgctgctcgagacccccaccaagtgcaaactaa

SEQ ID NO: 3197 - DNA, 324 bp, Zea mays
  Peptide Sequence Number=SeqID_44976
atgacctgggatcgaagagggacagaaggtggatgctggaggaggaggggctggagtttgggttgtagatggcgacgacgaggaggaagggagccagcggatggcgcgacgtttcccgccagggagggggatgatgttgcagttcctgctgccagggagggcgacgacgcgatggggagagagaaacagagaacacgaggagctagcaggtggagccagagcaatggcaacacggacgtgaacgtctgcctaaaaattcactcccacgaggagtcaaacccaggaattgaggagtgttgctcaccacctaaccaactcgcctag

SEQ ID NO: 3198 - DNA, 1773 bp, Zea mays
  Peptide Sequence Number=SeqID_44977
atgtaccaggaggctacggccactcagtctctgtttctgctcagcatgtcccgcccatcagccagattctatttcaatcggtaccagttcaagccagacaattccttcccaccattcaggtaccccgatgattcgtacgaccggctgtggcaaaggtacggccgcaacgccgcatggaccaccatgaacacgacgaaggaagtcgacgtctccaacgtcaccggcagcttcgacaagccgtcggagatactgcagaacgccgccactccggtggcgaacggagctaaccggatggacttctcatggagctcagatccctcactggagcaggacgcgaacgccgacggcaacgcaacaacctaccttttgatcctctacttcgcggagcttcagagggtgccgagcgacgggctgagacagttcgacatcctcatcaacaatgcgacagggaatgacggcagcagccagggctttacccccaggtacctctccgcggcggctgtaaagcggacggtgcaggggcctgggcagcacaacgtctcgcttgtcgccacaccggcggccacgcttccccccattctgaacgcgtttgagatatatgcagtgaagccgatgactgagatgccgacggatgatgtcgatgatacatggatgccaaacaactcaaggtttactagccctcaagccagttcacacatatttgagaacagaaagttcacctacaaggagctgaagctcatgacagctaacttcagagaagaaatagggaggggagggtttggtgccgtcttcctaggatacttggagaatggaaatccagttgccgtcaagatgcgttcaaagacatcctctcaaggggataaagagtttctagctgaggttcagcatttgactagagttcatcacaaaaatctggtctccttgattggatattgcaaggacaagaaacatctggcccttgtctatgaatacatgcagggaggaagcctagaggactgtctaagaggagaagcctctgctgctacacccctcacttggcatcaacgtctcaagatcgctctcaactctgctcaagggttggagtacctacacaaatcatgccagccaccactgatccacagggacgtgaagacgaagaacattcttctatccgctgatctcgaggccaagatagcggacttcgggctcatgaaggcgttcgctgacgagttcaggacccatgtcacgacgcaaccagcaggcaccctggggtacctcgaccccgagtactacaacacgtcccagctcagcgagaagagcgacgtgtacagcttcggcgtggtgctcctggagctcgtcaccggccagccaccagcggtccccgtaagcgacgccgagagcgtccacgtcgcgctgtgggtgcgccggaggctctcggagggcgacatcgcgagcgtcgctgacccgaggatgggaggggcgtacgacgtcaactccgtctggaaagtcgcggagctgggactcaggtgcaaggaacagccgtcgagggagcggccggcgatgaccgacatcgtggcggagctcagggagagcttgcagctggaggtgtcctatgcgatgggctactacagcagctcggtctctaccagcgcaatcgatctcagcacagcaagtgctggtttgcaaagcgatgagaaacccagcgaccgtctggggcaaaaagctgcacttgagttgcaacagcaacatgtagacagtgaatcatcggcaactgtaggtcctgcaccaagatga

SEQ ID NO: 3199 - DNA, 798 bp, Zea mays
  Peptide Sequence Number=SeqID_44978
atgagacaatacaagcccaagcaaaggaagtcaaagaaacacattgaaacagtccgcggaatatcggacgtatctggtgatgcaccagatggcacaccaaatacggtcctcaaagaggctgaatttggacttcgaaaagcaaagggcaccgaacgtatccggtggcacgccgaacaccccaccggatacaacactaagagaagtgttaaaatggacaaagtaagatatagtgcacctgacgtgaccggtgttgcactggatggcacaccggacacggcactcagagagattgtatttggatcaagttggatagaaggcatcagacctgtccggtggcacaccagatgtacaatgctcaacgatcagctacgagaaggcttcaacggctatttgatgtggcatgtctggtggcacaccatacatgtcagattactctcaccatttgagaaaaaaggactcaagctcgatcttggtgatcgtttgagtaaggaaagggttgaaaatttgtcatataattcagatgttttaggaacatccctagttgaaagagacctggttctttgtggacctctagtttctttgtggaaccgaactccgatggtggggatgagggacctaggcgcaggcgttgagaggctgggcgcgactagaggcaggggcaggacaccgggcgtcgatgcagtagaagagggcggccagacgggcgggggtgccagcgttcgggctctctcaagcatagggcaaatggccgcgagcactagggcagagcagatggccgtgggcatggggtctgagtag

SEQ ID NO: 3200 - DNA, 228 bp, Zea mays
  Peptide Sequence Number=SeqID_44979
atgtcacgctcaacacagagctctttgtcgtatgccaagtcgatgcacatggtctcgcctggccagaccaccgacgtgctcgtcaccttcgaccaggctccacgtcactactacctcgtcgtgcgtgcctacgctagggtgctcatggtctcgcctggccagaccaccgatgtgctcgtcaccttcgaccaggctccacgtcgctactacctcatcgtgcgtgcctag

SEQ ID NO: 3201 - DNA, 435 bp, Zea mays
  Peptide Sequence Number=SeqID_44980
atgtatggtttacaggtggtgatgaggaggatggttatgattatgcttatggtaatggtaatggttgcctttggtgcaatctatgctcagaaaatctttgaaaatcctgggcgacacacccaatgggcgtgcccaaggggtgtcttgtgcgccgggctcggtgggtcgaatgagtcggaggaggtctcctcggaagaggtggactcctccgactcctccgaggagtggagcggcgacgagggtgacggcgagggtgacggcagcagcaacgatggtgagggcgacggcagcaagggcgacggtgacgacggcatgggaaacggcgacaggggcgatgttgatggcagcaagggcgacggtggcaggggcgacggtgacggcggcaaggacgacggtggcaacagaaaggccagtggaataatgccgctggtttaa

SEQ ID NO: 3202 - DNA, 225 bp, Zea mays
  Peptide Sequence Number=SeqID_44981
atggcagaggaagagaaggagcaggagcagggcgcgcccggcccacgcagacaggcgcaaaagtccccccagcccgcacaggtgggagaccaccgcgggaaacaccgagcagaaacgatgccgaagcttccaaaagctcgcagcaacttgagctcggtggcctccacatcggtgctcgtcttcgcctcgtctttgaaaattgacaagggctcaaggctgaggtga

SEQ ID NO: 3203 - DNA, 285 bp, Zea mays
  Peptide Sequence Number=SeqID_44982
atggagtcctctgtgccaatgataaagggtggcagaaaggctagtgcttttcgcgtcaggatagcaggaaggaggaaaatttgtggaagaaaccagatggcgactttgccaagatgcccccgttttctcaatagtataatcagccacttgaatttcaaggatacaccagcagtattaggaccgaaagtgcatctacttcaacttgtagatttttgtaaaaatttggccaaagtcagagaaagtttacttcagggcaaaaataaagtgaagtataatcaaagttaa

SEQ ID NO: 3204 - DNA, 189 bp, Zea mays
  Peptide Sequence Number=SeqID_44983
atggctggcgacgacgacatggccacaaggatcacgaggtcgatcgggggaagatctcgggatggactccgcgccaccgacacggtgaagttcgcaggcgatccatcgagctcgagcggcggtgtggatgcagcggaaagaaaacagagggatggatctgtcaactgggacccgcacgcaagcaactga

SEQ ID NO: 3205 - DNA, 420 bp, Zea mays
  Peptide Sequence Number=SeqID_44984
atgggcaagaataagaagggcggaagttcctcgcaacactccggcgacaagcagaaatgcgagccaagtcccccctcggaggacttcagtgaatccgagtactcggaggaggagttttcctctgactccgaggggtcaccggtctacgcctctcccccggggatcgctgccgaggtgtggacgtacatccgggccgtcgagcgctccgggctcaagggctcggatgagtcagagatctcctcggacgaggagaactcctctgactcgtccgaggaggagagcggcggtgatgggggcgacggcggcggtgattgcgacgacaacggcaatggcgacggcaacggtggcaagggcgacgacggcagtggcaagggcgacggcggcagcagcaaggccagtggcaaagcgccactggtttaa

SEQ ID NO: 3206 - DNA, 321 bp, Zea mays
  Peptide Sequence Number=SeqID_44985
atgaagtcgaggcattgtcttgaccagacagatctccaggtgcggcaactgaagcgggagttgttacgaacaaaatattacttcaacttactgagaatagagcttgattctgggcctggaggttcaaataatactcgtccttcttcttctggtactcagcttgttgcctctgctactccatgtgttgcgtcaaaactgattgatgataatctacctgctgacgcaacactgcaatctctatctcttggacggatgatcaagaacgggactactgcgaagacaaggatgtggactattgtccatggtgtctcaactccctag

SEQ ID NO: 3207 - DNA, 333 bp, Zea mays
  Peptide Sequence Number=SeqID_44986
atggctgggaaagtaagtgatcaaagggcacaacttgcctgcaatgagctcctgctcagctacttctacttgttgaagctcagcaccggtgtggttgtccccggaggctggcggcgcgccagatctcttgacgccgacaacgaggctcccggtctctggcttagcgaccccgtggacgagtccttgcgcagtcaaccacgacggccaacaactaggaccatccgacttatgggcgagcagagcggtagcaccggagaacccgttctccgtttgaccaacgcccacacccagaagaatacgccggcgcacaggcttggctattgggccgcgtga

SEQ ID NO: 3208 - DNA, 219 bp, Zea mays
  Peptide Sequence Number=SeqID_44987
atggaggataatcagtgggctttaactcatgccccgaacgcctactgggttggtggattgctgcggcagcagcagaagccctcggcggcagcaatagatgcggtcgtgcaccagaggaggcgcggagccgagtcatggcgggggcatcggtcgaacttggggcagcggcgcctagagatggtggccaaggatccgcgcgccgagaagatctcggtgtag

SEQ ID NO: 3209 - DNA, 150 bp, Zea mays
  Peptide Sequence Number=SeqID_44988
atggacggtgctcgcgccttcggggtcaccgtcgccgctcgctcctcggggaaccgccactaccgagcgaattgggcgtcgtcgctcgctcgcgccttccagaccaccatcgccgctcgtgcctcggacgcccggacgtggggcggctaa

SEQ ID NO: 3210 - DNA, 564 bp, Zea mays
  Peptide Sequence Number=SeqID_44989
atgggcaggaggatcaccaccaccacgctcctcgccgtggccgcttccgcgctctgcttctcatcctgctgcggcgtcgacgtcaacggcgcggcggacaccgtggccggctcgtgcgacgcgatccgcgacttcgtcgacgtggccttctgcgcgtcgcggctggggtccgtgccgggcgccgcctccgcggacctgcacggccacctcctgatggcggcggacctggcggccgcgagcggggtctcggcgcgtgacgccgcggcggggatggcgcggcgcgagggcgacggcgggcacccggccgcgcgggacgcgctggaggcgtgcggcatcctgtacggcgcggcgtccgtgcccgcgctgcgcctcatgcgcggctacgcggcggcgcgcgcctggggcgccgcgcgcgcgctgctgccgctcacgggccaggccgggatcgggtgcgacgccgcgctcacgggctccgcgccggccaaggcccggatggccgccgccaaccgcgagttcgaccagctctccaccatggccacggcgctcctcaataagctcgcctag

SEQ ID NO: 3211 - DNA, 219 bp, Zea mays
  Peptide Sequence Number=SeqID_44990
atggcgcgacgacggcccgggtcggcggtggcggacctccgcggctgcacggaggacggcgggcagttggccttgaaagcaaaggaaaagaattgtttgatcataacagaaaatttccaggaccatctagcaggaatgcctagcaaagaactcgcgaggttctcagttgcgctctggaaatcagagtggaaactagaattaccaagtactatgctctag

SEQ ID NO: 3212 - DNA, 168 bp, Zea mays
  Peptide Sequence Number=SeqID_44991
atgcctgaggttggcttgccgaagcaacagaaactgcaggatggttacccacatactctggaatatatgcttctgctatctcttaccgcgtacacttctgctccccagtatggtgagtggtgcgtggggttcgggccactcacagcagggtccaacgaatcaagctga

SEQ ID NO: 3213 - DNA, 369 bp, Zea mays
  Peptide Sequence Number=SeqID_44992
atgtccctgttccacgcagcatgcattggtagagttcaaagggggaactacgtaagcttcagtgtcatatggagatcagagaatgggaccaacttaggtgtgcagctgctccatctgtcctggccatggcaaggtgagcaatcggtggctatggtcaccaccaagggaatggcatgcaaggcactcggacagggcaaacccaggggctggggagggaagctacacaaacctgaaggcatgaagaccacccccacacatgcagagaaaccagggctagagctcaaggacaaggaagaggattcactgatccagccaggatttaatgagctcatgtttggtttcctgtaccgactcagccagaattactga

SEQ ID NO: 3214 - DNA, 138 bp, Zea mays
  Peptide Sequence Number=SeqID_44993
atggagtggcggtggtggaaaaatggaagcacgagcgggccaggtcgtgggttccagtatttgtacgcgagatggagtatggggcagctgcaacggaagcctggagcttacggcgctgcggtgggcgtggagatttaa

SEQ ID NO: 3215 - DNA, 534 bp, Zea mays
  Peptide Sequence Number=SeqID_44994
accgaacaccacttcaccggaggtgccgaattgccatcggtggacttcatccgcccgccgccgcgcgtagaccgagctgcacggctggagcacgcgccgctaacgagcccgaccgcctgcgcacgcggccaacactactccggccaccaccgccggcgatccacccctcgacgtgaccgccagggacccccggacctcgcccgactctccactggacctctcccaccaccggaggacaatactgaggagattctgttgacacctactccgttaactaaacctcatgcctttgctgttggagcttcttcttcagcactacctatgctagtaactcaagcccctgctcctggatgtgatgatcctgatgattctagcaatgatggaggtgatgacgaggatgaggaagaagaaaatgacaataatgaagatgccaacaatcaacaggaacaagaagacgactttgttggaatgtggcctgttgcggagcattacacctcaatgttcgagacgggacacttcccaaactcgctgtag

SEQ ID NO: 3216 - DNA, 300 bp, Zea mays
  Peptide Sequence Number=SeqID_44995
atgacgacctacacctctcacgaactcgtcatggcatcctccatgcgcctcatcctgtggtacctattcttgacctgtggggagggagagggcaagcggagcaccgccggcgagcaggcgaccccacgccccggactccacgacaacgaagcagggcagatccgcggcgaagatggcgcctcgcgcgcgacaaccaagggtccaacaatggccgagcaaccgaaggttgttgcggagtttgttgccaccgagattctcgaccggaagcacagatttggtggagatcttccgtggagatga

SEQ ID NO: 3217 - DNA, 106 bp, Zea mays
  Peptide Sequence Number=SeqID_44996
atggctctagagcgcttgagcaacgacaggacatcacgagggccctggtcgatggcgacggggacacggctgcacggtgagaagtccggtggagcggcgaaccaag

SEQ ID NO: 3218 - DNA, 405 bp, Zea mays
  Peptide Sequence Number=SeqID_44997
atgacaaggccatccgaggcatcgcaaaaaattaagacctcagaggagtcaaaccactcctccgaggcctcgagggctacacccggaaaacagcgccgttcaccccactccgactaccgtgccaaccaccaggatgaaattgagtcacgatctccctcccacgagttcggcatcaggcgcaacaaggagctccacctcgcccaacctcaggcctcggccttagcctcgacctcagaagaagatctccgcctcgcccgaccccaggcctcggcctcggcctcggcctcgagaggagtcacaaccccgcccgagcctagccttggcctcaggagaagtctccgcctcgcccgacttgggcctcggaccgactacgctacaggggatacatcattaccctactcctag

SEQ ID NO: 3219 - DNA, 114 bp, Zea mays
  Peptide Sequence Number=SeqID_44998
atggcgagccacctggcgcatggtccagcagcgcacgtcgacgagcaggccgacacgacggagctcacagcggcgtccatggccaacgcgatgtgcgacgaggcagtgtggtga

SEQ ID NO: 3220 - DNA, 237 bp, Zea mays
  Peptide Sequence Number=SeqID_44999
atggcaacggtcgacggaggatgcaacacagttgatgcgggagcagacatttacgtactccctctagtcctccttgagcagcaggtgggcttagatgtggagcgtcatgtggattcgacaataggtggggggaggaagaaggatagggggcctgctggagctatgaacagttcatcgggctacaaaaaaagggatagagagcgtgatagggaggctgctcaagttggtcataactga

SEQ ID NO: 3221 - DNA, 1470 bp, Zea mays
  Peptide Sequence Number=SeqID_45000
atggaccgtcggagctggctgtggcggcgcaagtcgacggacaagagccccggggagaccgagacctcggcgtccgagaagattactgatgaacagacaatcatttcttatagctatcaaccatctattatcatcccttgtcccgttcacgtgttagggcaagttaccaatgcatctctaagactgtccgcaactgttaccattaggcaaaacgatacatacacagtatcaggcaagagaaaaagcaaatcattattttctatgttcctgtccgagacagtccagcctgtgtttaaaatagggaatgaaatagatgacagtacaatgggtagaggacgaggccggcagtgtgactgtcctggtggtttccataccaggtctgcagtctccaatggcaatgtggcacagtcagaccaggattctgccaagagctctccaaactcgactcggtcgccggagatcacgtcgaaggaactggaggacgataacgacgtgaaggtgaaggtattgagtgagaggctatcatccgtagttctggatgtccgtgcgaaggatgatctcgtgaagcagcattccaaagttgcagaggaggctgttctaggatgggagaaggccgagaaggagatctcatcgctgaaggcgcagctgagcgctgcaacggccaagaactccgcgctggaggaccggctcgtccacctggacggcgccctcaaggaatgcgtccggcagctccggcgcgccaaggacgagcaggaccagacggtgcaggacgcgctggcacggcaagcgcggcagtgggagtcccacaaggccgacctcgagctgcgcatcgttgagctcacggcgaggctggaggccaagtccgagcgctcggtggtgggcgccaccgacggcgacacccgttccagcaggctagccgccctggagaaggagaactcggcgctgaagttgcagctgctcgccaagacggaggaactggagctcaggacgatagagaaggagctcaaccggtgggcggcggagacgccgagcaagcagcagctggagggcatcaggaaggtgaccaagctccaagctgagtgcaggaggctgcaggccgcggcacaacggagggcgtcctccgtgaacgtcgagctccggcgttctccgagctcggcctgcgtcgagtcgctcacggattgccagtcggactgctccgactcatgggcctcggccctcgtcacggagctcgacccagttcaagaaggacaagagcggcgcgagcaccaggacagcgagcctcgtggccgcggacatcgacgtgatggacgacttcctcgagatggagaagctcgcctccgcgaacggctcgtcgaaaggcgacgccgtcgaggacgcgagcgggcaggtggagaaggcgctgcacgaggctcagcgcgagctgaggacttgccgccgccgggtaatggtggcagaggagagatcagctga

SEQ ID NO: 3222 - DNA, 495 bp, Zea mays
  Peptide Sequence Number=SeqID_45001
atggcctccccggcggcggcgtgggagcggcctaggcacggccatggtggccggaagcacggccccctgagcgggccccccggcggcgcatgctctggcggcgcgcagctccggccaggcgggcgcggcggcccagcagcgtgcggtccaggccaggcaggagcgatggccatggcggccttgggcataggcgcggcggcccccggcgcgcacgggtgcggctccagcggctcgacatcgagcgcgcctcccccgcggtggtgtgggctgcaccggcgtgcgacccttgcaccctcggcggcttcggcgcagacggaggacgaggatgagaacaggctttcggatgaacgcgcgcccgcaaacgcagattgctggccagaaggaacactccacaactactctcttagctgtaacagcgagacacaagttaagcctttgtcctcttacggatcctttccgttttcctgttcgtatacttgtacaggtggcccttag

SEQ ID NO: 3223 - DNA, 294 bp, Zea mays
  Peptide Sequence Number=SeqID_45002
atggccttatatgccttggttcttttctaccacttgtttgctaaagagttggcacctcacaagcctcttgcaaagtttttgtgcatcaaagggatcgtattcttctgtttctggcagggtttcgcgctcggtatcttagctggagcaggcgtgatcaaatcccaccatttctggcgggacgtggagcacatccaggaggccatccagaacgtgctggtgatcctcgagatggtcgtgtttttcgtcgtcccctctacgggcttgttcggttctaccccaatccatatggattga

SEQ ID NO: 3224 - DNA, 423 bp, Zea mays
  Peptide Sequence Number=SeqID_45003
atgtccgcgttgtttcgcgcccacgacaggcagcgccatggccgttgcgccatgcaggggccgcgcaaggctgcgtgccgaggggccgcgcaaggcggcgtgccgaggggccgcggggctgctgcgcgcacgccatggccgcccgccaagcctcgctggggctgtatccgcaccgggacccgcttagccggaggcaccatgcggcaccgcgctcgtgcgccggagtcgggggactcgcccgcgcgcgcgtctagacagcgcgcctgcgctgccgtggccgctgcgcatgccaaggccgagccgccgcgtcatcgccccccgagccgcgcccgcgccgcccgtggaggcccgcgcccgagccatgcacaccgagtggtctttgtccccgatccgtatggagaccgtgagatcgcgcgatcgtga

SEQ ID NO: 3225 - DNA, 330 bp, Zea mays
  Peptide Sequence Number=SeqID_45004
atgatgaagaagaaggaagtcggcgggggatgcatcaggtggaaccgattgggagaagaacgttgcgggaggtactgtagactgcccccgcccgcctatccgtcgcttcgctgcccgccgcagcgcacgctccgcgaatcccgcacgcccgccgccgcgactcccgcatgcccgtcgctaccgaaccgctcgcctaccacctgcacgccacacgtcgcgaagcgcccgcacgaagcacgaccgccgtcgcgaatcccgccactaccgaacgcggaccgcccgcctccgcgaatcccgcagacgcaacctctccctcatccacctgcttga

SEQ ID NO: 3226 - DNA, 2016 bp, Zea mays
  Peptide Sequence Number=SeqID_45005
atggcgctggacacggggacggcggcgggtatcgacgaggcgtacgagttctccgcgcccaggttcttcgacttcgtcgtcgaggaaacggaggaggccgtacgtgccgccgagagctggttcgaggctgcccgcagccacgccccctcgcgtatgtactcgcgcgctgccgaggccttcctcgtcgatcgccgattgtttcctgatcttttttccctgttctggattctagcgttcaacccaaggatcaaggaatcgagggcggaggtcaagctcgcggtcctctgtgatttcgcgcaagccgaggagccggctccagaggtaaataaacagaaggagccagctgacgaaatgtcggggccgcctgcggctcaagaagagagagatgaatcgcccccgtctctggagttcctctcggcgacggacctttctgtaaaatcagcagatggtggttctaccagcacgcttaagatgcagacgcgttatcctgcccctcctaccaatgttgcccctgcgagttcgacatgtgacagctcttcagtgaatactgatgcgcgcacgccgaagatgcaggtaaacatgtgcagagcaggtcctacggctgcttcgacgaatgtcaagaggagcgtgatgatcaagggtggccgtgatttggtggggactggaaaggcagccactgctggcgctgaaattgctcaagagaaccaagcggtgaagaggcagaagctcgatgatgggagagccagacagatactcaatgtcaagactaaggtgctgcctcataaggcgagagctgatttagctggaagcgaaatgaggaggtcccatgaggatatgcgctctgcgaaggaagcagatccatatgtatcagctgcagaattggttaagaagtttgaatcagggaccagagagcttagcatcactcacagtagatgtcgttctcatgaggatgctgcatcacagcgaagcctgcgaaggcctaagcttatgttaactagacctaaggaacctgacttccagacttcccagagagttcgaacagtaaaagtgaagagctctgcagagatagaggaggaaatgttggcaaagatacccaagttcagggcacggccattcaacaaaacgattgctgaagccccttcgttccctccacttccaaggagaaccccacagatacctgaattcaatgaattccatcttaaaacaatggagagagcaagtcgatatgcggacacctgttcagaagtttcttgtgcagatactatccaggaacttgaactggaggagctggagaaggcccccaagttcaaggccaagccattaaacaaaaggattcttgagagcaagggagacattggtgtatttttccatccaaagtctcaggtcacagctcccaaaaaattccatttttctaccgatgttcgcttgggccctccatcagttgctgacttatttgacaaggaaagaggtcatttaaaagagaggcagctagaagcacatctcttacaaaagaagatggaggaggaaaaggccagggttcacaaagctaatccttacccatacaccacggactacccgacgatgccaccgaaacctgagccgaagccctgtacaaggccagaaggctttcaactagagagttcggtgagacatgaactagagcagcgaaggctgatggaagaaaaacagagaatggagagtgaagaggctcagaggagaatcttcaaagctcaacctgtaatgaaagaggatcctttcccacttccggagaaagagcggaaacctctcaccgaagttgaacagtttgtgttgcatgttgatgagagggcagtgcagagatcagaatttgatacattgataaaagagaaagaaaagacttacaaaaggttgagagaggagaacgaattcgcgcacaagatcgaggaagagaaggcattgaagcagctgaggagaaccatggtgccacatgctcggccgctccccaagtttgacaggccattccgaccacagaagtga

SEQ ID NO: 3227 - DNA, 420 bp, Zea mays
  Peptide Sequence Number=SeqID_45006
atgccgcggaccaccgtggtagagagctccggctgcccgccgctccgcgccctcaccaccgacatcctcggcctcgtcaaagtcgtcgaggcccacgcgaggccggcgggcgccgccaaggtcgtcgagacgtggggcgcgcctgacgcttcccgtgccatcgttgctgcctccctcgccgatcgtgccgccgaccccgtcttggctgtggcgaggaggaacggcgtggtccgcttatatgatactgcattgcaaagaagacctgccgtctctgttgattttagggagtcaccaatcaaggcagttgctgctgatccaaatgggcatgatgtctatattggcacaggaacaggggaccttgcttctttcgacatgagaacaggtctttctgaagcagcaccttacaacggtggtccttga

SEQ ID NO: 3228 - DNA, 747 bp, Zea mays
  Peptide Sequence Number=SeqID_45007
atgccttactgtagtgaaatctcaagttttgtatatattttagtttttatcactgcacatgttgctggacaaatttatggactggaggattatagaggactaacaagtgctactggttgtatatttgactgtgaatatttgaacccactgttacaattgttgctaattgaggtcagatttcagaggccaaataattctggtatctgcagagttggaagatacaacatctctgcaaaatataggggtaaggttagggatggcaatgggtacggtgggcagatggttaacgggcatccaccggaagcgcacatctgtcccacgcttcttgcccggtcatcctgcgtcacgcgcaaagtacacatctatatcttcctcgccagggtatcgcctgacaactacatcacgtgcaaagcgcacatctatttcccctccccgcttgtgtcacacaagaagcacacatttgttttcccctcccccgataccgagttaaagctagaagcaaagcttgcaacccaagcctttcctagccacacgaatgagcgcctccagacgaagctcaaagggcggtggggtaaaaaaggaaaatgtctggactccatcctccacatcctgcacgcgggcatcgccgcatgcctcgtggccctcctcgccgatggctccaactcacacggttgcagcgtaccgctcgccgcgcgcgtcatcgccgaggccaaccttttagagtcaatggatccatgcgcgagctag

SEQ ID NO: 3229 - DNA, 369 bp, Zea mays
  Peptide Sequence Number=SeqID_45008
atggctgaaattgatgttggcgtagcatgggctctcggagcaaccgaacgctttaggaactctgccaacgccctcggcaacaaaggaatgatgaacaaggcctccgaagcccagactcctaggacgagcgagtctcttgacatcacctcgatcacttggaagggagccaccgacaaaacctcggtgcataagctgggacggaagaccccacaaacgccaaagaagcttttcgacattgcgacgggccatgcatcaagagaggacgtagagagagccaccactggtagtcgcaaacggaagactgggcgtgataggggtccagatgaagatgtcgacaatcacctcaacatgaagaggagaatagggtga

SEQ ID NO: 3230 - DNA, 381 bp, Zea mays
  Peptide Sequence Number=SeqID_45009
atggctggaggcaaaggaggcaaggggaagcatcattcgtctgagggaaagcacaagcgccctctgagccctccatctgaggactttgggggcttggtggtctcggaggaggaattctcctcggagtacgatggctcgctggccccggtgtccccgcggcatttggcagaccagatctacatcctgcccatcgagcgcgtagggctcgaagggtcggatgactcggaggactcctcagagaactcctcggaggaggaagaggaggaggattcctcggactccgaggacggcggcggcagcagtggcgagggcgacggtgatggcgagggcgagggcgacgacgacgatgataacgccggtggcaagatgccaccagcataa

SEQ ID NO: 3231 - DNA, 243 bp, Zea mays
  Peptide Sequence Number=SeqID_45010
atggggaagcctatcccatcactcctcatgctcctcctcagccgagacaagcagcatggatcaagcagtctcattagctgcgagaagcagatgattcgaatcgagtttttaaaccttgcaagtgaccgcacttgcacccaccataaccggaatgggagaccacgtctcaggtcgcgtgaggggatatgtccactgccaggttcactcaggctgtcctataaatttgaggtggatacggattaa

SEQ ID NO: 3232 - DNA, 141 bp, Zea mays
  Peptide Sequence Number=SeqID_45011
atggccatgatgggtccaacatcggaaaagatgtacctctaccaggtgaggaagcaaccaacttttgttgcttctcttcaaaggtggtacctaaggaagagcaccaggagtaaagctgcgggaggaaaggatcctccataa

SEQ ID NO: 3233 - DNA, 435 bp, Zea mays
  Peptide Sequence Number=SeqID_45012
atggctaggggttcgacctggcttgctcacgtggctccgggagtcaggaagggggcaataccaaggaagtggtggagcacggcggggcttggtcggatcttcactggagttggccggaatggtactacgggagaccaaagcgactggggatgggtttggggtgaagctggaagaaaagcaggcatgacagaggcctcaccgagagcgaagacggggcgaggacgacggatgacgacgaatgacaggtggcggagctccggtgtggtctgggtgatgtggcagggtcgattggcggatggagcaagctcggcgaagatcagagaagcaacagcgagcttcaaagatcacgtcggcatcctcgggatgaacagagaggctttgaaggtgcacagccacgatggcaatggcatggcggtgatggaaaggcgtgggtag

SEQ ID NO: 3234 - DNA, 1047 bp, Zea mays
  Peptide Sequence Number=SeqID_45013
atgtcgggagatctcgccaagaagaagatggagaccgacgacaagcccactacaagccacgagtcgacttcatcggaagagtcccgcaacaagaggaaggagaagaaaaactcctccaacaaagggaaggggaaggagaagaaatcctcttcccacaagtcgcatcggagaggcgacaagcataagaggatgaggaaagtggtctactacgagaccgactcttcatcgccatcgacctccgacttcgacgcgccgtccgtcacttctaagcgccaagagcgcaagaagtatagtaagatccccatacgctacccccacacttcaaagcgtcgcatgtctctcgaggacgagaagcctttcttcgtcgtcgctgtcgtccccaactgggtgatgctagagcgcgtcgtcttccgcagggacgacgagtccttctcggacggaagcgaggccatcgtggcgaccgaccggcatcgcgtcctgtttcgcgtcggcaccatgatgttcgcaagtctggttcaggaattcttcatctacagcacctcagccgccgtgagggccgcctacctcgtaaacgtgcttctcggggatgacgcctactggcggtcaggtccatgggcctcctgtgccgaggcgaagaagagttcgcggtgcaccgaccccaatgtgatctggcaactttgcttatggcagaccgacacggttatcctggtcgaccgctggctttgctgggttgactatgagcgaggcatccttttctacgatatgtttggggagcccagccctactgttatcttcagccagttccctctggacaagttccctgacaacaacactcgcaacaaggactgctgctggttgtaccgcagcatgtcgaccacccgtgaggggggtgcgctcctgttcaccaacggctggtgctggcttcactatcagtataccaatgggaggcagtatgccattggaaccgagggcgcttacttgaccaaaataaggtccggctgtcccatgtccttcctcccctctgagttctccaagtacctctgttag

SEQ ID NO: 3235 - DNA, 381 bp, Zea mays
  Peptide Sequence Number=SeqID_45014
atgcgcttagctttgtcaagtatggatttccccccggggaggagtgtccaccaccaagaaagcataagcggcggttacaccctcggggaatcgcaagcaagtctacgtcgcgaaaccctccccattgagccctttacggcgcaccccctccccggcgaccccccggcgcgcctatccctggcgagccccctcttaggccacgccccggacccacgcgccggcggccgcgtcccgcccccgcgccacggccgcgtgcaaggccgcgccctcggccgcgcccccggccgtggccctgaccgcgcccttgcgcgcccctgccctgcccgagcccgtgcctcggcggcctcgcgccccgcgcgcctgcacggttcgcgtgtgtaa

SEQ ID NO: 3236 - DNA, 870 bp, Zea mays
  Peptide Sequence Number=SeqID_45015
atggcgaccgacgacggcgagggccagcagccggtggtgctcatcacggggtgcgccaagggcgggatcgggtacgagtactgccaggccttcgcgggcctcggctgccgcgtggtggccaccgacatccccgaccaagtccccggccttgccgccgacctcgcgggcacgccggccgcggaggcgctcccgctcgacgtgacctcggacgccagcgtgggcgccgccgtcagcgacgtgctggcgcggcacggccgcctggacgtgctgctcaacaacgccggcgtcggctgcacgggcccgctcgcggagctggcccccgccgccgtgtcgcgcgcgctcgacgtcaacttcctgggccaggtccgcaccgtgcgcgctgtggcgccccacatggcggcgcgcgggtccggccgcatcgtcaatgtcggcagcgtcgtgggcaacgccgccacgccctgggccgcgccctactgcgcgtccaaggccgccgtgcacgccgccaccgacgcgctccgcctcgagctccgccccttcggggtgcacgtcgtcaaggtcgtgccgggggccgtcaggtcggggctgggacgcgccaacgccgcgcacctcgcctcccaccaggagtggcgcatgtaccgggacttcgcaccggccatcgaggagcgcgcgagggcgtcgcagacggggaaggccacggacgctgccgtcttcgccaggcacgtggcgcgccgggtcatgagcgcgcggccgcccagggagatcgtctacggcaacatgacgctgctgttcgccgcgctcgccgtgtcgcctgcgtgggtgcgcgacgccttctttgccaaccgcttcgggctcaacaagaagcagcgctag

SEQ ID NO: 3237 - DNA, 2187 bp, Zea mays
  Peptide Sequence Number=SeqID_45016
atggttctgccctctcacgtgttctgctcactctcgaccatacgattgcccattcgctcgcttgcgtcgttcgatctccgcacaacgcgcacgcaccctaccctctccacaaccaacccccgcgagatctgctcccatctcttcatctcccccatcgcacgaggtttgcgcccctccccgctcgccatcggcccgtctcaacgcgcacgcaccctaccctctccacaaccaaccccagtaccccacgagatctgctcccatctcttcttctcccccatcgcacgaggagcccatgccactacagctctcccccgcccacgattagccctcggctcgggagatgctgacgcccatcgcgaccacgatttgctccctcgtgtcctcggcctcttcctccactctcatcctccctcctccccccgtcctcggttattctcgtcgcctccgccgcgcgttccgctctccccacagcctttgtccgccacatcatcctcggctgttgtcggcgcctcgctccacgcccgccctcgcccaacgaccctcgccgcacccctccctgtcctcgacaacttcccctctggccccgtccttgccggcatcggcgcctgctctctccgtcatgggggaggggaaagtgaaggaggaagaagagccaagcggctaagccagctcggccggtcgcctcccaccaaaatcccccgagacatcatcgacgaggagatggagatggagtctagccccgcagctcctcggcatcacaatcgttgcctcccgtgttgtgcccttggatccacttctcgtgcgacgcccctgatcgacaagcacgtcgtgcgtccgcaccgcctccctgaccgacaagcatgtcatggctccaggcacttgcagcctccgcgcttcttcggccagcaagcacgcgaccacgcctcccactattcagtcgtggtggttccaggtgcttcttgcctccgtgtctccctgactagcgactatattacagttcttctctcctcgcatcctctctgcggatccttccttcacatctcgcgctcccacctccccccaaactccaccctcccccggtcgctcgcggcttcggcgacaactgctttggactccagttctctccgccgacgctccaaaggtccagcagctcctcccaaaagtcgtcgtgagctccgccgtctcgaacccgcgctgctgctggctccacgcgcggccaccctgcttctcgcccccgtcctgcttgcgcttgccgagcccctagatgttgagcgccaggttctccagctccgacgtggtccctcgctcgtccagctccgcaaacagcgctcgcgtggcagtggggtcgtcgtcgtcgccctgctgcggctcctcctcctcctgcacgccaccgtgggtcggcgcggcgccgatgggccgcctccgcttccggaaggcggcagagagcagcgccgcgcccgccagcaacactacccctccccccacgtcgtcgcagtagaccgtgagagccggggtggtatcgagtctcccactatcgtggacgtcgtcgcaacgccgctgatgtcggaggaggaggcgctcaagatccacaccgactgtgtccacttccagacttcctcgcctcacctctcacctacaggaaggtatgtgtgcgtcatccccacccaatcccaccctctcccctctccatttgccaagaatttgcatcccccaccttcacaatgcgcattgcgcgacgccgaggcagactgttgcgacaatgcccaggagccccatgttgtcaccgagctccacggcagtggcaccacagatgcgtcatctggcgggggagtccgctgtgaaattattcatctcctgtacagaaagctaataatgaagttggatcaaggtcccacatcagcagcaactgcaacatataaggtccaaaacggcaacgacgaggctatccacctcgcgctattttctcctcgtcgtttgatcgaaaagcgaccgcatagttctaagaaggccaccaaaggaaactcacctgacaagggaagaaacaagttctggaagaacatcaaccttggtttcaagacgtccacaagcagcataaaactctcactgatatgtaaaaagtttgagcctcttgaatcccctccaaagaggatcaaaaggattctacggaccaaagtaccccatgaatga

SEQ ID NO: 3238 - DNA, 453 bp, Zea mays
  Peptide Sequence Number=SeqID_45017
atgggtcagaggacacttgccttcaccaaagagatgctcagggtcttcaatcccgtagaactcgaagagcttgatctcaagaccggtggccacaccgccgcgcaggcaggccgcgccaccacgcaggggcccttgctgccggtcgagcaaagggggaggggaaaccgcgccagaggacgcttgtgccacggcctcctggccgcaccatggggcccgaggtcggacacgacaccacggcgctgggtggcgaactgtgccgcgcgcgggggttcctggccacactggggcctaggcgggctggccgaggatggctaccgcgcgcgaggctacaggggcgcgtgcgaggctacaggggacaaggtcagggcgtgcgcgctaagctgccgcggcactgcgccggctggtcgcgcgaagaagaaagggagaaggagagggatcctgcgtacctggtaa

SEQ ID NO: 3239 - DNA, 513 bp, Zea mays
  Peptide Sequence Number=SeqID_45018
atgaatcccaatgaagataaaatggatgaggtcaacgacaagattccaacctcgacagtggtgaaaaggaaggatgagtcacatagatatctgctgaatggaatgaagaacaacaaggggaccagaaaaatgtttgggtacaagattaaaccgcctcaaccgcaagcagaagcgccagagctaatgaatacccaaacaggagaatcaaatcaagctcagttgttcagcatgcaggcaaccgatcaaccatcatctgctggcaatcaagcaaaactgactcgcagagaggtcaaagtaagaggtgctcgtttctactgcaaggaagaagggcacttcatttgccaatgccccaagaagcatctagaccgggtcgcgaagaaggccttcaagcagaactcaaccagtgatgatccagaagaaattgtcttcactcgctcaaagtacaaagtaattcaaacaactgatgaaggcagcaggttgctagacataagagttgagccgagagagtgttga

SEQ ID NO: 3240 - DNA, 375 bp, Zea mays
  Peptide Sequence Number=SeqID_45019
atgacgagcattgagggtgctactgtggacccagctgggggtcagatgacgataactaactccaaagacgaggatgttgttgaactgcctattcttgaagaaacttctctggccaagattattgctgacccaaaggtggctccaattccaatgtcttttttgagtactttggagaaggctgagctcataactcccatgatgagcaccttattttttgatgacgtggaggacgataacgaagatgaagctgtggcgaaagacctagaggagatggttgccatgacaactatagtggtgaaggatagtgcggagctccccacaacgtcctcagtaacattatccaggggaggcaaatctacagaaatccttcactag

SEQ ID NO: 3241 - DNA, 450 bp, Zea mays
  Peptide Sequence Number=SeqID_45020
atgggttacacctgtgtcagaaggactcaactcactagcctattacatcatgaggtccaaaagctaggccaccgtgaggagtacaacttcctaatacctctactactagtgctcatttgcctcctcaagctcgtgttgggcattatggagctggttccccagaacctcaatggtgttatctcaaacctcgacttgctcctcgagcttgcagtgggaaagagaccgatgggtcgtgtcagcatctcctgtgggtggaaaccacagaaggtcatcaatgctcacaaggctgcgacctccgtagtgtcgtcagctcagaacccaacaaccttagagtctaccgaacgccaacctagctacaggggatggggctctagagtcagctacaccctgcaacgaggtatcatgtgctcctcgtacaactgcatcgtgtactggggaggcatggggtag

SEQ ID NO: 3242 - DNA, 240 bp, Zea mays
  Peptide Sequence Number=SeqID_45021
atgagtgagggcttttgctcggatagacttgttcttgatgtctgtaagcttgttgcccctgtccaggtcaccatcaccatgaaatcacaactccggccagaaaatgaagaagaaatggattgggatatttcaaaaataaaacttgatggtggatccatcatgaccgtgatgggttcaacatcgaaaaagatgtacctctgccagggttgtccaaggtccttaggacaaggacaactgtag

SEQ ID NO: 3243 - DNA, 285 bp, Zea mays
  Peptide Sequence Number=SeqID_45022
atgtgcagcaaggctgctactggaatgtgtgcagtggtgattgtatctcacgaagtaatgtggatggttagatgtactatgggtactggggcttctggaatgcacatcggtccagcaggccgagagttcggcctcttagctctggggacccgcttcaagcccccagccagggccctctcgcttcgagaaggaagcctcggtgcatcccgctataacaggacaaccgaggacgccacaagctcactcccccctacgaaggacccttcatcattgccaaggtgctga

SEQ ID NO: 3244 - DNA, 543 bp, Zea mays
  Peptide Sequence Number=SeqID_45023
atgtctctggtccgcccgattagaaatctagggctccgattgactcgatacgacggccgccgcgcttacaccgagaccgtcgatccccagatcgacgacggaaagcggatcaccctggaacccgatggatcaacaatgcacggtccagatcagattgccaacgtggtgtggccggactcgatcgcccgcgctcatccccaaatctacggaccaggtctaaaacacgcgaagagttcttcccaggctaatctggaccgcgcgttcatgaatcaacggccaaagcctaccttccccaaccagccgacattggacacgcccgcgctcacctccatccacggcggagaccacgccggtgggcaaacgatcaggcgggccgatgccccacaagcacaaccgaagaggctttattaccgtgtattgagcagtgtggagtttccccgtccagtaatggcggccgcgaggtggaagatgcgcgaagacgagaaatccccggccaatgcttgcaaatcccgcccggcgcaaccacggacacgttgtaggtga

SEQ ID NO: 3245 - DNA, 225 bp, Zea mays
  Peptide Sequence Number=SeqID_45024
atggtcactgtgttgccgagcctcctcgaggcggcgggtgctgtggcggtggcggtagggaatcggtggtatagaaaaaggaacaacaacgcaaatgagatagaacaggaagaggttcagagagacagggtgcaagaacagaggattgagcttagtgctgaatctgtggagaaggaacagtctgttaacaacaccggtgatggtttagctacgtctgagaagtga

SEQ ID NO: 3246 - DNA, 525 bp, Zea mays
  Peptide Sequence Number=SeqID_45025
atgtggacgcctccgggccgccacgtggccgaagaagatgatacactccaaggtatcggcaggaatccggacctccatgggaaagtgtcggacccctatacgaacggactggaccctcgggaaaggtctgggacctccacgggcgtggaccggacccctgggatgggtcccagacccctcaatgtggggtggagacccgatgctgccacgtggcctactgcccgtgacgtgagccagtgggcggagcctgacgcagtacgcccgtgctacggcgtacactatgctcatcatcactcgcacgttaccgaggaagcagcgcaggatatcaagattgggctaggcattaggtttttgcttgttcttctgctcgacgccatggtccacatcgtcgagcaccatgatttcatgcccgaggacttcatggtggaggaggcggcagcctcttccacaccacgggccaccaacctccctgcacctggtgcagctggtgttgtgcactctgcgcggcagcacactcccgcgtag

SEQ ID NO: 3247 - DNA, 174 bp, Zea mays
  Peptide Sequence Number=SeqID_45026
atggggaagacgaatgcagcacaacgctcttgtgtgaggaggagaaaaacaactgatcattcgaaggatggaggcaagaataacatcgagttactgagtgcacgggagaaagtcaaggaggtcgaggaacccaaagacaggggtgtagaagaagacttgctaagtcaaggttga

SEQ ID NO: 3248 - DNA, 129 bp, Zea mays
  Peptide Sequence Number=SeqID_45027
atggcgatctcgcaacctcaatttggtcccaagagcccgaattgcatgatcctgaacgctgcggaacaagcagaagaagctaatctcacaccatggatggagtccgcgctacagcggcgcggcgcttaa

SEQ ID NO: 3249 - DNA, 144 bp, Zea mays
  Peptide Sequence Number=SeqID_45028
atggctagacgggatacacgacttgcgggtcaagaacaggtaccgcaagatgaggcgcatgaaggatgctatgatgagttcgtgagtggtctagaccgtcgtctcccagtcaactatggttgctggatcgttgtcttcgtatga

SEQ ID NO: 3250 - DNA, 255 bp, Zea mays
  Peptide Sequence Number=SeqID_45029
atgaccgacgccagcgggagcaggagcatgtcggcaaggcggggcaagagtgtatgggcgggagggtgggagatggcgacgagccgtaggtgctcgacaaatatgcctagtgaaatcgggatggtcacggagactgccacgggctcatgctcgggcggctcggcgtcggggcgggaggtcgccggcagcgacttgggcggcgccgggaggcacctaggggcggtggcgacggcgtctcgttgggtgcgggactga

SEQ ID NO: 3251 - DNA, 234 bp, Zea mays
  Peptide Sequence Number=SeqID_45030
atggcggcgaactccagcgaactacactgcaagagcgagggagacgcgagaagagagagcgaggggtgcgggatcctcagcgcggggtcggtcggcttagcgaacggtgcgtccgcggggtcttcggtgtcgctcgggcacggcgcagtgcgcgcggcctgcgcatctccagggcgcggcgtggttggcgatgggcgcaggggagctcggtcggggaggaaacaggtggccaag

SEQ ID NO: 3252 - DNA, 225 bp, Zea mays
  Peptide Sequence Number=SeqID_45031
atgacgaaagtcagagcttgccaaaggtggtcaaatgagttcaccggaggatataatgatcttcggatgaaggtcatgaagggcgtaccttcatcatctcagcatataataatgaaagttagtcgtgtttttgaggaccttcagaagacgaaggccctcaacagtcgacaaagactctctccctacgctctacgtcttgctgttattccgaggtacacaagttga

SEQ ID NO: 3253 - DNA, 222 bp, Zea mays
  Peptide Sequence Number=SeqID_45032
atggcggcccctagtgcggcgccctacgcggagtttagcaagggtgagctcatttacggtgggggctcaacaaatggaagaaattatgcaaggttaacaagaggtggtacaactttacccataagctgtgtatcccctctagtctgggttatacgaacccttaaacactgcctgggtgaatgcctaggaattcactatgaggctttcacaatatatccttag

SEQ ID NO: 3254 - DNA, 312 bp, Zea mays
  Peptide Sequence Number=SeqID_45033
atggagccgccgccagtcccggcgctggtcctcgcaatcgacgagttcgcggccaacatcgaaggcgagagcggcgaggaggacgccgaggagagcgaggacagccgtgtgcctaccagcagcgccatggcgcgcgcggtagagtctagtcctgtccagcgactcctccgcagtgcccaagtcgtccccgccctcgggtcctcggacgtcgacgacggcggcagcctggcgacgatgaagaagccgttggacacctcctccgccagttcggtgtcctcgtcggagctggtggtgtcgtcgaaggctcgctga

SEQ ID NO: 3255 - DNA, 339 bp, Zea mays
  Peptide Sequence Number=SeqID_45034
atggggggtgtagaagcgatccttgcattaaatgctcctgcgatacagtcggttggcgtggcgatctggccaaggttgcttctccacgaagactgggcctcgggcgagcagaagctttgtgctgatgggggttaccagctgagattaggagtcttgggggtacccctaattatggtccccgacaagaccattgccgatggtgttgttgatgccgaagctgaaccgactatcgccgaagctgatagtgaaattgaagatgaggatgatgacaacatcttaagcccaagcaaacctagccatatcgaatatgggaaatccacagtaaggcagatgatctaa

SEQ ID NO: 3256 - DNA, 1401 bp, Zea mays
  Peptide Sequence Number=SeqID_45035
atgagggggcaaacgcagacagcttccgcggggggccggtggcgaggcgacggcgctgcggcgtggtgttggtggtgggtggccgtggtcctcctgcttggccatttaccgagctgcgcgcgcgcggggctgctggagtccaacccgggcctggcctacaacttctacaagaacagctgccccagcgtggactccatcgtccgcagcgtcacctgggcgcaggtcgccgccaaccctgccctcccggctcgcctcctccgcctccacttccatgactgcttcgtcaagggctgcgacgcgtcgatcctgctggacaccgcgcagagcgagaagacggcggcgccgaacctgtcggtgggcgggtacgaggtgatcgacgcgatcaaggcgcagctggagagggcgtgcccgggcgtggtgtcgtgcgccgacatcgtggcgctggcggcgcgcgacgccgtgtcgtaccagttcaaggcgtcgctgtggcaggtggagacggggcggcgcgacggcacggtgtcgctggcgtccaacacgggggcgctgccgtcgcccttcgcgggcttcgcgggcctgctgcagagcttctcggaccgggggctgaacctgacggacctcgtggcgctgtcgggggcgcacaccatcggcgtggcaagctgctccagcgtcaccccgcgcctgtaccagggggaacgccagcagcgtggacccgctgctggactcggcctacgcgcggacgctcatgtcgtccagaggcagggcacgctggcctccgacgccgcgctggcgcagaacgccgccgccgcgcagatggtggccgacctcaccaaccccatcaagttctacgccgccttctccatgtccatgaagaagatgggccgcgtcgacgtgctcaccggcgcaaacggccagatcaggaagcagtgccgccagcgtagcgataaactgggacttgaatcatgcgtaggagaaggtggtatcgcatcagcacgagacaccgccggtgcgcccagccgaatcgacaccggcacattttctcgtgttacgagccagcggcgcgggctccgcgccgacaactcgagatggccttgcccccacgatcccacggacccttatttttctctggctcgccgcctcatccgtcgcccgtcgccgatcaacgaacgactagacctcggcctgtcaagcccacgtcctatccggatgccgacaggcgggttcacggttcgcttcgcctgtgaccctgaggaacgtgagctgctgcagtgcggtgcagcaggaggacggtgggcggccgctggcgagtggccagcgtgcgcaccccatgttccggtgctggatgtcccagtcaggtcaggtccggtcactagcgcgccagggcatttccggataagataa

SEQ ID NO: 3257 - DNA, 258 bp, Zea mays
  Peptide Sequence Number=SeqID_45036
atgacaatgcgatccatggaggcagcttttggtcgtgagaatcatctgaggggtcgtttccaggatttggtcctagcttacaatgctgcatccgatgacgcaccaggagccgcggaggcagaatgtggtgttgtgttagctgatgggggtgagcctgatgcagacctagaggtagaagcagctactatggttgcatcagttagtggttctccacggggcagtagtgtgtcagagatagacactgacacagaggaataa

SEQ ID NO: 3258 - DNA, 375 bp, Zea mays
  Peptide Sequence Number=SeqID_45037
atgggtgaatggtccttggaaatgaacgagttcatcgaaactcggtacccgggaatgaagcaaatcactaagcacccatatgcagagggcgaggagactggaaggcgagggaggccgctgacctcgcgcttgttgtgctcgtcgacggtgaagcggccgagctcgtcggattcggcgctgttggcggcggcggtgttctccttcacgcgcgccgaggacgtggccgaccatggccatggctgctccgatcgcgagagacgcggtggcgagtcgagtcgtgggcgtggcaacacgcatgctctggtgctggagtacaggagcagtagtacggcaagtctggcggtttgcttcagtgcgggttttgcacttgcgtag

SEQ ID NO: 3259 - DNA, 534 bp, Zea mays
  Peptide Sequence Number=SeqID_45038
atggccaaacggttgctactttttaagatggtcgtcgaggcctcgtcggatggtagtcgactgagcgctctgcttcctagtgatgcggagatcgctcgctggctcacggaggccatggaagtttgcaaggccctcttcttcggtgttgcgagaggaccccgttcccctaccgaagagcacagtggagaaataggttgctcggaccgtggtgccaagactgactcgatagatgaggacgaggacgaggatgatgaagccagtgcaggatttgaattatgggccattccgaatacatcccttgctgtgtcgacagcggatttcgtcttggccttctcaggtgaggcggcaagcgacttcctaatggtggaggaagccgacttcctggaactccccgccctattctctgggccaatgtctttagtggcatttgtatccctacccgtcgaacctctggtcggtcgaccgtctagggttgcctgcatgggaagcttgtccgccttgggcccatcggtgactcctattgtaacaccctaa

SEQ ID NO: 3260 - DNA, 180 bp, Zea mays
  Peptide Sequence Number=SeqID_45039
atggctgcgcctaggcagcgttattgtgagagtaaaagtggacgtgctgctactcccctcattcccaacatgtttgggcctcaaaactcggcgacatggttttggagggaatctgaggctgcacatggcgtcattgtggaggttgcgttaaggcgaagcaacttcatgaagactacatga

SEQ ID NO: 3261 - DNA, 1764 bp, Zea mays
  Peptide Sequence Number=SeqID_45040
atggaggcgaacagcagcaagtccggcggtctgccaccgagaaacgctgacgtctccaaccccaagccaccgacccaccctcccgtccctccgcagcggctcagggagacggtggtcctcccgccgctggagacgcagttccaccaccctccaggctctggcttccgcaccgtgcaacaaaccgtgtcaatgagcctgccggcgtccccgggcagcttcggcaccgctacacccactgccgccgtgacaaccgactccgccgacctccggcggcaggccatggccaacgcgtcgcgcatggcgccgcaccgcctggccgcgcacggcgcggggagcagcagcgtccggttcacgccgcaggagaaggaggaggccatgatgttccggtcgcagcccatccccggtggcccaccaccggcgcggctcgcgagccgggctgctggtggtggacacggcggccgcagggccatgaactgggataggcgctacgactcgttcaagacgtggtccggaaagctggagcgccagatcaaccatctggccggcgccggcgccgagggatctggtgacgacggcgatctggacagtgatgtcatcggcagccaccgtacttgcgccacgtcggtgccagaggtggatcgcttctacgccgcgttggaaggccccgagctggaccaactcaagccgtcggaggacctggtgctgcctgcggaccggacgtggccgttcctgctgcggttcccggtgtcggcgttcggcatctgcatgggcgtgagcagccaggccatcctgtggaaggtgatggcgctgtcggtaccgaccacgttcctgcacgtgacggccaaggccaacctcgcgctctggtgcatctcggtggcgctgacgtgcgccgtcaccgccgtgtacgcgtgcaaggccgccctcttcttcgaggcggtgcggcgcgagtactaccacccgatccgcgtcaacttcttcttcgcgccctggatcacctgcctctgcctggcccatcggggcgccgcgcgcggtggcgcccagcaccgcggcgctgccgcgctggctctgatctacggccagtggatgtccggcgggcagcgccggctgtccaaggtggccaacccatccaaccacctgtccgtgctggggaacttcgtgggcgcgcagctcggcgccaccatggggttacgcgagggccccgtcttcttcttcgccgtcgggctggcgcactacgtcgtgctgttcgtcaccctgtaccagcggctgccgaccaacgagacgctgcccaaggagctccacccggtgttcttcctgttcgtggcggcgcccagcgtgtcgtccgtggcctgggccgagatctccggcggcgagttcggccacgtctcgcgggtcgccttcttcgtcgccatgttcctgtacgcgtcgctcgccgtgcgggtcaacttcttcagggggttcaggttctcactggcgtggtgggcctacacgtcgccaatggctggcgcggccgtcgcggccatccggtactccaccgtggtggacaacgccttcaccaaggcgctgtgcgtggcgctgtctgcggtggccacgctcaccgtggcggcgctgttcgcgacaaccatggtgcacgctttcgtgctcaagaacttgttccccaatgacattgccattgccatcacggagcgaaaggtgaagcccatcatggagttgcaggagagcgacggaaaccatatagaggccaccgatgatgcaacagaaccatga

SEQ ID NO: 3262 - DNA, 99 bp, Zea mays
  Peptide Sequence Number=SeqID_45041
atggcgaccggaatccttcaacaacgtcgggctgcgggtttaacagagactcagacggcggcggggttaatacaccgcaggatccaaggtactcaataa

SEQ ID NO: 3263 - DNA, 315 bp, Zea mays
  Peptide Sequence Number=SeqID_45042
atggcaacaggaaccagaaggacggtgtccaatctggtttccaccatcccggatgacgcacgaccagattaccacatacttttcaccatgtcgagcactatttcaaccactacgactcgatatacttataaacgtctcatccgcacccctgcacaggacgggctcgggcacgcgttcgagcccccaaacctggcctcggctctctacctggtcaaacagggatcagacatccttctcctgaccaaagacgatgccaaggacaggggccatcccgtcgaccatactactacggggcctcggacacatctcctctga

SEQ ID NO: 3264 - DNA, 2181 bp, Zea mays
  Peptide Sequence Number=SeqID_45043
atggggatcgtggaggcgtggatgcgggagaagcccatccgcacattcctagcccgcctcgcccagcgccgggcggcggctgccgccgccttcctcgcttccccctctgccaccacggtcatcgatggcgagggcggcagcgacgggagcatcccgcagctttcctccgttgccaactccgtcgtgtcccgctgctcaagaaatccaatagggttgaaattacctattgctggatatgtgcacttcacatttaaacttgccaagttcacactaaatttcagcatggagtttctcattaagtttgggcatgttgcgagcggaggtagagattatttggccgataagaatcttcgccgcttgatgtttgatatgatgcttgcatgggaaactccaggtgctcaggatgtgtcagtagataatggttctattgtgcgtgattcccttgagattgaagatgaggatgaggggtcaattttttatgcaaattccacaagattggctgctcaagttgatgacaagaagacagtcgggttaagtgcttttgcacgaatagcaccttcatgcccaataatagctgacctggttactgtacgcaatctgtttgacgcacttacaagttcatctggaggccgattgcattttcttgtttatgacaagtatctcaagagtttagacagggaattgaggtctgtgaaaggtatcatgcaatcatcacttgcctcaagttttcatcttgatgctggagaatgcatattagctattgatggagacaagcccattcaaccggtactgcaacatattggaatatcagcatggccaggaagattggtcctcacaacacatgctctttattttcagagtattagagtgggatatggtgataagattgttaaatacgacctatcaacagattcaaatcaagtgattaagcgtgatttgactggaccactgggtgtccgcctctttgataaagctgtgatgtacaaatcaagcactttgacagaaccaatttatttcgatttctttgaattaggaggcccttcacgaagagactattggttagcaatcacccgtgaagtattgcaggtgaacagatttattaggaagttcaatcttggagatgttcagaaagcagaagcactctcaaaagctatcctaggcattttgagatactctgctgtcaaagaagcttttcatattgctccttctcactttaagacaacacttacttttagcttagcagaaaagcttccgaaaggagatatggtcttagaagcactgtataacaattatttccaactcttggactcttcattgagacatttggcaattgattctgcagtcgatagaatgtcggagaaccattctataccattttctttgtatgctctctctagaatgggttttcttctgctgaagacaaacgataaatctgaaaaggaaatgagcttttgtgctgtttgctttggtgtaacaaaatctttggaggctgccctagaagagtcaatttgttactctgagagaatagagtcagcacgtgctacagttgatcaagtaaaggtagaaggcgttgatgcaaatcttgccctcatgcaggagttactcttccctttaattcaagcaggcaagattgtttactctctcagccaatgggaagatcctttgaaatcacttctattcttagcttttatgttgtatgctattcaaaggggtctcatcagttacatcgcaccctttgttttcttaacttttgctattatcatgctttggcataagtatattggagacggaaaattgttggaagtgcttgaagtgaaacctcctccaagtaaaaatgccgttgagcagattttgacattgcaggaggctatatccaagttagaaaattttctacagtctgcaaatattactcttctgaagttcagatctgtcttgtttgcctgtgttcctaaggccactgaagtagttgcagctgtacttattgtcgcagctgcatttcttgtcttcctaccttccaggcctctgatacagatgttagtcctggaaatgtacacaagggagatgcccctaaggaaacagaacactgaaaaattccgcaggcgaattagagagtggtgggctcgcattccagctgcacctgtgcagatgatcagacctaatgaaagcaagaaaaagagatga

SEQ ID NO: 3265 - DNA, 441 bp, Zea mays
  Peptide Sequence Number=SeqID_45044
atggcgcttcctgttgacgtggctggcctgcgccctaggttgggcgatgtggaggctcctccgaagccgaggtcgagtctgtcttccatggccgaggccgagtccgagcccctgggtcgggcgaggcggaggtcgttcggcagaggccagggcggagtccgagccctggggtcgggcgaagcggagttcgtcgtcttctgggcggcgctgtccttctgtcaggccggtcagtggagcggtgaagtgacggcggtcactttggctctgccggcgtgcgtcaggataaagctttatgctgatgggggttatcagctgagaattaggagtcttgaggatacccctaattatggtccccgacagatgtcatcccatttccatgaaggtattggtaggggttgcaaggcaccagctgatttcaagtggcttgccgttatcctctga

SEQ ID NO: 3266 - DNA, 282 bp, Zea mays
  Peptide Sequence Number=SeqID_45045
atgaagcttcttcaagcgagaatcgagaccctgccttaccagagcagagggatcgccctcgccagacttcggccagccgccaccacacgtaaaccgggctaccagattgcaacctcgctgaaggagagtacgtgctcatcctcgagcaaggagttgcccaagaataactctaggagccagctccagagcctgccactgaggatcttcccgcagccccagggtggatgccttgtctatgagacagaaatggaattaaggactaatgtgtggatacctgagtaa

SEQ ID NO: 3267 - DNA, 198 bp, Zea mays
  Peptide Sequence Number=SeqID_45046
atggtctcccattccagttatggtgggtacaagtgcggtcactgcacgacggcaatcggggtcagtgaggcattgtacgccaaggcgataggttatctggaggacatggttgctggagtgacttggccgcccatcttgccaccgggttggacagtcgagtgggatcctgcctcggctgaggaagagcatgaagagtga

SEQ ID NO: 3268 - DNA, 243 bp, Zea mays
  Peptide Sequence Number=SeqID_45047
atgaggcacttcgctaagttcttccctcgtcctaagaagaagaacgatgtttaccccgctcgtgtgcatcctaccacagcagatgaggccgctgatggagaacctgttatggccaaggggtccgaatatgatagtgaggatttggacattgatgaggacaataatgacatccagccaacaaagttgaggcatgtgaactttgcaaagtcaacaatcatgagcggacatattgaggggctatag

SEQ ID NO: 3269 - DNA, 405 bp, Zea mays
  Peptide Sequence Number=SeqID_45048
atggggaataaagtgtcagagcttgaagctttaaatgctgaaaaagacaagtgtattgcatcactcgaagatgaactgaagcgagcaaaagaggaatacgaacctgaaattgataagataaggcacacatctggcaaggaaacatttgagcttagcgctgttcaaatgaaaataggggacctcaatgatgaagtaaatcgtataaggcagcttaatgagaactatcggattctgatgactaaattctacaccctcggcaataggtgctataatgaattgatcttatcttctaccggagcaacatctcgggagaaaaactttgtagatggcgacttagagggaatgacgcagtggatagctcgaagggcggctgaaaaagctgcaagcatcatgaaaattttatag

SEQ ID NO: 3270 - DNA, 261 bp, Zea mays
  Peptide Sequence Number=SeqID_45049
atggcccaagggcacatttccctttcagatggtaaaactctgaggccaactttcataaagaagaccctggagagagccgaggctagtgcctggggctcagtcacgcacccgagcctattcaatggaggagttgtccgagtcgtagtggttggagcagtgcttctggtgacgttgggtgtcctttcgtcggtattatcaaggccgaagccacgctcgggcgaggcagaagtcttcccgaggccatggccgagccagctctag

SEQ ID NO: 3271 - DNA, 1143 bp, Zea mays
  Peptide Sequence Number=SeqID_45050
atggagtgcgtcaccgatatgcccctcgcgacgctggacagccgaccgcgcaagcggcagcggctcgggtgggacgtcgttcccgccgagatgtatcaggttacgcggccgcggcttggttgggacgtcggccccgccgagatgaatcagtttgcactttgtggacaagaagttgtgaatgccttcagtgctgcagtgttgggcctatcttcaggttgtgtttcttctcaagtcaaccaagagcagcctcatgatggttcccctcctctgagagaagatgacaagaatgggcattatgtttttgctgttggagataatctcacatctcgctataagatcaatgcaaaaatgggagaaggtacctttggtcaggtgttggagtgttgggataaggaaacaaaagaaatggtggccataaagatcatcaggggcattaagaagtacagggatgctgcaatgatcgaaattggcatgcttgagaagcttggtaaatatggtgaaagcagatccagttgtgttcaaattcggaactggtttgactatcgtaaccatatctgtattgtctttgagaggcttggaccaagcttatatgattttctgaggaaaaacaattaccgctcattcccaattgccctagttcgggagtttgccaaacaactgttggaatttatgcatgaattgcgcctcatacacactgatttaaagcctgagaacattctccttgtttctccggagtacattaaagtgcctgattacaaagtctcatcccaatccccaaaggaggggtcctattacaagcagttgcccaagtctagtgctatcaaggacatggatggagttacccatgtgatatctggagtgttggttgtattcttgttgagctttgcacgtcggcactctgacaaatacatcagaaaaggacgcctgaattggcctgagggttgcacctcgcgggagagcatgaaagctgtgatgaaattgtccaggcttcagaatctggtgatgcaaaatgtggaccaggctgcgggagatttcattggtcttttgcaagggctcctgaagtatgacccagcaagccgtttaacagcacgagaagcactgaggcatcctttcttcaccgaagggtttgggcgaagaagatga

SEQ ID NO: 3272 - DNA, 225 bp, Zea mays
  Peptide Sequence Number=SeqID_45051
atggcggagggtcgtcttcctcctcgtaggaacctagatctcaccccctgggggagataccttagggcgctccaggtcgacaggtcacccgggacgtctccagataacagtcagttggcggagtacgaaggagttgcaggttgtccacgttgcaacctctgctcaggagaagatgaagtcgtggtggaggacttccaggagttccaagagtacgatgagttctag

SEQ ID NO: 3273 - DNA, 522 bp, Zea mays
  Peptide Sequence Number=SeqID_45052
atggaacagggaggcaacgccatggaagacctccgcgagcacccaccaccagagctgagggggagaagggcgctgggaggtggggtgcgcgcccctggagcaggggaacagggagctcggcacggggaactcccgccctggcgagagagcgtgcagcatagggagctcgacgcatcgctcctagcaaccgcggccaccaagaccagccatgggagagagggagctcgcagggtcgagctgctaggagatgggaacggctgcgcaggggagggacgctgtccttgggagggagccgccagcttggaggaatgcagctggccatgggtgacggcgagctcactgctcgaggtcgggaaatggcagaggaagggaggttggcctgcttgcctaaggaagaagaagagggaggaggtaagggcgccatggaagggagctctgcggccatggagcttctgcccctgcgcacgtacaggaaacagagagaaggagctgctggtggcggctaggggtgggagtgaataa

SEQ ID NO: 3274 - DNA, 924 bp, Zea mays
  Peptide Sequence Number=SeqID_45053
atggctgctcggagttgggcgctggctgtgaggacgtcacggttgctcggagttgggcactggcgcgacggtgtggggaggcagcgtggggctcgacgtctgccgtggggaggtggcgtggggcgacggcgtggggcgcggcgtggggagcccgcggcgacggaggagcccgcggccaaggcggcgggcggcggcggaggagctcgctggaggcggaggacgggcgcggcggaggagcccgcggcggcggaggacgggcgcggggctaaaaaacaaaaaattcggatatttgggctgggtctgcccttaggcacgggcatcggcaacatcgtccagtcggtcaccttcaccgttagcgaccactcctgggccatccgcttctaccacgacagcctcaaacaggaaacccgaatgttcgcttccgtcgaactggcgctcatggacaaggacgccaagaaaccaagctggaggctggagcttccgtcgaccggctacatccggaacgatcgcatgatcattcaatgtgatctcacagtcgtcagggaccccgagctgtgcaaaaccaaggggggcttcgaaatccaggtgcctccctcggacctggcagagcaattcggcaagctgttgctggaggaagaggaaacagacgtggttttcagcgtcgggggagagaccttcccggcgcacaaggtcgtgctcgccgcgcggtcccccgtgttcaaggcgcagctgtatggaaacatgaaggaggccaaggcgcggcgcgtggccgtggaagacatgcagcctggtgtgtttagggccctgctgaagtttatctatatctatactgatgcgctgcctgtcattggtgatgacaacatctgcgatgacgattacgacgaaatcatcaggcatttacttgtggctgcagcctgcagatag

SEQ ID NO: 3275 - DNA, 534 bp, Zea mays
  Peptide Sequence Number=SeqID_45054
atggcgcttcctgtcgacatggtcggtccgcgccctaggttgggcgatgtggaggctcctccgaggtcgaggtcgagtctgtcttccgtggccgtggtcgagtccgagcccctgggtcgggcgaggcggagaccgtcggctgaggccagggctgagtccgagccctggggtcgggcgaagcggtgttcgtcgtcttccggggctgggcccaagtccgagccctgggtcgggcggtgcggagttcgccgtcttccggggcttagcacaagtccgagccctgggtcgggcggagcggagttcgccgtcttccggggcttagcccaagtccgagccctgggtcaggcgagcagagttcgccgtcttccggggattagcccaagtccgagccctgggtcgggcggagcggagcttcctatggtgcctgaggtcgggcctgactgcctgtcagcctcactctgtcaagtggcgctacagtcggtgcggcgcaggcggcgctgtccttctgtcagatcggtcagtggagcggcgaagtga

SEQ ID NO: 3276 - DNA, 441 bp, Zea mays
  Peptide Sequence Number=SeqID_45055
atggacgatgcagagagatcccaggcgccgcccgagagctgcgtggactggcgcgggcgcccctgccggccgcgccacggcggcatgcgcgccgccgccttcgtcctagacccccaacaagtcgaagggcaagacccaggccgacgccgcgccggcgcccgggcaatgccgtgtatatacagcaacagattaagaaggcgtctggttgttgtgcgcattgcagtgttccaggcgtcgcagacgatggcgctggcggcggtggggagcaacctcatcaccttcgtgttcggggagctgcacttcccgctgccgcaggcggccaacgtggtgaccaacttcgtcggcaccgtcttcatcctctcgcccctcggcggcttcctctccgactcctacgccggctgcctgcgcacgctgctggccttcgccgccgtcgagctcgcg

SEQ ID NO: 3277 - DNA, 219 bp, Zea mays
  Peptide Sequence Number=SeqID_45056
atggcggagatgcgccatcgagtggaccagagccttgcgctgccatccttgggtgagaatccctttgagcctccacctacgtcccctcgtagtttatcatcgagtattgtattcattagagcgcatgtggatcgagaatttgtcggtagacttaaggcaccgccgcgaaaccccgtgcgaccgtgggcagactgtggtgttgcgcactcatcgatgtga

SEQ ID NO: 3278 - DNA, 126 bp, Zea mays
  Peptide Sequence Number=SeqID_45057
atggcggcgcaggtggtggcagcggcgggcaccccggtggccaggccactgggcgacggatctggggccgacacgctctggcccgcggcgaggatgccaagggagagaaggaccggaatggactga

SEQ ID NO: 3279 - DNA, 1476 bp, Zea mays
  Peptide Sequence Number=SeqID_45058
atgccagaagcaaggaggctgttcgatcaaatggcccaggtggggatccaagtaaatacaatcacgttcaatgttttgattgatggatatgcaaagagtggacagatggatcaggcgagtgcagcctatagggagatgcaagcgaggggattagtgccagactcctgcaccttcaacattattgctgctagagctcacaagttcgggtatgctgcccagttagtgcatgaccatgacatgtttagttcacatatgtcggctgatgagttggatatgttggtctgtaggctttgttgggatcatcaattggatgatgcctgggagcttctgcttggtgctattgagcagggtgttccattgcgtgttactggatttaatgcattgatcgctgcttatagtaaggagggactccacgaagaagcttctgaactgtatagaattatgaacaagttaggactggcaccatcctcgtctacttttaattacttgataatgggactctgcaatcaagtaagacttgatgaggcacagcttcttttagagcacatggttagcaaaggatattgtctaagtacatcatttactatcagcttggatgcatacttcagagacggtaatgcagttggcgcactgaaatgctgggatgatatgggcaaaattggtttgcagactgattttattgccttctcagcatatattaatggcctaagccgattagattacgtgaatgaggcttatcaggcatttgctgagatgacgagcagaggaattgtaccaaacaatattacttacaactccatcatatctacactttgtagccaaacactatcttactcttattttgccaactcatacaatcagccaacagaacttatctttttacatacagctgatgaacatttattgtatcacggccagcttgcaaagaagggagaacaattcattgatgtcccttatgttgtgaagggtatggatgtgtcatttagtggcatattgagctttattgaagctgcggcgattgaaaagcttaaaaataatgagtgcacacctgcggacctatgctactcattgcaggaaactatctttgacatgcttgtcgaaattactgaacgtgccatggcacactgtgattcaaaggacgttcttattgttggtggcgtcggttgcaacgaacgtttacaggagatgatgaagattatgtgctcagaaagagggggtaggctgtttgcaactgatgaccgctattgtatagacaatggggcaatgattgcatatactggtttactggcatatgcacatggcatgaccactccccttgaggagtcgacatttacacaaagattccgaactgatgaagttcatgcaatttggagagagaaggagatgccggtgctaaataacacccattcagatgcaattgctgaagtttctatagatgaagcctccatggcgacaccaatcgttatagattactga

SEQ ID NO: 3280 - DNA, 174 bp, Zea mays
  Peptide Sequence Number=SeqID_45059
atggagacgccgcgcctcgtggtcgctgatttcggtcctctaattcgtgtctcagggaggggaacggcgattctcatggtaccaagtttggctgacgagcaacgtgagggtgatattacagagctcttcaacctggctcaacggagtaattactctccccttgcttcacattaa

SEQ ID NO: 3281 - DNA, 2052 bp, Zea mays
  Peptide Sequence Number=SeqID_45060
atgaagcctggtcagggccatgctctcttcacagcagagtgctcacacactttccacttccattgtatttcggcaaatgttaagcacggaagcagcagctgcccagtgtgtcgtatcaaatggaaggagctcccatttcgaggtcccttgcctgctgaattacctcaaggaaatgcgaggattaatccagttaatgggtaccaaaatggaggccatatgaacatattgcgtccacttcctcgtgcacgctcttctggccggcttcatcatctggccacgttgctgcctgacactgaccctagtactttcaacgatgatgaacccttggacttgtcgtctgaagaggctaatgacaatcatcagggctgtttgagaacagtagagataaaaacatatccagagttcactgaagtacctgaaaatacatcagaaagaaacttcactgttctgattcaccttaaggcaccggttgctcagcacctgcagccatccagcaatctcggagatggcaacgggctaagtacagcccgtgcccctgttgatctcatcacagttcttgatgtcagtggaagtatggctggtaccaaacttgcattgttgaagagggctatgggatttgtcattcagaatcttggatcctctgaccggctttccgtcatcgccttctcatcatccgcacgtaggctcttcccactccgtaggatgactgagtctggtcggcagcagagcttgctggctgttaattcactgacgtcaaatggagggaccaatattgcagaggccctcaggaagggctccaaggtgatcgaagagcgacaggccaagaatccagtctgcagcatcatcctcttgtcagatggtcaagatacctacacggtctcaccaactgctggcgtacacaaaggagcaccagagtattgtgcgctcttgccgtccactaacggtaaccagcaggtacctgttcatgtctttggattcggtgctgaccatgactccgtctcgctgcactccatctcacaaacttctggtggcaccttctcattcatcgagacagaggccgctatccaagatgcatttgctcagtgcattggtggacttttgagtgtggttgcacaaggtctgcatgtaaaggtggagagcctccaccccgacgtgcactttggctccatcagatcaggcagctattctagcagggtttcagatgataagaggaatgggtccatagatgttggggacctgtatgctgaagaagaaagggattttcttgtgtctgtaaacgtcccaccaggctacggggaaacagcactcctcaaggttggctgcgtctacaaagacccactgatgaaggagaccgtgaatatggctgatgtgcaagtgaagatctccaggccagcattcgtctcggtacaaagcgtgtcgatcgaggtggaccgccagaagaaccgcctccatgcagccgaggtgatggctgaagcaaggttttctgcagagcgcggtgacctgaccaccgctgtttctctactcgaggactgccggaggatgatcatggggtcggcgtcaggacagtctggtgaccgtctgtgccaggcactggatgccgagctgaaggagatgcaggatcggatggccaaccggcagaggtacgaggcgtccggtcgagcatatgtgctctcaggcttgagctcgcactcatggcagagggcaaccgcccgcggggactcgacggacagcgagagcctgatccaagcctaccagacttcgtccatggtggacatgctgcttcgctcgcagacaatgagccgctcatcgactcctcgaccaacgccacagatgaggcacgctaagtcattcccggcacgcccgcagccaagggggtcggggatggtatacgtcctggggagaattgggcaggagggtggtgaactgggatcatctgacctgattgtaagaggcggggtcgtcgtgaggcgcagtcggttttcctacagcctatccggccaccggaactgtccattggcgccggggattcaagctggccgcgagaaggggtaa

SEQ ID NO: 3282 - DNA, 384 bp, Zea mays
  Peptide Sequence Number=SeqID_45061
atgtcgctagggctcaacctctgcgtctacgtgccccggacgctggaaggcgacgacgcggccagctcgcccgacaccgcctcctccacggcggcgctcgtgtcgccggtggcctcctcctcgtccgccgcgacgagcaccaacaccacccccacggccgcttcggcggaccagagcagcgccagcggcaaggtgctcatgcccaccaccccgacgccgacgtccgccgggctccgcctctccaaatccggcagcaaatcattcaaggaattctacggattcccgagagcccaccaccggctcgctttggggcgccctgatgacagaattgcaaaagaaagtattctgatcatggcccagttgcaaacctgcaatccttattaa

SEQ ID NO: 3283 - DNA, 516 bp, Zea mays
  Peptide Sequence Number=SeqID_45062
atggcacgagcttttggcgatttctgtctcaaggattttgggttaatctgtgtgcctgaagtcacctatagacaaatcagtaagaaggatgaattcattatccttgctacagatggggtgtgggatgtcttgaccaatcaggaagtcatggacgtagttgcttcatgctctgagcgttcgtctgcagctcgttctatcgttgatctagcaaatcaggcatggaggtttaaatacccaacttccaaaactgatgactgtgcaacgatatgtctttttctcgacgtagaggacaaggctgctggcttgtcagtgtcgtcatctgttgctagcaagggaactggatcacaagctcagccaaggaagcccaggctccatactagtgtaccacctgaagatgtagatgatgggagtgaatcaaatatcagtggagatgaaaggtccttggacagcttcactaggttgaacacactactggcactaccaaagctcggagacacaagtctgaaaataaaatga

SEQ ID NO: 3284 - DNA, 294 bp, Zea mays
  Peptide Sequence Number=SeqID_45063
atggagctaaataaaagcagggcaggtgaacatgccaagaacgagaagacacccaccggggaaaagtccaaaggcaagacgtcgtcaaggatgatcaagatatctggcgataaccacaaaaagcgggaagaagagttcgccggctccaccaagtcaaacaagaaaaaggatggcaagaagaaaaagaagatgaaggtgatcgtcatctatgaaactgactcttcagcttcggcttcaacatccgacgccgagtcaacatcctccaagcgccaagagcgccagaagtataattga

SEQ ID NO: 3285 - DNA, 1488 bp, Zea mays
  Peptide Sequence Number=SeqID_45064
atgccagaagcaaggaggttgttcgatcaaatggcccaggtggggatccaagtaaatacaatcacattcaatgttttgattgatggatatgcaaagagtggacagatgcatcaggccagtgcagcctatagggagatgcaagcgaggggattagtgccagactcctgcaccttcaacattattgctgctagagctcacaagttcaggctttgttgggatcatcgattggatgatgcctgggagcttcggcttggtgctattgagcagggtgttccattgcgtgttactggatttaatgcattgatcgctgcttataataaggagggactccacgaagaagcttctgaactgtatagaattataaacaagttaggactgacaccatcctcgtctacgtttaattacttgataatggggctctgcaatcaaactgattttattgccttctcagcatatattaatggccgaagccgattagattacgtgaatgaggcttatcaggcatttgctgagatgacgagcagaggaattgtaccaaacaatattacttacaactccatcatatctgcactttgtaaggcaggaaatatgactgaagcctttaagttagagcagaatatgaggcagagtggccttgttcctgacatttacacaagcaacattctaatcgacggtttgtgcagagaaggaaagctaaagatggtggacaaccttttattggatatgtgcagtaatggtctaaccccagacacagtgacatataatacaataatcaatgcatattgtagggctcaggatatgaacagtgccatgaatttcatgaataagatgcttgtagctggttgtgaaccagatattttcacatataatatttggatgcatagcctctacaggaaccatatgttgaaccaagcagggaagctgctagatgagcttgttgttgtggattgttctccaaattctgttacgtacaacacattaatggatggcatttgcagtgatgttcttgatcgagctatgatacttactggcaggcttattaaaatggcttttaagccaaacactatcacactcaacgttttcctttctcatttctgcaagcaaggatttgggaatagagccctcatgtgggctgagaagctcagagaagattcttatgttttttatggtgctacaagaaatataattgactgggcacgaagggaaatggaggatgacccccaggctaacaacgaggacataggaagatgcatgtttcttgagttcttaatgttcatgacatacgaggctatgctcaacagcagatcctcaaaggctacacatatgcttacagaaaaaggttttgatcctgctagcaacagcatgattagaaaggaggtgaaaatgggattggctgtaattgcttgtttattgctgaaccagaccttcctgattgatcccaaatacccctccttttgcctaattaacccctgttacgagcgcctataa

SEQ ID NO: 3286 - DNA, 363 bp, Zea mays
  Peptide Sequence Number=SeqID_45065
atggagtacttgacattgtcaaatgtgccctcacgtagtcctctcgtccagtgcatgggccttgctgtcgtcgatcatcccaaggtgtggcctctgaagcgccctcacctcctccgcaagagccccgtggtgcgctctgggttctacgccttcatcaaggccttcctcgtcgtctccctgctcctgctagccatcgaggtcgcggcgtacatcaacggctgggacctcgccgcctccgcgctcgccctcccctccctcgccctcgagtcgctgtacgcctcctggctgcgcttccgtgccgcctacgttgcgccagggatacagttcctcaccgatgcctgcgtcgtgctcttcctcgtctag

SEQ ID NO: 3287 - DNA, 351 bp, Zea mays
  Peptide Sequence Number=SeqID_45066
atgagccgaagcagaagattaaagaagggagggagcctgacgagctgtgtgagctggtcgattgacgacgacttccgcatcctagaggccctcgctgcgcaacgcctggagcacggcgcgctgcctcaaacggacgtgctggtcgacgctctcgctggcaagctcgacaatagtggttgcagcctctccgatctcaagaggaaggtgaggagtttgcagagccggtacgccaaagtggtcaagaaaggtgcgtcaccgagcaaggatcaggatcactatctcttcgacctctgcaagagccccgtggtgcgctccgcatcaggcaatgccggggattttggctcaggctag

SEQ ID NO: 3288 - DNA, 144 bp, Zea mays
  Peptide Sequence Number=SeqID_45067
atgttgtgtgcttcatgtgggtggctgctgactgaccaacagccggacactccgggagatgaaaacgcagagacagaaaacttggaagatgatgctaatgatagtgtccctgacctgaaatctcttgatcttgatagtgtctaa

SEQ ID NO: 3289 - DNA, 939 bp, Zea mays
  Peptide Sequence Number=SeqID_45068
atggccagcggcgaccttctcctccgtgtcctcacaaaacactgcctgccggagatggccagcggcgaccttctcctccgcgcccacgccggcgccccggtcctagcgagggcctcgcctgcctcctcctctagtcccggcaaggcgccgcaacggactaatctcacctctggccgcttccaaggtcggcatcgccgacgtcgttgggcgggtcaggtcgaggtggagcaggacgaggaagatgaagctctcaagttgggagtggagaagaatggcgcgagacgggaggtgtgggctacgttcccaaacgctggcgctgcctggctcggtgcctcccctgagttccatctcctgacatgccgccgccgcagtagagctaacgaggcacgggtagcatgcgccgcggcctgcgtcgcgggttgggcatcctcctcgtcccactcccgcacgcacccagccgcccgccgccgatctctcgcgtggctcttctcctccgacgcctcaatggcttctcccgccactccttctgcagcttccccgtcggggagcgcaccgtcgagcagttctcagacgacgaatacgaccacgagtacgaggacctccgggttcgtgctacatctaggggtgcaacctgttcccctcgtgcacgtgccgcacgcgcactctccttcactcggagaggctggtgcctatgtcgccgaggtaacacagctcggcgccataggctatggcgccgagagcctctactccgactccgaggctgcgtgccgcgacgaacagaggatcaaacctgcaactgatctgatcaagaacactgactgcacacaggtaggaggccgtctaggacagacaggcacaggctcgcgcgcgccatcgtttttgggtcgcgtgactggtccgcgtctagcattaacctcggccgccgcctgcgtagcgtag

SEQ ID NO: 3290 - DNA, 2064 bp, Zea mays
  Peptide Sequence Number=SeqID_45069
atgtcctccgtgccgacgacggcggggagggcggcacctttcgcgctctactccctcatctgccgccacgtccgcgccggcctcctgcccggcggcggcaccagagatgagctcatggaggaagagaaggccaccgggcgtcgtggcgagcggcccgtgtccagggtcagggcggtgcttgagaagtacagagtgctgcagcggctgttgctgctgttcgcactgctcgggacatgcatggtcatcggggacggcgtgctcacccctgcagtctctgtgttttctgcggtatctgggcttgagttgtcgttggaaaaggaacagcacaaatatatagaacttcctgtggcctgtgccatacttatatgcttgtttgcgctgcaacactacggcacacacaaagttgggtttctttttgcaccaatcgtatgcatttggcttctctgcataagtgcaataggcctctacaatatcatccgttgggaccaccatgtttatcgagccctctcgccatattacatgtatcaattcctcaggaagactcaaactggtggctggatgtcactgggtggaatccttctctgtgtaacaggctctgaagctatgtatgcagatcttggacatttttcgcaatcagcaatacagattgcattcatatatgtggtttatcctgcacttgtattggcttacatgggacaagcggcttttatttcacaacatcacaacttcgagagcagttatcatattggattttatgtgtcagtaccagaaacactcagatggcctgttctggtgattgctatactggcagctgtagttgggagtcaggcaattattactggaaccttttcaatcatcaagcagtgctcttcattaagttgtttccctggagtgaagattgtgcacacatcctcgacagtgcatggtcagatatacataccagaaatcaattggatgctgatgatactctgcctggctgttactattggcttcagagacacaaagcacttggcaaatgcacaagggttggcagtaataactgtcatgcttgttaccacttgcttaatgtcactcgttattgtgctttgctggaacaagagtatcttccttgcccttggtttcctgcttttctttggcgcgatcgaagtaatctacttctcagcttcccttgtcaagtttcatgaaggtgcttgggttcctattactctctccttcatatttatggtggtcatgtgtgtctggcactatggcacgataaagaagtacgagttcgatgtgcaaaacaaggtttcagtaaactggctcttaaaccttggtccttcgctgggcattgttcgtgttcgaggcattgggctaatacatacagaactgatgtctggaatcccagctatcttctcccacttcgtcaccaatctgcctgcgtttcaccaggtactggtattcctctgtgtcaaatcagttcctgtgccgcatgtgcaacctgaggaacgatttctggtgggtcgcattggtccgaaagagtataggctatacagggtcattgtcagatacggttatcgcgatgtccagaaagatgacctagagttcgagaaggagctagtcggcaacattgcagagttcatccgcagcagcgcggaatacgacaagaatggcttcgccgaggacacagataagccctccgggaagctgtccaccatcagcactggaattaacatgtgggaagaggatggagaacctgatgcatcctcatcccctcgcaaggagacagacccacgcgacgcagcacccgagcgaaagaaagcgaggttcatgataccaaagagcgcccaggtggacagcgaggtgcggcgcgagctgcaggagctcatggacgccagggaggcgggcatgtccttcatcctgggacgctcgtacatgaaggcgaagagcgggtcgggtttcgtaaagcgggtcgtgataaacttgttgtacgagttcttgaggaagaacagccgtggccctgcgtacgccgcgagcataccccatgcctccactcttgaggtaggaatggtctaccaggtctga

SEQ ID NO: 3291 - DNA, 498 bp, Zea mays
  Peptide Sequence Number=SeqID_45070
atggtgctcgtcgaccgatcgggtctgcaggtggagatctccggtcaacagaagccgcagccattgaaccacctccacggcaatcgggggcagttgcaaccaccccactgcctcggcctcctaccctctccccttcttatcccctcagctgcgactccaaatcgaaggaactattgccgacaggggatatcaagcacggcgatgctcggggtgccgctgtgggggaatcctcaacgtagtcgtcgtctgcgccttcggtggtgtcgtgggtcttccttaggccgtggagagggcaatcgtgtccgtgtttcacgagttcggccaccagcgtcgtcagaatccttcaccgccgccgcagatccgccccgtgccgctgccggtcaccctgcgactctaatcaccgggcgccgtgggaaggaggactcgtggacggtagatgcacggatctacggccctgatcgcaccaagtctggaaggaaatcagaaccattggattaa

SEQ ID NO: 3292 - DNA, 1776 bp, Zea mays
  Peptide Sequence Number=SeqID_45071
atggggcccatcaaggacttgaaaggcgtacagagggtcacgggatgccttgcggctcttagccgtttcatctcacgcctcagcgaaagaggcctgcctctgtaccgcctcttaaggaaggccgagtgcttcacttggatccctgaggccgaggaagccctcgggaacctgaaggcgctcctcacgaacgcgcccatcttggtgccccccgcggccgaagaagccctcttgatctacgccaccgctaccactcaggtggtcagcgccgcgatcgtggttgagagacgagaagagggacatgcattgcccgtccagaggccagtctacttcgtcagtgaggtactgtccgagaccaagatccgctacccacaaattcagaagttgttgtacgcggtgatcctgacgcggcggaagttgcgacactacttcgagtctcatccggtgactgtggtgtcatctttccccctgggggagatcatccagtgccgagaggcctcgagtaggattgcaaagtgggcggtggaaatcatgggcgagacaatctcgttcgcccctcgtaaggccatcaagtcccaagtcttggcggactttgtggctgaatgggtcgatacccagctcccaacagctccgatccaaccggaactctggaccatgtctttcgatgggtcgctgatgaagacaggggcaggcgcgggcctgctcttcatctcgcccctccggaagcacctacgctacgtgctacgcctccacttcccggcgtccaacaatgtggccgagtacgaggctctagtcaacgggttgcgcatcgccatcgagctaggggtccgacgcctcgacgctcgcggtgactcgcagctcatcattgaccaagtcatgaagaactcccactgccgcgacccgaagatggaagcctactgcgatgaggttcggcgcctggaggacaagttctacgggctcgagctcaaccacatcggccgacgctacaatgagactgcaaacgagctggctaagatagcctcggggcgaacaatggttcccccggacgtcttctcccgagacctgcatcaaccctccgtcaagaccgacgacacgcccgagcccgagaaggcctcggcccagcccgaggcaccctcggccccgaaggggtgtcaattctacgcaaggcagacccacctgcccgctcaggctctgcagaccatacccatcacctggtcgtttgctgtgtggggtctggacctcgtcggccccttgcagaaggcacccgggggctacacgcacctactggtcgccatcgacaaattctccaagtggatcgagttcaccggcagaaagttcctggacttctgcgaggatcaccacatccgggtggactgggccgccgtggctcaccccatgacgaatgggcaagtagagcgtgccaatggcatgatcctgcaaggactcaagccgcggatctaccacgacctcaacaagttcggcaagcgatggatgaaggagctcccctcggtggtctggagtctgaggacaacgccgagccgagccacgtgcttcacaccgttctttctagtctatggggccgaggccatcttgcccacagacttagaatacggttccccgaggacgagggcctacgacgaccaaagcaatcaagctaaccgagaagactcactggaccagctggaagaggctcgggacatggccctgctacactcggcgcggtatcagcagtccctgcgacgctaccacgcccgaggggttcggtcccgagacctctag

SEQ ID NO: 3293 - DNA, 498 bp, Zea mays
  Peptide Sequence Number=SeqID_45072
atggtgctcgtcgaccgatcgggtctgcaggtggagatctctggtcaacagaagccgcagccattgaaccacctccgcggcaatcgggggcagttgcaaccaccccaccgcctcggcctcctaccctctccccttcttatcccctcagctgcgactccaaatcgaaggaactattgccgacaggggatatcaagcacggcgatgctcggggtgccgctgtgggggaatcctcaacgtagtcgtcgtctgcgccttcggtggtgtcgtgggtcttccttaagccgtggagagggcaatcgtgtccgtgtttcacgagttcggccaccagcgtcgtcagaatccttcaccgccgccgcagatccgccccgtgccgctgccggtcaccctgcgactctaatcaccgggcgccgtgggaaggaggactcgtggacggtagatgcacggatctacggccctgatcgcaccaagtctggaaggaaatcagaaccattggattaa

SEQ ID NO: 3294 - DNA, 354 bp, Zea mays
  Peptide Sequence Number=SeqID_45073
atggacgagcttttggctatctgctacttatacatggatttcgatcctaccaacattagctcagctcgtatcttcaagatggagaaaacttgtggtgacgaggaacttgtggcctggcacctggtggatgatgttggggacagggttttcctcttgacgggcaccaacatggcaacttggtgctatgcatgcaccaataacccaagagggagcaccctctactttctggtccacttagtagctggtcatagggatctatgcatctatgatgtccagaagcagactatggaggttggtcaggttcacgaccacgaagatctggagatcatgcacacacagtcatactggattaat

SEQ ID NO: 3295 - DNA, 1134 bp, Zea mays
  Peptide Sequence Number=SeqID_45074
atgtgcatcatgttgatgaacgacggccacagcggcagggctagcatccagccaccgccgcaggtcctcgcctctgttcccttgctcgtctacgagtacgaggatgctgccgctgttgatccagcagacgactctgctcctaccgccttcaagatgctcatgtatagcctgcctgagcggagcatcgtctacacgcacgacaataggcctcccatgatgatggagggcaacttctgcttcaccacgcctcaaggatggctggtcatccttggacaagagtcggaggcctctatgtggcatccgctcaccggggagaccatcaccctgccacccatacacgacatccccgtcacctgtaagtgcctcctcacccacagctccgtcgcccacccggactgcgccgtcgttctcctcgacgtcaccgaccctctcatgtggttctgccgtgtcaatggagaggctgatcggaggaggtgggggcagcacgcctacgacattggtgactacttcttccccgaggagttccgcacccccactacgcccaccaagaacgtcatccatgacgtcgccgcgctcggagggaagctgtactttcgcttcacggaatcagatcagcacaagatgggcgtcgtcgacttggacttcccgtctgatcctggccatcctcccaccgcagtgttcgatgagtttgatgtctgtgcagagttcgacctcgttcccgagggcatttgcgctgcttgcatccacttggtagagtccatgggcgagcttttggctatctgctactactacgtggatttcgatcccaccaatattagctcagctcgtatcttcaagatggagaaaacctacgacgacgaggacgaggaacttgtggcctggcgcccggtggatgatgttggggacagggctttcctattgacaggcaccaacatggcaacttggtgctatgcaagcaccaataatcttagagggaacaccttctactttctggcccacttagtatctggtcacagggatctatgcatctatgatgtccagaagcagactatggaggttgtccaggttcatgattatgaagatatggagatcgtgcgcacaatgccatactggattaatgtacctccatgttag

SEQ ID NO: 3296 - DNA, 390 bp, Zea mays
  Peptide Sequence Number=SeqID_45075
atggagatgacaaagggcaactgcgccgaccatctcgccttcgttggtgcagcgaaacgacgaaggcttcgcgtgaaggagaagagactcacccaccgtatctcggcggaaggtgccacctttcagctccagaacgcccaaggagaccgtagatctatgagaagtctggtgcgcatgccaatcatgagatctaaggcgcaggcatggcacgcgctgtctctgatccgggaggagatgaggaacgccgccgccttcgtctttgctctctgtggcacagaaacatggcacgccctgactctggctctggcgctggctctggctctgactctgactcttgctctggtcggggaagaggaacccccgtcgccattttcgtctttgcgcggttag

SEQ ID NO: 3297 - DNA, 342 bp, Zea mays
  Peptide Sequence Number=SeqID_45076
atggcaatgggcctcgaccccgattcctcacggggaattccttcattagagaacggggatgactttgccctctctcgcgctctgccctcgccgccagacgccgccggagacccggtcccgcttccccggccatctagctcgccggagaccgtgccaagcctccccgagctccgccccaagattcatggcctcttccccgccattgagtttgtcgtggtgttctctccctctctgcccaatcccggcaaccccggagccactctagcacgcgcctgccccaactccggctacctcaccgccgcggagaggagcagcatcgcccgcagctgttcgtcctccctg

SEQ ID NO: 3298 - DNA, 1182 bp, Zea mays
  Peptide Sequence Number=SeqID_45077
atggccaagaagaagcgcagcggcggcggcggagggcagcagcagaagccggcgaccgcggaggagggcgaggagcaggcgggcgacgcgcccccggcggcggagggcaacaaggacagggagcacgagaaggggaaggacaaggaccaggaggagaaggggagcaaggggaaggacaaggacggcaagaagccgccgccgcagccgcccgtggtgacggcggtgctcaaggtggacatgcactgcgacggctgcgccaagcgcatccgcggctccgtccgccgctacccaggcaagcaacgcaacgcaatgaaagccccatgcgtggagggcgtggcgatggacgtggacaagggcatcatgacggtggtgggccgcctcgacgccaagaagctgcgggaccgcgtcgccgacaagaccaagaagaaggtcgacctcgtcctcggcggcggcggtgggaacagcagcaacaacaagggcggcggcggaaacaacaacaagcagggaggcgggaaccagcacaagggcgggcacgaagaggacggcaagcagtcggacaaagagcacggaggcggcgagcaggagggcaaggagaaggacaagggcgatcgccaggagggggaggaggggacgaaggggaaggacaacaacaagggcggcagtggtggaggtgggaaggggaagggcggcggcggaggaggaggaggaggaaaggacaacaagaagcccgtggcgccggtggtcgcgacggtggtgctgaggatcggttccacggggctccactgcgacggctgcatgaaccgcatccgcaggaagctgtacaagatcaaaggagtggagcaggtgcgcatggacatgggcaagaaccaggtgacggtgacggggaccatggacgccaaggccctgccggagaagctgcgcaagaagctgcggcggcccgtggacgtggtggcgccggggtcgggcaacaaggacggcaaggacaaggacggaggcggtggcggcggcaaggagaaggagaaggagaaggatgggaaggacgggaaggacgcggcgatcaccaaggccctgtcggctgagctggaggcgtggaaggcggccttctacgaccagcagtcgctgagcaacgccgagttcatgctgagcgacgagaaccccaacgccgcctgcgccgtgatgtga

SEQ ID NO: 3299 - DNA, 414 bp, Zea mays
  Peptide Sequence Number=SeqID_45078
atggactatgacaggttgaattcgccgaacacgtcggctatttcgctggaggtgatgggccaccggctacatatttcacaggatccaaactccaagcaccttgggaccacggtctgggatgcatcaatggtgtttgtcaagttcttggaaaagaatagcagaaaaggtcggttttgtccatccaagctaaaaggaaagagagtgattgaattaggagctggctgtggcctggctgggttcggaatgaccttgttgggttgtgatgttacaacaactgaccaagtcgagtgtcttgaatcttctgaactctgcctctcaaataacaaaccctacttactttctgttataatcaaggttttcaagttgataagtcgagtcgacaaggtaccgctagtcgataagtcagtcgactag

SEQ ID NO: 3300 - DNA, 675 bp, Zea mays
  Peptide Sequence Number=SeqID_45079
atggtcacccggtcagccatcactaagcagaagaggtggcggcggagaggacgatcttgcgaggacaggcggcacctttggcaagcgaagcaggcgacgcttcgcttccgccataatgaccgcgtcaaaaaagggaccgggaaaggggatacctcgaaagggatccttctccgtgaaggaaacaggccccgagcccccctactgatcagaggttcgaaggctggcccctcgaaagggttcaacagtcgcctcagagcactcgggctccgcgcccactactggctggcccccgaagggttcgacagccgcctcagacgcagagcgagggatgaccttgggtacgttcgatacataaccaaggctcgggctgcgctcccgagagagaggctgacagcagccaagtccggcctcgggcgccataggaagctccgcctcgcccgaccccagggctcggactcgaccttggccccggaagacgacgaactccgcctcgcccgaccccagggctcggactcagcctcggccccggaagacgacgaactccgcctcgcccgaccccagggctcggactcggcctcggccccggaagacgacgaactccacctcgcccgaccccagggctcggactcggcctcggccccggaagacgacgaactccgcctcgcccgaccctag

SEQ ID NO: 3301 - DNA, 213 bp, Zea mays
  Peptide Sequence Number=SeqID_45080
atgggcgggtgcagacccccacttatgtcacactcggtttcagaaggcaaaccgaatgtgaaccatgagcttcgtcaccagaaaagcttcgatatagatcgatggaagtacgacggagcaagcttcatcaagatgaagcaggcgccaatggtgccaaatgagattgtcattgaagccatagtcaagggactttgtctaggtccaacagcataa

SEQ ID NO: 3302 - DNA, 1305 bp, Zea mays
  Peptide Sequence Number=SeqID_45081
atggacgggcacggcggcggagccggtaagctgacgaggacgccgtcgtcgctactccggtcgcctaccatgcgcgcgggtcccggcaccgcatcgttccacgcgctcgacgacccggaacccgacgacaagaaggcgcaggcgccactgggcaagcctcgggcgctgctccgccgggcccaccaccggttccgccccggcccggcccagtccgcgctcctcctcctcctcccggtcctcgcgctcgccgcgctgctcatgcgcgggggcgacggcggccaccacctcgccctcctggcggccgcggcggggttcgccctcgccgccgcggccgccgtcgcgcggctccgcggcgctcgcccgcgctccccggcgctcgaggcctccgtgcggtggttcatcggcgaagatgacgacgaggagcagcgggactggaagcggagggcggggctcgggctggggctgggactggggcgccgcgcggaggtgcgggagggcgtcgagttctacagcaacggggaccgctacgagggggagttccacgggggccgctgcagcggcagcggcgtgtacagcttcttcgggaagggcaagtacgagggcgactgggtggacggcaagtacgacggccacggcgtcgagagctgggcgcgcggcagccggtaccgcggccagtaccggcagggccttcgccacggccacggcgtctaccgattctacagcggcgacgactacgccggcgagtgggccggcggccagagtcacggtatcggcgcccagacctgctccgacggcagcacgtacgccggcgagttcaagtgcggcgtcaagcacggcctcggctgctaccatttcaggaacggcgatctgtacgcgggggagtacttcgcagacaagatccagggtttcggtgcgtacagattcgccaatggacacagctacgagggatcttggcacgaaggaaagaaacaggggttcgggatgtacgtatttgggagtggggatgaacgagccggggagtgggattctggaattctgaagagctccttgcctctgtcagacccagctgttcagcgtgccctgcaggctgctcgaagggctgcagacagcgcctttcacctcccaagagtacaagagcaggtgaacaaggccgtcatggctgcaaacagagcggctacagctgcccgtgtcgctgcgatcaaggcagtgcagaacaggatagatggcaagctctgtttcatcgatattatggcgtctttcggtccacttgctgctccatgttctcgcctcgcattagaggcatga

SEQ ID NO: 3303 - DNA, 336 bp, Zea mays
  Peptide Sequence Number=SeqID_45082
atgaagcaggcccccaatagggacagacgactgcgatggggcgcgcggggggttttacagctcggtgaccaacgttgctccctacgtggcggcgaggtcgccgaaggcgagacagacgtggttgccaggggtctggggtcaacggtgagggttagaacgagtgaagaaggttcagcgaacttgctggcaagactccagccgcaagaacgggaccggaggtgggagaacgacgaaggtgaggtgctccgggcgggtcgggcaattccggtgagaaatcctgaccgcgaggaggtggattcgggcgcgctaaggcctggactagctccagtggggtaa

SEQ ID NO: 3304 - DNA, 330 bp, Zea mays
  Peptide Sequence Number=SeqID_45083
atgatgctacgtgtcctaaaaactgaggcgaatcgcttgaggggaaactcaccggtggcggtgttgcacaggagccggacgtcaacggacaaaggatttgtggcggcgctagaactccagcgacaaattcacacccacccggccacaaaacttgcgcggcgagaccacagacaccgacagggtgttgaggcgaagctctccgaatggcttggggtagcccgacgtcggcggtcgcgtgcttcagcggcggcagaaaactgcggcaatggcgggtctctgtctttcttctcctatgacacgattagctctgggtttggggggtcatggtga

SEQ ID NO: 3305 - DNA, 423 bp, Zea mays
  Peptide Sequence Number=SeqID_45084
atgtccgcagatccaaaccgttggatcgaggacagacgattgcgatggggcacgtggagggttttacagctcggtgaccggcgttgctccctccgcagcggcaaggtcgccagaggcgaggcagacgcgttcgccgggggtttggggttgccggtgagggctggaacgggtgaagaaggtctggcgaactcgctggcaggactccagccacaagaacagggccggaggcgggagaacggcgaaggggagcgggtgcacggacatgcgtcagcgacggttgcggggaagacagagctgacatggctggcccaccgcgcagcgggagagagcgagcgcgcgggtgaacgattctcgacgctgacgggtggggctgtcgctgacaggtggggcccacctgtcaggcagagcgggcgcgcgacctag

SEQ ID NO: 3306 - DNA, 717 bp, Zea mays
  Peptide Sequence Number=SeqID_45085
atgcctcgcactgtcgctaatgtcccaccactacctgacagctcttccctggaaaatggacacgatgagattagtatcaaggccatgggacaggccataaataagacagttatggttgttgaattgattaagagaagggttggaggtcttcatcagaacagtgccactgaatctgttgatatcacagacacatgggaacctttggaagaaggccttctcccactagagacaactcgccatgtgtcgatgatcactgtgacgttatcaaagaagcctctggatacatcatctccaggataccaaccacctatcccagctgaagaagtgaaacctgcttttgactatgaccatgaagattcgtatcctactggccgtggaagaggacgtggtggtgggagaagaggcaggggaagaggtatgagcaatggtccctctccacccgcttatggttacaatgaagagtggggtgaggaaggagattactataatagagggcgtgggagaggaaggtcacgtggacgaggcagagtgcgtggtggctactatggaggcgggaggcgtggtggctacagttatggctatggtgcgagaggcgggtactatgaagagcaagacgaatactatgatgatcctgaagaatatgcccctccaggccgtcgtgggcgtggcagaggaagaagggggatgccttggcgtggccgtggagtctactactag

SEQ ID NO: 3307 - DNA, 573 bp, Zea mays
  Peptide Sequence Number=SeqID_45086
atgaagaatataggtgaagtttcattgccaggaggaaaggtcgaggagggtgatgctgatgatgtagcaacagcgttaagagagtcaaaagaggagattggacttgatccagctctgtatggtttggaccatagtcacagtttctgggtcgacatggtcaaggggccgtggaacatggcttgttacttattggaggtttttgcacttcggcatcttctggtagttgttcctgttgttggcatactgttagacagacaagcatttaaacctgctcttaatattgctgaggtagacgaaatatttgatgtacccctggagatgttcctcaaggatgagaacaggacatcggaggagcgagaaaagatgggccagacattcacagttcattacttcacttatgagaacggaatccagaagtacttaatctggggtctgaccgcccgcgtcttgatccatgctgcttcagttgtatacgagcgaccgccagactttacagagcgaagagcgcatttcaaattgccaaagttcacaaaggactgctcttcaatgctagcaggacctgctaaacattag

SEQ ID NO: 3308 - DNA, 1140 bp, Zea mays
  Peptide Sequence Number=SeqID_45087
atgtgtcgacaagatcggtcgagatccgaacttgtgaggcgccaagtggttccatctgtgcgcaccgcgctgcttgctttgaaccgtgccctgaatttgaatgaatggacggaccaaatccaagcaaaagatttgttttgcctcagcgacggagtcggctcctgctccaccaccgccgagagaagggtggcgccgagcaaatggggaaatgctagatcgcatagagatttggcgcaaacggaaacgggcggcaaaggcgccaagccagagagagcgcggtgtcccatgtccaaattcgacgaatccaaatccaatcaggcgcagtccgaggttcccatcactcccacactgtccatccctcttctcctccaccaccgccgcctcgcctcaccccctcccacgcctgcagcccttcctgacgacgggggaggcagggcccgacgccgctgccagctcccgcagcttcgccacttcgcttttctccgcctccacagatcgccgacgccctcttggccctctccaccgcgtagcaatggccgccgtggatgcaccaccgagcgagaagggtacgcccgtgctgaagcggagtgcctagatcctagaggacgcgcgcgcatcctgtaccgcctcgccggcgacctctggggcggcgacgtggaccccagcgccctcgtggcccccgcctgctcgaccgcttcgccaatggctgcattgagctgtgttgaggagttcatcaacgccaggtatattttagcagaggctgttgataccctatttactacatttattggcacgaagcagtacaaagatattattgatgatgtgaacatacgccaagggaccttattttatgaacatactactcaggatttagctcctaatgttgaccctaaacaaaatgatacccagaagggcctgtgtgctgccttttgtcctgccctgttcgccattatcattgtccggccgccctacccctggaactgggagcgtcctgtgacggagcccatcatgtgccgggccagggaggcgcaggcaggaccggaagtacagctcggtccacgaggcccagcacatggtactgggcttctccttcctgagtccaacatggtcctgtcgctcgccggatcggagttggcatag

SEQ ID NO: 3309 - DNA, 153 bp, Zea mays
  Peptide Sequence Number=SeqID_45088
atggagggaggaaggcaaaagagggagtatgagatgacactcaagagaacgttgcagagtatttgcttgctcacagttcatcctaacaccaccacctctgtcgtgcttcaggttgtagctgatgatgcctctatatctttccacatgatgtag

SEQ ID NO: 3310 - DNA, 651 bp, Zea mays
  Peptide Sequence Number=SeqID_45089
atggggagcatggaggtgtccaagccgtcgaagcgcctgtccccgaagcgcagcagcagcttcaagctgagcctgttctgcggccagtgcaaggccacggcggtgtcgtcgccgccggactcccccacggcggccgccgctggcgcgaggtcgctgtcgtcgtcgtccgcgtccgcgtccgcgtcgtcctcgggcacgtcccgcgggcgcgaccgcaccgcggagctgcgcgagatctttcgccacttcgaccgcgacatggacggccgcatctccggcgcggagctgcgcgagttcttcgcgtccatgggcgacggcggcagcctgcaggcgctggggctgaaggacggcggcggagccggaggggccgtcgacctcacgctcacgctcggcttcgacgacttcgtgtgcgtcgtggagagcaagggcggggaggaggaggagcgcgaggacctgcgccgcgccttcgaggcgttcgaggccgtcaaggggtccggccggatcacgccgcgcggcctgcagcgcgtgctcagccagctcggcgacgagccgtccgtcgccgagtgcgaggccatgatccgcgcctacgacgacgacggcgacggcgagctcgacttccacgacttccaccgcatgatgagccagggctag

SEQ ID NO: 3311 - DNA, 405 bp, Zea mays
  Peptide Sequence Number=SeqID_45090
atggccattccatttgatctaaacgagtttccggttgattatgaagacacccaggagttggaggacttccagcaggttcaaaacatcactgcgtttatggaagcgagtagtctaaaaaagggtagagttggccgtaaggcaacctccgtctccaagcctggcgcgagctccagcaagtccgacgtgacggaggccggcggcatctccgggtcaggcaccacctccatctccaagtccggcaaaacctccatctccatgcctggcgcgagctccagcaaatccggcgtgacagaggccggcggtacctgcgagtctggcaccacctcaatggcaattaagagtgatcttcatggcttcggactccatggttgcgttgcgtcgcagaggcagcaacgaagagtgtag

SEQ ID NO: 3312 - DNA, 306 bp, Zea mays
  Peptide Sequence Number=SeqID_45091
atggccggacatggcgatttggcgacccaccggcctaatccaagcgaaactacaccgaaggaaagaggagagggaggcgaaaccaccagggcgtccataccagtctgttgtcgcgagggtgatcccgacgacgtgaaggcgcggttccccggcctggttcaacgtcgacgagcgattcaacgctccagaagcgaagacaatcccgggcgatccttgcgctggcttcaggaggtcacggaggtggatccagagcactacacggagggcaagtcgatggctagcgaacctgggcgcgcggcggactga

SEQ ID NO: 3313 - DNA, 642 bp, Zea mays
  Peptide Sequence Number=SeqID_45092
atggagcggggagcaggcggcgtgctggatgcagcgggagggagctggcgggggcggcggcacgctgctcgagcggacgtctgtgcgcggctcgggagggagctgtgcgggcgtctgtgcgctgctcgggagggagctgtgcgggcgtctgcgcgggagggagctggtggggcggctgtgcgctgctcgcggcgggagcgcgggggcccgggcggctcgtggtcgccggcatcgtgggaagggcggggcagccgcgcgcagcgtgcggagggaagcggccgggctgcgcgagggagagggcgggccgggcgtcgtgggagggccggacggccgcactgctcggagggagagggcggcgctggccagcgcgcagcggcccggctgcgcaagggagagggcggcgcgggggcgccggcgtcgcgggagggcggggcggtggcgcgtggggagagggagagggcggcggctgcgcgaatggagagggcgagctgggcgtcgtgggagggtgggacggcggcgctgcgcagagggagagggtgggctcggcggcgcgtgggcgtgccggctgccggcgtcgagggttgggatgaggacggtgcgcgcgagcgggagaagattggttggctaattttgggcggctag

SEQ ID NO: 3314 - DNA, 414 bp, Zea mays
  Peptide Sequence Number=SeqID_45093
atggacggggactgcgcgaaccgaatctcgaaaaacagcactgttcaccccgctccggctgctgtgccaaccaccagggtaaaaccaacggcagtaagtcacgacctcccccgagttcagcctcgggcgcaacagggagctccgcctcacccgacctcaggcctcagcctcagcctcgacctcgggagaaggtctccgcctcgcccgacctcgggcctcggcctcaacctcggccttgggaggagtcacaacctcgcccgacctcagcctcggcctcaggagaagtctccgcctcgcccgacctcggccctggaccgactacgccactggggatacatcattaccctacgcctagctagctgcctcaggctacgaaggaacaagaccagtgtcccatctagattactcctgtaa

SEQ ID NO: 3315 - DNA, 687 bp, Zea mays
  Peptide Sequence Number=SeqID_45094
atgtggaacctctggaaggagaggaatcgcaggattttcgaaagcgacgcccttcccccggtccaagtcgccttaagaattaaagaagatgtttcacaatttaggcgggctttgcttcccatattggatatgagattgaatgggcgcatgaatgaagatacaaacgtttaccactctagtttcgctgatgataatgggatcacaaaagcttgcagctgtcctttgcttccactgaaaactcatatcaagggcccggcaccagcctctgaccctgataaagcggacattgttgatgaagccataactttctttcgagccaatgttttcttcaaaaatttccatgtgaaaagctcagcagacaagttattgatctatctgacgttttatatcaatattgccttaaaaagactagaaggttgccggacactagctgttgggactaaagcaatcattaatttgggattggagaaagttcctgtacctagggaaccagggtttcctttccctggacttttcactcttccccagtcccaggaggaagcagaattgttgaggaattatttgaagcagataagggaggaaacaagtggaagattgctcaactgtgcatacagagctaatggctttccaaacaagtggtggttggcttttgctaagaggaagttcatgaacattgtcatcctttag

SEQ ID NO: 3316 - DNA, 303 bp, Zea mays
  Peptide Sequence Number=SeqID_45095
atgggggaacttgatatgttttcctctatgagccacttcctcgtcatgaagggaggccaacaagggctacgccttcgtcaacctcatcacgtcagagatggcctactcgctatggggggccaccacactcatcggttggttttcaagggcagtgccaagacctgcgtcgccccctacgtcggcctactatgggactttgtggcgctagacccaactcgtcgaccacagcacaagcccatgacattcggggtttgctgtgtcggccagcagaccgagctccatggcattcagggtagccgttga

SEQ ID NO: 3317 - DNA, 846 bp, Zea mays
  Peptide Sequence Number=SeqID_45096
atgaagtgcacccccgggctcatcagcaaagatgaatggaataacttcctagaacgtattggagttgaatcaaataatgaagtgtcgataaaagggcgcatggatgacatccgtttatgggcatcttaccgtggtcaaacacttgccagaactgtgagaggaatgatgtactatagacgagctcttgaactacaatgctatgaagatatgataaatgaccaaggttatggcctagctgatttggatacagctaaagctgcaaggtccaaggccattgctgatattaaattcacttatgttgtctcctgtcaactttatggcgtgcataagacatccaaggattcccgagaaagaggtctctacgagaatatcttaaacctcatgttgacgtatccagcattgcgcattgcttacatcgatgagaaagaagtacaattacgaaatggtaaaatagagaaacagtattactctgttcttgtgaaaggtgatgatgaggaaatctaccggataaggctccctggtaaaccaacagaagttggagaaggcaagcctaataatcaaaatcatgccataatcttcactagaggagaagcacttcaagcaattgacatgaaccaggataactatctagaggaagcatttaaaatgagaaatctcttggaagagttccttcttacacatggaaagtcagagcccaccatattgggtgttcgggagcatatatttacaggaagtggtcgggacacggaggacatgaacatcaccgacaacgacatgtccgtggacgaagtgaaggttgatctccacgtgcttcgtgcgctggtgctgcacgagattggtggatag

SEQ ID NO: 3318 - DNA, 273 bp, Zea mays
  Peptide Sequence Number=SeqID_45097
atgccgaactgtccgatggtaaatccggactgttcgattgtgtttgcaactattggggcgccacgtggtggtcctggtgcagccctaagctgtccgacagtccactccactttggtggttgcccacgccactgccaaggccaccataggcgctggccgggaccgcgaacgtgttgcggccctcgcctgggagcacgagcgcacagcggctgatgccctcgcttcccagctggctgaggctgagcgacacctcctcggctcctctgtcgcttag

SEQ ID NO: 3319 - DNA, 507 bp, Zea mays
  Peptide Sequence Number=SeqID_45098
atggctagatattaccaagtggtgtatgctctttatgaagtgctacaggatgtaacaaataaaaacattgatgatcaggtgttgcggtgtgcagacatggttgaggaaaatggtcgtcatttcaagaactacaagtacaacattattcccctcaattttcctggttcttccgaggaaattatggaacttccggagataagaggtgccattgatgcaataagtgacatagatggccttccaatgccagacatgtcttctatccaaaggcatgaggataaatctatccaagatctaattgaatatctttcactagcatttggatttcagaaatcaaatgtagaaaatcaaagagaaaatatggttttgcttctcgcaaatattagtacaagaactgctgcccaggaagggcatcctttggttgatacagtgaatgaattgtggaaaaaaatatttggaaattataagtcatggtgttgctatttgcatattacttcaagtatcatgtaa

SEQ ID NO: 3320 - DNA, 822 bp, Zea mays
  Peptide Sequence Number=SeqID_45099
atggccaagggacttgcagcggaagcagcgagtccgcgagcgacagagagcagcagtgtgcgacggcgaaaggcagttgaaacacttgccgacgaggtccgccgggacggcacggcgaggaggacgagccgcacggagacggcggcacctggagccgtgggattccgccctctgccagccgcccggagccggacgcgcggaacagggcgagtagaccgtgcgaccacccctcggacgatcccgccggacgagcgtaatccggggggaaacccggggacaggccggcgaggggcaagcaacaccagcaggagccgccgaagacgaagcgtcagtgccacggccaacagcgcccgaccgcccaccacagaaaccgccgcgcaggacgcgtcagaggaggaaagaacaacatcgcggaaggaacgatggacgccgccagaatcggaggagtccgggctctccgcacaccagcgctccagcttggaacgcccacacgaaacaagccgcgcgacgggggagggaccaacgaggcagaaggggtggccgccgcgcccgggaatcagtcatgatattacagaacataagaagcaacagctgaagcttcttcacattggcttgtatcttcttatctggggtgaggcttctaatgttcggtttatgcctgaatgcttgtgctacatattccaccatatggcaaaacagttgcatgacatggttgatgaaaacaattttcaaccaccacaagcacctgtggaagagggatcatttctgaaaaatgtcattgaacctatctttaaggttctgcaaaaagtagatttggattaa

SEQ ID NO: 3321 - DNA, 528 bp, Zea mays
  Peptide Sequence Number=SeqID_45100
atgccttcgctcgcacctttacccgcgccacacgcggctcagacgtcgcgccttgtgccgctacacgtgccacgcgcggacctgacgcctccgcccgtgtttctatcggcgccacgcacggccccgtcgatagggcctgcgccacgcgaggccctgtctcctccggctacgccatgtgtggccccatcgacgagcgcggctcgcttcgccaatcccgccctcgtctaccactgtcgtgaacgggctacttcctcggtccccgccgactcgcatgcccgttcccgcaccgagcctccagtctaccacccggtcgccatccaccgcgaccccgactacgtccacccgatggtgactcaccgcgcagccggcgttctccgccctgtcaattggctaatattgacggctgatgctcctctaaacgcctcctcagtcccctcctccgttcgcgttgatccccactggcatcgcgctatggaggagtatgtggccctgctggccaaccacacctgtttagggttttggggttag

SEQ ID NO: 3322 - DNA, 108 bp, Zea mays
  Peptide Sequence Number=SeqID_45101
atggtgattgatagcaaggaggcagatccactcaagactatcaaggttgtttcagaatttctgaacgtgttcccgaaagatttaccagtttgtggtggtatttattga

SEQ ID NO: 3323 - DNA, 1020 bp, Zea mays
  Peptide Sequence Number=SeqID_45102
atggagattggccttgagaaaggatttggcagagcattggcagagtttgtaatcatgcaacttcagttagcttctgtattcttcacttttcatcttggaacaaagactcactactatggcaggacgatacttcatggtggagcaaagtatagagctactgggagagggtttgttgtgcgtcatgcaaagttcgctgagaattatcggatgtactcccggagtcactttgtcaaagcactggagctgcttattcttttggttgtctacctagcttatgggagttcatacagaagctcaagtttgtatttgtatgtcacagtttcgatatggttccttgttttctgttggctgtttgcaccttttgtcttcaacccatcctgctttgagtggcacaagactgttgatgactggaatgactggtggaagtggatgggcaatagaggtggtattggattagcgcctgaacaaagttgggaggcttggtgggtgagtgaacatgaccacctgaggaatgcaacaattcgaagcttgctcttggagttcatcctttccctgcggttcttgatctatcagtatggtattgtttaccacttgcacatagtatatgcactgtcatggctggttatagcagttgctcttgtgtcactaaaggttgtttcaatggggagagagaagtttgttacaaggattcaactagtgttccgcatcctcaagggcattgtgttccttgtgctcattggtttgcttgtccttttatttgttggttttgaccttgctgtctcggatgttggcgccagtatcttggcattcattcccactggctggtttattcttctgaggtccctgctgtgccaggttcagacagaggaccggtgctgcgcttcggaagatgggaccatgggactccatccaggagatggcgaggatacacggctgctcttcaaccaggccttcagcagggggctgcagatctctaggatcctcgcggggcagaatggtagcggcacaaagagcgactga

SEQ ID NO: 3324 - DNA, 3477 bp, Zea mays
  Peptide Sequence Number=SeqID_45103
atgtgggtctgccacgactcacgtgcagtcaaagagaaaggtgtaaacgttgggaagtccatacaacttctttctacttttattggtggctttattattgcatttgtaaaaggatggctcttggcccttgttatgctctcaagcattcctccaatcgccatcgctggtgcgattgtgtcaaggctgatgacaagactctccactcgcatgcaagcaaaatatggtgatgctgggaatgttgtcgaacagatgcttggagctattagaacggttgtgtcgttcaatggtgagaagcaggctataagaacatataacaagttcatacgaaaagcatatgaatctgctctacaagaaggtgctgtaaatggacttggactaggttccgtaatggcagtcttgttttgcagctatggcttggccgtttggtatggatctagactgatagttgagcgaggatacaatggtggcatggttatctctgtcataatggctgtcatgattggcgcaatgtccttaggtcaggcaacaccatcagtaacagcttttgctgaaggtcaaggagcagcatatagaatgttcaagacaattgaacggaaaccagatattgatatatatgataccacaggtgtcatattggaggacataaagggtgacattgaactgaaggatgtgtacttcagctatcctactaggtctgaacatttggtatttgatggattctcgctgcaagtaccaaatggcacaactatggccctagtgggggagagtggcagtgggaagtccaccgtgatcagtttggtggagagattctacgacccacgggctggacaagttttgatcgacggagttgacattagaaggatgcaccttggatggataagaggaaaaattggtctcgtcagtcaagaaccagtgttgttctcaactacaatcagggaaaacattgcctatggaatggaaaattcaacacttgaagagatcaagagagcaactgagcttgcaaatgctgctaaattcatcgataagttaccaaatggtcttgacacattggttggggaacgtggaactcaactgtctggaggacagaagcagagaatagcaattgctagagcaatcgtaaagaaccctaggatcttactacttgatgaagcaactagcgcattggatatggaatctgagagggtggttcaagaagctctgaatagggtcatgctagaaaggactacgattatcgttgctcatcgcctaagcacagtgaaaaatgctgatgtgatatctgtcctacaacacgggaaggtggttgaacaaggctcacatgtagaactgatgaagaagatacctgaaggtgcttactctcagctgatacatctacaagagacacgccaaggggcagaattttcaagcgttgaccctgatattgtactaacaaatggtattggctctaggtctattaatagcaaaccaagaagccaaagtatctccaggagatcaactagtaaaggatcttcctcgtttgggcacagtggtaggcactccttccctgctccacttggtctacctgatcctatggaactcaatggatctccagatgtggaagagactgttgacaaaacgagcagagctccaaagaaagctccacttggcagactcttgtatctaaacaaaccagaagctcttgtccttgcacttggttctataactgctgcgatgcatggcgttattttcccaatatatggcacattgatctccaccgcaataaaggtgttctatgagccacctgcagaactactgaaggactcgaggttctgggcaagcatgttcgttgcgttgggtgcttgtgcatttgttctgattccagtagagtatttcctattcggattagctggtgggaagcttgtggagcgcgtacgatcactgacattccaaagtttaatgcgccaagagattagctggtttgatgaacctgaacactcaagtggatcaattggtgcaagactatcaaccgatgccatgaacgttaagcggcttgttggggacaatttagcactcaatgtgcagactttatcaactgtcatatcaggcttcacaatagcaacagttgcaaactggaagctggcactgatcatcactgtggtggttccctttgtgggtttccaaggctatgctcagatgaagttccttaaaggtctcaacagaaacgcgaagctcaagtatgaggaagcaagccaagtggccactgacgcggtcggcggcatcagaaccgtagcgtcgttttctggcgagaagaaagcggtggacgcctacgagaggaaatgtgagtctccgataaagcaagggatcagggaaggtgtcgttggtggcctggggttcgggttctcgttcctggcattctacctcacgtatgctctgtgcttctatgtcggtgccaagttcgttgagcaagggacggcgacgtttcctcaggtgttcagggtcttctttgtattggttctagccaccagtgggatctcgcgaacaagcgcagttggcgcggatagcaccaaggccaatgatgcggccgcgtctgtcttggaaatcctcgatcgaaagtctaagatcgactacagctgcgaggagggcatcaccatcgcaggcgtgagcgtcaggggggagatcgacttccagaacgtgtgcttcaagtatccgctacggccaaatgttcagatcttcaaggatctgtcactaagcattccttctggaaaggtcaacaaatcgaattccacaccagaacaagaaatggaatctgagctgatcttccctgacactgtcgctgtcgctgtcgcttgcttgcagactgttgcactggtcggggagagcggcagcgggaagtccaccgcgatcgcactgctcgaaaggttctacgatccagactcgggtaaggtcctcttcgacggcgtggagctccgagccctcagagtcagctggctccggcagcaggtcgggctggtctcgcaagagccagtgctgttcaacgacaccatccgcgccaacatagcctacgggaagcagggggaggcgtcggaagaggagatcgtcgccgctgccggagcagccaacgcgcaccagttcgtatcggctctgcccgacgggtacagcacccttgtcggcgagagaggcatccagctgtccggtggccagaagcagcgcgtcgccatcgccagggccgtcgtcaaggaccccaaggtgctcctgctggacgaggcgaccagcgcgctggatgccgagtcggagcgggtcgtgcaggaggcgctggaccaggcggtggtcggtaggaccacggtggtggtagcgcatcgcctgtccaccgtcagaggcgcggacgtcatcgctgtcctcaagaacggggcagtcgccgagaaaggcaggcatgaagacctgatgcgggtgaagggtggaacctatgcttcgcttgttgagctaagctctacttcttcgtga

SEQ ID NO: 3325 - DNA, 1245 bp, Zea mays
  Peptide Sequence Number=SeqID_45104
atggcggcgcccaccacctcccgccgcggccccggcggcgcgcgcaacatggacgatgaaaacctcaccttcgagacctccccgggggtcgaggtcgtcagcagcttcgaccagatgggcatcaaggacgacctcctccgcggcatctacggctacggcttcgaaaagccctccgccatccagcagcgcgccgtcctccccatcatcaacggccgcgacgtcatcgcgcaggcccagtccggcaccggcaagacatccatgatctccctcaccgtatgccagatcgtcgacaccgccgtgcgcgaggtgcaggctttgattctctcgcctactagggagcttgcttcccaaacagagagagttatgctggctattggtgaccacctcaacgtccaagtacatgcttgcattggtggaaaaagtatcggtgaggatatcaggaggctcgagaatggggtgcatgttgtctcgggaactccaggcagagtctgtgatatgatcaagaggaggaccttgcgaacaagagccatcaagcttctagttctggatgaagctgatgagatgttgagtagaggttttaaggatcagatttatgatgtctacagatatctcccgccagaacttcaggtggttttgatctctgcaactcttcctcatgagatcttggagatgactagcaagttcatgacggaaccagttagaatccttgtaaagcgtgatgagctgaccctggagaaagaggaatggaagtttgatactctttgtgatctttatgatacactcaccatcacacaagctgttattttctgcaatactaagagaaaggtggattggcttactgaaaaaatgcgcagcaataacttcacagtatcggctatgcacggtgacatgccccaacaagaaagggatgccattatgggcgagttcaggtccggcgcaactcgtgtgctaataactacggatgtttgggctcgaggactggacgtccagcaggcgagtattcgtacaattttttttgtatttgtatcgtcctttgcactgctggtttcacttgtcataaattatgatctcccaaataatcgagagctttacatccatcgcattggtcgctctggtcgttttggacgcaagggtgtggcgatcaatttcgtgcgcaaggatgacatccgtatcctgagagatatagagcagtactacagcacgcaaattgatgagatgccaatgaatgttgctgatcttatttga

SEQ ID NO: 3326 - DNA, 2616 bp, Zea mays
  Peptide Sequence Number=SeqID_45105
atggcgccgccgcatgcatgctctgcgccgccggtgttcggcgtcggttttggcccctccacgtcctactctctcctctaccttccccgacgatgccgacgccttcccgtcccccgagcctcctccagctttgcccccaagcgctcggcgccggtccccaccaccaccctcccgcccgaggccccctccacctccgccgctgtcgaggcgccggcgcccttctcggtcacggccccggggacctaccggggaggggaggacccgctcgtctccaagctccgcacccagctcggcgtcatccacccgctcccggcgccccccatcagccgctccgtcgtcggcctcttcgccctcttcttcttcgtcggcgccgccttcgacaagctctggacgctgcggaagcgccgtcgcgccgagcgcgagctcaaggtcaacggctcctggccgcaggtgcccaccccgagcttctccctcttcctcgagaaggacctgcagcgcaaggagtccgtcgagtgggtcaacatggtgctcggcaagctctggaaggtctaccgcaccggcatcgagaactggatcgtcggcctgctccagcccgtcatcgacaacctccacaagcccgattacgtcaacagggtcgaaatcaggcagttctacctcggcgaggagcccctctccgtcaggaacgtcgagcgccgcacctcaaggcgggccaacgacctgcagtaccagattggcatccgctatgccggtggagcacgcatggcattggcactctacttgaagttcaccaaagtaccggtcgtcgtgccggtctgggttcgagattttgatatcgatggggagttgtgggttaaactaaggctcataccaacagaaccgtgggtgggagccgtatcttgggcttttgtgtcccttcccaaggttaagtttgagctttcgctgttccggctattcaatcttatgggcaagacagatccttatgttgtcatgattattgatgatcaagtaataaagagcaagaagaacagtcaaacaactgtgattggactaccgggagaaccaatttggaatcaaaagttgaccattcaagtgaaggattcaattggtctaactgacatcactattggcaccggagaggtggagctagggtcacttaaagatacagtacctacggacaaaatcgtgactctatatggaggatggggtttgtttgggaagcgagaggctggggaagttctacttcggctgacatacaaggcatatgtcgaggatgaagaggaagaagacgaggcggtgagaagcgagattggtgcgggttacgcctcagacgaggatgtgctggactacgttagtggcatgagcaaggggactgatttcgtgggtaaagaaagggaaactttcatggatcttctcgccgcgctgctggtgagcgaggagttccaaggcatagtgtcatccgaaacaggaagctcgtcaagagaaggtgagcaggcaggcagtggaccagaaggcacagacagcgtcactgtccctactagcgctgcggcggctgatacggaggcatccaccgtgccaaacagctccacagatacggctctggtgtggctggcggccataacgagtgtgatggtgctggtgtcctccaacctcggtggctcaggctacttcaacccgaacatcctcgagatcgacgcggagaggatggtcgccagggtggagcctctcgtcagcatggcccagataaccaaggctacctgccccatgaacctctcgctcgccgtggctcctgagttggacgaccttaccgtcggtggtctgataaacggctacgggatttcggggagctctcacgtctacggcctcttctctgacacggttgtctccatggaggtcgttcttgcggatgggcaggtcgtgagagccaccatggacaacgagcactccgacctcttctatggcatgccatggtcgcaaggcacgatcgggctcctggtttcggctgagatcaggctcgttcgtgtgaaggagtacatgaggctcacgtacactcctgtcaggggcaccctcaaggagatcgcggaggcttatgctgattcgttgttcctgccggcaaaggtccctgactttgtggaagggatggtgtactcgtcctcggagggcgtgatgatgacgggcgtgtatgcctcggaacaggaggcgaggaggacgaagggcagcggcaggatcatcaaccgtgtgggctggtggttcaagccctggttctaccagcacgccgagacggctctcgagaggggcgagttcgtggagtacatccccacgagggagtactaccatcgccacaccaggtccctgtactgggaagggaagctgatcatcccgttcggcgaccagctctggttcaggctcctgctcggctggctcatgccgccaaagatctccttgctcaagatcacccaaggcgaagccatcaggaactactaccatgacaggcacgtcatccaggagacgtgctgctgccccttcacaggctcagcgacgcgctggagtttgctcaccgtgagctggaggtctacccagtgtggctgtgcccgcatcgcctgttcaagctccccgtga

SEQ ID NO: 3327 - DNA, 1650 bp, Zea mays
  Peptide Sequence Number=SeqID_45106
atgcacgaggaggagaagcgtcccaggggcggtgtgacgcgtctccagttcttcgtcatcgtcgtcatctgcagcttcgcctactacctcatcccgagctacctgttcccgtcgctgagcaccgtgtcggtgctgtgctggctgtacagggactcggtgacggcgcagcagatcgggtcgggcctgcggggcctcggcatcggctccttcggcctggactggaacacggtggccggcttcctcggcaacccgctggtgtcgccggcgttcaccgtcgtcaacgtcatggccgggttcgcgctcaccacctacgtcgcgctgccgctgctctactggacggacacctacaacgccaggcgcttcccgctcatctcgccgcacgtctacgacgacgccggaaggccctacgacactggccgcgtcctcaaccgcgacaccttcacgctcaacctcgtcggctacgacgcctacagccgcatcaacgtcagcgtgctcttcgctgtcaactacggcatcggcttcgccagcctcatgtccacgctctcgcacgtcgcgctctaccacggaagggaggtctgggacggcctctgccggaagcggcagcaccagaagacagatgtcgacgacgtgcacacgaggatcatgaggcggaactacaagcccgtgccgcagtggtggttccacctcatgctcgccgtcgtgctcgcgctctcgctcttcacctgcgagggcttcggccagcagctgcagctcccctactggggcctcctccttgcctgcgccatcgccttcgccttcaccctccccgtcggtgtcatcttcgccaccaccaacatgcagccggggctcaacatcgtcaccgagctcatcatcggctacctctacccggggaagccgctggccaacgtggtgttcaagacgtacggcttcatcagcatgggccaggcgctggcgttcctggccgacttgaagctgggccactacatgaagatacccccgaggtccatgttcttcgcgcagctcgccggaacgctcacggcgtccacggtgcacttcgccaccgcgtggtggctgctcaccacggtcaaggacatctgcgacgtgggcaggctccccgccggcagcccctggacgtgccccggcgacgacgtcttctacaacgcctccatcatctggggcgtcgtcggcccgctgcggatgttcggcagcctcggtaactactggcagatgaactacttgttcctcgtcggcctgctggcgccgctgcccgtgtggctgctccagcgtgcgtacccgaccaaccgcgtgctcgccggcgtcaacctgccgctcgtcttcgctggcgccagcgggctgctccccgcgcgcagcgtgaacttcatcatgtgggggctcctcggattcatcttcaaccacgtcgtgtaccgccgctacaaggcctggtggatgcgacacaactacgtgctcgccgccggactcgacgccggcgtcgcgttcatgggcgtcctcaccttcgtcgcgctgggttacttcgacgtctacgggccgcagtggtggggcagcgtcgccgacgaccgctgcgacctggccgcttgtccgacggcgccaggagtcgtcgctaagggatgcccagtggtggcggcagagtga

SEQ ID NO: 3328 - DNA, 153 bp, Zea mays
  Peptide Sequence Number=SeqID_45107
atgggcaccgctgtgggggcctgcgtcgccgtcctctgccagttgttatttattgttcatgttaagatcattatgttaattggaacatggagaaccacccgggaaaacagtgctaccacaagggtttatggatgcccttggctgattaactag

SEQ ID NO: 3329 - DNA, 600 bp, Zea mays
  Peptide Sequence Number=SeqID_45108
atgaccgcgtcaaaaaaggtgcgccacgtcgttcgatttcgtatcctttcccttttcctctttctctctcttacaacagggaccgggaaaggggataccccgaaagggatccttctccgcgaaggaaacgggccccgagcccccctactgatcagaggttcgaaggctggcccctcggaagggttcaacagccgcctcagagcactcgggctccgcgcccactactggtcagaggttcgaagactggcccctcggaagggttcaacggccgcctcaggctactcgggctccgcgcccactactgatcaggggttcgtaggctggcccccgaagggttcgacagccgccttagacgcagagcgagggatgaccctggtcaaggctcggtccactcaagggacacgatctcgcctcgcccgagcccagcctcgggcaagggtagccgaccccgaaggattcacgcctcgcccgaggaccccctcaagcaacggacacaccttcggctcgcccgaggcccagtcttcaccaagaagcaaccttggccaggtcgccacaccaactgaccgtattgcagaagcatttaatgcaaagatggcctga

SEQ ID NO: 3330 - DNA, 678 bp, Zea mays
  Peptide Sequence Number=SeqID_45109
atggcgaaggccgggaagacgaatgggacgtccgacaacggcaaaaacgatggtgtgcacatgggcgtgggttcggtcgcgcgtgctgtgcctaggtcagagctgcggcccgcacgtgctaggctgtcgtttggccatctatatgcggagccgacggcaatagaagtagagaactccgacttcttcactcacacacacatggcgctgatgagccttggcgccgccgggtacaccacggccaccgcgccgcctcgtccccgaagatgtaccctgccgtttcgcgccgccgcctcccctgcggcactggaccgccggcgacggccgcataatgtggctggcgacttcttcgtcgaccaccgctgcatcgactgccagacctgccgatggatggcgccggaggtgttcaagagggtggatggcaaggccgccgtagcggcgcagcccagctccgaggaggagaggaccaaggccctgcaggcgctgctatcctgtccaacatcctcaattcacactgagaaacctccaaaagacattcttaaagtgcaaaacatgtttcctctaccaatcgacgacaagctactcccaggtgtttatctctgtgggtataattctgaagactcatatggggcaacatcgtacctgcccaaggtatactccaaagctggccaacaatattga

SEQ ID NO: 3331 - DNA, 168 bp, Zea mays
  Peptide Sequence Number=SeqID_45110
atgacgtttcacatcatgcgcgcaccattgtttttgcggtcgtcggacgtcccgttcgtcttctcggccttcgccccattcttcctccccaacctgctatctccgcccacggtcgtagtcacgagccgaccgacgctcgtcgacgcgggcacaggacacagcctgtaa

SEQ ID NO: 3332 - DNA, 390 bp, Zea mays
  Peptide Sequence Number=SeqID_45111
atggcgaccggcggcggcaacgagcagccgccagcggaggccgagccgctggagctcgtgctgttccaggtcgccgagtgctacgtctacctgataccaccgaggaaaacgtctgcctcctacagggcggatgagtggaacgtcaacaaatgggcatgggaaggggcgcttaaggttgtcagcaagggagaggaatgcatcattaaactggaagataaaaaaacaggggagctttatgctagggcatttctcagagagggtgaaccacatccggtggaacctgtaattgacagtagcagatattttgtactacgtgttgaagagaatataggtgatgactgtctttctatcgttttctcgaacgcagagagagctgtgccatttcattaa

SEQ ID NO: 3333 - DNA, 372 bp, Zea mays
  Peptide Sequence Number=SeqID_45112
atgtcctctgagcttcacaagcaatatgagtatgcgaatgcccacgtggtcacatggtctaaagcctggtcccgatcgtggtcgttctcacatgggctacgatgtcgttgtgtatggaagaatagcaagaagtggaaacacttcatgaagggcaagggcaagctcgtgccacgctatgtcagccccttccaggtgctggagcgtgttgagtggtggtgtgacctgccctgcaacggcaccatttgggagtcgcttcaacaattcaaggacctttacctcgacatccaactcgagtacgagatgtttaaagaggcagggaaagatgttatgaccaacatcacctataggggtcggggttgtgctagtggctag

SEQ ID NO: 3334 - DNA, 711 bp, Zea mays
  Peptide Sequence Number=SeqID_45113
atgccagatcttagtttatttggcaagtgtgttttaacatatttaaacaagaagaaggcggctgaagagatgattcagcattatgagaagcaatcttcagtggattacagcctcaaagaaggggagacattggttcttcagcttaaaaataaggaaacaggcaccaagacaaaatcgacattttttgagcaaggcctaaacaagctctccgttaacgaaaagacaagcgccaaggaggcccccgtctcccttaaactcccaccaccaccaccttcgcctgtctcaccgacggattctggagtcgctgcctcgcctttcaaagcagaatttccttcccaagagcaaccacctgctgaacccgtcagcagaaccagcgctctcccctccaaaggcgaacctgctccagagctaccggctgctgcagagaagatgaaggagcaagaatccgtggatgaagacttcggggacttccaggctgccggagatagtattttcagtgagcaacaaaatggaaccaacttcaaaggttgtgaggtcctcgattggttgagcgattacaagaactgttgctgcaatgatcgccaatatgttgccaccaccgtgatctcggcgttggtgctccttctcaaccacccaccgctcctcaccccgtccccgttggcaaccaacccgctcgggatgcgcccgccgcggatcagtcgcagcaactag

SEQ ID NO: 3335 - DNA, 546 bp, Zea mays
  Peptide Sequence Number=SeqID_45114
atggctgaacagcaccgcgctctgtgctgcacgacggtcctggaaccgatagcctctccagccgtctttgtcgttgttcgccactttggtttgggcacccaccgtcgtcatgggagcgtgtgctctgctcctgctgcccgccgccccgtagacattgtctgtgactccaaccgtgttaccatcggtcccatatctttctatcaagttgaagatcttccacaactattccttcggtcatcaattgttttcataggttgtgctttgtttggattcacgtgccggtacgctgttagaagagatctggataatatccaactagaaactgggcctcctgcaacgtttgcttttgttagagtccttgctctgctagaatctggtagaaccctcgtgctgagtattgataccttaatatcagttatatcagttactcttgatgctgcagtcagtgtggttgagaacattctcatatttctgcccgctgctgttgcactggactactgttttaagatgagatttttgagtccctttcctagaagaaaacaataa

SEQ ID NO: 3336 - DNA, 1896 bp, Zea mays
  Peptide Sequence Number=SeqID_45115
atggaggaggcgacggtgatgtcgcagctgggccgcagcaaggacagcggcggcggccgccggaggcagcggtaccgcatcgagaccagggcgctgtcctacgtgctcccgccgcgcgcgcttctcgtcccgtggtcgtccgccaccaaggggaaggaggagaggctgctgctgcgcggcgtcacctgcgaggcgccgccgggggagctgctggcggtcgtggggcccagcggggcgggcaagaccacgctgctctcggtgctggccggctcggcggacccggcgcgggtggtggccggggaggtgctggtgaacggggtgcccatggacgccgccgggttccgccgcgtgtccggctacgtgccgcaggacgacgcgctgttcccggcgctcaccgtcgaggagtcgctcgtgtacagcgcgcgcctgcgcctgcgcctgcgcggcgggggcgggggcgggacgccgtccggcgcggagcaccgggcgcgggagctcatggcggagctcggcctcgcccacgtcgccgcgtccagggtcgccgacgtgtccggcggcgagcggaggcgggtgtccatcgggatggacctcgtgcacgacccggccgtgctgctgctggacgagcccacgtcggggctcgactccggctccgcgctccacatcgtcaagatgctcagggacatggccgccgcgcacgccaagaccgtcgtgctcaccatccaccagccggggttccgcatcctcgagctcatcgaccgcgtcgtgctcctcgccgacggagccgtccgccaccacggctccctcgacttcctccagtcgcgcctcatcgccaccggccacgccatccccgcccacgtcaacgtgctcgagtacgccatggagaccatcgactccctcaagcccgacgtcgccgtagccacggcggtcaccacgatcaccgccgccactccagcgaaccgacaagacgggccgcgcgcggggtacgccaactcgccggcggcggaggtgcgcatcctggcggggcggttcgtgaagacggtgctgcggacgccgcagctgttcgcggcgcggatggcgcagtcggtgctggtcggcgcgttcctcggcagcatcttcctgggcaccaccgacctgcagtcccgcctcggcttcttcgccttcaacctcacctacctgctcacctccaccaccgaggccctgcccgtgttcctccacgagcgccgcatcctggagcgggagacctcccgcggcgcctaccgcgtgtcctcgtacgtcgcctccaacgccgccgtcttcctgccgttcctcctcgccgcggcggtgctgtacgcggcgcccgtgtactggctcgtgggcctggcgcgcgagcccgccgccttcgcctacttcgcgctcgtcgtctggctcgtcatgctcaccgccaactccttcgtcgcctgcctcagcgcgctggcgcccaactacatcgtggggaactccatcgtcgcggggctcatcggctgcttcttcctcttctccggatacttcgtggcgagcaagaacatcccgcgctactgggtgttcatgcactacgccagcctgttcaagtacccgttcgaggccctggtggtgaacgagtacggcggcgcgcgcggagccagggagtgcctcgcctcggccggcggcgcggggggactgtgcgtgctcgacggcgcggggctgctgcggcagcaggggatgagggagggcatgcggtggagcaacctgggcgtcatgctcggcttcgtggtcgggtacagggtgctctgcttcgtcatcctctccttcaggtgccaccgcacggggagggaaagtgtcacattcgtgttggatttgatctttggtagccctcgccaatgtgggaaagagggtagttga

SEQ ID NO: 3337 - DNA, 231 bp, Zea mays
  Peptide Sequence Number=SeqID_45116
atggcgaccggcggcggcaacgagcagccgccagcggaggccgagccgctggagctcgtgatgttccaggtcaccgagtgctacgtctacctgataccaccgaggaaaacggttgcctcctacagggagaaatttgatattacgaaacacgacgggtgcgacttcgacaaaatagaggctcaggcgagggtttctccgttatggaaaagttgggcagggccaacactctaa

SEQ ID NO: 3338 - DNA, 2184 bp, Zea mays
  Peptide Sequence Number=SeqID_45117
atgggggctctgttgccaacttgccattctattgatacagatcgattaggacaagccaagtttatcagtcagtcgttgtcttgttactgtgcgcacttttttaacccaaacatgttgtatgataggattcatccaaatggatgcgcacatgacaggatatgctctggggatgtttttggaatttgcattattcatttgtactgctccgggcgttgcttttccacgatgcttttactagctattgaactcccagtgttggtacaatcactgggtcttttcaaggtgtcagcatttcgggaaagtaagtcagatgacaggagattttacatattttcccccactaagacgcttcacttgaagacaaactcaaaagttgaccgtgttgcctggattgaggctttgatcctggcaaggagtgtttattctcttgggtcacttagcgggagagcaacttttgtgcagagtgatgtttcaatttcaactgcaaggcttagagatcgaatgcatcaggagggtttgaatgagagtcttatacaggactgtgaacaaattgtgctttccgagttctcaagctaccggaagcaactgaagtgtcgttacgaggattacttaagcttgtttgggtcctgcagacataattttgaggaaggtaaagatggaagtataacacaggggacattgacacgaaatgacttctctagttctaggcatggaaattttagcgaatatagcacaacagaatctgatgagcatgagtttgagaaacacgatggaggcgaattgatttgtgaagatgaatctgcattctttgattctatagattacttcacagagtcagacaacaggtcttcaaccatgttaagtggcaaggaagtagtggattcccaaacacatgattccagtaataatatacaagcacaaatcagacgacggagtaggctgcctgaccctattgagaaagagaaagggatcagtctctggtccattattaaagatagcgttggaaaggatttgacacgagtttgtcttccagtttacttcaatgaaccactctcatcccttcagaagtgctttgaggatttggagtattcatacctcttggatcaggcatatcaacatggaaaagtgtatactctgctagtaagcatggcagtttactcatccttagaaaatgaaaggtgttttcagagtattatagttgtatctgtaagttttgttcagggggacagcctcatgagaatcctcaaagtagctgcttttgcggcctctggctatgcttcatctgttgcaaggccttgcaaaccattcaatccattgctaggagagacctatgaagctgattaccctgacagaggaattcgtttttttgcagaaaaggttagtcatcatccaatgctgattgcctgccactgtgaaggcaagggctggaaattctggggcgacagcaatctcaaatccaagttttggggacagtcaattcaagttgaaccagttggcattttgactctagaatttgaggatggtgaaatcttccaatggaataaggttacaacaaccattcacaatctcattcttgggaagttgtactgcagccaccatggaacaatgcatataaaagggaatcgccaatattcatgtaaactgaagttcaaagagccatcacttcttgaccggaatccccatctagtacaaggctttgtagaggacaacaatgggaacaaagcttcgtttttgatagggatgtgggacgaaagcatatattgtagtaactctgatacttccaaggtgaagagcgccgatcaactgaaaggtgcctcgctgctgtgggaaaagaacaaacctgctcctaacccaactcgatacaatttatcttcattcgcgatcacactgaatgagttgaccccagggctgcaggagaaacttccacctactgattcacggctgagaccagaccagcgccacctagagaatggtgaatacgagaaagcgaatgcagagaagctgaggttggaacgacggcaaagaatgtctactaaacttcaagacaatggctggaaatcccggtggttcgagcaagacaccgaggacgggacgtattgctacaaaggtggatactgggaaacaagagagaggggcttctgggatgggtgcctcgacatttttggggagttcgtggagacataa

SEQ ID NO: 3339 - DNA, 432 bp, Zea mays
  Peptide Sequence Number=SeqID_45118
atgagacggcggaggatctcctctgcaaacacgcacagtgggatgggtaggaacttacctcgcgcggcggcggacggtgatttgggcttgggagtcgctcatctcgcccgacagccgcctcccctctccttcctttctccttcctcccacgcaaccggtgctgtggggcggggcgcggtgatttgggcttgggggcggagggagagccggagagggagggagcaccgcccaggccagaggatgatggtgttggacgagttgccatggatagaggagcgtgggttgcagctgcgagggacgcggggaggggagggcggtcgagcaaacgaacggtgcagcgggcgcgagggtgatgctcgacgaacggacggcttagattggctgaaggcagaacgcaaggggcagcctaccccttgcagccttaataggtag

SEQ ID NO: 3340 - DNA, 315 bp, Zea mays
  Peptide Sequence Number=SeqID_45119
atgggtccgggtccgggagctttgcagtgttccacgggggtgctcgtcactcctcctggcgccaatggtggccggatctcagcgaatttctcaccgaagaactcgactcgcctcagggccacgccgcgtcgaagcatgtatgtcactgggtcattccatggtacgaaatcctccatgcagtttgctttcttctcctctctgcatagcacatgggggattctcgagtggggcactggttgggccggaacacatcgagtcggcgggcgccaccaggggaaactcgcgctctggcgtcccggcaccgttgggaggtag

SEQ ID NO: 3341 - DNA, 516 bp, Zea mays
  Peptide Sequence Number=SeqID_45120
atggtgcgggtccccctctgctccgttttccaattagtgaaccagataggagtcttcttcctccccgaccacaccgctcctctccttccaagccctcgtcaccaccagcctgctctcattcctgtgccacctggatctcaactgcttgcgctcaacatgctccccacacactctcgctgcggcgtgtgcccgcccaacccgtgcatcgctctctgtcgcttccgcctcatcataggtgatggcgtcgtcgtccccgcagcagcacacgaggtcggctcgtcctcgaacctcgcgcaatttaggaatagcggcggatccttcccaggaaaactgggaaggtggcagcaacttttgatagacaaccttgttggatatgatactatacctacaaacagcttggtgatttctcctggtcatggttatttatacaactttgagatgaaggagctaaatggtcttagttatggccatgaaacaccagaaggtcctacaaaatttggaggttggtatagctaa

SEQ ID NO: 3342 - DNA, 309 bp, Zea mays
  Peptide Sequence Number=SeqID_45121
atggcggccccgcaaccaatgggaagtaatttatcacgcaatctaaacaagaaaaaaacaaaggaagcgaagcgtggcattgacatacagatattaccagggttccatgggcaaagagtcgattcagcctaccagacacaacaacaaaagagtttaaagaaacgaacgaactctcatgttgtcctaggagagtctcagggcctctttgggaaggctcccaaatgctctggctccggctttttatgctgctcggactctgaccacggagccaccttcccacggctcctgagagagagcccttcgctgtga

SEQ ID NO: 3343 - DNA, 2559 bp, Zea mays
  Peptide Sequence Number=SeqID_45122
atgagggcgtgcgcgctccccctcgtcctcctcgccaccgccgcgttcttcccactctccacctccaccgacaccctcggcacgtccgcctccatcgccggcaataaccagacgctcgtctcggccggcgacgtcttccagctcggcttcttcagcccggatggcgccaggacgtacctcgggatttggtactacaacatcacggtgcgcaccatcgtgtgggtcgccaaccgccagagcccggtcctcagctctccagccgtcctccggctctccggcgccgacggccgcctcctcgtcctcgacggccagaacggcacggtgtgggcctcggcggcgccgaccaggaacgtgaccgccggcgccaccgcgcggctgctggacagcggcaacctcgtgctcagctcggacgggagcggctccgaccagagcgtggcgtggcagagcttcgactacccgacggacacgctgctcccgggcatgaagctcggggtggacgccagggccggcatcacccggaacatcacggcgtggcgcagcgcgtccgacccgtcgccgggcgacgtcaccttcaagctgatcaccggcgggctgccgcagttcttcctcctccggggcaaggcgaggctgtacacgagcgggccgtggaacggcgagatcctcaccggcgtgccgtacctcagctcgaacgacttcaccttcagggtcgtgtggagccccgacgagacgtactacacctactccatcggcgtcgacgcgctgctgtcgcggctcgtcgtggacgaggcggcggggcaggtgcagcgcttcgtgatgctcaacggcgggtggagcaacttctggtactaccccaccgacccgtgcgacacctacgccaagtgcgggccgttcgggtactgcgacggcaccggccagtccccggcctgcttctgcctcccggggttcgagccacggtccccgcagcagtggaacctccgcgacgggtcggccggctgcgtgaggaggaccagcctcggctgcggcggcggcgccaacgccagcagcgacgggttctgggtcgtcgaccagatgaagctgccggaggccaccaacgcgacggtgtacgccggcctgacgctggagcagtgcaggcaggcgtgcctcagcaactgcagctgccgggcgtacgcggcggcgaacgtcagcgggggtgtcgaccgcggctgcgtcatctgggccgtcgatctgctggacatgcggctctacaccacggacgttgaggacgtgtacatacggctcgcgcagtcggagatagacgcgctcaacgccgcagcaaaccgccgggccccgagcaagcgcgtggtggtgatcgctgtcgtggcgacagttaccggcgtgctccttcttctgctgtcggccggctgctgctgcgtctggaggagaaagaggagggagcgccacggcgagacggatccctgcccggcgccgccgagcggcggcggagacgacgcgctcccgttcagggcaaggaagcagcaggcgctggacgaggactggaggagcgccgagaaagacgttgacctgccgttgttcgatctggcggcggtcctggcagctacgggcagcttctccgcgagcaacaagatcggcgaaggcgggtttggtcctgtctacatgggaaagctggaggatgggcaggaagtagccgtcaagaggctgtcccggaggtcgatgcagggggcggtggagttcaagaacgaggtgaagctgatcgccaagctccagcaccggaacctcgtcaggctgctcggctgctgcatagacgaggacgagaggatgctcctgtacgagtacatgcacaaccagagcctcgacacgttcatattcgatgaaggcaagcggaggctgctagggtggcagaaacgcttcgatatcattctgggggtcgcgcggggtctgcagtacctgcacgaggattcgaggttcaggatcgtccacagggatctcaaggcgagcaacgtgttgctggacacgaacatggtccccaaaatttcggacttcggcatcgcaaggatgttcggaggtgaccagaccacggcatacacactgaaggtcattgggacatacggctacatgtccccggagtatgcgatggacggcgtgttttccatgaagtccgacgtctacagcttcggcgtgctggttctagagatcatcaccggcaagagaaaccgaggcttctacgaagaagagctcgacctcaacctcctccgatatgcatggatgatgtggaaagaaggcagaggcgctgatctgctggacccggtcatggacggcggcggcagcgtcaaccacagcgaggtgctgcggtgcgtccaggtcgccctgctgtgcgtcgaagtgctgcccaggaacaggcccctcatgtcgtcggcggtcatgatgctggccagcgagaacgcgacggtcgccgagccgaacgagcccggggtcaacgtcgggaagaacacgtcggacacggagtcgtctcacggcttcacggccaacagcgtcaccataaccgccattgacgctaggtag

SEQ ID NO: 3344 - DNA, 2511 bp, Zea mays
  Peptide Sequence Number=SeqID_45123
atggcgtccccactgctctgcggctgcgccctcctcctctacctacttggccacctcgcgacctgccacgccgccagggacaccatcacgccgagcagcccgctggcggccaacgagacgctggtctcgggcggcgacggcaacttcgcgctgggcttcttcaccccgccgggcgccaacagcacgtacctcggcgtgtggtacaacaaggtctccctccgcactgtggtgtgggtggccaaccgcgaggccccgatcgcgggcgccgtcggggacaacccgggcgccacgctgtcggtctccggcggcggcacgctggccattgccgcggggaacgggaccgtggtgtggtccgtccggagcgcgtccagcaggcggctggcgagcccggccgcccagatcctcgacaacggcaacctggtgctgaaagacggtgccggcggcggcggcgccgtggcgtgggaggggttcgactacccgacggacacgctgctcccggagatgaagctggggatcgactacgtgaaggggaagaaccggacgctgacgtcgtggaagagcccgtcggacccgtccacgggccccgtcgccatggtgatggacaccacgggcgacccgcaggtgttcatctggaacggcggcgagaaggtctggcgctccggcccctgggacggcgtccagttcaccggcgtgcccgacaccgccacctactccggcttcaccttcagcttcataaacagcgcgcaggaagtaacgtacagcttccaggtgcataacgcgtcgatcatctcgcatctgggcgtcgtgagctcgggcaactacggcctgctgcagcgttcgacgtgggtggaggcggcgcgggcgtggaacctgtactggtacgctcccaaggaccagtgcgacgcggtgtcgccgtgcggcgccaacggcgtgtgcgacaccaacaacatgccggtgtgctcctgcctgcgcggcttcacacccaggacccccgcggcgtgggcgctgcgggacgggcgcgacggctgcgtgcggtcgacgccgctggactgccgccgtaacggcaccaccagcaccaccgacgggttcgtcgcggtgcggcacgccaaggtgcccgacacggagcgcagcgcggtggactggagcctgacgctggagcagtgccggcaggcgtgcctccgcaactgctcctgcacggcgtacgcgagcgccaacgtcagcagcggcggcggcgggcgcggcggcggcgccggcggagggtcgggctgcgtcatgtggaccacgggactcaccgacctgcgcgtgtaccccgacttcgggcaggacctcttcgtccgcctcgccgcctctgatctcgatgtgctggaaggcagatcaagggcggcacgcattagaatcgcggttggtgtcagcgtctcgctgctggcgcttcttctagcggttgctggcctcctcatctgcaccggccgtcggtacgaggggagcagccatggtgacgatctggagctgccaatatttgatctgggcacaattgcagccgctacggatggtttctccatcaacaacaagcttggcgagggtggctttggaccagtatacaagggtaaactcgaggatggaatggagatcgcagtgaaaacactctcgaagacatccgcacaaggtcttgacgagttcaagaacgaggttttgctgatagccaagctccagcaccggaatcttgttcgccttctcggatgcagcattagcggacaggaaaggatgcttgtttacgagtacatggcaaacaagagcctggacttcttcctgtttgagaaagacactgtggtgcttgactggcaagtgcggtatcgtataatagaaggcatcactcgaggtttactctacctccaccaggactcgaggtacagaatcatccatagagatctgaaggcggccaatgttctcctagacaaggagatgactcccaagatttcagactttggcatggcaagaatatttggcaacgaagagacggaaattaacaccttaaaagtggttggcacatatggttacatgtctccggagtacgcaatggatgggatcttctctgtcaagtcggacgtgttcagctatggagtactattgctggagatcgttagtggcaggaggaacaggggagtgtattccagttcaaacaaccaaagccttctaggccatgcatggagcttgtggaacgaggagaagagcatagagctagcagatgagagaatgaacggacaattcaactcagacgaagtgcagaagtgcgtcagggttgggctactgtgcgtgcaagagaatccagacgaccgtccgctgatgtctcaggtgcttctgatgttagctagtcctgatgccgcatcactgccgactcctaagcaacctggcttcgcagctaggagagttctaatggaaacagacacatcatcgaccaagcccgactgcagcgtgtttgacagtgcgacaaccatcatgcttgaaggtcgatag

SEQ ID NO: 3345 - DNA, 519 bp, Zea mays
  Peptide Sequence Number=SeqID_45124
atgggtggctcaggtgccgccacccagggcggtggcaagaagaagaagaaccacggacatgataggccgcaatctggtgctacggtcgccgcagctgcggctggggtccggaacgagtgtggcaagcacccacggcaacagagaagtagtagtgggtcatgccctgtctatcccaacagtcgccacaacacctcggaatgccgagagatcctcaagctcgcgaagcgcatcagtgagcggcgtgagcaggcctccaagtatggctcgccgcctcgtcgtcggcctggtgaaagggaaatgagaaatcaatttggagatgacttggctcgttcagccaaagtctgctcagtctgggtgcaccggactgtccggtggtgcaccggacagtgtccggtgcgccaggctggttctggcgaacttgctgctctcgggacttcgacggcggtgtacggctataaatcaccggactgtccggtgagccattcacaggcgaagtcgtcgctctcgggaagtgattaa

SEQ ID NO: 3346 - DNA, 378 bp, Zea mays
  Peptide Sequence Number=SeqID_45125
atgtgcccgttctacatagtatccggagcatcgtcgcatcacgatcacatcgccatgtcacgctcaaagaactgtcgtcatcgttcgcagcaccacctggtcgagctccaccccgagtcgccggtgcgggaccacgaccgcaactgcgttgttgtgtcgtgtccctccgaccaactgctggtgcccgaagttctccccatccttgtgccaccactggccatggtcgtcgtgcccagcattgcacatgagcgggaggtggacgaaagccccgacatccagggcccacctacaatctctccaccccctcatgtacacgtgcatggagccgctgtctggtggaccccaccggcagaaaagccaccccttcacacacactag

SEQ ID NO: 3347 - DNA, 174 bp, Zea mays
  Peptide Sequence Number=SeqID_45126
atggagactgatggagtggccaccgtgcggccggtggcagtggagctgctggcagctgccagcgcgagatgcacgggggcagcagcaccggtgctcccagttggcaaggggcaacaacgtcgcttgggccaggcgaggtgccaggtgtcgctagtccagtgcccgtccacgtag

SEQ ID NO: 3348 - DNA, 1389 bp, Zea mays
  Peptide Sequence Number=SeqID_45127
atgaagtccttcagctttctcaagtacctgtgcggcggtatggtcgctggcgcccatcgcatacccatctcgcgcgctgatgctggactacggaagcagaagggcacttcagcgccggtgtacgcggccggtgccagcaccgcgtccgcgttagtggctacttcagcgccggtggacgcggctggtgcccgcaccgcgttagtggcgaggcagcagcgagcagccaacgggacgggagagccggttcctagcggaggaaaggcggcagtgcacaacgacagagacgaagactttggaatcgtccttgaatacaagtacgggtacccgaacttatacccaaacctaaacctgaatttgcgggtacctgaaattgcgggcggggcccacggcgcagcggcactgggtgtggatgtgggcacacgcgggcgcgtgcaggccgtggctggatcgggccgaaaggccaagggcgagaaggttgcaagggaattctcgtaccaggagctgtctgcagcgaccagcaacttcttcaaggacaggaagctcggcgcgggccagttcggggaggtgtacagaggtgagctgccggaccctctcatgccgccggtggcggtgaagaggctgacgaggcagatggaggcgcggacccggaaggactacgtgaccgagatcatgaccttgggccggctcagccaccggaacctagtgaagctcgtcggctggtgtcaaggcggcaatgagctgctgctcgtgtacgagctggtaacgaacaggagcctcgacgagcacctccacaggtcagagcgcctgctggcgtggcctgagaggtacaggatagtgctcggcataggctccgccatagagtacctccacaccggcgaccagaaccccatcctgcaccgcgacatcaagcccagcaacgtgatgctggacgatgacttcgaggccaagctcggcgacttcgggctcgtgaggcagatccatccaggacatggctcttccctcgagggcaccgtcatgatcgggactagggcgtacatggatcccgtatgcatgagcaccaacacggcgagcacagcgtccgacatatacagcttcggagtgctgctgttggagatcgccaccggcctgatgccgaccgaggtggcgggcccaggaggcctcctctccaacaccctcatcagcactgtccgggaatactacggcaggggatcggtcctcgagatggctgataggcggctgaacggcgacttcgacgagggcgagatggagcgggtgctgctcgtcggtctcttgtgtgtccagcaggatcgccgtcaccggccggaaatcagaatcgctgtcaacatgctctcgaatctcaagcttccgagtcctagaattcgttcctga

SEQ ID NO: 3349 - DNA, 270 bp, Zea mays
  Peptide Sequence Number=SeqID_45128
atggctcacaagggcaaggcgacgtccaacgtcacctacaactcggaggacgggttcgaggcgtatagcaaccccatcgtctacaactgccttagtgcgagcaaggagtacgagcgtgagcccagccatacgacctcgataggacaactcatatcatcgtgtctaggaacttcaggtgaccattggtgcgcagaccttttcacaccggacagtccagacttcacactggacagcctggtggccttccctcagggtgccacctggaactag

SEQ ID NO: 3350 - DNA, 141 bp, Zea mays
  Peptide Sequence Number=SeqID_45129
atggccaccacggctgcggcgacgatcgttggagcgctgccgactgccaggggacgctgtggagccttctggagatgggtacgtgcctcggcgaacgacgggaatgggcgatgcattttgaggatcgacaccgtgtgctag

SEQ ID NO: 3351 - DNA, 156 bp, Zea mays
  Peptide Sequence Number=SeqID_45130
atgaggttgagtaagtgcggaacctatggtggtcagggatgggacagcagcgggaggctggatggcggtgtggctccgatggacgcgagcgtggcgacaaggcgtgagaatcgaggtggcggcgacggcgtgagtaagggaggcgtcgacaagtaa

SEQ ID NO: 3352 - DNA, 861 bp, Zea mays
  Peptide Sequence Number=SeqID_45131
atggcctactgctactatccagcaagagcctgctatctcctgttcctcatctaccagcccgtcgtctactacctgttgctcatggctccccacaccatcgcgctgtctttcagctacgacttctccaacccgggcgacctcgaccgagcaaatctcacgtacctcggcaactctatcgccggcgacggaatcattaaccttacaaatatgaatgacacctggagcaccggcggtgtggcctacccgcagccggtgcgcctgtgggatcaccgcaccggcaggagagcaagcttcaccaccaacttctcgttcgccatcagcggcgagcgtacctacaaccgtgcggatggcatggccttcttcatcgggtccttccgctcagccgtgccgctagactcaggcggtggttttctcgggctcatcagcaacatcactccaccgccgctgtcgactgtcggcgtagagttcgacacaaacaggaacatatgggatccccaggacgccattgaccattttggcatcgacgtcaacaacatcacctccatcgtcgtttacaagtcgctgggacaagatttcccaaacccgctctctggtaccatgtcggcaggcgtcaactacgatggcagctccaaggttttatccgttagcctccggctggccaacggagatgttcatgacctcgaaacgtcggtcgaccttaaagccgccggagtgccacagtatgccaccatcgggttttcggcggccaccggcaatcacgtcgagtcgcaccagctcttgtcttggtccttcaactcaagaggccatgtacaggtcccgcaacgtgacgagccacgccgagacctagactacgaaggctag

SEQ ID NO: 3353 - DNA, 369 bp, Zea mays
  Peptide Sequence Number=SeqID_45132
atggcgagcgtcctgcctcggagtgtccccattagggacgacccaagagtcgcccaacgcagaaggaccccatcggatctgtgggggagtctggccgccgcccatattgcccttgaggctgtcgatggtgagcgccatcttgacgtctcgaaccaagttcgccaagctgttcgatgtggcgcttgtcgcaatgctgtcggtgcactggctttcgttcaattccggtcgagcttcgagcttggcatcggtgacctatcaaaggatgtggctagcgacgctctagaggacatggaggatgattttggtgtggctaccaaggtcgtggtcaacctccttccacaggaggatgttatcaatggttccccttag

SEQ ID NO: 3354 - DNA, 336 bp, Zea mays
  Peptide Sequence Number=SeqID_45133
atgacgatcgcaactcgatggtacgtgaagagcacgtcggagacacaagcgattgctcagtcaaatgagccgtccaccgatttccgcgcgctgcacttacaagacgcgactggtttctcacatacgtgcacctacaccttcctcggactccaacgactcacgttcgaccgaggcccaccaagggcctttcggatggcccacgaaacgtcttcgggttgtggtggcccgggggatatctatccccagaagggccccatgtcgtctgccataatgagcacgagcagagacgaccaggcgaccaagacgtatacagacaacacgacctcaccaggataa

SEQ ID NO: 3355 - DNA, 171 bp, Zea mays
  Peptide Sequence Number=SeqID_45134
atgaaggaaaaaaaacaacatgccgagtggcggtggcaccgaggctggaggagggcgacgacgccaggtctaggggagaggacagtggcgccggggctcgagctacgtcgggcggtgggcgatgacggtggcgtgaccactaacgactcggtggtagcactgcacgtgctc

SEQ ID NO: 3356 - DNA, 774 bp, Zea mays
  Peptide Sequence Number=SeqID_45135
atgagtcagacagtaaacaagaagcgtgggctcttatggccactgtcggaaatggttaggagattcttcagtgccgatggtagcaagggttccacgctgtggcctgcgctgaggctattgatcccggtaatagcattggttgcagtttgtgtgggttactacatgcacaacagtgttgaagagatagactgcaccaactgtgagtgtttatcgttgtatagatctgatgagtactacacgtatttgttggctgtgtgggttgaggacttgagggcgaagtattcacgttacaaggccatccaatttccaggatttctacatatatgcatttcattattgcctcacagttgcgcgagggatgccaaattatatggcaacatgatttccaagttgagcaagcttgaagacacggaagataatggccaaatgagtcagacagtaaacaagaagcgtgggctcttatggccattgtcggaaatggttaggagattcttcactgccgatggtagcaagggttccacgttgtggcctgcgctgaggctattgatcccggtaatagcattggttgcagtttgtgtgggttactacatgcacaacagtgttgaagagatagactgcaccaactgtttgttgagcagggtatctgtgcttaccttctgtcctttttcaggtgagtgtttatcgttgtatagatctgatgagtactacacgtatttgttggctgtgtgggttgaggacttgagggcgaagtattcacgtgtactgtactgttaa

SEQ ID NO: 3357 - DNA, 672 bp, Zea mays
  Peptide Sequence Number=SeqID_45136
atggcatcgcggctcgctgtacaggcgctgtccgcgagcctgttgtcgcttgcggaaactacgtcccccaaaccaccgaagcaacagtcgcagaggccaagggcagccagcagcagcagcagcagccggaggaggctagcagcgacggcgggggcgataatcctggcgtcccagctactgccgcccgtggcgagtagcgccgccggcacgttcgacctgcagctcatgctgccggagaagtccagcgaggaggccgaggccgtggtgcggatccacgcgcgcaacctgctgggggtgaagcgcttcatcgacgccggggcgtggcgggagctgcaggcggcgctgcgctccaatgcgtccaacctcaagcaggacctgtacgccatcatacaggcgaggcccacggggcagcgctctgagctccgcaggctctactccgacctcttcaacagcgtcaccagcctggattacgccgccagagacaaggacgcgctccaggtgcaggagcactacggcaacatcgtctccgctctcgacgagattttctccaagatcacggcagctgaacggtttcatccacctctcctttcgctttcagatagagaaagcagggggtccttggtgaatggtgaccctattcaccgccacttggtgtgcaaaatgaagcagtag

SEQ ID NO: 3358 - DNA, 1113 bp, Zea mays
  Peptide Sequence Number=SeqID_45137
atgcaggaggctggtggcctggtgaatccatcggccccgcccgcccctggtagagggatgcaggaggctggtggcctggtggtctcggttacctatgtgaaagctggaaaagcccttgatgctacccctaaccttgttgaatttggaggtactttgaggagcctcaccactgaaggcctttactgtctgcaaagaagggttaaagaggtagtagaaggccaggctgtagtacatagacgcaagggagctgttgagataaatagtaatgactacccaatatactctgctgttgtgaacgatgagaagctgcatcaccatgtagaggatgttggcagacgcttgcttggtctggacatggtgaagcctgtagagaagatcatggcacgcgaagactttgctttgtaccagcagctaattcccggtgttggcatcgaaattaaaaacaagaaagctgactccgtcactcagctcaccacccttatttcttcgttgatgaggatgtcgttccattcggtgctgctttgcataatgcagttgcagaactttatctctctcaggcttccgctctgtacgaaggaggggacttgcagtcgcgttgacgatcttgagttgaaaagatggttgaaatgtaaaccaacgcctttcattgaatcatatctgaatctaactggcaatcaccattttttccaggtggtagaagggcaggcggctgtgcataggtgcaagggagctgtcgaaataaaggttgaggactacccggtgtaccctgccgttgtgaacgacgagaagctgcatcgacatgtagaggatgtcggcagaggcttgcttggcccgggcaaggtgagaccaggggaaaagatcatggccggcgaagacttcgctttctaccagcagcttgttcccggcgttatgtttggcatcggcattagaaacgaggaagctggttctgttcactcggctcacaacccctatttcttcgtcgatgaggacgtcattcctgttggggctgctttgcatgctgccattgcagaactgtacttcactgacggccccctctttcgacaaagaagactagtggtttctcgttcgtgcggttggtctcgggttcagtaa

SEQ ID NO: 3359 - DNA, 273 bp, Zea mays
  Peptide Sequence Number=SeqID_45138
atgatatcgggtgaacacgccaaggacgagaaggtgccctcgggaggaaaacctgagttgtcgggatccaacaaggtgccatcgggcgggatgaagccatccagttacaagcacaagcacaagaagcataaggaagaatctatcggctctaccaagtcgcacaagaagaaatgtgacaagaagaagatgatgaagaaaatggttggagataaggactacgattcggacgaggccgccaaatccgacatttcaactctcaagccaccaacatag

SEQ ID NO: 3360 - DNA, 150 bp, Zea mays
  Peptide Sequence Number=SeqID_45139
atggaaactgtccagaaaacacggtttctcatccgggattacggtttctcgatcaagcaagtggctccgattctttgtgtggaggcccttatgggacttggtgtccccaagattgagaagaaagttgaaccggtctccatgatcgtttga

SEQ ID NO: 3361 - DNA, 2163 bp, Zea mays
  Peptide Sequence Number=SeqID_45140
atggacgccttcttcagcggtctcgactcccggctgcgggaggcagtgaaggtggcggactccatcatggtggggctggtgaacgccgccatggaggacgcctacaagaagagcctctggaaggacggcgacctggagcgcctcttccagaagctccgcttcgccgagctcgctatcatgcagctcgagtggtgcctccgcttcgtgcggggggagatggaggccgacggcggtgccgacgacggccacgagcagctgctagacgacctcctcgagacgcgggaccggatccaggcccgcctcgacgaggccgaactcgccgtcgcccagacggactgcgactacatgcgccggaagcgcgatgaactcgacccgtcgcgccgccgggagacgccgtccgcagttgatcaccgcggcgccgaggtggagggcggtacgttcgaggaactcagggggtccgtgggccggaagatgacgaggatgagggctaggctggaggacgcgagctccgagctggcggcgctcatgcaaaaggtcagcggcgaggcgtcgccgatggcgaggctgcaggagcccggccacgagggcgacggggtcaagggcctctcgggattctacagcatggcgcagctgcttatggagttccaggagatggtcctggacgccggcgtcctcagagacagcgtcgcatctgcgttcgatgcgatggagaggtcggtctctgctcagcgggcagccatggaggagcagcagtggctcatggatgcagagaaggagatgtacagtgccgtcgttgaaggttttctccgggagatcaacgtggaatcgacgaaacgcaatcagtctgagggagagggatgcccgacacctacattgcatcatagcagagatgctcctgataataatagctcggacgaattccagtatctgaacgatgaaactagccagctgcactcagcaaggcgtatcccggcagagaagtcagagagcagactgcgttatactaattcagaagaggattgtttctgtctctctcaagaggaagctgaaaggctaacagaaacaacgattgattcagaaattagatttgaactgcagcgtgttttgtactcagcagcattcagagacctattaagcaaactttcggttcaggcatatcatgcacagaggcttacagaacaaagagatgaaacggaaatcagaagtaatatacagtatgagatggatagtatcatattcaaagacttggtgaagaacctatgtgttgaatccgttgatcatcttatcaagacctggatccaagatgaggtgcatagagctcttcttgccaagattatgaatccttggaagatcactactgagatggttcacagcgagagacttatcaaggaagagattgaatgcattgtttttggaggtttgataaatgatttggtaaatggtcaaaatttaagtgtggtcaaatatcaacaccaaaatagacccagcgataatctgggaagattcggtatgattgacagcgccgagcagttagtgaatgggaagatacaagtcaatgtaactactgaagatgatggtgtaggctctgatcaacatagaatacttgtgaatcaagaagttttaggtctaattggtaactgtgacaggcaaaattcaaaaggaagtgataagcaagctgaagaatcaataggcagagatgatgttaaggaacgattggatgattgcaggaagctgcaaacagaagaggtagctacaggtttgtgcatgccttctgaaggagtgattcaagaaatctgcattccattgacaaacatatatgaaatatttggggactttgaggctattacctgtgaaaaaataggaacatctgtgctgagattgagagacctggacaaacaattgtcaaacctgattgaaaaagtgaactctcttaaaacaagtgagtttctgtaccggagcgctttcactaggagatgttgcgaccttcaaacagcagaagcagaggtggatcttcttggcgatgaagtggagctgcttcttggacttctcagtaagacatacggagctctggttcactactcaccagttcttcaacactatgtggggatcagggaggtgctgaacctgcttgggaaggagcttgctgtgaggccgaggcattag

SEQ ID NO: 3362 - DNA, 1476 bp, Zea mays
  Peptide Sequence Number=SeqID_45141
atgccgtcccttgtcgcggagagcgccgccgaaccgcctctggtggacagctacctggagctgctccggcgcggcggcggcggcggcggcattgcggcggcgaccgagggctgcgtgcaggagcgcgagctgcccttgatcgacctgacgtgcctgcagggcagcgcgggcgaggcggcgaggacgacgtgcgcggacgccatggcgagggcggcctcggagtggggctttttccaggtgaccgggcacggcgtgagccgggcgctgttggagcggctgcgggcggagcaggcgcggctgttccggctgccgttcgaaaccaaggccaaggccgggcttctcaacggctcctaccgctggggcgcccccacggccacgtcgctccgccacctctcgtggtcggaggcgttccacgtcccgctcgccagcatctccggcactgcctgcgacttcggagagctcagctccttgagggacgtggtgcaggaggtggcggacgcgatgtcgcgggtggccaagaccgtggcggtggcgctggcggggagccttctgggccacgacgaggcggcggcgttcccggcggggtgcggcgagaccacctgctacctgcggctcaatcggtacccggcgtgcccgttcgcggcgaacaccttcgggctggtgccccacacggacagcgacttcctgacggtgctgtcccaggaccaggtcgggggcctgcagctcatgacggacgccggctgggtggccgtcaagccccgccccgacgcgctcatcgtcaacatcggcgatctgtttcaggcctggagcaacaacctgtacaagagcgtggagcacaaggtggtggccaacgccgcggcggagcgcttctcggcggcctacttcctgtgcccgtcctacgactcgctcgtcggcacgtgcggcgagccgtcaccgtacagagacttcaccttcggggagtacaggaggaaggcgtccacagcaccactgttctgccgccgcgatcgtcctcccgcacgcgctgccccaaacccgccccgccatcagcgccaacacaccgcgccgccagcaatcaacgcccgcggatctcccacccttctccccgccgccgccgcaatcaacgcggtcctcccccacacggatccgcgtgtcctccccaccgccgccgcaatggaagctcagcgggcgttccttcccccgcagtccgccacctccgcgcccccaccaaaccggaaggcgagatccgccgccagccgtcacagggaaggaaggtcgagcgagtcggggaaggaaggtcgcgcgagtcggggacccgccaggcatcccgtgcccgccgtcgggatacatgtgtccgctgccgcgtcatccccgccttccccctgctcagcccctccgtgcccccgccgcgcgcaacagctccctccccctgaatcacgcaagggttggttcttgttcctccaggctactgcgttgtga

SEQ ID NO: 3363 - DNA, 399 bp, Zea mays
  Peptide Sequence Number=SeqID_45142
atggcgaaggtggctgttcaagttcttggtgtcgaaggtggtcgtttgagttcactggaggtgggcacaaatgttgttcacttgttctcaaatgctgtgaatcaaggacaagggccgaggccaagcccgagcccctgggtcgggcgaggcggaggttgttcggcagaggccagggcggagtccgagccctggggtcgggcgaagcggagttcgtcgtcttctggggctgagcccgagtccgagccctgggtcgggcggagcggagttcgccgtcttccggggcctagcccgagtccgagccttgggtcgggcggagcggagttcgccgtctaccggggcctagcccgagtccgagccctgggtcgggcggagcggagttcgtcgtcttccggggcctag

SEQ ID NO: 3364 - DNA, 483 bp, Zea mays
  Peptide Sequence Number=SeqID_45143
atgcaggcggcatgcaaccgcgccaagtgggcgcacctctccgacttccaacgcacccatcatgggggcccacgcccacgcgtcatgcaactggtgcaccggtcgctacgtgcaagcaactgcaccgccactcgcaccactgccacgcctcctcgactgcgaaaccagtaccgcgactcgaggcaaccctgcggaccgggaaagggggataccccgaaaaggacccttctccgtgaaggaaacaggctccgagcctccctactgatcagaggttcgaaggctggcccctcggaggggttcaacagccgcctcagagcgcgtgggctccacacccactactggtcagaggttcgaaggccggcccctcggaagggttcaacggctgcctcaggccactcgggctccgcgcccactactgatcaggggttcgaaggctggccctcgaagggttcacagccacctcagacacagagcgagggatga

SEQ ID NO: 3365 - DNA, 330 bp, Zea mays
  Peptide Sequence Number=SeqID_45144
atgagggtcagcaagggcagctcgatatgtctgtggcacaggggagagctgcgccacatgaaagagcgcaagctgtctgaaccccagcttagctcgagtagtcatgcaatgataattgacaaccggagaacatggacatcaccaggtggaagttggggtgctgcccctgcaggaagacaagaacgtgctgatccaataggagcgggcaggagagtcggtgtccaacaaaactcgaaatccgtagcagacggtgtggaagaatgctcggttaagggaaaagatgagtcgtcgaagaccgcatggcgagaaatgatgatcttgttggagtga

SEQ ID NO: 3366 - DNA, 462 bp, Zea mays
  Peptide Sequence Number=SeqID_45145
atggccgtcgaggtctacgtccctatgtttgcgggcattttctcccacctctcacatctgttccacacatcaggtctccagcaccacctcttcggcgccgtcccaacaatgttcgtccaggggtacacacccgaggtgcttgccatcacgaggagttccccatcacctggctcccctcctcagtcgctcaccatacggaccagcaccgccgcttctagatgtggcggctttgacagctcttgccccatctcatcggtggagatgctggagcgcattccgcatgaaccccgcagagccatggcggaggcgcttgccatcgccaccgaccacaaattcccctgccctactgtcacacccggttttagaagggaggacgtcgacttcatcctcaacgagaagatgaaggggaagaacaagatggactacgaggtctgttgctccatccctctctcccgtacctag

SEQ ID NO: 3367 - DNA, 1260 bp, Zea mays
  Peptide Sequence Number=SeqID_45146
atgagggagcacttgcaatactgcaacaagctggtcggcacgcggcggcactatcgccgctgtgcgccggcaacgccccacatcgccgtggccatcctcctcatcgcgctcggcgtgctctacctcgccttcagcccgaccaactccgacctcaacctcgttctcagcatgccgcgcgtccacgtcgtgttcaacgacgaaccggtccgcaaggtcgcgcccgttgccgccgcgcctgccccaggcaacgcgaccgacgacgacgaggacagcggcctcccgccgcctcggcagctgacggacccgccctactcgctgggccgagccatcctggactacgacgcgcgccggtccgcgtggctcgcggcgcacccggagctccccgcgcgcgtggggcggcggccgcgggtgctggtcgtgacggggtcggcgcccgcccggtgccccgacgcggacggcgaccacctgctgctgcgggcgttcaagaataaggcggactactgccgcgtgcacggcctcgacgtgttctacaacgcggcgttcctggacgccgagatgtccgggttctgggcgaagctgccgctgctgcgggcgctgatgctggcgcacccggaggtggagctcctctggtgggtggactccgacgcggtgttcacggacatggcgttcgagccgccgtgggagaggtacgcgcgccacaacctcgtgctccacggctgggccgccaaggtgttcgaggagaggagttgggtcggcatcaacaccggcagcttcctcatccgcaactgccagtggtcgctcgacctcctcgacgcctgggcgcccatgggggtcgcgcggccccgtccgcgacagcggggcaggtggggggacaagacgttcatcgagagcacctacgagctcaacggcttctgggaagggatagtggacaggtacgaggagatgcggcggaaggggcggcccaccgggggtctcggcgacgaccggtggccgttcgtgacgcacttcgtcgggtgcaaaccgtgccggcggtacgcggacagctacccggcggaccggtgccggcgcggcatggaacgcgcgttcaacttcgccgatgatcagatactgaggctgtacgggttcgagcacgagtcgttcaataccactgccgtgcagcgcgtcggaaacgagaccggcggcccgctggacgctgacgatgatgagctcggccggctattgcatcccacgttccgggctgccacgcccacacagacgtag

SEQ ID NO: 3368 - DNA, 846 bp, Zea mays
  Peptide Sequence Number=SeqID_45147
atggaggagcagaggcagggggccgagagggagaggcaccggcgttggggaggagatagaaggggccttcctaccgccaagcgccgaggagccgataaggggcgcatccatggaagagggcgcgccaggacgcctgctcgagctcgaacgcaggaatggaggcaggagcaggggcgtcgtggatttgggcgtccaggagggatcgccggacctggggaagagcaggccgagagggaatatgggaggttggccatgggggattcctcgcgcttgctccaggggagctcggatggtgtccagctgacgcgtgcaggggaaatggtggagaacttcgcgggtggggctccctgcaggactggccgagatctccaccgacgacgagaacttctgccaccagcgcgaccagggcagaggcaagctcggactccagcctgggtgtcaactgctcgagctcggacctgggagaggaagcgcatgaccataggggccggcgtcggctgggatgtggaaggagagggagatggctgccagggagcctttgcgcacgggggaagaagaatgcctgctggcgtgcgtgagaagctggcggccaggaaatgcttctgcgctaaggaacagggaggagcgacgcttaaagggtggctgcagcagggtgatcggctagcaggaaacggcatcacccattggcgcagggattcggtggccacacattggtcaaattgggcagcgctggctattggcgcagaatttggtggccagccactggacgggggctgtcagtggcagactggtgctatcggctggagaagaagacaggaaaatggtggccgctggttgattatttaa

SEQ ID NO: 3369 - DNA, 2454 bp, Zea mays
  Peptide Sequence Number=SeqID_45148
atgtcgtctatcgcatcgcagctgaaggccatcaagtcggcgctcggcgctgcgccggagccggctcggcggcccgtcacccggccgtctgtgctcttcgacgccaaagaggccgccgacatcgacctccgggccatcctgcccattgccctctctgggttggagcaccttaccagcgtagacgagagatttgcaaaatacagcaacactctgttcagggagactagccttgaggtgaaccgcgaacagttgactcccaaggagaacgacaaactcaacaagtctatctccacctaccttcgccttctagctggctatttgcatcttccctctgccctcaagacccttgaataccttatccgcagatacctgtatgaatttagctcagctaattttgccgatggccctacgagctctagcttattctcttgtttctggtgggaaccttcatgtagggtgcatgtatacaattcggatgagttgctgctgagcgcactgccataccatgatacacatgcgtttgttcggatcgtgcagttggtcaacttagggaatagtaactgggcatttcttggcggtgtcaagtcctcaggtgcaccgccacccaggagtgttctagtgcaacagtgcatccgtgataaggctgtgctggagaccctatgcaactatgctacaccaacaaaggaattcagtcactcgaagacagtcgtctgcttttgcactgctgtgattgttgagtgtttgggtgctgtccctaagcttgacacagatgtagtgcagagggtgttgggatttgtgtttgactctcttaatcctgcagtgacgcgagaccaggaatataaggctggcgctcttatgattgttggagtacttggaacccgtgcgactctagcgcctaaacttgttcaaaatttgattcttttcgttgcaaggactgcacaacatgatgcattcgagtcagttgacttgccatggcttcgtgtttcagtgatggctcttataagtcttgttcagtcccaatctgtccatgttttccctaagaagccactgatggttttgaaagacatcagggatttttctggtatactttctgtattatccagtgaatacaacatcgagaaattcattaggctttatgttgaatcattaattgactacagtattgtcgatggtacctgccacacacacctgattgaaactattgagagtctgccaatgaagaatttcattgaaagtgtcgtgtgcaaaattcttggaaactgtatcaaggtatctcgggccacaggaatcccagatattaatcacacagaattatgggctaagaaaatttttaaggcaattgaaagaaaatatcccctggagctacgtgatgctattcataaatttcttgagaactctgaaactaattcaccgggaggggattctttggctgaggtttttgggatattgtttgatgaaaacaagaatttgccaactgaaatatctgactcaaacatttggttcagtctcgatcatccaaaggctacggttcgtcaatctgctctctcaaaagttgctacatctggcatcttcaataacagaactctaaatcctcagaagtttatcaatatgcaagatgctatattacgtagtctgtatgatgatgatctaagtgttgtccaagctgctttatccatagaaggactagctgctgttgccaatcctgatagcctgttaaaagcatatgattgcgtgctcaccaaatgcatcaaaatcatcaacaaaggtggttcaaaggcattaaaagcttctgatgttgctgtttcttgcttggaaaagctgacccttagggtgaacataaaggccttggagctagctaagaaaatacggtgggagttctacgcaagtagttctcttgtatatgatggggtcgattttgataaaatgaagaacatgagtgcagactccattgcttctattaacatgaacaacatcaaagcttttgctgaaactttcctagcagacccaaataagcatgtggagtggttagctaactctggaagtggaagtagattttctaaaactctgtttctgctcatagtattgcaaacacttgtttccacagaagctttggatgagcaggtgaatctttgtcatgcttgtttgccagtcctgaaggatgaatgtcatcacatacagcccaaagatagcgatgttggtgatgagatcagcattactaaccttgagatgtgcagtttagaattggtgaagcattttttcaacagagacacagaggcattgaatgttagaatccttgttggcagtggtggaaacacaatgctggatgatttgtttctcttcttccttgtttcacctgccaaaaatatcttccagaagcacctacagtatcttgttaattgcattggagcaccttttcaatttatttcaaagtacttcctggatgaaggggcatag

SEQ ID NO: 3370 - DNA, 600 bp, Zea mays
  Peptide Sequence Number=SeqID_45149
atgagccttaaggatggagtagttgatgttaggaggcaaggtgacgtgattgtcctagtttggttgatagttggagatgtggctctaaatgtgatcaacgcctatgcctctcagccagattatctccacagccagattttcagaaaagctggtcagaaaaaagctgaaccaaacaggcccgatgttttgaacttcacgttagcctatgctctgttgatagcgaattccttttttaggaagagggattctcatctagtgacctttcataatggacaacactcgagccagatcgactttatccttgcaaggagggaggatagacatgcttgcttagattcaaatggacagacgtatgatgacctttatcaggtgctagacacgaaggagggagagaaggacatgtttaggatggctaggacccaggagaggaagacaatggacatcaaccaaatcaaatgcatcaaggatgagacaaatcaacttctggtgaaggataatgagatcaaggacatatggcgagagtatttcgacaagttgtttaatggggagaatgaaggttctatccttgagttggacgactcatttgatgatagcaactga

SEQ ID NO: 3371 - DNA, 1644 bp, Zea mays
  Peptide Sequence Number=SeqID_45150
atggtgccacaaaagcttaaagatttatcagaaagagtccaagtggagagtcttcttgtgtttgcatctatttgttccaagtgcgcttcctctgacaataatagcttggatgaaagcatctgtgtgcagcttctactaggttttccttccattattctaccacttgctcatgtcaacaaggatataagggcatctgcaattaagtgtattgaggggttatctttggtgtggcagcgcttgagcacttctgtaccaagaaatggaaacaacaccaaattacctcaatgtttgtcatctccaacttttggtagtttccttgaattgttggttaaccaaaagaccatgatctgctcggacgcaaaatttcttcctgcatatatttcatctatgctgagcccatgtaaagatattctggttcccgagaatctccatgaaagatttgatccgcatacaaaggatactattcttactttcatcttgcgctctgctttgaggctccctccttacggaaagttcatggttctgtcagtcctgaaaggagtaggaagcatcttatttcatgcagaagatgtgaagtctctgttttttgatcttctggaccgtcgtgatcagtaccagaatcgacataattgcaagcagatcctatccacccatgaaatgcataccttgtgcttgcttttggaggttttattctcaacgccagatcatgtgaatattggttttaacatgtttgaacctttgatgaaagctttaaaggactcaactaactgtatagaacttcaggttgatgcttcgtctccaggtgattctgttgttgtgatgccatgtcttactgtcctgcagaatcttcaaccagggttctttgataatttgaagactgatactaaggttcattcttccactttagtaaaatttattgaattaatttcaacacttggtgatgcaagaggacattcaaaaaggataaagagaaatgaagatcgggaccttaatgtgttctgcaattttgcggagatatttggagaaaattctgtagcttctattcttgtttctcttctagatatcttgtttcttaagaaagatgtgaagcaaaggtcgcgtttattacaacctcttttccagattctatcgaagctcctttctgatcaatgggtctcagttattgttagtcagtataacgaccaacaagatacctcatctgaaatccctgatttatctagttttgtaaaagaagttcaacacttggtactgctggccctcaaagatattacagatacactacaatcgggtcaccatgatgcaatggtcagcagttccgatgtaggtcttcttattgattgtgtacggtccatccaggacataggaactcggaatcatggcttttccttgatagcttctttgggaaaggcttgcccgcaactggtctcagagagtattgttgatttgtttgtcgctattggggatgctattaaacaggacgatagccactcgcaacgtgttttggaggatttattatctgtcttagtcccatgttggttatcaaggaccacaagcatagaaaagcttcttcagatattcattaaagctttagcagatgtgcctgaacataggcgattgacgcttatggtttacctcttaaggtag

SEQ ID NO: 3372 - DNA, 351 bp, Zea mays
  Peptide Sequence Number=SeqID_45151
atgatgggttactgcggcatcgggcttattgggtggtcctggaaagtcaccataccactccgcacctcttcatggcctccccgtgcgaagctatcgaccaaagcgccaccagtttcacgccggagttggtgctccaccgtgatgcctccttgctccgcggactggctactccacaacacattcgcaggtgagaagttccccatgcgattagctgtcgtcccttttcgtgtattgcccttcggattgaaatactgcgctcgggatctcgggttggaaacgaccggcgatggcctccgccgtgctggtgccgccgccgctgcctgggggaaatgcctggtgtatgggacgtag

SEQ ID NO: 3373 - DNA, 322 bp, Zea mays
  Peptide Sequence Number=SeqID_45152
atggcctccgcctcggcctccggcggcggcgcgcgtccgtggcgcaccgcgctgctcaccctccgcgacgagtccctcgcctcgccgtcgcccacggccctcctcgagctcctccgccaagtcctcctcaccccagcctcgccctcgctcgccgcgtccgcggccgggctcccccctcacgaggtgggctcggatgtggcgttcctcgctgacacggccgcggcggcggccccttgccccggcgccggcgacgcgctgcgcggtgtctgccacctgattcatgatgtcatgtccaaaacaaatatggagattaacccttctg

SEQ ID NO: 3374 - DNA, 3552 bp, Zea mays
  Peptide Sequence Number=SeqID_45153
atggccatgaggcccatgagctactatgaagaccactcgatgtcatcatctcatgccgatgacacggatgaaaggaagagcacggtttcagcctcccccgaggctagcgccgacgaggagtcgttctcattctttgggctgctttactacgccgacacggtagattggctcctcatggccctgggaacccttgggtctatcatccacggcatggcattcccggtcgggtatctcctccttggaaaggcgctcgatgccttcggaactaacataaatgatccggagggcatggtccatgcgctctacaaggtggtcccctttgtgtggtacatggcagcagccactcttccagctggaatggttgagatctcctgctggatatactcaagtgagagacagttagcacgcatgcggctcgcgtttctgagatcaatccttaatcaagaggttggggccttcgacactgacttgactactgcaaccatcatcaccggagtaaccaactacatgagtgtcatacaagatgcaataggagagaagctgggtcatttcgtcgcaagcttctccactttctttgctggtgtcataattgcgtttatcagctgctggcaagttgcaatgctttccttcctggtcattccacttatcctcatcatcggagcagcatacacgaaaaagttgaatgtcttatctttgtcacgcaatgctattgtttcagaggcagtatcagttgtagagcagactttgtcacatatcaagaccgtcttctccttcgttggagagagctgggccatgaagtcctttgtccagtgcatggaaagccaatttaatctaagcaagaaggaagcattgataaagggaataggacttggaatgttccaagcagtgactttttgttcatgggcactgatggtttggattggggcagttgcagtaaccaaaaacaaggcaacaggaggtggcacgatagctgctatcatgagcatcctctttggtgcaatatcaattacctatgccgcaccagaccttcagaccttcaatcaggcaaaaactgcaggaaaagaggtcttcaaggtgataaagagaaagccatccataagttatgcaaaaagtggattagtactagacaagattcatggagagatcaaattccgtagggtgcactttgcatatccttcccgccaggataagccaattctccaaggattctcattgtccatccccgcaggcaaagtcatcgctctggtaggaagcagtggctgtggaaagagcactgtcatttcactacttcaaaggttttatgatccaacttcaggtgacatactcattgatggccacagtatcaagaaaattgatctgaaatcgctgcgcagaaacatagcttcagtctctcaggaaccatcactattttctggtaacataaaggacaacttgaagattggtaaaatggatgcaagtgacaaggagataactgaagcagcaagaacagctaatgttcattcattcatatccaaactaccaaatgagtacttgaccgaggtaggagaaaggggtgtgcagttatcgggtggccagaaacaaagaatagctattgcaagggcaatgttgaaggatccaccaatcctacttctggacgaagcaacaagtgcccttgattcagaatcagagaagctagttcaagatgcacttgagagagcaatgcgtggaaggactgttatcttgatagcccacaggatgtccacaattgtaaatgctgacactatagttgtcgtcgaaaatggaagagtagcacacactgggacacatcatgagttgcttgacaaaagcacattctactccaatgtatgcagcatgcaaaatatagacaaggaagctgaaaataaagtggcaagcactcctgataacatggaggaacaaattggcgaagcacacatcaagcagtcctccacaaatcagggaccaaacaaaaagctagaaagactggagtcaaaacaaccaagaaatgagaatcactatatttatggtatcattggagaaagggcaatgaaaaacataagggaggcactcttttcagctgttctccgaaatgagcttggttggtttgagaaaccaaataatggcgtaggatttcttacctcacgcattgtcagtgacacgtcaacagtcaagaccatcatatcagacagaatggcagttattgtgcaatgcatcgcttcaattctgatagcaacaatagtaagcatgaaggtcaattggagaatggctttagtttcatgggcagtcatgccatgccatttcattggtggccttattcaagccaagtcagcaaaaggattttatggtgactctgctattgctcaccgggaacttgtctccctagcttcagaagctgctagcaacatccggactgtggcatcctttgtttatgaagatgaaataatcaagaaagcagaattgtcactgcaagaacccttgaggatcaccaagattgagagcatgaagtatggggtcatccaagggatctcgctctgcctctggaatattgcacatgcagtggccctatggtacaccacagttttggttcagaggaagcaagccaaatttgagaacagcataagatcataccagatattctcactcacagtaccttccatcacagaattatggaccctcattcctatggtcatgtcagccatttcaatactgaatcctgtatttgacacacttgacagagagacacaaatcgtcccggataaaccagaaaacccaggcaaagggtggctcgtcggtagaaccgagtttcaggatgtgagcttcaattatccatctagaccagaggtgaccattctggatggcttcaatctaattatagaacctggccaaagagtagcattggttggccccagtggtgcaggaaaatcctctgtactggctttaatactgagattctacgatcctgctagaggtagattgttaattgacaacaagaacataaaggactacaatctccgatggctcaggaagcagattgggctagttcaacaagaaccaatcctgttcaacacatccatcagagataacattagctatggaagtgaaagcccttcagagactgaaatcatccaggctgcaatggaggcaaacattcacgaattcatcagtggtctaccagaagggtatggcactgttgttggagacaaagggagccagctttcaggagggcagaaacagagaattgctattgcaagaacaatactgaagaggcctgccattctgcttcttgatgaggcaaccagcgcacttgatggtgaatctgagagggtggttatgagctctttagggaccaaggtgtggaaggacaaagatgagcaagccagtacgattacaagtatcacagttgcacatagactgtccacagtcataaatgctgatacgatagttgtgatggagaaaggaaaggttgttgaacttggtaatcaccaagagttgatctctgctgaagatggcgtttactcaagattgttccacttgcaaagcaacatgaaagaatga

SEQ ID NO: 3375 - DNA, 121 bp, Zea mays
  Peptide Sequence Number=SeqID_45154
acaggctctaggcgagcttcaggtggacgaccaggccgacgaatggtcggagatgagcagcagccgccaccgccgtcggctggagatgagcaacaaccaccaccgccgtcgctactgctag

SEQ ID NO: 3376 - DNA, 279 bp, Zea mays
  Peptide Sequence Number=SeqID_45155
atgaatcgatctcgggactccataccgtatgatgtgcagaagaacgccctggcgccgacaaaggatagatctgccacgaccatggaagtccggcaagcaatctgttgttccatggaaaacctccaagctccgaaagtccatagtcacacatcacgtcatcgggtgatttcccaagaccgcacatctgatcctcgatgctattttgggaaggttgtggtggcaggtgggcagttcgcggccgcgttccagccttacacttcacatgagctcccacctttg

SEQ ID NO: 3377 - DNA, 729 bp, Zea mays
  Peptide Sequence Number=SeqID_45156
atgtggaaactcaatccctttggaggtaaagcacagagtgggttggatggtcgtactattgatgttggaaatttgaagatcacagtacaaaatgccattgcacaaggaggtttctcttgtgtatatctggcatgtgacacagtacatccatcaaagatgtatgcactaaagcacattatttgcaatgactcagaatcgcttgatcttgtcatgaaggagatccaggttatgaacctcctcaaagggcatcctaatgtggtcacacttgttgcccatgatgtttttgacatgggtcgtacaaaagaggcacttcttgtaatggagttctgtgagaagtctttggttagtgcaatggagagcagaggtagtggttactatgaggagaagaaggtgcttttgattttcagagatgtctgcaatgctgtctttgctatgcatggacaatcaccgccaattgcacatagggatctgaaagctgaaaatgttcttcttggttgtgacggtgtatggaaaatatgtgattttggaagcacatcaactaatcacaaatgctttaacaaaccagaagagatgggcattgaggaagatgtcatcaggaagcatacaaccccagcctacaggcccccagagatgtgggatctctacagaagagaagttattagcgaaaaagttgacatttggtgtcacattatatttaacattaattattgggctattggcgaagagtga

SEQ ID NO: 3378 - DNA, 1245 bp, Zea mays
  Peptide Sequence Number=SeqID_45157
atggcccttccaaacgggaccttacaagtgcatgtaaaaagtgagctttcagattctagcaaacggcggggggagcagagcacggttcagaaacgaaagagagttagagcacggttcgtcgcgggggaagcaggagaggagctgacacggcggcgggggcgagacggcggggaggcatggacgggcacggcggcggagccgcagtacgtggccaccgggcagatcgagccggacctcgccggcgccgcactcacggtgctcggtgatgtagcagccgacgcgaagcaggagcaccgcgacccggtgtacgcccaggtgctctcgagtgttcttggggcgatacatgactggtcagagaaacggctgcttgattaccatgaatggtacgggaagggcatggctgccaccggcgctggggcaatggtgattccgctgtctctggcactttccacgagcaagatcatcgcagagagtgtgcctgggatgggcatcgatctggcagactccgagctcgacggcatcgggagcttcgctggcaaccgaagtggacctagcagtgtatccagttccagctacaagagccctatactgaagaaggctaggatagagtcgagcaagattgtagtctgctatgcaaaagaatacttttgcgaggcattggagaacgagctcggacaagggaacagcatggtcatccaacgagacgacgaccccagcgagaccatggcacggctcgccaaggacacggagcagctggctcagttcgagctggagaacttcagcccggtgctgaagcggtggcacccgttcccgggcgcgtccgcggtggccacgctccacagctgctacggcgtcttgctgaagcagtacgtggccaaggcgacgtgcctgaccaacgagctcgtgcatgtgctgcacgcggcgggcaggctcgagaaggccctggtaccgatgatggtcgaggacgtggcggacagcgacgacggcggcaggtcgttggtcagggaggtcgtcccctacgacgtggactccctcgtggcgcgcttcctcaggacttggatcaaggagaggctcagcggcgacggctacgccggcgagtgggccggcggccagagtcacggtatcggcgcccagacctgctccgacggcagcacgtacgccggcgagttcaagggcggcgtcaagcacggcctaggctgctaccatttcaggaagagaagaggagaaaagaacgacggctgctag

SEQ ID NO: 3379 - DNA, 159 bp, Zea mays
  Peptide Sequence Number=SeqID_45158
atggatcttggcgctgaggtgtcggactcgaccttcgccaccgtgagtttgactcatccgcgcgcttcctccctcggctgtcgttcctcccgcgcaccagcagccgacgccgtccactccgccgccgctcccgagttaggtttaggtattagttattag

SEQ ID NO: 3380 - DNA, 732 bp, Zea mays
  Peptide Sequence Number=SeqID_45159
atgatgcagcagcccccgcagccgcagccgggtatggcgctacctcctccccctcagaccggtggcgggcagccaccgcagtggggcgcgatcccgccgccgatgacgcagcagtacggcgcaccacctccgcagcagcctccagcgatgtggggccagcctccgtcgcaggcgcactacgggcaggcgccgccccctcagccgtattatgccgcgccgccggttcaaaatgtgaagctcatccgcgacaagaattcaggacagcttcagggctatggttttgttgaatttacaagccgtgcagctgcagagcgagttcttcagacatataatggacaaatgatgccaaatgttgacttgacatttcggctgaactgggccagtgctggtgaaaagcgtgatgatactcctgactatactattttcgttggtgatttggctgcagatgttacagattacttgttacaagagacattcagggttcattatccctcggtgaagggtgcaaaagttgtgactgataaattgacaatgcgtaccaagggttatggatttgtgaaatttggcgatcctacagagcaagctcgtgcaatgactgaaatgaatggaatgccttgttcttccaggcctatgcgtattggtcctgcagcaagtagaaaaaatgcaggtggtgttgttcaagagagaggcatagttgtcgaccacttcacttccagaagtcattattcctag

SEQ ID NO: 3381 - DNA, 450 bp, Zea mays
  Peptide Sequence Number=SeqID_45160
atgccattctctccctcgttctttgactgcaagttgccaaaagcggccggatctgcgagcgtggatccttcgagacagccagacgcggtggatcctccactatggcagccagacgcggcggatcctccgctgctcgccgtctcggggctctccggcgttggctcgacgcgccagcgcccccaattgccccacccgcacgacccaccgtacagccggtgcctccccttcctcgtctctgcggtgtcacagtcgcaggccggcctaggcacacctcccacccctgtaccagtccccgtcccctctgacccccgcgctgctttttctggcaacctcccttcaaccacgtcctctttccagactcgttcccgcttgagaccccaccatccaaggaggaggaggacgcgacagcgcggcagaccgatgaggcggtggcaccagccgtccccttga

SEQ ID NO: 3382 - DNA, 282 bp, Zea mays
  Peptide Sequence Number=SeqID_45161
ccaaacctcctgctggacaaccagcagctccagctactgcagcagcaacacctgctggaccagatcccggcgacgacggcggagagcggcgacaacatggggcgcggcggcggcggggtgtccgacccgctgctgggcgacgagttcgagagcaagtccggcagcgagaacgtggacggcggcgtctccgtggacgagctgcaggaccccaaccagcggcccagcaagaagaagcgctaccaccgccacacccagcaccagatccaggagttggaagcgtaa

SEQ ID NO: 3383 - DNA, 2127 bp, Zea mays
  Peptide Sequence Number=SeqID_45162
atggccagtttcttcaaggagtgcccgcacccggacgacaagcagcgcaaggagctgagccgggagctggggctggagcccctccaggtcaagttctggttccagaacaagcgcacgcaaatgaagaaccatcacgagcggcaggagaactcgcagctgaggtccgagaacgagaagctgcgcgccgagaacatgcggtacaaggaggccctgagcagcgcgtcgtgccccagctgcggcgggccggccgcgctcggcgagatgtccttcgacgagcaccacctccgcgtggagaacgcgcggctgcgggaggaggtcgacaggatctcctccatcgccgccaagtacgtgggcaggcccatggtgcccttccccgtgctgtccagcccgctggccggggccggggcacgcgcccccgcgttgccgccgctggacatggcgccgccgtatggcgctgccgctgacatgttcggcggcggcggtgtcgtcgctgctgctggtgctgccggtgccggggacctgctgctgaggggcgccgccgtgcagtcggacgccgacaagcctatgatcgtggagctggccgtggcggccatggaggagctggttcggatggcgcagctggacgagccgctgtggaacgcgcccgcggggctcgatgggtccgctgaggaggagacgcttaacgaggaggagtacgcgcgcttgttccccggcgggctcgggcccaagccgtacgggctcaactcggaggcgtcgcgtgacagcgccgtcgtcatcatgacccatgccaacctcgtcgaaatcctcatggacgtgaaccagtatgcggccgtgttctcgagtatcgtgtcgagagccgcgacgctggaggtgctatcaaccggcgtggctgggaactacaatggtgcattgcaagtgatgtcggtggagtttcaggtgccttccccactggtgccgaccagggaaagctacttcgtgaggtactgcaagcagaacgccgacggaacatgggccgtcgtcgacgtctcgctggacggcctgcgccccggcgcagtcctcaagtgccggcgccggccgtcgggatgcctgatccaggaaatgcccaatggctactcgaaggtgacctgggtggagcacgtcgaggtggacgacaggtcggtgcacagcatctacaagctgctggtgagctcggggctggccttcggtgcacgccgatgggttgggacgctggaccgccagtgcgagcgccttgccagtgtcatggccagcaacatcccgaccagcgacatcggtgtgatcactagcgcggaggggaggaagagcatgctgaagctggcggagaggatggtgatgagcttctgcggcggcgtgacggcctctgcggcgcaccagtggacaacgctgtccggcagcggcgctgaggacgtccgcgtcatgaccaggaagagcgtcgacgaccctggcaggccgcccggcatagtcctcaacgctgccacctcgttctggctccccgtcccgcccaagcgtgtcttcgacttcctccgtgacgaaagctctcgcagcgaggcacgcgcgcactcaatacctaacaatttttatttatttaaccatgaacgtacacgttcgagaatgcatccttgggacatcctctccaatggcggcgttgttcaagagatggctcacatcgccaacggccgcgaccatggaaactgcgtctcgcttcttcgtgtcaatagcacgaactcgaaccaaagcagcatgctgatcctccaggagagctgcaccgacatgtcgggctcgtacgtcatctacgccccggtggatgtggtcgccatgaacgtggtcctcaacggcggcgaccctgactacgtggcgctcctgccctctggcttcgcgatcctgcccgacggcccatcgtcagggagcagcagcatgctgcaaggcgacggcggcgtcggctcaggtgggtcgctcctgacggtggccttccagatactcgtcgactctgtccccaccgccaagatctcgctggggtcggtggccacggtgaacagcctcatcgcctgcaccgtggagcgcatcaaggcggcggtgatctccggccagagcaatccccagcagcagtag

SEQ ID NO: 3384 - DNA, 483 bp, Zea mays
  Peptide Sequence Number=SeqID_45163
atgaacagggcaactcatgagctgggcagcgggagacaagcggcgcgtgggagcgggagcgagggagcgagggagcagccaggcatggaggagcctgttccggctgatccccaagattttcttgaagccaaggagatcaggttcagctgtagaatggatgaaagggaggagagcgctcacatccggtcgaccggtcgttttggtggaacgggagcatttcaactatttatgtttgctcgttcccgaacctcagacaggagagtctggcaatgggcctgtgactatttagggctcatgaatgaaccagccatctgtttatcagtactgggaccgtccactgcccaagatgtgatacctggtgacgaaatctcagacatcgagttggcattgctaaggaatgaagccatattatattactcagcaagtcagcaggcatgcttatcctgccgagatgagtggcattccatggccatatcactataa

SEQ ID NO: 3385 - DNA, 180 bp, Zea mays
  Peptide Sequence Number=SeqID_45164
atggagatcacagggatatttttgctgcactcaaaagaagtcctgcagagcctagcccagccgcttcgaaagacattgaacccatttgttggggaaggcgatttgttagaggtgaatcaatcttcacaaatgactaatgaggtgaacccatttgttggggaagacgatttgtgcgggtaa

SEQ ID NO: 3386 - DNA, 2661 bp, Zea mays
  Peptide Sequence Number=SeqID_45165
atgctcttcaactcgccaaaatcagcaaaacgaataggagtacagttcctatcagttgcaagtgcagactgctttggtcgagatgtctctccgacgcactttgcatccctgttaaaggaatgcaggtctgtgaatacagttcgtcaaattcatcagaagataattgcttgcggccttctttcgtatccatcatctttgttgtctgtgccactcgcaccacttccatcacattcatatgtatcaccaaaatctttgggcaccggtgttgtagcttcctatcttgcttgtggtgctacgaaggatgctctctcagtgttggagcgtgtcacaccatcaccagccgtgtggtggaatctactcgtaagagaacacatcaaggaaggccaccttgatagagcaattggtgtatcttgtcgcatgctgcgtgctggaactaagccagaccattttactctgccgtatgcgctgaaagcatgtggagagctaccttcatactgttgtggaagagcattacatggactcatatgttgcaatggatttgagtcaaatgtctttgtctgcaatgcattggtggcaatgtattcccgctgtggttctttggaggatgccagtctggtgtttgatgaaataacacggaagggaattgatgatgttatctcatggaattcaattgttgctgcccatgttaagggtagtaatccgcggactgcattagagctgttttcagagatgtcaatgattgttcacgaaaaagctacaaatgaaaggtcagatatcattagcattgtcaacattcttcctgcatgtgcttctctaaaggcattgcctcaaattaaggaaatccacagctatgccattcggaatggcacatttgcagatgcttttgtgtgcaatgctctgattgatacctatgcaaagtgtgggtcaatgaacgatgcggtaaaggttttcaatgtaatggaattcaaggatgtcgtttcttggaatgcaatggttactggatacacccaaagtgggaactttggggcagccttcgagcttttcgagaatatgcgcaaggaaaatatcccactagatgtcataacgtggagtgctgtaattgcagggtatgctcagagggggtgtagccaagaggcccttgatgcattccagcaaatgattcttgatggttcagagccaaattctgtcactatcatctctctattgtctgcttgcgcttccttgggagcattgtctcagggcatggaaattcatgcatactctctgaagaagtgtcttttatccttggataatgattttggtggtgacggtgacggtgaggatctaatggtgtacaatgcattaatagatatgtactcaaagtgcagaagtttcaaagctgcacgctccatatttgattccatacctcgaagagaacgtaatgtggtgacttggaccgtcatgattggtggatatgcacaatatggagactcaaatgatgccctcaagattttctcagagatgatttcaaaaccatacgcagttgccccaaatgcttatacaatttcctgcattttgatggcctgtgcacatctggcagctcttcgtatgggtaagcagattcacgcttatgtcacccgtcaccatgaatatgaaccatctgtgtactttgtggcaaattgccttattgatatgtactcaaagtgtggtgatgttgatactgctagaaatgtatttgatagcatgcctaaaaggaatgaagtatcttggacttcaatgatgtcagggtatggaatgcatggtcgtggtaaggaggctttagacatatttgacaagatgcagaaggcaggctttgttcctgatgatatttccttcctggttcttctttatgcttgtagccattctggcatggtggatcaaggtctgaattactttgatatcatgcgcagggattatgatgtagttgccagtgcagagcattatgcttgtgttattgacttactggctcgctgtgggcgattagataaggcatggaaaacaattcaggaaatgccaatggagcctagtgcagttatctgggttgcattacttagtgcctgtagagttcattcgaatgtggaacttgctgaatatgctctgaacaaactggtcaatatgaaagcagagaatgatggatcctacacacttatctccaacatatatgctaatgcaaggcggtggaaagatgtagcaagaatcagacaattaatgaagaaatcagggattaagaagaggccaggatgcagctgggtccaaggtaagaagggtactgcatcattctttgttggagatcgatcacaccctctatctccagagatatattctcttttagagagattaattggccgcatcaaggttatgggttatgtccccgagacaaactttgcactgcatgatgttgatgacgaggagaaaaataatcttctcagtgaacacagcgagaagcttgctctcgcatatgggctcctcacgacttcccctggttgtcccatacggatcacaaagaaccttcgtgtttgcggtgattgtcatagtgcattcacctacatctccaagattgttgaccatgagatcattgtacgagattccagtcgcttccatcatttcaagaatggctcttgttcctgtggtggctattggtga

SEQ ID NO: 3387 - DNA, 221 bp, Zea mays
  Peptide Sequence Number=SeqID_45166
gaaaagtgcgttttggacttgaaacaagccctattgcaaatcctggtgaaaccaaggagaaaagacatctacagtactctgtctggtgtgcatcagacaacctctccaacggctacttcgacttcggccagtgctctaacgtggggctcaccgaaaagtccggtgcgcccgcagacaggaaggttttggagcttccaaatggagaagccaacggctcctag

SEQ ID NO: 3388 - DNA, 453 bp, Zea mays
  Peptide Sequence Number=SeqID_45167
atgggtaagagtaacaaacgcaagcgcgagccgactcctccatcagaggacttcagcgactcggaatactcggaggaagagttctcctccgagtccgaggggtctccggctcccgtctctcccccggcgtcgtctgacgattcagacgactcccagaggattgccgcgaaggtctggacttatatccgggccgtcgagcgctccgggctcgagggctcggatgagtcggagtactcctcggacgaggaggactcttcgaactcgtccgaggagggcggcgccggcgatggcggagacgacgatgacgacggaggcaacagtgacgacaacgacgatggcggtgatggcgacagcaggggcggcaatggcggtagcgagggcggcaacggcggcagcagcaggggcagcaacagcggcggcagcagcaagggcagcagcaaggccagtggctag

SEQ ID NO: 3389 - DNA, 279 bp, Zea mays
  Peptide Sequence Number=SeqID_45168
atgaagcgtgaccttaaccacgtcatgtcctttgtggttctatcacgggcacaggaggcgaagggtacttcaaccgttattaaagtcgaggtcaatgtccaagaaccatcgaagacattgaagcgaagggatttaccgtttaaagcgggggctcctcatgacttcgtgaaggtgaccccgccagctcggacggttccgagttgcaaccttagcgaggatcgaagacctggtgcctcaaagcgaagagtgccatgcatgggcgaggactacaccgtctaa

SEQ ID NO: 3390 - DNA, 1059 bp, Zea mays
  Peptide Sequence Number=SeqID_45169
atggcggcggtcgaggggacgaagaagaaggtaatcatcgacaccgaccccggaattggtagatcgatggtgcttcttcttgttgtggcgttcggatcgcagtccactaaccgaaccgaaccactgttcgacggagcagatgacgcgatggccatcttcctggcgctgcggtcgccggagctggaggtgctgggcctcaccactaccttcggcaacgtacacaccgcccttgccacgcgcaacgcgctccacctgctggaggctgttggcaggactgacatccccgtggcagagggatcccatgtaacgatcaagaaagccaccaagctgaggatcgcaagcttcgtccacggttcagacggcctgggaaaccaggacttccctccaccagctaccaagcctgtagatcagtctgctgctgccttcctggttgagcaggcaaatctgtaccctggtcaagttagcgttgtcgccctcggcccacttaccaaccttgctctggcagtcgagcttgaccctgcgttcccggagaagatagggcagattattattcttggcggtgcgtattcagttaatggaaacgtgaaccctgcagctgaggcgaatatctttggggatcccgacgctgcagatatcgtgttcacctgcggcgctgatattttggccgtgggactaaatgtaacccaccaagtggttctaaccgatgctgaccgggaaaagcttgagcagtgtgacagcaaatacgcccgctacttgtgcaagctaatgggcgtttattttgattaccacagggacggttacttcataaaaggagcgtatcttcacgatccaacgacggttattgctgcggtgaacccatcgctgctgacttacacagaaggcgttgtgagggtacagacagtcgggatcaccaagggccttactgttttcgacaacaccaagaaaaggtacggagagatcacagcctggagtggcatgcccaccgtgaaggtcgctgtcaccgtcgatgcccctgccgtggtagagctgatagtgcagaggctgatgaccgatgactag

SEQ ID NO: 3391 - DNA, 1413 bp, Zea mays
  Peptide Sequence Number=SeqID_45170
atggacgagtacgggaggctggcgctcaccgttgccgtggtcgcagcggtgaccacgagcggcgcggccgcgtggggctggcagcagcagccgcagccgctggcgccgtgcatgtacgtcttcggcgattcgctggtggacaacgggaacaacaacaacatcctgagcctggcccgggccaactaccgcccctacggcatcgacttctacgagggcccgcccggccgcttcaccaacggccgcaccatggtcgacttcatctccgacatgctccgcctccgcccgccgctactcccgccctacgccacggcgcgcccggaggacctcccccgcggcgtcaacttcgcgtcgggggcctccggcatcctgcccgacacaggaaacaacctgggcgggcactacccgttctcggagcaggtggaccacttccgcgcggcggtgagcgacatggggaacaggtcggagttccgcggcaacgccacgaagctggcggaccacctggggcgctgcatcttctacgtcggcatgggcagcaacgactacctcaacaactacttcatgcccgactactacgacaccgcgcgcaggtacagcccgcgcgactacgccgcgctcctcctccagggctactccacccagctcacacagctccacggcctcggcgcacggaagttcgtcatcgccggcgtcggcctcatcgggtgcatcccttacgagctcgcaaggatgaacgacgacgacagcaggccgtctgggcctaacaataaccaatccgctgctagccaagaagacattgctatatccattggcataggtggcggaggtggaggaggcggtgtcggcgtcggtggaggaggcggcggcggcgacgactggagatcaccgtccatgccaccgccatacgcagacggtggcagtggcaatggcagtggcaacggcaacgcagacggtggcaatggcaacggaaacagtagtggcagccgcaccggcaccggcaccacgaacccagcgcctgccggcggcgggtcatgcaacgagacgatcaacagcgcgatcgacatctacaacaggggccttctggccatggtgaagcgcctcaacaaccgcggcggcctgcgcggggccaagctcgtcttcctggacaccgtgcagagcggcaaggacctcatggcgaacgcggccgcgcacgggttcgccgtgctcgaccgcggctgctgcggagtgggccggaacaacggccagatcacgtgcctgcccctgcagcggccctgcgacgaccgcggcaagtacatgttctgggacgccttccaccccacggaggccgcccacaggatctacgccgccaaggccttcggctccaactccaccgccgaagtttaccccatcaacatcagccagctcgccgccatctga

SEQ ID NO: 3392 - DNA, 999 bp, Zea mays
  Peptide Sequence Number=SeqID_45171
atggcgccccgcacactctgtgacgacggcggctctcagcccccttacggaagcaaggggacgtgtgcgattggagaacaacgaggttatgctaccgaaattttgcacgatcacatgccttgtcataaaatatggggctcattgaccataaattctggcagtaagctgagtaccataagaaaaggacaagtactattcgaacctcgtggtacagaatcaagctcccatctcggacgaaggcaagcggcggccggatccgccgcctccgatccggaccccgccgcgccggtcttcccggtgtgggcgcgcacaccgagcgagtgcctcgcggagctgggcgtctcggcggaccgcgggctcagctccgaggaggcggcggcgcggctgcagcgccactactcggagttcgacgcggcgggcgtcgtccgccagatcgcgcgcgggctgcaggcgctccacggcgcgggcgtcgtgcaccgggacctcaagcccgagaactgcctcttcgccgacaggggcgaggcctccacgctcaggatcatggatttcggcctcagctccgtctgcttagtgtggcttgcgctagcgctatccagcactgctgcctatttctttccctgcgtcgtagtgctgctcctttttcctctcccctctcttcctctatacccgactacccgagcactacctgccaagccatggatcaggacaatgaggtcggctaagacttctcaatgttcctcatccgctacaagagtggccgatgaccgtgtgcgctgcctcagggtggatgtcatctcaggtgtcctctccagggataacatcgccatggacgccttggctgtctcccagcagcatcctttgcgtttccaggaagctgcccctccttttctgcatccactgaggagtgctgaggaagagaggaagtctggtcatggaagagaagagctgagcctatgcgggacaaaggagatggacgacgacggcgtcgatgaaggatga

SEQ ID NO: 3393 - DNA, 1320 bp, Zea mays
  Peptide Sequence Number=SeqID_45172
atggagcgagagggacgagacgcagccgagaagcccctcttggtaagggtgggcggcagcggtggtagccagggcggcagcgcctcctcttcttcggttgccgtggtggtcggctgcaccgccatcgccgtcgccggctccttcgagttcggaatgtcgatcggctactcgtcaccgactcagctgggcatcatgcgcgatctccgcctctcgttagctgagtactctgtgtttggctcgatcctgaccatcggagcgatgctgggtgccattgtcagtggatctgtagccgatcgagcaggtcgaagaggtagctattggtggcttgacatcggaagggtgctgatcggatgcggaatcgggattctgtcatatgtggttccggtctacatatcagagataacgccaaaggaccttagaggaggctttgcaactgtaaaccagttcatgatttgctgcggagggtcgcttgcatttgttcttgggacatttatcgcctggcgcaccttggcgatcgttggagtggtgccgtgtttagtgcagctggttggccttcttttgattcccgagtcccccagatggctggctaggtttggacacccaggtgcctttacaggagcactgcagacgctaaggggacatggaaccgatatctctgaagaggcctcagaaataaaagtatggacaggccaagagttcaaaacagtagtccttcagttgtatgcatcatgctcccttgctaattctacagtctattttgtccaggttttcacagaaaagcttcagcgccttccgaagtcgaagatgttagacctgtttcagaaggagtacatccgtgctgtcatagctggagttgggctcatggccctccagcagcttgggggtgtcaatggcgttctcttctacgccagtgaagtgttcgtctcggccggtttctcgtcgggaaacacgggaacagtggccatggcggtagtgcaggttccgatggtcggactaggggtgcttctgatggacaaggctggaaggaggccactgttgatgatctctgcagctgggacatgcgtgggttgcctgctagttggtctgtcattcttgtccaaggagcagcactgggaaagggacctgaacgtgttggctttggccggacttctggttttcatcggatccttttcactgggtatgggcgggataccatgggttataatgtcagagattttccctataaacatgaaagggtcggcagggagccttgtgaccttagcaccttcttcatcttcgcggccatttgcggactcacggtcgtgtttgtgcatcggctag

SEQ ID NO: 3394 - DNA, 651 bp, Zea mays
  Peptide Sequence Number=SeqID_45173
atgagtgagcagtgtaatgcacctgagaattctcattttgttggaagaacatcacattgcatagaagtggatgaagcatgtgataaccctgttgacattgaggagaatgatgcagatgaagtcaaaactgaggcaagactaatatggaaaccaaatgaagatgggagagtgcttatgaatgtttggtacatggttcgtaacgaggcaaagtggatgagctataatgatcatagtcagggcaagagaaaggaaatggagaagggcaacccagaaggaggaggattagaagatgttgaccttgatagaccaattggacagaaggcagcaaaaagatctgtactcgaaggaaaaataaaatctaaattaagatcgacaaatgtggaagaacttgatagatttgagaaaattcaaaacaatgttgcactcaatcatatgaaggctcttgaaatgcaaggcaagattcatcgtgacaagattgaggcgaataaaattgctttgcaggctgctaaagaagagaaggaggccaaaatgttggagacctattcaaacctactcaaacaagatacttcagaaatgcctgaggatattagaactgagcatgttgctgatctaaaatgtttgaggaacaaactgtttgcagaattttcttag

SEQ ID NO: 3395 - DNA, 354 bp, Zea mays
  Peptide Sequence Number=SeqID_45174
atgccgccagctctgcggcgaacgatcctgctggccgcggcggcggcgacgacggcggtgctgctgctgtggccggccgcctgcgtcgcggacgacgacggcacgacgttcccgccgtcggcgttccccttctgcccgacgcggccggccggggtctccacggggccgttcccctggtcgccgccgccgccgtcgtcggtggcggtgttcccgcaggatccggggttcttgacgtcggacgcttgcgcggtgccacggctgccgctgctcgctgtgttctctgttctcttggctttagcttggataatagtaaaactagtgtcactggcgttgaaggttctgaaatcccagtag

SEQ ID NO: 3396 - DNA, 537 bp, Zea mays
  Peptide Sequence Number=SeqID_45175
atggccggcgccgtgccggctcttcgacggaggcgggtggccgagccgaagacggacaagggatggcgggtggccgaatgcccgaattcactgagcggagggcgaaggcggactgcggctcatttcgcatgcacggctctacgccttggtggatgcaggagttgggagcagtcctgctcctgcacaccgccacagcggcgccattggccaccagcgcccagcgatctagtccaggcgtccagcagcgcccagccgcccatcgcggcagcagccagcagccaccagtggtcctctgccgtcctccggtccggtcctcccttctcccatccagcagcgtccagcagtgcccaccgcggcaccaagaggaggcaggagcggaggagcccactgcctaggagccaggagtccaggtcgcgcgaccaggaggcaggaagtcaggaacaggtctggagactacagctacagcctacaggctacaggtttgctctgttatgcctggtagaaagagacagcaaaattgcaaaatatgcctggtag

SEQ ID NO: 3397 - DNA, 357 bp, Zea mays
  Peptide Sequence Number=SeqID_45176
atgagcaaagctccgtctgaccatgctcatcagacccaccccacccccgccccaagcccccgtcgagctccgtggctcgttgaatgtcggctccacccttggctgctgggcgctggacgagcccaccactccgccccacgccctgccctctgcgactctgctcaggtggagtttcttgtccccagattagagcaacaccttaattttggcgtgtcctctgccatcgacccctgcgcatgcgccactcgctttggtgctccccgagttcttgtccggtcaaaccagaagccgttctctcgttcatcggttcagaaagataataaagagcagtacagttgctgcgacggcgatgcttga

SEQ ID NO: 3398 - DNA, 465 bp, Zea mays
  Peptide Sequence Number=SeqID_45177
atggacggagctctgctcgggttcaggcaagatccgagcagaacttggacgaactcggacacggggaacaaggagcagcaactgagcagggcgcgaactacacacgacctcggcgcggaagaatggagcaaaggacggcggctatggacagcaggcgcagctaggaggagctggggaatcgcgatgagcagagagctccggccaagcgtcggggaaaggaagaggagcaggggcgccgcggcctgcgacggcgagcagagcgctcgagcgcgcgcagtaggggacgcggtgcaggggagaacgcatgggagcagcgcacgcaggacgcgagcctgggcagagggcgcggccagggaactccgaccgacggctgccagaggaaaatccagccggagctggagcaggtgcgcagggaaccggctggaaaatgaagaggagcagcgggattccgagcgcagggactga

SEQ ID NO: 3399 - DNA, 900 bp, Zea mays
  Peptide Sequence Number=SeqID_45178
atggcggcgatgatgatggatagtaccgcggagaaagacctcgccggcgacggcgctgcggtgagcgggcacgggcaggacttggagcggtcttgccatgaccaggagcccgccgctgcagatggtgcgagcagcagaggcctagccatcgggcgtttcgtacgggagctgatggtggagggcgtggcgtcgttcctgctggtgttctggtccgcggtggcggcgctgatgcaggagatgcacggcacgctgacgttccccatggtgtgcctcgtcgtcgcgctcaccgtcgtcttcgtgctctgctggctcggccccgcgcacttcaaccccgccgtcaccgtcaccttcaccgtattcggctacctctcctggaccaagctgccgttctacgtggcggcgcagctggcaggctcgttgctcgcctgcctgtcagcgaacggcgtcatggagccgcgggcggagcacttctacgggaccgtccccatggccggcggcgacacgaggctgccgttcctgctggagctggtcgcctccgcgctgctcatggtcgtcatcgccaccgctgccagaggctccaatcagacagcaggagggctggccatcggcgccgccgtcggcgccctgggcctcgtcatcgggccggtgtccggaggctcgatgaacccgatcaggaccctgggcccggccatcgtgctcggcaggtacacctccgtctggatctatctcgtcgcgcccgtcgccgggatgctcatcggcgccctctgcaaccgcctcgtcaggcgctccgacgccatcatcgccttcctctgcggcgccaagcccagagtggtggcgccaggccagaaccgcgccgcgcgccgttggagcacttgcgtctccgcgctactagcaggctag

SEQ ID NO: 3400 - DNA, 318 bp, Zea mays
  Peptide Sequence Number=SeqID_45179
atggacatggatatgggtattaaaacttacccgtgggtattgtcaggtcggccacccactcctcgtgggccatggtgcatcgccccgtcctcgcctatggttcacgctggaggctcagaggtcgacgtcgcgccgcccgtagagctccgcacgtttcgagggagaactgcaccgggccgtcgcctaggccgaaagatcgccgcctcggccccacctaagatctgtgccagactcgacgtggcgctgcgccgccagctccactcccaagctccagcgacccgccagctctacgcccagtcaggtagtcacatgaactaa

SEQ ID NO: 3401 - DNA, 684 bp, Zea mays
  Peptide Sequence Number=SeqID_45180
atggccttcgtccgaagatcattatatccttggggagataatgcttcaatggacgaaggtgtccccatcaataaattgcaggctacttgcgcatcagagggacggggtttggggaagaccattcaaactattgcttttttgtcttctgttattggaaaaggaaatggccatggacaattaacaaacaaaggaaagatgactggtcctgtactcatcctctgccctacttcggtgatccggaactgggaaaatgaattttctgagtgggcagaattctctgttgctgtctatcatggtccaattcgtgatttagtttttggaaaaattgaaactcaaggactggaggatgtccactgtagctgtggaagtcctttacctcaggttgaatgttgcaagagaactgaaccagatggtgttatatgcttcttgccgtgcagctatggcgtggtggaggtggagctcgtcttgcctgacagccccttcgcatcccccaccaaggaggaggcctcatgcgctgatgctgtcaccgctgcagccgctcggaatggcagcagcagcagccctcgccatgtcccatgtggcttcaccgtcccttttcgcacccgcgtcttccaccaccctcgacctgcccccctacagctcctcctgcttctttcaggtgcccaggttttctcctgggcatga

SEQ ID NO: 3402 - DNA, 1167 bp, Zea mays
  Peptide Sequence Number=SeqID_45181
atgaggcgccggaacctaattgtgcattctgattccgacgaggacgacggcgagggcatgaccaccgccacaacccccgcctcagtttcagcttccgtcgctagcggcggcgtaagcggcagcggaagcgtcggccggccctcgccccaaaacctcagccccctaccagtccccttcccgtcactctcgctatcttctgcccccttcgtcatctccgatgacgacgaggacgtcgacgagatcgtggaccctgacggggactctcccatcgttgacgcccctgaggtcttctccccgccagctcctcccgcgctccatgctcccgctcccgctcccccttcccctccccctcctatcactaccccgtcccagaccccaatcccgactccaccttcggcacggaccccgaccccgactccgccttcggcgcggaccccgaccccgactccgccttcggcgcggaccccggcctcaatagcgcctccgcacccgtccccgctgagcggccggttgcgcccggtggacgagttcctgcggcggctcgggttgcttctgcggccggactggctcgagtcctgcgctgcggggattcccggcttcgacggcctcggtggtgttgaggcgcaggccaggcggtgcttcgagcagtttctcttcgccgatatgaactcttgcggtgctggggtgctgccggagggcgtcgggggcatgcacgctgagttccttgatggccccttcgtgcttcagaatgtattgatcgagaaaacgaggtgttatagcaatattcaagttcttgctatgaaattgcttctcattggtgatcaaaatggaaatgttgatgaagttgtcaatatttcagttcctttaaaggaaaggtatcgtgaagcaccggcaggacccaaaaggtgtttaaaactatcaatgacagatggcatacgacatatatttggaatggaatacagacccatcaaagacctgacagttcttgctcctgctggtttaaagattattgtaaggaatgtacacacaaggaggggtcttcttatgctagttcctgaggctgttgagattcttggtggtgtagttgacgaattggaagcagcgcgtgccagacttgtttctgaagtaaacaaaccacctcgtggcaaaaggtatattctttcatag

SEQ ID NO: 3403 - DNA, 918 bp, Zea mays
  Peptide Sequence Number=SeqID_45182
atgggagatgtgagctccacggtgggagatggaactactgcacataatgattcacatgatgatgcagaaatcacagacggtaatgctttccaggttggtggagctacagaaactgtggttgaagagcttgttagccctcttgtagcaaaccgtgtccaagaaatcaacatgcagggctcatatgcttctcttaccagggaaactactgaaacttctatgcatactacccatgaatatgatcccactcatatcactgaaaaaagtacagggaccgtcatggaagaacgtcctgatcctcctattctagcaaacagtgtccatgaacaaatgcagcgagtccaacctgctaacggtgcacaatcttcaaatgttggcaagatcaatcagatggaacagtctttcattctaagcggtgaaaatgaaaaaccatttacatacatatacagcatgcttattgactggggtaggcaacaggacacaaaagcctacattcaaggaaaaatcaagggtctgatcacttctgtaaaaaaatttcaatataaacaacgcaccaagtacgagctttatgtatatatagatgatgggagtttcatttcagaggccttcattgacagtgatattgtgaataacatgcttggcctttctcctggagaggttactgctgcacttgctggtgaattagagtttgcatcacccagtgaagtgaaagaaactttgaaaggatttcagaagtttttggtgaagtttgagggtatgatgcttatcgagttaaacaagaactctcctgttcctgttgttcgtgagttaaatgaaggttgctcaagttctactgcatggcttctgctcggaaggctgaaaacaatttcttctcagaagaagaccatccaaactcaggatattatggacaccactccatga

SEQ ID NO: 3404 - DNA, 678 bp, Zea mays
  Peptide Sequence Number=SeqID_45183
atgggttggcacgagacggagcgcgaaggagggaagaagccggagggagacaggcatacaaaggggaaacccgcggccttcgtgtttgtcccgcgcccaggtcggggtaatgatggcgcctcctgtgacgtggtcggtccgagcccagggttgggcgaggtggaggctcctccgaggtcgaggtcgagtctgtcttccaaggccgaggtcgagtccgagcccctgggtcgggcgaggcggagaccgtcggctgaggcctgggctgagtccgagccctggggtcgggcgaagcggactgagcctgagtccgagccctggggtcgggcgaagcggagttcgtcgtcttccggggctgagcccgagtccgagccctggggtcgggcgatgcggagttcgtcgtcttccggggctgagcccgagtccgagccctggggtcaggcgaagcggagttcgtcgtcttccagggctgagcccgagtccgagccctggggtcgagcgatgcgaagtttcctatggcacgtgtggccagacttggttgctgtcagcctcactctgtcgagtggcacagcagtcggagcggcgcaggcggcgctgtcctcttgtcaggccggtcagtggagcgacgaagtgactacggtcacttcggctctgtcgactggagggcgcgcgtcaggataa

SEQ ID NO: 3405 - DNA, 270 bp, Zea mays
  Peptide Sequence Number=SeqID_45184
atgtgccaaggacagtctgagctcaccttttctgacagctctgataaggtttcaaataggaatatagctggcaaggtttcaaacgggaatatagttgttactgtgtacggcggactgcccggcctaagggtgcggactgttcgcttatgcgcagaaatcaaaatcgtatattcaccccctctagtcggtgttctagatcctacaagtatcaaagccgaggactccattgtttatggatctaaccatttcagagttagacaaaatggctag

SEQ ID NO: 3406 - DNA, 2076 bp, Zea mays
  Peptide Sequence Number=SeqID_45185
atgacgcccgcggagacctccccgccggcgccacctccacgtgcttctcaccctgtctcctccccgctcctcctacaagaccccacaacccaggccacgtgcccttggagggagcagctcaccgtccgtggcgtcgccgtggctgcggcgctgggcgcgctgctctgcgtggtaatccaccgcctcaacctcaccgtcggggttataccggcgcttaacgtcgcgtcgggcctcctcgccttcttcctcgccgcggcgtggcgtgctgccgccgggtggctagggtttggccgcgggccgcccttcacgaggcaggagaacaccgtcatccagacgtgcgccatagcatgcgccggcctcgcgtttagcgcgtcccacgatgctgacacctcgatatcgagacgagggtgctccgcctcctacatctttgctatggacaggaagacttatgagctcgtgggaccagactatcccggtaatcgagccgaagatgttaaggatccttcacttggctggatgatcagtttcttgttcctcattgctctcgttgggccatttagcattgtcttgcttcgaaaggtaatggtgattgattacaagcttgcattccctggtggaacagctacagctttgatgatcaatagcttgcatgggaaaacggatggtgatcttgcagggaaaaagctgcactgccttgtaaaatacatgggcattagttttgtttggagcttctttaaatggttctttagtggtgttggtgactcttgtggttttgacaatttcccaacatttgggcttgaagcttttaaaagcacgttttatttcgacttcagtcctagttatgtcgggtttggttttatttcccctcatattgtaaactgctcagttttccttggatctgtcatatcttggggctttctttggccatttattagtgcacaagctggtcattggtacccagataaccttggtaacagtgatttcagaggcctatatggttataaggtcttcatagccatttcgattatacttggagatggcctatacaacttggttaagatatttattgtcattgctagagaattatgcagcatgcaatcgaaacaacatgagctgcctgttcaagctctggaagatgacgggagttgtgaacaactagcagatgagaaactacaaacagagatattcctcaaagatagtatatctccttggtttgctgcttctggttacattgtcctggcagcaatatccaccgccagtgtgcccgccatatttccccagctcaagtggtaccttgtcctcctgtgctacttcttcgctcccgtggttgcgttctgcaactcctacggaatgggcctcaccaacctgaaccttgccccgacctacggcaagatcgccctcttcgcgttggcctcgctcgtcggcagtgatggcggtggagtcatcgccggccttgcagcctgtggcatcgtaatgtccgttgcctgttccacagccgatctaatgcaggacttgaagagcgggtacctgaccctctcgtcgccgcggtcgatgttcactgcccagctgatcggcatcgcgctcgggtgcgtcatagctccgctcacgctgtggctcttctggacagccttcgacatcggcgaccctgacggggagtacaaggccccctttgccatcatgttccgggagatggccatcctcgggatggagggcttctccgcgctgccactgcactgccttgacatctgctatgccgccttcttcctcgccttggccaccagtctcctcaaggacgtggcgcccgcaaacgtgtccaggttcatccccataccgatcgctatggctgcgccgttctacgttggcgcctactttggcgtggacatgttcataggcacggcgatcttgtacgcctggcagaagctgaaccgggagcaggctgatggttacgcggtggctgtggcgtccgggctgatctgtggagatgggatctggagcatcccttctgctcttctgtccatcctgggagctgttccacccatctgcatgtcgttcgaggcttcctctgctcccaggtga

SEQ ID NO: 3407 - DNA, 318 bp, Zea mays
  Peptide Sequence Number=SeqID_45186
atggatcatgagatctggtccatcctcgagaaattccatgagggcaatgatcatgtgaaaactggatactttgagacgagggtttggaaggtgaaggtcttggtaatcatcgagtcacccaactatgagaccctcaccgtggatgagctattcagcaagctcaagtccatcgagattgactaccagactcgagcaagattgagaaccctgttccacaacaactgccaggaccagtggtgtagcagatcgaaggatggatgcttcaactgtggtgaccctgaccactttgttgctagttgccccaagaagggcaagtag

SEQ ID NO: 3408 - DNA, 171 bp, Zea mays
  Peptide Sequence Number=SeqID_45187
atgaccgccgccgtgattcgtgccaccgccgttgcgattcacgccgctgatgacccgataaggctgccagaacccaaaatcctaaccccctactctttgaacttcactgttgactccggaaaccctaagttctcggagttccgtgaaggaaagttgtattcaagactttag

SEQ ID NO: 3409 - DNA, 378 bp, Zea mays
  Peptide Sequence Number=SeqID_45188
atggctgggacacgagcgtcggctctggtagctacctgggcacaagcaagcagaagaccggagaaggataaagaatttgtgggtggcgtgaagataagaaagcctggtgctgctatcggtttcgagagttctcaaggcagcggcctaggaaaaaatctgggtgccgagcgtgaagatataaggccacggcagccgaatcaccagggaagtagccagataaggattagagcctgtggcgccgaggtaacacagctcggcgccataggctattgcgccgagaacggagctcggcgtcaagatttatggcgccgagctcgataccacgtcggcgccacgacgtccgtttatgccaacgcggcacgtaccacggcgccatag

SEQ ID NO: 3410 - DNA, 522 bp, Zea mays
  Peptide Sequence Number=SeqID_45189
atggcactgttgccagaaggtattactcaattactgcatcacaaaacactaccattaccattggaaatcaaggtccattttgcatcggcctcatccgtgttcgatccttcgtcgtcgtccacatcttcccctacactgcgcaagattacccctacgaccttcctggctatggggccatccccaccgcgcaccctccctgcccctggtagccgttgcgagacaactttcgccctctacgacgcccctgctacagtatggtctaccatggttcgggggcatcccggcccttctggcgttggttccagtcatttcggaggtcttctctacgctgcatgtcccgcctgcgagtttggtgcccgacccttttctgtagcggatcaactagccaccgccataactggccagcagtctcctgagagtcgaggagagcagcagtccagggctgctttccaccacttcttcaccgccccatgcctgtgccgccatagtagcattgcgatggcgtcttctacgggggtgtag

SEQ ID NO: 3411 - DNA, 603 bp, Zea mays
  Peptide Sequence Number=SeqID_45190
atggcctctggccgcttgccccctgcactcgctgtagctagcccccaccccaccgcgctctcccgcgccggtctggccgcgcgcgtctttgctgctcttgtcaaacacgtcttcaatccgctgccccctgccctggtaaaaaaagaggaagaaggagacgctgatgctaaccgccgcactactctactggtgcgtctgctgcgcatgcgcggagcaacagatgctacccggcgtacaaacacgcaagcagttccagatcgacgaggcatggcactactggcgggtcacagcgactctgaaccgatcactcaccacgactccgaaccggaccaacggcacgcccggccatggcccgtggccgtgctctcagaagaagccgcggcggcgcggcgggggcagcaagagggcgacgagcatcaaggcggcgacggcgacgagggccaacgccacgaggatgctctcgtcgacggtgagcaggcacaccttccccatggacggactcgcagcctggggaatggcggtgcagaggggccttcagctgcaagcgggcaagctcaagagcgatgcctggatgcgcgtccttgtccttgttatagttgttga

SEQ ID NO: 3412 - DNA, 369 bp, Zea mays
  Peptide Sequence Number=SeqID_45191
atggccatgcgagttgtcaagatcttcggcacgccgcagggggacgcgccgcacgtccgcctctcccgcagctacccgaacccgctcaatccaatactaagcctaaggacaactccaaactcttcgccatgcatgttgcagagggaggtgaaggggtcacagtcgcggtcgcgcgagctgaaggattcgagcgtggtggggacatgtgcgctaggggagggggagctggacggtggggcggaaagggggagctgccgtcgctcaaggtggtccaagacggcggctagggtttcatcggaggccgacgccttcatctccatatcaggcgctggcggcgggatccgggctgaggaggaggcaggcgcgtag

SEQ ID NO: 3413 - DNA, 1446 bp, Zea mays
  Peptide Sequence Number=SeqID_45192
atgccgtgtcaagtgcatacacgtgtggagtgcacacaagatagacatgatcaggagagtagtagctgcatgcagccattagtctctttccttgtgattgctgtattcttattcattaatactcaattgtatcttttggttttcaatgggccattgacagtggactacccaaaatcttctgaaagcagcccattgaaggctgagagagtggttcatatggacggagcccagctaattggtagacatgatgaagcaacaatcttcacgttgcgtcagcttgctgaggctaccaataattttaggcaggactctcttttggggcgagggggattcggttgcgtctacaaggcaactcttagtaatggacaggttgttgcagtcaaacaacttgatctaaatgggcttcaagggaacagagaattcctcgtggaggttctcatgctcaacctcctgcatcaccctaatcttgtcaatctgcatgggtactgtgttgatggcgatcaacgcttgctcgtttatgagtatatgccattgggatcactagaagatcatctacatgatcttgcacctaatcaacaacctctagattggaaaacacggatgaagatagctgctggtgcagcggctggtttggaatacctccatgataaggcaaatcctccagttatttaccgagacattaaaccatcaaacattctccttggcgaaggctatcatgcaaaattgtccgactttggacttgctaagcttggtcctgtaggcgacaagactcatgtgacaacacgcgtcatggggacacatggttattgtgctcctgaatatgccttaactggacagctgacagtgaagtctgacatctatagttttggcgtcgttttccttgagctaattacaggtcgaagaccacaagacagtgatcggcctcctgaggaacaagacctagttgcatgggctcgtccattgttcaaagaccaaaagaagtttcgcaagatggctgatccttcgttgtgtggccgcttcccaaagaggggtttattccaggcactggctattgcagcaatgtgtttgcaggagaaggcaaaaagccgacctcccatgagggaagttgccgcagctctctcttatttagcatcacaagcatacgacaggaacaacaacgctgctgctcatcgtaatcgtgccgggccttcaacaccgagagttctggacgaccagattggccaggacacctgcacattagctaatcaacagggagctcagatgtccatgcatgtcgggacagaccacgccatgcctgaagtgaaggaagcttcctgtagtggttcacatcgtggaggacggggcagggttaccccgaatggcgctgatagggagcgtgcacttgcggacgccaacgtgtgggccgaggcttggaggcgccaggagaaggcaagcaagatgcgatag

SEQ ID NO: 3414 - DNA, 108 bp, Zea mays
  Peptide Sequence Number=SeqID_45193
atggccgtccttttcgcgccgtgcacgcggacaacagtggcaccggaggtcgccttcacggtgcggccgcgcacctgggtgtcctccggatgcagcagtgcagagtga

SEQ ID NO: 3415 - DNA, 252 bp, Zea mays
  Peptide Sequence Number=SeqID_45194
atggaggttttctcggatgtgcaagcggcggcgatcccgagggccagcggcagtggtgccctgaggagggcgaccagcggcggcgctcctccaggatcgagcgacggcgatgctcctgaagcggacgagcggcagcgatgtaccctaggcccggtggcgacggcggttgcgcgaggcacggtaggcttcaacagcgtcgatggtggccttgagggagcgcggcgacaatggatcttgtaccgcaatgcataa

SEQ ID NO: 3416 - DNA, 399 bp, Zea mays
  Peptide Sequence Number=SeqID_45195
atgaccgttggtggaagctgtctgtcgtatggtgcaccggacagtccggtgtacaccggacatgtccgcggagcagccgctcggttttcccgaagctggcgagttcctgaggcgccgttccttggagcaccggacagttcggtgaattatagcggagcgcctctggaaattcccgaaggtggcaagtttgagttggagttctctggtgcaccggacactgtccgaacaagggaaagaagaaggctcccactccaagcccctcaagtgaagaagaggaagaagaagaaagtgatgatgatgaaggtcgaggatcttctctttaacatcgacatcaaagaaagagaggacgcttcgcatgtggggagaaggaccacttcagggacaactgtccaaatatga

SEQ ID NO: 3417 - DNA, 894 bp, Zea mays
  Peptide Sequence Number=SeqID_45196
atgagatcggcgccgcggtggccgacttcctcgagctcatgcgcagcacgggtgccaccatcctcctcctgggcgagcatgaggacgctctcaactccggacgattggaggcgcggttcacgtgcgctacggtactatgttgcggcattcgacgtcgtggaggcggccgggctggcggatgccagccctgcgagggccaaggcggaggagatgttcgcgcgggagatccgcaatgcggtggcattcgaggccgcagaccgcttcgagaggcacgagaccttcgccgggtggcggtggcgcatgcaggaaggcaggttccaaaacaccggcatcggcgaccgggaggcgttgcaggggtgcatgatcgcgaggatgtttgcgccgggcaactacagcatgcaagcactgctcagctatggcaccaacgctggggcaggcgtcctaatcctgtactgctctttcagtgtgcagtgttttaagctctcaagtagcctaacattgtggcgatttttggataatagccttctctccgacttccagagccgctcgcccgctgcctcgctcctgcccgagtgtgctactgcgccgtcggccgcccgcccaccccaacatccggacaccgccgtcggctcccactccccttctcattcctcgcgtcgcgcgccgctcacgcaaggtgacggcttcaccacggatagcggcgtacagatcctttcgtgccctagcccctggggttccgcaacacgccggcacgaccaagcaccaagcggtggcgctgctggtgtaattgggcagctgcacaggtccatcttcctcaacgaccagcagatcaacgctgaccagcagatcaacgctgcccctcagaccctcaggtactcagtagtcagcacttag

SEQ ID NO: 3418 - DNA, 165 bp, Zea mays
  Peptide Sequence Number=SeqID_45197
atggcgcgcagcagcttctccagccatggcgccaccgcgggcgaggagctccgccggggccataacagtgggaagcgtaggatctctgatgaacgtcatggatcagatttggcctaccctttggattcattaaattcgggtggtctgattgggatcgtgcggtag

SEQ ID NO: 3419 - DNA, 630 bp, Zea mays
  Peptide Sequence Number=SeqID_45198
atgaccgcgtcaaaaaaggctccgagcctccctactgatcaggggttcgaaggctggcccctcggaggggttcacagccgcctcaaagcgcgtgggctccacacccactactggtcaaaggttggccctcgaagggttcacagccgcctcagacacagagcgagggatgaccatgggtacgttcgatacataaccaaggctcgggctacgctcccgagggctcggactcgggctcagccccggaagacggcgaactccgctccgcccgacccagggctcggactcgggctcagtcccggaagacggcgaactccgctccgcccgacccagggctcggactcgggctcagtcctggaagacggcgaactccgctccgctccaccccagggctcgaactcgggctctgtcccggaagacgacgaactccgctccgcccaacccagggttcggactcgagctcagccccggaagacgacgaactccgcttcgcccgaccccagggctcggactcagccctggcctcagccgacggtctccgcctcgcccgacccaggtgctcggactcgacctcgacctcggaagacagactcgaccttgacctcggaggagcctccatatcgcccaacctaa

SEQ ID NO: 3420 - DNA, 594 bp, Zea mays
  Peptide Sequence Number=SeqID_45199
atggctggagccggtgacctcacgcgggcgaaggagggcacgaggcggtggcggttggccgggggacctcggcacgacggtgcggtgccaatgctgatgatcaccgggacgacgagcgagccttgccggggaaaatttgggtgcaggaggcctggcaacggggaagctttggtgagcttagaaacggccgcgcacagctcgggtgagtgcgctgaggacatgaatgaggcaggggggaagtgggcgcgtgcaggggattcaaggggtcggggcgacggtttcgcctggagaggcgacgtgggcacgacggtctcggcgtgcatgcacacggtccgctcgggcaggcggttgaaggaggggaggcgctggcagccaggacacgctgggcggtggcacagccgcgcgggtgcgcaacgggcaaaggcgctgatgggtggggccaccgggaagaggctctgcccggtgaagcaatctgagttggcttctcaatatatgtcaggtcctcttgaacttcgagatcctcggttggcagttgcttttctgattctcttgaaccattctgatattctcttcggcttcgagcaaaatatctag

SEQ ID NO: 3421 - DNA, 396 bp, Zea mays
  Peptide Sequence Number=SeqID_45200
atggcgaggcggagcgcggcggggcacgacgaaggtcgctgggcttgcgtgcgcgcgacggccacgggcgcaagcgagcgcggcgaggcggggcgcgacggagcgaggcggggcacgagcgcggcggcggtggggcgcgagtgcggcggcggcgcgacgggatttagggcaggcggggcgcgagcgaagagatttcgtgctgagtcagggatggacgatttaagggacactattttcgtcggcctaacggaggccgacgaaaataatggtcggttaatgacgtattttcgtcggcctctggaggccgacgaaaataatggtcgtattttcgtgggcctggcggagaccgacgaaaatacaccacattttcgtcgatcccgaggccgacgaaaataa

SEQ ID NO: 3422 - DNA, 471 bp, Zea mays
  Peptide Sequence Number=SeqID_45201
atgggggagccaccgccccgggaagcgccttggccaggccgccgcgccgggtcgggatggccacgcccacgccgttgtgccgctgggggctccgcacgccgggacgtcgcgccgcctaggggccgcgcccgcaccaccgaggcctggggccgcacccgccgccggggccaccgactgttgagggaaggggggacgggcatgggggagcattggtatcataatctacatgtagcgggagatgagaactatggtgctttcttggagaaggatggtgctggatttagaggtcaagtaaaactcactggcttgtcgaatggggatatcgaccttactaattctctttggacatatcagattggtttgaaaggtgagttttcaaggatctattctcctgagtatcaaggatctgctgagtggagtagcatgcagaatgatgacacagtttcacccttcacatggttcaagtcctag

SEQ ID NO: 3423 - DNA, 223 bp, Zea mays
  Peptide Sequence Number=SeqID_45202
atgagggaggttgtgggtgctggcaagatgaagcagtcgaaggcggagaccacacccaggtgcagcttgtcgagcatatatgatgaggctcagtttaccaccgcccaggcagcagttctcgccgctgatgcgatgcctaagccgagcgcccagccggcggcatcctcccccgagccccgtcgatttatcatcaaaagtcggcagtttaccgcgattggagcaa

SEQ ID NO: 3424 - DNA, 447 bp, Zea mays
  Peptide Sequence Number=SeqID_45203
atgaccgcgagaggcttgggtgaggggctacatcgccatgcacgagagagtggtttcccagtttggttgcgcgatgtccctgggatagaattccgcactgacaatgaaccctacaaggctgaaatgcagatttttgtgacaaaaattgtagatatcatgaaagaggagaagctttattcttggcaaggtggtcccattatactgcagcagattgaaaatgaatacggtaacattcaaggccattatggtcaagcagggaagagatacatgctatgggcagctcagatggcacttgcacttgatactggtgttccttggctcaatacttgcaatgccttttactgtgatgggttcaaaccaaattcctacaacaagccaacaatatggactgaggattgggatggatgcaatggatttaaatatctggaagattttaagcaaggatag

SEQ ID NO: 3425 - DNA, 417 bp, Zea mays
  Peptide Sequence Number=SeqID_45204
atggggggacgggtggcggcgcggcagcgcggcgggcagaagcagggggcatcggcgccggcgagcagaggaggttggggcgcggccggcgcgatccatcagagaggggcggagctgaaggggcggccggagcagggggcgcggccggcgctgaggaagacggaggttggggcgaccgacgctatccaccagagaggggcggagctggaggggcggccggagcagggggcgcggccggcgctgaggaagacggccggagcagagaggggggccgatgacggtgggcgcggccgccagcagccgggcagcacagggcgcgggccgtgcgggagctggggcggcggcggccagggcagggcgcctggcggcgcctggagggagcagagaggcggcggtcggcagggaaggaaatcctag

SEQ ID NO: 3426 - DNA, 720 bp, Zea mays
  Peptide Sequence Number=SeqID_45205
atggccgatagcacaaaccacaccaatgtcctcctggccaggaatagcataactcttattcatattggtaaccaaaccggaagccgacccaaaacaattcaagaccaatctaacacagttcagatattcttcaatgggtttaacaaaaaggaccacatcgtcagcataaatggaaagcctgtttcggactcctgctccttccaagctatgaagcagtcccctactttcagcagctctaaagagactactaagaacatccatgatcaacacaaacaacataggggaaacctatgcatcacctaccgagcaaggcccaactggtttctcacattacccacctccttatgccctcacgactgcaaatgtttagcgagccttttaagcttttgggacagcctctccaaagggcaggatgccagaattgtctgtcctaagtttgaccaagtctgtatagaaaaagtattgtcatctaccacaccaaaaagcacagtttctgataaaaagactatgtttgatgctccagaaggtaatggccctgttaccattgatcttgggagcatgggaaagggccaggcttgggtgaatgggcatctcattgggcgctattggtcactagttgcgccagagtccgggtgtccatcgtcatgcaactacgcaggaacatacagtgatagcaagtgccgatcgaactgtggaatcgctacacaaagctggtattaa

SEQ ID NO: 3427 - DNA, 865 bp, Zea mays
  Peptide Sequence Number=SeqID_45206
atggggaaaggggagaggggatgggggagggaggagagggggaggggggagctcaccggggaggggcgcgacggcgaggggcggtcggcggcaggggcggccgagggcggcggttgggcagggggcggcggcggcttagggcaggggccgcgcccgcgcgctgggagagccgtcgggccgcgcgcacggcaggttggccatcgggccgtcgcgtcggtgccgcgccgggccaccacgccgggtagccgggccggggccgcacactggggacatggggcaggagcggctggctcgggaagctcgccggggccgcgccgggccgccgaggccgcgcgcccacgccggaaccgcaccgggccggggcagcacgcccacgccggagccgcgcccgtgccaaacgtcgggcgccagagccgcgccgggccgaaccgggacaggcacgccgcgcggggaggggaaggccgagcgtgccgggcgggccgccgcgcgtgggggaaaggccgaggccgcctcgggcagagaggggccgagccgggggggcgagcgcgccgggccgccgtgccacggccgcaccacgtggaggccgggactggggaagaagagggggcggcggggaagaggagggagagagagaggtgcgtcgtgggggagagggagatgaacaggggcgaccggggcactgacaggtgggccacgcggcaatgggctgggggggggaaggcgctgcgccaactgggccgcgcgaaggccgaccagggggctgagggggggtgcttgagaccgaccgatgcaattcttgtggatctcttcgacctgtgggatgccaaccggacaggtgcaaaagggaagagtatagatagaaaag

SEQ ID NO: 3428 - DNA, 1032 bp, Zea mays
  Peptide Sequence Number=SeqID_45207
atgcctaaggtctgtgacctgtattgcgacggtggaatggatacagacaagtggtgtgatgcccaggttggccactacataggcatcgatgcctctgcatcgggtgtcaactatgcccgtgagctatgggagaacaggaggaaacctttcactgctgaattcatcgagttggatccttctgatgtagactctccctctatgccttccaacacaaacaaatgcgctaaggcgctggcacagcagtctttcgagctgacaattggtttatgctttgagaatgaagaacaggcaaagaagcttctgaacaatgtatcatcacttctcaaacctggaggctacttctttggcataactccagattcatctacaatatggacaaaatatcaaaagaatgttgaggcttcacataataagggtttgaagactgttccaaatagcattcgctcagagaactataccattacctttgaagtcgaggaagagaagtttcccttttttggaaagaagtatcaactcaaattcgcgagtgacgcggtgtttgagaatcagtgcctggtccactttcccacccttatgagattatcaagggaagctggacttgaatatgtggagatccagaatttaaccgagttttatgatgataacagaacacaattcgctccaatgcttggtggttacggtgcaagttttttggatgctcgagggaagcttgttgctcgttcctacgacattttaggtggtgtagaattctttttctttttagaagggcaggcctggtgcaacgatgagagctgtctcactgagtcactaggcttgtattcagcatttgtgttccagaagcctgatccagaggcaataccaccgattgtaactcccgacttgcctgatcctgataaaggtcacgaagagcaggagtggctccagccacagcaggcgtcagtggaagatgggagacgctcgcatgcggatgtgcttcccatagaccctgagaaaggcatcctgggtcctggacctgcagacatgaggctttag

SEQ ID NO: 3429 - DNA, 285 bp, Zea mays
  Peptide Sequence Number=SeqID_45208
atggcgaggcctcggcgcgacggcgcagccggcctgctgccaggcgcagtggccagggcagagcccctgcacgctgtcccagtgtgcctatccggctcggcccccttgccggcgagccgtcggcagcctgttccggccatcttcttcgacctcggcgagctgcccgcgtcgctcctcgcccgcatgttgtgcaccagtgcgccttggaatctgtcgaagtgtgaacgacaggtgcatgcaggcatgcagtcaaagtgtgaacggctctccacattcgatggatag

SEQ ID NO: 3430 - DNA, 174 bp, Zea mays
  Peptide Sequence Number=SeqID_45209
atgagtgtgtggagagtggcgaaggtgtttccgggtgcatgggatcctctgggtggcaaagatgtgtcgccagtccagcagcgggcactgctagagggcgccaccgtcggccttcgcccacattgtcatgcctcccttggttggtggccaaggagtgtcaccggagcacgctga

SEQ ID NO: 3431 - DNA, 171 bp, Zea mays
  Peptide Sequence Number=SeqID_45210
atgacgccgcaagccaacccgtatggatctgcccgctcaaacccccctgcgcccgaaccaggacctagagaaggcggagacgagagtggacatgatgaaggttacctcaacggtggaggaagcagcgacgctgatggtctaggactcggtcgaatcgatcgcgagtcttaa

SEQ ID NO: 3432 - DNA, 261 bp, Zea mays
  Peptide Sequence Number=SeqID_45211
atgtcgctactgagattgttgttgctcaagtccagcaggctctgcaactcttgtagcttgctgatatccgaagggatcagaccggacagggcaagtataattaagtggtacttcaacccagataccctattaactaatgtgtactacaataggttcactccgccacgcgcgcttatgcgcgctgaatacactagtctttctacaaatggcctcgctcggttagcctttcactacaggaaactggttaaagaacgtgggtga

SEQ ID NO: 3433 - DNA, 513 bp, Zea mays
  Peptide Sequence Number=SeqID_45212
atggccacgcctacaccagatcccaagcgtccatcaacggatctacggacatattttaatgttgccaagaggccgccaccggggtcgttccttcctgggatgaacgcgaaatcttcagtcgacaacccgcaagacccccggacaagacttcgagggcgcggtcgttgggcttataagctcacgcccccgcggatcacggtgggcagcgacagcgaccagggacgagatccggtgagcaattcccatgggtccgaagcttcccccgcaaattggggacacacagaggcgcgggacgggcaagcgaagcttcctgaccaccgattatggcgagagatccgattagttgcaacaaactccgagccacgcgcggagaagaatgggttaagttcagcggcgccgttcctgccggatgaccacggggaggggaagcagatagtccttaccggtgggtcccaccccaaagccacagcgcgcgcagcgcagtctgagccaagcgaaggggagcacgggtga

SEQ ID NO: 3434 - DNA, 612 bp, Zea mays
  Peptide Sequence Number=SeqID_45213
atggccagtccttaccactggagaggacaaggatgtggtccacgacatgtaaggcatctgtggctgcttcaatcctcccaagctctaatccagtttggctatgtcttgttaaaaatgtacaatgaaattgcaaatgaacatcaacatttgttttatcttgatttagatcttaaaatctgtgcgattgatgattctaatacatccattttactggttcataatgatactattttccatgttgtctctgcccttgctgttgaccatacaggatccagagtgctctctgatagctatgattatatgcatatgtacgacttccagggtatgaattcaaaggccattcggataattatggatgtaaggggatattacatatttatggatgtgtatgactttaaaaagaagcagaatgtcgccaatgtcctgactgcttctggggaaacttattttttcaagaagcagcatggtactcaagtttgggttgctcttatgttgatgataatctctgcagttccgggaggaataacggatctgtcattccatgctatgggatatatctggcagaccttaaactgcgttctgacggtggcatattcggtatttctttcctaa

SEQ ID NO: 3435 - DNA, 162 bp, Zea mays
  Peptide Sequence Number=SeqID_45214
atggtggatgaggagcatctagagaggatagaggaggcctccgaggtggatcatgattcaactcttgatgagcttggagatggagagggcactcaagttagccacgcaaaggctgttaatgtgggcgatgccatgcgggaggaagccacaagtacaggttag

SEQ ID NO: 3436 - DNA, 264 bp, Zea mays
  Peptide Sequence Number=SeqID_45215
atggcgaggcctcggcgcgacggcgcagccgacctgctgccaggcgcagcggccagggcagagcccctgcgcgccgtcccagtgtgcctatccggctcggcccccttgccggcgagccgtcggcagcctgttccggccatcttcttcgacctcggcgagctgcccgcgtcgctcctcgcccggggggtactcgactggttcgataaacttagcttcgagcagtctgtgtactttggccttggctgcttcggtcttctcgtctaa

SEQ ID NO: 3437 - DNA, 360 bp, Zea mays
  Peptide Sequence Number=SeqID_45216
atgtgttggcgacagttcatcgatcatcacaaacgccggaaaaacagcaaggacagcggggttctcacggaggatttacggcgtcgcggatggggctgcgcaaaaatagcaaacaaccggcattatgtcgaacactctgtgcacagcgaaaaggagcaaggggaggggctgtcctgggaagaagacaggggcgctgttcttgggagaggggctcggcctccatggggaagaaggtccccggcgctggctgtgtggggagaacgagaggaggcgggctggttttccatgggaggtgtaggggcgcgctggagaggggctagagaagaggcgtcgcggtgtgctgctgagggagggacatag

SEQ ID NO: 3438 - DNA, 540 bp, Zea mays
  Peptide Sequence Number=SeqID_45217
atggcaaggcgaggtagtgttgcagcggggacagggaatggtcgaggtggacaagagtctaaaaagtacgtcggaaccaaggtggccaagacatcgatgccaagtggaggcagaggcagcacaggcaagggtggggcaacacaagatgatggaggtggggcgagaaagcgaatggaatatataggggctagaactgtcatatcgggcacgacacgagtggagtggtatggtgccaagcgccggagtcagccacccagtcggtggaaggagtgggtggtgatgacatggggatggggaaggagagccatcagaggcacccccatagagccaccgggaggggtgctggagccggcagtggcgagcatgctaacagaagtggtatggtgccaggcgccggagtcagcaacccagtcggtgggaggagtgggtggtgatgacatggggatggggaaggagagccatcagaggcacccccatagagccaccgggaggggtgctggagccggcagtggcgagcatgctgacggcgatcacaagtag

SEQ ID NO: 3439 - DNA, 5568 bp, Zea mays
  Peptide Sequence Number=SeqID_45218
atggaggccgccgctgccgacctcatcgccgccctctcgtccccatcctcattcgctggcctctactctcgcttcgccgcctacctacagcccttcaccccctacctgcacagctcaaaccctaacaccaagccaccgcagaagagggcgacgaagcagaacaagcagccgccgcctcccgacgcggccaccctccgcccccttgcgaagcgattcctgccgtttctcggtcgcgcgctccacctcctcccgccgctcgtccgcgcttgtcctgtttcgggcgataagggcggcgaagccgccgacgaactgcttgagatctacggcctcctcttggactgcctagaggccatatcaccctgccttgcggggaaaccctactccgtgttgctccaacgcggccgcttcatctgttgcctcgagtcgcgcggtcacttcgcacgcgccagtgcggaggctgccgctaccctcgacgccctccgctccgcgctctctccacccaccacgagcaccaagtcgcgacgtggtgctgcaggcgttgatcccgtcctccttccggaccccggcagcgctggggaggctggcacggatcctgaagtcaccctccttgcggttgagctcactgtttgccttgctaattgttccagcaagggcaaggtgaaggaacctaccccttatgaacgactcatcagccttttcaaacagctaaaaccatggcttcgtattcttactaatgaagtcagcaggaagtatctcccgttgcttatgaatgccatgagccggtgtaccctttttctggtttctgagtcttcccttttcaatactgatctagtgcatggattctgtcgttacacgatgcaagagtgtgtgggggaggggatgattgagcttttgccagcaattgctcgcaagatttgctcttctgtagatttgacttggggagggagcacacagcttttgctccatgtgctaaaaactgtcactgattctgttgtacgtttaaaggatgatttaccaaaatctgtaaatgagcttctggtatttgtggcgtatttttgccggttcattctttctgccaatagggatttatctgttggcgcttcagaactactttataaacaaggtggttatttctctgaggtttcctctcctactgcctcaatgcttcttctttatgcgactgggttatacttgagtgcccagcaagcagaaagtgaaataccaccctatttatcggtgggtattcccaaggatcaaaagtatctacatgccttagagaagggtcttggcacattagcacgatgcccacatgataatacatctttggtcacatacttggactctttggagtttattagcaagatattatcacagcaagtgaatacactttggaaggacttctctgaaggaaaaccaacccattattctggtaacatggactatgtcttgacagcactgcatcagttcattgattcgagcttcacgtcttttagctgtaggcaaatgtctcaaggggacaacgagagacagcatgaacaacatggaaccttactgacagtccttgtttccgcgatcaagttttcctttcttaccaagaaagatatccagaagagcttgggtttcatcgtctgtgccatttcaagtaaatggtttacacttgaggagctcaaattcttgataccttcacttggcaacatcggagtgacacttcataacactggacatgttaaagaggcaccaaaggctttagaactgtgctgccaaacaatatgggcacacatcagccttttttactatagactatcttcaagaacaaaaggaaacgacattatgacagatctgtcgatggatacactgaaggatatggatatcattttggatgcattttcaagaattgcaaagatggttgatgctctctgtagatgtggcacagagatagaaacaccacttgtgattgttgcgaagagtttgtctataatgttgcctgatggcgacaattctgaatataacaaatgttcttttatactgatcaaggcatgggttaaggcagtacacaaggattttagggatactaaggtggatgatgctccacttctctatccctttcttctgaaatatcggtctccatggccaattaagctgataggcttaatagtagagcaggagttattagcatatggattaactgaagcccgaagcatagaattctgctctaaaatgcagataaggatcatagatgttctgcttcataaaatttactgtacgaaagaacattttttggagagatcaagggttcttattagaaaggcaggtgcacttcgtgcatctggagtggaaaacataaaaaactgccttgagtctctacgtgatgccatatctttactgttggccattgcgtactgtttgtatgcgcagtgtgctcaggaagacaaacttggtggggaggtaatatttgatagcgctgagaaagcacttaacttgtggttggacatggaggcttttgaccattcttcttctgatatggtcttgcaacagccatcaaaaactattgtaccacttatttgtttcctggttgatttgttgtctatgaagggctgttttgagcttcagtttaagttgtgcaaggttatgataatgatatggaagcaagaaaaattacccattgagaagttgttgtccttgctgttcaccagtgggcgccttagtcatgcatgctgttatctcccactggatgagcgatttctttctattgccaaagagcatcttggtagaacgctgcctagtgccttatttattcctcaatcatgtaagcatccctttggaaggcagttcagtttcgtcacgagtgttgatgaagtcagcaaagttgcctcatctctggtatctggagatacttcaaatgagcaatctacctttctagctggatgtttatactatgacttgtcagaaaaagttttttcacgcggacaacttttccaggccttttcatatggaaacaaagccctccatttgcgcaaaaagctcctaaaaaagaagttcaaaatcaattcgggcatatctggaaatatggaaagacaacactgtgggcaggacatctctcttgaagtgtgtggccctacaatagttgagatttggccaaattccagcagttcagtcaacactaaagattttttccttaccccatggaatgtccttaggtgctatcttgagagcactttacaggttgctatgatgcacgaattgattggcaatggtgctgaagctgaagttctcttacagacaggaaaagagatatcaaatttccatggtttatcagttttctgtattgtatttacatcatttctaggtcaactatattgtaagcggcagctatgggatgaagcggagagtgagcttaattatgcccgagatcttgtgaaaaatgatgcaacaatttcatttcgaaggaaaaactcagggaatgctgaagctggtccacctttagatgcaaaagcaaggaggtcatcaagaaattcatcacgtttagctaagggacagaatgtagagactcttgcaaagactagaactcgctctagtaaacgaaatgcatgtatgaaaagtgagaaggttttaactgagctaaatagtaaaaataacgtaactgggagtaaggaattggctgcagatgcttctgtttgtggtgaagcagagtgttttcctgatggcattgatcacagcaaagacgacctatgcaatatgtttggttgctggagctgccttttcattaaatccctcaattcggggtgcattcagaatattttgcagctgagattggactatgttcaccgacactaccttgtgtcacttcttttaaaaaaagctagagccttgggatctcatagcaatggggactgtgaagttcatagtgtctattggaagtgcatatcactgctgttcttcaggtcccttccacaagattgctgtaggacttatgggccttatttaattggactaatcatggataggagcattggtgattttcttcctttagagtgtgcagaaatactattcaatatgagcttcttcttgctaaaaagccccctttctgaacagtcaagggacatctgctgtatcttctctagtgtaacaatggcagacgttgtcccctggttgctcaaagcttttgttctatccagagagagcccctcacttgttcaggaggtttgcaagttacttgcatgcatattcttgctatcaactacagattcctcaattcaactgcctttgggttctcataaagaatctctttctttgaatcactgggccacatacttccatcaagtttctgtgggaactaatctcaattgtcattactttgctagcttacaagcatcgtccgaggaaaaggttccaaaggacacctataaagatttcagaaatgagacagatgacaatgtctcgaaatttctcaggttgtcatcaagggacatcaaatatattgagaaacatatgacagaattcttccaaaaacttcctgatgtaccagttctgtgcattagtatgcttggaggtgattatgttaatgcccttctgaaattccattgccatcctccgttttttcctgcttggatgttgctttcaaggtttgattcaacaaatgaacccacaacattgcttcttccagtggattctatttcagaaatgcaatttgaagattcctgcaccaaagatttgggcaatccaacgagagttttagataagtggcaatgcccttggggctatggaattactgactatgtagccccagtttttagaaatatactcgaggagaattttatgtccctctccagcgcaacccttactattgatgatgtaaatgcagatcgtgtcaggtggtggtcccatagaatgaagctcaacaattaccttgctaacacattgaaagacattgaagattcttggtttggaccctggaaatgccttctgttgggccatcaattatctgatgaacacattgagactgcctcatcaatgattatcactggtctggatacagaattcgaatttgaagtcaatccaatgctcatcaaggctatccttggtggtgctgtgtcagtggatgaagtacaagaatgttttctccaactcattttgtataaaggttactttggaaggggaggatgctgtgggaaagatagacttaaagctttctcttcctgccaaatggatgatggatctatggagacactcaaacgtataataacggatgcatcatatgagttgcctcagccagctgatagagatccagttattttagttcttgatgtcaatgttcagatgcttccttgggagaacctgcctgtactaaggaatcaagaaatttatcgcatgccgtcaatgggtagcatctttttagcattatctcgaaccaataatgattacaaagatcacagttctccttttcctgtcatcgatcctttcaatacatattatctgttgaatcctagcggtgatctgagtagcacacaagaagaatttgttcagttattcagaaactatgagtggaagactataaattgccaaatttag

SEQ ID NO: 3440 - DNA, 390 bp, Zea mays
  Peptide Sequence Number=SeqID_45219
atgctgtatgctgcacggcatgcactttcgcagtattgctcgttgttcagcggggtggctgacgatcttaacctgaagtattacccccaccgctcaactggcaatactagaagtgtgcttgtctcactagtaggtgaaggcaatcctaggttgaacaacgcagtcaacctagtcgttgtgctcaacacggagctggaccactcccttgacgagctgagtagggctcgtgctaagatcatagagttgcgggcggagcgtgcagagcaccgtcatcaggaatatggttctcccgctcccgctgggactcagcacccgtattgctcaccgccacgagggtaccatgcttatggcacgcctgactatagaaccaagctagatttggatcagtag

SEQ ID NO: 3441 - DNA, 198 bp, Zea mays
  Peptide Sequence Number=SeqID_45220
atggttggtttacagatggtgataaggatgatgattttgactatggtaatggttgcctttggtgcaatctatgctcaggtaaagaagaaggcgtcgaggcagatctccaggagttctaggacttcgacgagctcgaggattaggctagcaacctcccctagtcagctgcctatgaattggttaagtcattacatctaa

SEQ ID NO: 3442 - DNA, 1617 bp, Zea mays
  Peptide Sequence Number=SeqID_45221
atgctctatagtgggagacgcccaggcattaaggatggtattgacttccaaaagggagacaatgtcaagcttaatgcccctaagaaattgtccaactttgttaagggcaaagctcccatggttcaggataacgagggttacattttatacactgtcagttatcccgaacacaaaattaggagaattcactctagaaagtctcactctggctctcatcatgcttttatgtataagagtgaggcatctagttctaggcaatccactcatgctaaattgcctaagaagaaaactcctattgcatcaaatgaacctaatatttcatttaagacttttgatgcatcatatgttttaactaacaaatcaggcaaagtagttgccaaatatgttgggggcaaacacaaggggtcaaagacttgtgtttgggtacccaaggtttatgcatccgggggttcaagttggataattgatagcgggtgcacaaaccacatgacaggggagaaaaggatgttctcctcctatgagaaaaatcatgatccccaaagagctatcacattcggggatggaaatcaaggtgttactgtctttagaagaagtgatgattcagtagcatttacgggagtgttagagggtcagctatacttagttaattttaatagagctgaactcgacacttgcttaattgctaagactaacatgggttggctctggcatcgccgactagcccatgttgggatgaagaatcttcacaagcttctaaagggagagcacattttggaactaaccaatgttcattttgagaaagacagggaaaaatcacaaacccaagagaccttaaagggattcttgagacgggctcaaaatgagttcagcttaagaataaaaaagattagaagcgataatgggacggagttcaagaactcacaaatagaaggctttcttgaggaggagggcatcaagcatgagttctcttctccctacacacctcaacaaaatggtgtagtggagaggaagaatagaactctacttgacatggcgaggaccatgcttgatgagtacaagacttcggatcgagtctttggtagcaaatgctttattcttgttaaaagaggtagaaaatccaaatttgctcctaaggctgtagaaggctttttacttggttatgattcaaacacaagggcatatagagtctttaacaagtctactggactagttgaagtttcttgtgacattgtgtttgatgagactaacgactctcaagtagagcaagttgatcttgatgagctagatgatgaagaggctccgtgcgtcacgctaaggaacatgtccattggggatgtgtgtcctaaggaatccgaagagcctccacatgcacaagatcaaccatcttcctccatgcaagcatctccaccaacccaagatgaggatcaagctcaagatgatgaaaatgaagatcaagaagagccatctcaagaggaggacaatgatcaagggggagatgccaatgatcaagacaaggaagatgatgagggtccaagaccgcctcacccaagagtccaccacgtaatacaaagagatcaccctgtgaacaccatcctcggcgatattcaaaaggggtaa

SEQ ID NO: 3443 - DNA, 255 bp, Zea mays
  Peptide Sequence Number=SeqID_45222
atggcggtgggtgcgctgcaaaagggggcgtgggtggcggtagtgcgctgcaaagggggcgtggggcggtggttgtgcgctgcaaaggggaagtggggcggtggtggtgcgcatggaggcgggcacgcgtgcgggggcacggctggactgggtccttcgggagctaattccatgcttccaggaaaggctttctgggatcttattgataaaggaacttttctcttcagatggctgaagatgagaatggaagcataa

SEQ ID NO: 3444 - DNA, 990 bp, Zea mays
  Peptide Sequence Number=SeqID_45223
atggcggaggagcccgccatcgtcgtcgccgcctcctccagctgcgaggtcgacctcggcaacctcatggcgtacgacccgtgtcaccacgtcgcagccgccgcctccgcctccagaatgcgtggtcttgctggggcgaaaaaactcagggaggagctgaggcaggagtgcctgcggaaggggacggagctggcgcaggcggtggccgacgccctcttcgcgctgccgcccaccgaggaccgcgacggccccatcgtccacctcccgccacacaccgttcgactcccgcgcgagaagcatctacccaagcccaagccaccgaccaagtgggagctgtttgcaaaggcgaaaggaattaccaagcgcaagaagaacaagcgtgagtgggacgagcaaactcaatcctggaagcggacttatggctatgaccgtgtaaatgatgataaagacgttccgattcttgaagccaaactgactgacgagcctggtgttgatccctttgcacagagaagggatgagaagaagaagagggttgaaaagcaagaaaaaagcagattagagaatttaaagaaagctgcaaagcttgctgcgaaggccttgcccatcacaggaactaaagctgaccttccaaaaaaatctagaaaagaggatcttgagagtgttgttggcatggcttcgtcagcaacagcaagcggtgggaagtttgacgagaagttgcctggcgagaaacctccaaagcaccctggcaaacatagaaagttcctcccagttgctgaggggaagggaatgggcagcctggagaaacagcagaatgacaaaatcctgagctctctacttgccagaaactctgatgaaccgcttgatgcaattacaatgtacaaggtgaaaaaggaaaagcagagaaggaaagagaaaaatatgccatcaaaatctgataagcttaagccccagaagaaaccccacaagaaatcatcgaagaaaagggcttag

SEQ ID NO: 3445 - DNA, 3372 bp, Zea mays
  Peptide Sequence Number=SeqID_45224
atgtcgcactgcccccgcgcctcactctccctcgcgccgccgtcgcccttcctcttcccccactgcccgtctccgcgccggcggcggcgcccgcgcggtcgcagcctccacctgacctcgcgccccctcctcaccctcgctcgcttcgacccgccgcggctgttccgcctcaaggtctccgactccagcgcctcccccggcgaggccgctcacgcccacgcccaccacagcaaccaccgcgcccacgcccaccacagccccgcgccgtcgctgctcccgtggccgcgggccctgatcggctcgctcgcgccggtatggcgggaggggctcttcctcgtgcgctgctccgtcttcgccgccgtggtctccgtcgccggcgcgctctcctggttcgcgcagctccgggcccgctccttcgtcgaggcccgcctcctgcccgctgcatgctccgcgctcagcgagtacctccagcgggaggtccgcctcggcaaggtgcgcagcatctcgccgatcgggatcacgctgcagacctgctccatcggcccgcacgaggaggagttctcctgcgccgaggtgcccgtcatgaagattagggtacgccccttcgccagtcttaggaggggaagggtcgtcgtggacgccgtgctgtccgagccctccgccctggtggcgcagaagaaggatttctcgtggctcgggattcccgcgccctctgagggcacggtcaagaggcactcgggggaggagggcatagactaccgcaccaagacgaggaggcttgccagggagaaggccgcggagcaatggaacgaggagagggataaagccgcaagggaagccgctgaaaagggatacaccattccgagcggccaatcggttcctctgtccagtaatgagattctggaggctgatgggcctaccgagattgggaagtccagtccacccctttgcgctgatcaaatgcacaagaatgatcatcacttggcaacaggcatcgactctggttcaaagcatgcagatttggagaaatcttttggcttcaaatcgcccattccagggatcaacctctggtctagggtgatttcaagccctagtaggctcaggtacatgagaaaggctcccagcaaggttattccagatgttgataattcttctcagcaaaggattcttagacgcagtgcagatgctgctgtatcatattttcagaacacaggtcacattaatattgatgattcatctcctggaccaggaaaaggctcgtcggatggtggtcatgccaatgttggtggcagtggaatcaattcaaatgatgaaactgtcagcaactctaagactgcatcaacgagtttggctgaatccccatcgcatagtcaactatctagtcagtgcagttcaagtaatttggataacttgttactatggcacaatttggaagatctgcagatcggtcaggccaagaatccttctggaaataagcctgttccacaccaagaaaatatttttgggaattttggttcatgcacacatgctcacaactgggtgccattttggccgttccaattaaagagttgtcctgtcagttttaattcaccttgggcatctctggaccttcaaattgagaaattgaagtcacaatttgccattggtcctggagatttctctgctgaacttacagaaggggttagtgagatccatcctggtggtgttcagaatgcacttccaatcaccctggattctgtgtatttcaatggaggtaacttgatgcttctgggatatggtgatcaagaacccagagaaatgaagcatgctagtggtcatgtcaagttcaaaaacaattataatcgtgtacacgtgcatgtaactgggaattgcatggagtggaggcaagaccgatcttctcaaggagggggttatctttctacagatgtatttgttgacatagctgaggaaacatggcatgctaatctcaatatagtcgatgcatttgccccgctgtttgaaagaattttagaaatacctgttgtttggcacaaaggaagagctaccggtgaggtgcatatctgtatgtcaaagggcgatagttttccaagcattcatggtcagcttgatgtgaaaggtcttgcttttcagatattggatgccccatcatcattttctgatattgtggcaaaattatcatttcgtggtcaaagagtatttctgcacaatgcaagtgggtggtttggtgacgctccagttgaagcttctggagatttgggactaaatcctgaggatggagagtttcatctaatgtgccaggttccatccgttgaagttaacgcacttatgaggacaatgaaaatgaaacctcttatgttcccattggctggttcagttactgctgtatttaactgtcaagggccccttgatgctcctgtttttgttggaagtgggattgtctcaaggaagtctttttcagtatctggtatgcctccatctgctgcttctgaagctgtgatgcaaaacaaagaggctggcgcagttgctgcatttgaccatattccattctctcatgtgtcggccaatttcacgttcaaccttgacaactctgttgctgatttatatggtattagagcatgcctattggatggcggagaaattcgaggggctggtaacgcatggatttgcccagagggggagggtgatgattctgctatggatattaatttgtctgggactattctgcttgataaagtattgcatcgttacattcctggaggaatccaactgattccactcaagattggagagctcaatggagagactagactttctggttcccttattagaccgaagtttgatatcaaatgggctgcaccaaatgcagaagattctttttcagatgcacgtggcaatattgttattgcacatgattacattatggtcaactcttcatcagtctcctttgatttaaatagtcgagttcaaacatcatatattaatgactacttgttgaacaaggagacttatcaaatgaaaaaaatcatgccactaattgtggagggtgttgatttggatttacgtatgcgaggctttgagtttgctcatatagcctcttcaattccttttgattcaccacgtccattacatttgaaagcatctggaagggtcaaatttcaaggaaaaatcatgaaatctagcaatatagctgatggcaatatcaatggtgttcttcaaagtaacattgaccaaaataagcttgagaccaatgcgtcaaagcttgtaggcgacatatctctttctggaattaaactcaaccagctcatgctagcgccacaatctactggttttctttccatatcacgggattctatgatgcttcttttgatttga

SEQ ID NO: 3446 - DNA, 1155 bp, Zea mays
  Peptide Sequence Number=SeqID_45225
atgatcccgacgcggtccgcgcaggcgtcgttccgcgaccgcaccaacgagttccgcgccgccgtcgagagagcgcgccgccacgccgtaccttcctcgtcgtcagcccccgccgcgccgagtagcagctctaccgggcccctcgacgggttgatcgcagccacgtcggctcgctcggagttcaacaaccgcgcgtccaagatcgggctcgggatccaccagacctcacagaagctatcccgccttgcgaaattggcaaagagaacatctgtttttgatgaccctacagtggagattcaagagttgactgcagtcattaagaaggatatcacggctttgaattctgctgttgtagacctacaagctctctgcaattcacaaaatgagagtggcagtctctccaaggacacatcaaatcattccactacagtcgtggacaacctaaaaaatcgtctgatgagtgcaacaaaagaatttaaagaagttcttaccatgcgaacagagaatttgaaggttcatgaaaatagaaggcaaatgttctcttcgtcagctgcaaaggacgcgtcaaatccattcatccgtcaacgaccccttgttgctagggatccatcagagtcatctgtgcccccagcaccatgggccagcgactctgcatctaccccattattccagaggaagaaaactaatggagaccatggggcatcatcatctcagcctttcgcacagcagcaacaattggcagtgcagcaggacagttacatgcagagcagagctgaggcccttcaaaatgtggaatcaacaatccatgagctgagcaacatatttacacagttggcaaccatggtttctcaacagggagagctagcaatcaggagcatatatcttcatggaccttatcccccaaacagctcctgtattatcagtccacgctgcccttattgtattgcattgacttgtcctattggctatcaattgacgggttgcccctatgacagaattgacgagaacatggaggaaacagtggctaacgtggagggagcgcagggccagctcctgaagtatctcaacagcatttcgtccaacaggtggctgatgatgaagatattctttgtgctgatggtgttcctcatgatcttcatattcttcgtggcttga

SEQ ID NO: 3447 - DNA, 2352 bp, Zea mays
  Peptide Sequence Number=SeqID_45226
atggacgcactaacaaattctatagttgttaaggcgtcacttaagagacgcttaagcggctttggctttgggcaattgggctggtataacgtgcaggactgcagtgtccagtgtccagtgtccagtcgtgctgtgttgagtcgtgctgtgttgtttgggctggggcgctgggatgtgggcgtccggctcatatcacgattataccagcccaattgcccaaagccagattttagtgttgatgcctatatcacgcgtgcacaggttcaggatgatgcagattttgatttcaatggtgaagattgggaatggggaacttacaagacacagcgagttctcgcatctggttcattcagcaataatgatggtctgcgtcttgataaattatttatccagaaagataatgccacccttcatgctgatggttcgattcttgggccgcttacaaatcttcactttgctgtgcttaacttcccagtcggccttataccagctttagttcaggctatagaatcatcaaccacagactcaattcattttctgaggcaatggttgactcccatcaaaggtattttgcacatggagggagacttgagaggtactctggcaaaaccagaatgtgatgttcaaataaggctgcttgatggcactattggaggcatcgatcttggaagagcagaagtattagcttctgttacccctacaagtcgtttcgtatttgatgcaaatttcgaaccgacaatacaaagtggacatgtaaacattcaaggtagtataccagtcacttatgtagacaacagctcgatagaggaaagtccagaagaggcagatgggaaacaaggtatcataagaatccctgtttgggcaagagacagaggatcatcgaatgagatcagtgaagcaagaatggtgagagacaagacagaggagggctgggaatttcaattagctgaaaaacttaaaggtttaagttataacatgctagaaccaggtgaagtgaggatagatgcagatataaaggatgggggtatgatgctgataactgcattgagtccttatgcaaactggcttcaaggctatgctgatgttttcctgcaggttaaaggcactgttgatcagcctgttgttgatggatcagcaacgtttaaccgggctattgtgaactctccttttcttcggacaccattgacaaattttgcgggtacaattcaagtcatatccaacagactatgcatcagttcaatggaaagcagggttgggaggaaagggagattgtcgatgaaaggaagcctacctcttaaaaatagcgagccatctgccaatgacaagattgatttgaaatgtgaagttctggacatacgagcaaaaaatattttgagtggccaagtagacagccagctacaagttacaggctcaattttgcgaccagatctttctggaatgatccggttgagtcatggtgaagcatatttgccccatgataaaggcaatggtgctgctgtcactaggttgacttcaaacaagtcgagttatcttctttctggttttgaccaatcaaccacttcgcaggatgtctcacgaattctggggtcactgtcaacatcggcagaaagagatcaatcagacacagaaaagactcttgagcatggaagttttaatccaaacattgatgcacggctaaatgatctgaagctcaccttgggaccagaattgaggattgtttatcctttaattctgaattttgctgtcagtggtgacctagagcttaatgggatggttcatccaaagtatctaagacctaagggcatcttaacatttgaaaatggtgaggtcaacctggtagctacgcaggttagacttaaaaatgatcatttaaatgcagcaaaatttgaacctgatcttggtttggatcctgttcttgatctcgttcttgttggatctgaatggcaattcaaaatccaaagtcgagcaagcatgtggcaagacaatctggtggtaacctcaacacgctctgtggaccaggatgttctgtcacctagtgaggctgcaaaggtttttgaatcgcagcttgcggaatcattattagaaggtgacggacagcttgcgttcaagaagcttgcaactgcaacgctggaaactttgatgccaaggatagaaggcaagggtgagtttggacaggcacggtggcgactggtttatgctccgcagatcccaagtttactctctgtggatccaacagttgatccgctaaaatctctggcaaacaatatctcttttgccacggaggtcgaagtgcagctcggaaaacgccttcagcaagaattggttgtagcagctgcgtcgtacaaagattag

SEQ ID NO: 3448 - DNA, 492 bp, Zea mays
  Peptide Sequence Number=SeqID_45227
atgccgctctcgagaaaattcagtgcgccgcggctatattcatcggactgtccggtgtgcatcggactattcggtgagccagccgcgcacacgccaatggtcggcagtgcaatcagcgggcgacgcgtggacttcgccaacggtcaccaggccgcaccggactgtccggtgtgccaccggactgtccggtgttccacgagtgttgtggctgcaacggtcggctttgccataaaaggaagaaaatcacgtctgttcactgttcgttgcgcccacgggcagaaggcaactatggccttccaaatggagctccaaatggctcctagctaccttagggctataaaagggacccctaggcgcatggaacagtacaccaagcacctcttgaacatcctaagacgacgagactccacattcacgcatctggatcacctattcaccccctctaggttctctcaattggtatcggggccatactcttcattcagggactaa

SEQ ID NO: 3449 - DNA, 339 bp, Zea mays
  Peptide Sequence Number=SeqID_45228
atgtcgctgaggtaccaccacttatgcacctccatggcggcgaggtgccagtcagcggcccatggtgcatgcgagcttggtgtggcacgtgatccagaactcgttctcccgcagctcggcctccgtggtggtgtgtccatgttgatgggtgggtcggacacgaagatcccattcaggttagggggtggcagtgaggttggaggtggagcagaggcggagggggaggcagcaaggactaccgcaagtggatggatgggggcgcaacatggggaggcagcgagggctgagcgcaagtggatggatgggagcgcagcatgcacggcgaggatgggggcgtga

SEQ ID NO: 3450 - DNA, 999 bp, Zea mays
  Peptide Sequence Number=SeqID_45229
atggccgccgccgcttctaccatgtccctgctcccgatctcccagcccaggaagcagcagcagcaaggcgcgggcgccgtggtcgtgttccagcggcggccctgggacgcgcggcggaggcgatacgtcgtcccgacggcgaggttgttcgggccggcgatcttcgaggcgtccaagctgaaggtgctgttcctgggcgtggacgagggcgaggggagcagcaagcatctgcatgcgcaccacccggcgccggcgccggcgctgctgccgcggacgtacacgctgacgcacagcgacgtgacggccagcctgacgctcgccgtctcccacaccatcaaccgcgcgcagctgcagggctggtacaaccgcctgcagcgcgacgaggtggtggccgagtggaagaaggtgcgcggccggatgtcgctgcacgtgcactgccacatctccggcggacacttgctcctggacctcatcgccggcctccgctactacatcttccgcaaggagctccccgtggtgctcgaggcgttcgtgcacggcgacggcgacctgttcagccgtcacccggagctggaggaggccacggtgtgggtctatttccactccaacctggcccgcttcaaccgcgtcgagtgctggggtccgctccgcgacgccgccgcccccgcgcccgccgaggacgactccaccgcgccggccgccgcctccatcgccatggagggccagatgcccgtgggcgagtggccgcaccggtgtccccagcagtgcgactgctgcttcccgccgcacagcctcataccctggccgaacgagcaagacatggccaccgccgccggccagcttagctcagctcagctcagttccacttctacaccttcgtatttggaagtagcttggttgaggttgggggatgaacattgtggtcttgttatggatgccaaacctgcaaagaatctgcagtttttcttaataatatctccgatctcgaccgtctactag

SEQ ID NO: 3451 - DNA, 411 bp, Zea mays
  Peptide Sequence Number=SeqID_45230
atggcgaccaagttggaccacgatccacccactcgcaaaagatttttattactcttggtgtacctgtgttcttttttcttgcgagagaatacaatctcggcagtgaattttagcgtgcccggattttatctgtccggcaagggggacagtggtcggactcggacgacgaagtacgaagctgagtccaaccggacagtaataacgctccactggccactgccggcccgccaccgaccgatcaactccgagatgtggtggccggcaggcggcagccacatcaaggctccagcggaacggcacggcacggctcggctcgacggcgaccggtccagcccgtaccgccgctacgaatctgtggacggtggagcgaaagggaagaagatagatagaaagccagccggcggcggatag

SEQ ID NO: 3452 - DNA, 642 bp, Zea mays
  Peptide Sequence Number=SeqID_45231
atgggtcagcggtcacttgagtgcagagggagtgccggtctgccggttgccctgctcgtgcttcggcagagtttggctgggtgggaggactgggacaagcaggtgcgtccgcggtgggcggcagccagccaagggcgcgagtcgtcaccgcgcctcgagatcggatcccaatggatcacaggcggaggtggattttccactccatcccccagcgcagcggtgctcgctgcagctgctgcgtggtgtactggaaagctaactctaaatttgcatgtaacttcgagaaccctaaatacagcgtacgcttccatccaactcgaaaatctctctcctcgcatgggtggcctgtccgtagcagcatggccaagtcacctggctgtctcgtactctttatggtgggtgacgcgagcagcgtggggccagagcgccatcattcgggctataccgacccctagccttcgtagcctggggctcggtgtggttcgtcgtgttgtgccctaccagaggtctacgcactcagacctagtcctggtaggtcatgagtgtgacgtaggttggggtgtgcgggccataaatgtgcagcagtccgagcgattcctaggtcatgagtgctctatgatccgaggggctcgtaggctatga

SEQ ID NO: 3453 - DNA, 1107 bp, Zea mays
  Peptide Sequence Number=SeqID_45232
atgaaggtgttcaagggcaagatttgggcagcaataggatcactcatggaccacgccggcgccgcgtccaccaccgccaagtcctcctcttcggcggccgccgttcccgaccgagcactcctcacagacatcgaggcggccatcgagcggtgcaccggcagcagcggaggcggcggcaacgacgacgaccggcacgccgcgcgcgccccggccgccgcgctccggtctctgctcctcgtccaccgcctcctccgcgccggcgaccggtacttcgagcaagacttccgcagcctctgggcctcccgcgagctccgcgtcgacgcgccccggtgcagctgctcgcccctcgctgccggcgtcggctacgccagcggagcgtgcgccttcgtccacggctactcggcctacctggaggggcgcatgcagtgggtgatcaaccaggccggtaacctggagcccgcgcggaagccgccaccgccgccgcctgaccacgacgccggaaagcccatgccctcctcttcctccgacgacgccggcgccgagacgctcctcttcaagctcgccatgtgccagaggctgctcgacctcgccatccaactgctgccggacaacaacacgagcgccagcaccgcggcgcggtcggccttcggcattgtgctccgtgagagcttcaaggtctacgatgccttcgcggaaggcatcgacgtcatgctgctactgtcgaagagcctcgccgggcaaagcaagccttcgagggccaccgctcacgagatactgaagaaggcgtgcgtccagacgctggagctcaaggagttctaccacaagtgcaagaggagcagcgcgaacagcaagagcatcgagtaccctctcgtcagggtcgtcacgccagcgcaggccgttgtgatggagatggagctggagctggtgccgatcccggaggaagatggctgccaggaagaagtcgaggccaaacctcaagcagaggcgatcgacggtggtggttcgccgtttgcgcacaagatggagacgacgatcagcacggtatgggtcgggttcgacgatgaggaccagaagctgatcactgctcctgatgctggtgatccctga

SEQ ID NO: 3454 - DNA, 603 bp, Zea mays
  Peptide Sequence Number=SeqID_45233
atgggcgagttgaactacttccttggattccaagtgaagcaactcaaggaagggaccttcatctcccaaataaagtacactcaagacttactcaagaggtttgagatgaaggatgcaaagcccgcaaagacaccgatgggaatggacggacacttagacctcaacaaaggagtcagcagacgcacccccgtctcactcgaggctaagctcggggattgcctgacactttatcctgacacgcgcgcctcagtcggcaaggtcgaagaaagacagcactattcatcatgttccgactactgtgccaaccaccagggtaaaactgagtcacgatctcccacgagttcggcctcgggcgcaacagggagctccgcctcgcccaacctcagccttggcctcgggagaaggtctccgcctcgcccgaccccaggcctcggcctcagcctcggcctcgggaggagtcacatcctcgcccaaccccaggcctcgggaggagtcacatcctcgctcgacctcggcctcggcctcaggagaagtctccgcctcgcccgacctcagcctcggaccgactacgctacaggggatacatcattatcctactcctag

SEQ ID NO: 3455 - DNA, 1710 bp, Zea mays
  Peptide Sequence Number=SeqID_45234
atgaccaccctagccatattatatggcatgacactttatgtgcacaattgcaacagatacaagcaagtgggccactgttttcttgctgttcatctggaaggacaagattgcacatttctttttaaaagagagattaagatattgaggttatttatgcatccacatattatccgcctctatgaggttatagacacaccggctgatatttatgttgttatggagtatgttaagtgtggggaattatttgattacattgttgagaaaggtaggctgcaggaggaagaggctcgccgtttcttccaacagattatatccggtgttgaatattgccatagaaacatggtggtgcatcgtgatctaaagccagaaaacctcctattggattcaaaatgcaatgttaagattgcagattttggcttaagtaatgttatgcgggatggtcattttctgaagacaagttgtggtagcccaaattatgctgctcctgaggtgatatctggtaaactatatgctggacctgaagttgatgtgtggagctgtggggttattctttatgctcttttatgtggtactctgccatttgatgacgagaacataccaaacctttttaagaaaataaagggtggaatatatacccttcccagccatttgtctggtgcagcaagggatttgattccaagaatgctagttgtcgatcctatgaagcggatcaccattcgtgaaattcgcgaacatgattggttcaaaattcttctcccgcgctatttgactgtgcctcctccagatagtgcgcaacaagtcaaaaaggttgatgaggaaactctccgtgaggttttaggtatgggatatgacaagaacctgttggtggaatcaatccaaaaaaggctgcaaaatgaggcaactgttgcatattacttactcttggacaataggctccgtacaaccagtggctatcttggagctgaatgtcaagaagctatggactcctcattctcaaacatcgcatcatatgaaacaccaagttcagcacgtgggaatagacagcaaatatttatggagtctccagttggcttgagaccacatcttccagctgagaggaaatgggctcttggtcttcagtctcgagcacatccaaaagaaataatgtctgaagtgctgaaagctctgcaagaattaaatgtttactggaaaaagataggtcactataacatgaagtgcagatggagtcctggctttcctgctcaaattcataacaatcataacttcagtgcagggtccattgaaactgatagcctgagtgagaggttaagtttaattaagtttgaaattcaggcgagaccttgtgctccaaggggacagggtggcacgaccgaggccgtgcgctggggcctcgtggacaccgccatagatggtggccccgaggatgtggtggccgtggatgtcgccgaggccgagaggctggccgcaaaggggtgggacggggaggctgtcgcagagatcaggaactcaaagcgtgtggaggagggggcacagctgccgctgccgagctggtcgttgacgctgtccagatgcatcgcagatgtgctggggcccgagctgtacaaaacaagagacgagaaatacctcctcgatttgcaaagagtcagtgggccacagctcctctttctggacttgtgcgcggcctttctaactcaactgagagttctttga

SEQ ID NO: 3456 - DNA, 1095 bp, Zea mays
  Peptide Sequence Number=SeqID_45235
atgggggcgtcggatctagaccggcagatcgagcagctgaagcggtgcgagccgctcacggaggcggaggtcaaggcactgtgcctcaaggccatggagatcctcatcgaggagagtaacgtgcagcgcgtcgacgcccccgtcacccgattgtgtatctccttaaaggaaaatgattgcatgtcagcatgtgtatttgctgcaggcaatgacatatgtttgatttgtggagacatacatggacagttctatgacatgaaggagctgttcaaagttggaggtgactgcccaaagacaaactatttgttccttggggattttgttgaccgaggattttattctgttgaaacttttttgcttcttttggctttaaagggtgtcttctcgaaagaacatattcagagcatggttgttttggaacttctgtcctggagaagccaatctagtctgtctggcggcaagcgcttattgatacttaacttccactacataacagtggatcacactaaccgtgaactgatttttctgaatggtatatgtataacactggagcatagaagtgataaaatagtaaggcggtcaaacgcgacatctaaggtgtccaggcgacgcctaatgcgtgtaggcgatgcccagaacgccaaggcggacgccctaatcgtccaggccaaggttaggtatccagaccgtattaccttaatacgaggaaaccatgagagcagacagatcacacagataagagtaatagaccgcaagcaagaagtacctcatgatggggctatgtgtgaccttctatggtctgatccagaggacactgtagatggttggggactaagtcctcggggtgcaggattcctctttggtggaaatgtggtctcatcatttaaccattcaaacaacatagattacatttgtcgtgcacatcaacttgtcatggaagggtataaatggatgttcaatagcaagattgtaactgtatggtctgctcctaattactgctacagttggaaaatacttctactggattctgtaggaggggcagggactgtgagaagatgtatttactgtataagacttgctgatataagctgttaa

SEQ ID NO: 3457 - DNA, 423 bp, Zea mays
  Peptide Sequence Number=SeqID_45236
atggctgccggctacctgcccctcgccgccgccgccgccgccgccgccgtcaccctgctcgtcgtcgccacatccgccattccggtggccgccgccaagttcagcggcaggaacaggatggtcatcatccgcgcccccggggcaagggtcgtctcccctggcggcgctctcaacaacaagtggcagcagcagcggcgcctggtggaggacgacgtggcgccggagtttggcggcggcggcggccagctggtggggggcgcggacggcaacagccttggcctcgtcaatgacaggccggtgtgcctgcacaacgggtgcgcccaaccgggacagaggtacaccccggggcactgcacctacaagaacggatgcccccatacccccaccactgccgagcgcgcaggtcccatgcagcacgcatga

SEQ ID NO: 3458 - DNA, 657 bp, Zea mays
  Peptide Sequence Number=SeqID_45237
atgacgcctagtgctcagctgagccgaagtgaccgccgtcactccgccgcaccactgaccggtctgacagaaggacagcgccgcctgcgccactccgactgcagtgccactcgacagagtgagtctgacaggcagtcaggccttgccaaaggcgccataggaaactccgctccgcccgaccccagggctcggactcgagctaagacccggaagacggcgaactccgctccgcccgaccccagggctcggactcgggctaagacccggaagacggcgaattccgctccacccgaccccagggctcggactcgggctaagacctggaagacggcgaactccgctccgcccgaccccagggctcggactcgggctaagacccggaagacggcgaactccgctccgcccgaccccagggctcggactcgggctaagacccggaaaacgagaactccgctccgcccgaccccagggctcggactcgggctgagacccggaagacgacgaactccgcttcgcccgaccctagggctcggactccgccctagcctctgccgaacgacctccgcctcgcccgacccaggggctcgggctcggcctcgaccacggaagacagactcgacctcggcttcggaggagcccccacgtcgcccgacctag

SEQ ID NO: 3459 - DNA, 351 bp, Zea mays
  Peptide Sequence Number=SeqID_45238
atgaggacccaccccatcggtctattcctcgctgagaaggaggatgaccctgtgtggaaggattgggttgaccatgccacgaatcatgaggctatgtcacacttgataggcctggcacggactgcaaaggtcaccatcggtgacaaagaggaccttgtgcagcagctcaaggaggcgaaccagcacctggacatgcatcaacaggagatgcataaggacatggaggctaatgaggacgtggacattgaggatgaggatcccgagggactagagccagcttctagcttggacactgctagcatagctgctctagaggacccccttcgcctgagcccagtgttgcctcattga

SEQ ID NO: 3460 - DNA, 387 bp, Zea mays
  Peptide Sequence Number=SeqID_45239
atggcgtgggggaggaagagtagagggcgccgagcgccatgggagctgagtggagatgagggctggtcagggaagaaacggaggtcggccatgggggccctgctcctgcgtgcactggaccagaggagggggaatacgccaggaagacgcttctgcgctaaggaacagagagaggaggtgctcaaggagcttctgcgcgctgggaaagggagccgagcagggtggtggagctgctgttttaaaggggtgcttgctgtagccattggtgggcatgggcggctgctgcagagcaccagtctgcacagagacagaaaggagcacgcattagacggacgtttttggcattttctgtttggattcagatctcggttctacaacttttattaa

SEQ ID NO: 3461 - DNA, 1623 bp, Zea mays
  Peptide Sequence Number=SeqID_45240
atggggcccatcgaggacttgaaaggcgtacagagggtcatgggatgccttgtggctctgagccgcttcatctcgcgcctcggcgaaagaggcctacctctgtaccatatcttaagaaaggccgagtgcttcacttggacccctgaggccgaggaagccctcgggaacctgaaggcgctcctcacgaacgcgcccatcttggtgccccccactgccggagaagccctcttgatctatgtcgccgctaccactcaggtggtcagcgccgcgatcgtggttgagagacgagaagaagggcatgcattgcccgtccagaggccagtctacttcatcagtgaggtactgtccgagaccaagatccactacccacaaattcagaagctgttgtacgcagtgattctgacacgacggaagttgcgacactacttcgagtctcatccgatgactgtgttgtcatccttccccctgggggagatcatccagtgccgagaggcctcgggtaggattgcaaagtgggcagtggagatcatgggcgaaacgatctcgttcgcccctcggaaggccatcaagtcccaagtcttggcgaactttgtggctgaatgggtcgacagccagcttccagcagctccgattcaaccggaactctggaccatgtttttcgacgggtcgctgatgaaaacaggggcaggcgcgggcctgctcttcatctcgcccctcgggaagcacctacactacgtactgcgcctccatttcccggcgtctaacaacgtggctcagtacgaggctctggtcaacgggttgcgcatcaccatcgagctaggggtccgacgcctcgacgctcgcggtgactcgcagcttgtcatcgaccaagtcatgaagaactcccactgccgcgacccgaagatggaagcctactgcgacgagcccgaggcaccctcggcccccgagggtgaggcactgcgcgtcgaggaagagcggaatggggtcccacctaatcgaaactggcagaccccgtacctgcaatatctccaccgaggagagctgcccctcgaccgagccgaagctcggcgactggcgcggcgcgccaagttgttcgtcttgctgggtgacgggaaggagctctaccaccgcagccccttcggcatcctccagcgatgcatacccatcgccgaaggccaggagctcttacagaaaatacactcgggggcttgcggacaccacgcagcgcctcgagcccttgttggaaacgctttccgacaaggtttctactggctgaccgcggtggccgacgccactagaattgtccgcacctgccaagggtgtcaattctacgcaaggcagacccacctgcccgctcaggctctgcagacaatacccatcacctggtcatttgctgtgtggggtctggacctcgttggtcccttgcagaaggcacccgggggctacacgcacctgctggtcgccatcgacaaattctccaagtggatcgaggcggtggcgttcttcaccaacatcatccatcgctttggggtcccgaactccatcatcaccgacaacggcacccagttcaccggtagaaagttcctggacttctgcgaggatcaccacatccgggtggactag

SEQ ID NO: 3462 - DNA, 321 bp, Zea mays
  Peptide Sequence Number=SeqID_45241
atgacgcgtaccttctccggcggcggtggtgggcacaaggtgggggtggccgagggccaacctgccaacattgcccatggtcatggacagggctccaaaccacgaaatgccaagctgatcatgcccaatgctccaggccatctccaacctcccgtagcttggtccaacgcatcagttcacggcatgatgatgagctcatgtgcaataatggcctcctgcattctttgctgtcaacgaaagcacatgtctcgagagacggcacgaacaaaagcgcctttacagatcttgctacatgatgtctacactacagagagtatctga

SEQ ID NO: 3463 - DNA, 411 bp, Zea mays
  Peptide Sequence Number=SeqID_45242
atgccacagaggtcggaggcgggcactgctgggaagggcgacgaggagcaacggctgcgggctgctctgcgtcacctgcaggcggaggcaggggtactggatcgcctgccgtggggcgagggcaagggcgatgatggtggaggcgagggcatggcgcatggtgtctcctgccggggggagagggggcgcggagcgtggggcgtcgagtcaggggccgtgcggcgtctattgcggctggcaatgtgcggggcggggaggggcggcaacgcgacccttgatggtggcgtggatggcggggagatgggatctacgcgcttggggaggatcgcggagcgcggcgtgcgggcggggtgcggtttcggcagaacagtgcaacgtccgggggtgtggacacctacattaggtgcttaa

SEQ ID NO: 3464 - DNA, 222 bp, Zea mays
  Peptide Sequence Number=SeqID_45243
atgtcgcccgaagaaattcttggtaagtttgtgagtgggcgcatgatggtaaaggaaacaaggtacatcgacgacatcgccgatggacctcttcctcaccgcaagccgcaacccattgcacttaaagcaacaaccaacaaggaggcgcttcccaacaaggtggtgcaagttgaggcggctagctttaatgaggatgagatggcgctcccgatcaagctgtga

SEQ ID NO: 3465 - DNA, 150 bp, Zea mays
  Peptide Sequence Number=SeqID_45244
atggggtccaggcacagtgcttgctctgccgaggctgggtgccgaggttctttcgttttgctttttagtcgccctcctgcggggagaggtaaagaaggtgtcgaggcggatctccaggagttccaggtcttcgacgagtccgaggattag

SEQ ID NO: 3466 - DNA, 600 bp, Zea mays
  Peptide Sequence Number=SeqID_45245
atggcaattggggctcgcactgcccgcaccatccgccataaagaatacgagacaaccaggcgaccctggggcccacaagggacttgtgcgttccacgacgaagctctccaagcttcgtatggccatccacgacgcgaatcgatctcctgggatgactatccatttgggagccttgacttctccttcaacggcgaaggtgaagcagtcagggccccggaagcccgacctcccctagttcagaagcctcgattttgtcatcggccaagagggatatatggtcagggcgacgcccacccgcccgctcgccctactccgcctgagagccccgacaccgtcttaaaagccgttaacggctttagcctcgccccatgctggtggtgtgaggagcgcaggtcggcctcgccttctgaggctgacgagatacgacgacagaatgagattcatatggggccaaacccgtcgtatgacgatttgtcgactttcttcgtattctacgtggagctctctgtgtcatatgacgtggaagcgtcgtcctactacgacggcttcaatcgtgggtctggtgccttctcgcctcgactggccactccccggtggtga

SEQ ID NO: 3467 - DNA, 1080 bp, Zea mays
  Peptide Sequence Number=SeqID_45246
atgggcatctatgctggtttaactgtggaccataatgtaccattgaacaatgaattgaatgcagaaatcagttggaattggggaattttcatgttagagaaaaaaagacaggcatctggaatagctgcacttgatgtgaaaaaactcaaagatgctggtctctgcacagtggaatctgtagcatactctccaaggaaagaccttttgcaaattaaagggattagtgaagccaaagtcgacaagataattgaagcagcttccaagttggttccactcggatttactagtgctagccaacttcatgcacagagacttgagatcatccagcttacaactggatctagagagcttgatcaaattttggacggtggaatagaaacaggatctatcacagagatgtatggtgaatttcgctccgggaagactcagttgtgccacactctctgtgtcacatgtcagctcccattggaccaaggtggtggtgaaggaaaggctttgtatattgatgcagagggtacattcaggcctcaaagaattctccagatagcagacaggtttggcttgaatggcgctgatgtactagagaatgtggcttatgccagagcatataacactgatcatcaatcaagacttttgctagaagcagcctccatgatggtagagaccaggtttgctctcatggttgtggatagtgctacagccctttacagaactgatttctctggtagaggggagctatcagcaaggcagatgcatctggcgaagtttcttaggagccttcaaaagttagcagatgagtttggagtggcagtggtaatcacgaaccaagtagtggctcaagtggatggtgctgcaatgtttgctgggccacagatcaagcccattggagggaacatcatggctcatgcttccacaactagtccctcattgtctcaagtatgtcgcctttgtatcaggctctttcttcgcaagggaagaggggaggagcggatctgcaaagtaatcagctctccctgcctggctgaagctgaagcaaggtttcagatatcatctgagggtgtcactgatgtcaaggactga

SEQ ID NO: 3468 - DNA, 867 bp, Zea mays
  Peptide Sequence Number=SeqID_45247
atgccctcgtcgcgcccccgcttgcgcccacactctcgcccgacccctccccgcaccctcgcctacgcccggacacgcgcccacacctgcggatttcgcctgccccagctccctcgctcgcgattgccccctggcccgcgagatgccgccgcccaccgtgcctgcgattgcgcccgctgcgcgcatcgtcctcctcctattccagcccaatcacctctggttctcaagtatggggaggaagggaaggtggtggagcgagtgaacctcgccactcagcagctgcgcctactgccgaagcccgttgtccggatctgcggtctcctcgcgctcgacgtctcccgcgaccagctcaaggttagatactccatcccgcgcaggcaacaccggcaagatccacggactacggtccctgtggcgtcggcaccgagtccgacgcggaagacgccgccgaagggggaggaggcagagggaagcccgcggaacaaagctccccgcctggacgacgctgctcggactacggttcctgtggcgtcggcaccgagtccgacgcagaagacgacgctgaagggggggaggagacggagggaagcctgcagaagaaatctccacggcccgcggaggctctgcctgtggctacgtgatccagaaagaggatactgcttcaagtgtaacactgaggtgctaatgttgggcaaatgtggagaagacaacaacgagggtggtcttgaactgatctgcgatattgtcagtcagttgccggatcaaccatctgttgaatctgtgtcactgtgtgtggaggctgaaagtctcaacgaagaagattcatctctgcaccgaccacgagcacaaccagtacctctaagctaa

SEQ ID NO: 3469 - DNA, 222 bp, Zea mays
  Peptide Sequence Number=SeqID_45248
atgagatacatcagacaagacaatgaacaagggcataagccacaacagagagagcttcgtgaagaaatccccagccatgatgacatatgggctcaggcgccaacgttgccaaatgagattgtcattgaagtcacgatcaaggacatcgtccaggaccaacaacacaatatttcgccagaaagccacacaaaccctggagaagcttctctagatgatggatga

SEQ ID NO: 3470 - DNA, 489 bp, Zea mays
  Peptide Sequence Number=SeqID_45249
atgagcgagcaggtggcgcacgaggttgacgatcgacgacatcgacgtgccggcttggcgggatcagacttcaaggcgagcacgcgcaccaaggcagggagcgagcgcagccaagcctacgcccgaggcaaggaccagaggagtaagcagctggttgcgaggtcgccgaggagcatggccgcgcagccaggccaagctgaggaggagcagggatggcgcgggccaaacaccgagccgtggctagaagggactcgccatggccgagcagagagggacgcggtccgagcggaggagcgcggcaaacctgaaggtgagcaggcaggggcggacgcgccaggaacaagagagcaggtgccagggacacgacagcagggaggagcaggaaggttgggcggccgagaaggagaagtcccagcaccatgggaagcatgggagctctggccggcgcgtaggaagaagacgagggaggccgtggcgagtgaacactag

SEQ ID NO: 3471 - DNA, 537 bp, Zea mays
  Peptide Sequence Number=SeqID_45250
atggagctcgtggccgatgagtcaggtcttggtgcctgcattgaatcccacaagagcgtgtgcgccaatgcccttaagactcgaagggcaagcagcatcccatgttgctttggagatagccagaggcggagcagccgaccgttgcagccgcagtccctttggcacaacaggcagtccggtggcacaccggacagtccgatgtggcctgcgtcctcagcgattcctgagagcagcgagatcgtcgacgtgccagcctggtcaccggacagtgtccggtgcacccgcaactggtgcaaggtgccgatcgagaagagagccttctcgatgttcccattgggtgcgccagccatctgtcgcggcgctgctggggctctggtgttcgtggagttccgattagacttcaagcttggtactagtgacctgtcagaggacgcgaccgctggcaccctggaggactttgaggatgacttcggcatgcccgccgaggccatggtcgacatcctctcggtggaggatgtaatcaatagatctccctag

SEQ ID NO: 3472 - DNA, 495 bp, Zea mays
  Peptide Sequence Number=SeqID_45251
atgtacacagcagggagctcgcggctgaaaaaaaagcaaaatcgaggcgaggctgtagtggagctaactggaaagaagggaggcggacgagggaggtggtccggtgggctgggaaccacacggaggcgcttgtactggtggccgaggagaggcgccagggaggaagatgactgcgcgagggccggtggccatggatccggaggtcggctagggcttgagggggagctcggcgttcatggagaagaggagtaccaggagaaggcgttgatgttggcgtatgtgaggaggagcagcgaggtggagctattgtttttaaaggcagtgctcgctgcagccattggtggacatgggcagcatgctgcagagcacgagtctgcacagcgacagaagaaggcacgcattggacgaacgtttttggcattttctgtttggatttggacccggatcactgcaaaagatttgttccttgatgtatactctacaaatcgtgtatag

SEQ ID NO: 3473 - DNA, 375 bp, Zea mays
  Peptide Sequence Number=SeqID_45252
atgaccgggcccacacacacagaggttgacgacacaagcgacgctccggcaccgtacgcaccgacacgaagatcgcacgggcgcatcacatgtgcatgcagtagaggagcgacggcgccgcggcagaggcagacgcagtgccaggctgtgccgcggtggctctgcctgcgcctgcacactgcgccaacgccctaccgtacgggaactaccatactatggcttgatccacatgaagctgcaatcaacttagcacatagagctactaagcaacaggatgggaagtacgagcagagtccacaccctacaggggtatctccactctctctggtgcattcgtcgtacgaatatgcgacttcaacactcctcttattttag

SEQ ID NO: 3474 - DNA, 2343 bp, Zea mays
  Peptide Sequence Number=SeqID_45253
atggcgctgttccggaggctcttctatcggaagccgccggatcggctcctcgagatagccgaccgcgtctacggtacggtaccacacaatgtagattaccactccgttgaaacggctgcggtcgtgctttggcaccttgcttactacttcctcccaccaatcgtattcgattgttgcttctcaacagaaaccatggaccaatacagatacaagaattacctggacaacattattttgcagctccgtgaacagtttgcagattcttcattgatggtacttaactttagagatgaaggaaaaagtcttatttcaggcattttctccaagtacaatattacagccaaagactacccttgcaagtatctaggatgcccgttacttcctttggatatcattctccacttcctaaggctgagtgaaaggtggcttatgcttgaagggcagcaaaatattttactaatgcactgtgagaaagatggatggccagtgttggcatttatgcttgcaggtcttcttctgtacaggaaacaatataatggggagcaaagaactctagatatggtgtacaagcaagccccaaaggagcttcttcagatgctaaccacattgaatccacaaccgtctcatcttcggtatcttgggtacatatgcagaatggatgacggcataggatggcctacacaacctattcctttcaccttggattgtgtaattcttagagaaattccaaattttgatggagtcggtggttgtcggccaattgttcgagtatatgggcaggatattccaacaactgacagaagtcatagtgtcatttcaccaccatcaaaggccaagaaacatattaggcgttacagacaggcagataatgcgccagtgaagttaaatgtaggatcctgcgtccaaggtgatgtcgtccttgaatgtctgcatgtggatgatggccaaggaaatgaaaggttaatgtttagggtgatgttcaatacctttttcatccagtctcacattttaccgttgaactttgaggacatcgatgtcccttgggatgccgatcaccagttcacaaagaacttcaaagcagaggtactcttttcagagtttgatgctgagtctgatgcgtcaactgaagtagcacctgattatgattatgattatgactatgataatgatatggatgttgcctctgctgatgagttctttgaagcagaagaaatcttcagtaatgctgaatctcaagatggaaataaggatgcggatactctttctatggtctctacagattatattcgaactccaagtgccgaatgttggaaaaactctccattttccaactttgatctgaatattgacattgatggatcacaagacaataaagccgataacttgggcttgttgttagaaacagtaaatgatggaaagacatgcacatccactgaagccaatattttgctcaacaatgagactgcagttgtgaagtcaacttttaccgctacaatagcatgcacatccactgaagccaatattttgctcaacgatgagactgcagttgtgaagtcaacttttacagctacaatagatggagacacagatagcggcatctcaagttctacctataaagaggatgggtgcatgtttgaaaagggtagttccaagcaggatataaggatgggttccaatcaagacttgagccagattgataatgtattggttaaggaggtgattatattagaaactaatagtactgatgacatacagatgatcaaagaggtcatcatatctgaagttacaactcccaaacaagtggtagaggggaatatgatggaaactgaattagatgaggcagtccacagttcagaaagcactgcactgggagaagacgaggacacaaaacgacctaatacttttttcaaaaaagatgagggacagagtgcacgagatgaatatgctgcttatgacaatggcatagtgattgaacgggaagaaagtcgcaacaaagaaaaatttaccatcacaggcacagattcactagtggctgagcccaaagatttaccacatcttgacagctcaaacacttctttggaactaagttcagccaatgaaaatattgatcagcttcgtgcttgcagtagtaatgtcactgcagagcgaagagcaggaattgacacatcattttccagctccaggactctacacatccctgggatcatcatccaaaatgtctctagtacatcctactctgcgaccaataagaacgatttcatctctaccatcattatcatttggcacattcatagagatgtcaatggcttcttcaagatcacccaaacaccaagagcatgttag

SEQ ID NO: 3475 - DNA, 396 bp, Zea mays
  Peptide Sequence Number=SeqID_45254
atgaccggtggtcacgaaaatctctccccgaagcccgaacttcgacgtgcatggaacaaatacgaagagcgtgattgggtgcacgagtttacaggatcaatgccacagactaagcccaaaattgcactgacgacggcgttgggcggaagagaggaattacctacaaccgcggagtgggaggccctggccatgaagagcttcgtccggcggcaaaatcctcacgccgatgagcaacttccctcacgtctatatgaattcccacacgaagacaccacggatacacgcagggagcgccgacgaagtccctcagctacacactggggcagtatcgagactggaagtcgccaatgccaacggcggcggagttttccccaacctcggtctctttcgctatga

SEQ ID NO: 3476 - DNA, 420 bp, Zea mays
  Peptide Sequence Number=SeqID_45255
atgggcaagaacaacaagcgcaagcgtgagccgactcctccatcggaggagtttggtgactcggaatactcagaggaggagttctcctctgagtccgaggggtctccggctcccatccccctgcgtgagtcgtctgatgactcagacgactcccaggggcttgcggcggaggtctggacatacatccgggccgtcgagcgctccgggctcgagggctcggatgagtctgagttctcggacgaggaggactcggacggcggcgaggacgagggtgacgacgacgacggtggcgacggcgacggtgatggcggcaacggcggcggaggcagcggcggcaagggcggcaccaagggtggcagcagcgtgggcagcaccggaggcggcggcggcaagggcagcggcggcagggccagtggctaa

SEQ ID NO: 3477 - DNA, 1077 bp, Zea mays
  Peptide Sequence Number=SeqID_45256
atggagttaatgaaacttcttcagctgtatgtgagctggaaagtatacatcctccttggccaatggtggaatttactgtctgcaaaggcactccgctattattcaccggactgtccggtgtacaccggacagtgtccggtgctccaaggaacggcgcctcaggaactcgccagcttcgggaattcgcaacggctagttcgctataattcatcggacatgtccggtgtacaccggactgtccggtgtgacatcgaagcaacagatatttcgacgccaacggctacctgcagcgcattaaatgcgcgccagcgcgcgcagaagtcaggcacgcccatactggcgtaccggacactctacagtacatgtccggtgcgccaccggacatccaggcgggcccagaagacagagctccaacggtcggaacccaacggctttggtgacgtggctggcacaccggacatgtccggtgattccacccccaccgccgccggcgctccctgctacggccgcgccgccgtcggattcctccgaccgccgcccatggatcccagcaacgccgccgccaccgtggccacgcccctcgatgtcgtcgccgctgccactgacgcccgcaccaccggccacaccgcgcccagcaccaccgcggttgctgccgccgcagccagcgcacgcgcggctggactcctccccagcagcctttacggcgacctagacctcccggctaccccgccttcatgggtgacctcagtgcccctgcggccctctccccgaccggcttctctaggtagcctcccccccggcttcaccgctcctcgcctgcctattgctgacaccacttggacctcgccacgcgttgtcgcgccatccaccgactccgcgctggtcgccgccattgccaccatccaggctgccctcgctgcctcgcaggagcgcgtgcgcgccgcgtcccacgccgtggagcaagagtgtgccatgggcgccgctctgaccgcacagatggccactgcacaactcctcatccgtggccctccgccgtcatccctgagtcgcctccgcccactcccgaggctcccatag

SEQ ID NO: 3478 - DNA, 1752 bp, Zea mays
  Peptide Sequence Number=SeqID_45257
atggatcagtatgaggtgctggagcagattggaaaaggagcatttggttctgcgcttttggtgaggcacaaggtcgagaagaagaagtatgtgctcaagaagatacggctcgcacggcaaaccgaccgcacacgccggtctgcccaccaggagatgcagctcatcgcgactgtccggaatccattcattgtggagtacaaagattcatgggtggaaaagggctgctacgtttgcattgttattggctactgtgagggaggagacatggctgaggttatcaaaagagccaatggaaaccatttctctgaggagaaactttgcaagtggctcgtgcaacttctcatggctcttgattatctacatgcaaatcacattcttcatcgagacgtgaagtgctctaatatatttattgccagagatcaaagcatacgccttggtgactttggccttgcaaagatattgacatcagatgaccttgcctcatctgtggtagggactccaagttatatgtgcccagaacttcttgctgatataccatatggatgttgcatttatgaaatgactgctctcaggcctgcatttaaagcttttgacatgcaagctcttattagcaagatcacaaagtcgatagtatcaccattgcccacgagatattctggttccttattgttttactctaataaaaacatttcgcataactggcatatgcaggctgcagaactgctaaagcatgtgcaccttcagccttatgtgcttcaggtccagttgaagtccagtccctctcgcaacatgtctccaatctatcaagctctgacagacaaagttaagaagatgacatttcctagtgatataactgattccgccagaagagtggcaagaagaaactcgcttggaaatgagaggactgtaacattctgcaaaccctctcctgagcggaactctattagctctacacggagcatcaaagaatatacaactacccagagtgtcaaagagctatctgttgacagcagtcaaattgatgatgaggttacaagtaaagccattagaacaaagacaacaggcattctaaggacgcccaagagtaccccagccaagacattgactactagaaatcggttggatcctccaaaaacttcttacagcagaacaaaccatagtgagttgacctcaagaacacctctgaacaagagtgctgtgacagcaagaagagcatcgctcccgctgccgacatacagagcacccaacagccgtgccgccagcgtccttgaccaactggactccccagacgtgtccgtcaacgcgcctcggatcgacaggatcgcagaattccctctagcttcatccgaggaccccctggcgcccatgaagaagaacctgtcctcggcgcccggccacgacggctcatgctccacgcctcccttcatcaaccggtccatcacgaaggacaagtacacggtgcaggtgctgcacaggggcgacggggacaacgcgagcgactcgtcggggcgcaacgccaccgccgcgtcgagcggggggtccaacgactcgaggcagcagcggttcgacacctcgtcgtaccagcagcgcgccgaggccctggagggcctgctggagttcagcgcgcagctgctgcagcaggagcggtacgaggagctgggcatcctgctgaagccgttcggccccgagaaggcgtcgccgagagagactgccatctggctcaccaagagcttcaaggagacggcgtcatag

SEQ ID NO: 3479 - DNA, 258 bp, Zea mays
  Peptide Sequence Number=SeqID_45258
atggaagccctcgactgcgcggacggcgcacgcgacacccccatctcccatggaaaacctagttggctgtcgggggccgtcgtccgccaagctgtgccccacggcaaatgcctgccaggcaaaggatcagccccagacggtgaaaatcaaacaggcaaaggatcagctcccaacgaggcaacgactgggagcgttgtctggatcaggcagccttccgcccgcgcaaaccaaacatacctacaatataatatagtatag

SEQ ID NO: 3480 - DNA, 324 bp, Zea mays
  Peptide Sequence Number=SeqID_45259
atgggggcggtgatcaccgatggcgatctgtttttctctctctcgctcacggcaatgggagcgaccatagactttgatgacgatgcttatgaggggctggaggaaggggaggaatacccacggccgggtcttatagacgggcgaaatcggttctgggagacccgcgagccccggggaagccacaccgcggatctcgcgcagcttgttatcgtgacacatgagggtgatgacaggtggtccccaatccacagtgaaacaagtgcgcatatgccctggctgcgggtgacacaggtggcccacgccgcagagactagaggtatttaa

SEQ ID NO: 3481 - DNA, 303 bp, Zea mays
  Peptide Sequence Number=SeqID_45260
atggcgtgggcgagcaaggaatgtgagaaagagagacagagctcgaagaggaagagagctcggctgtgggaggaagaagagaggaactcggccatatttatagagagagaggggaaacgaagagatggccgattggtttcaaggcggtcattaatggcgttcatggagcttgaatggagaaaagaaacagtcgcggctgcgtcctggcgctgggtgtcgcggtcggactgggcgcggctgggcatgtgtcacaaatctacccctcttaaaaagaatctcgtcctcgagattagggaaggctag

SEQ ID NO: 3482 - DNA, 360 bp, Zea mays
  Peptide Sequence Number=SeqID_45261
atggcggcggcggccgcggcgcctcccatccccgcccctaaccccaccgatgactgggtggacggctcgtggacggtggactgttcctgcggcgtcacgttcgacgacggcgaggagatggtcagctgcgatgagtgcagcgtgtgggtgcacacacggtgcgcacgctatgtccgcagtgtccacacatccttctcctgccacaaataccggaggtccaagcatgtgccttcctccaccgacgaggtcgaggttgctgagctcctcgccgagctgccaacccactgcccgcctccgctatacttcagcgccactgaattaggtaaagtcatgcaatgtgacctctttatcttggtgtag

SEQ ID NO: 3483 - DNA, 1038 bp, Zea mays
  Peptide Sequence Number=SeqID_45262
atgaagatagagacgatttatggcatggcaaaccgtatttacggcttccgaccaaaaccgttctggtgtcttgcgtccacacacccccacggttctgcctctgcctgccccgcttccgtcaatcacgcgtctcgcccaaccgccccatccgcagcgctcccacccccgtccgcccagatctggatcccgtccccgtcatcggcgcctcctcccccgcgcgtccgagacccggttccaccgcttcctcgtcaagctctccagtctctcctcaccttccttccccccctccctgctcggtccgtatggcggcttgacggcgaatcggatcttcctcggcctcctctctctgcgcccctctggtcgccatggagctcgccgcccggacctccagccaccgcgcctcccgtcgccgaccgtcaagcgccgcattgggcgctcctccccaacactgccgtccgcggatctccctacacgaccatggatctcccccctggccaccgtccgcagatctccctgcacatcctagctttgaagcagtcgcggcgcgagtttgccgcctgtgtggaggttgtggccgccgtcgctcagatcgtcctctgtttcatgccttcgtctccgctgccctcagcccccttccgctctcagattttggcatctcccagactcactagcgtccttctctcctcccgcgcagatgcttcgcggcggcggcgaaccggatccgggggctcgccagggccttctgcggcgcgtcggcctcacgagcggatgcagaggccaacgggatgcctagcccacaggtacttccttccctccccctccctgttcggtccgtatggcggcttgacggcgaatcggatattcctcggcctcctctccctgcacccctctggtcgccatggagctcgttgtcgtacatgcggccgcagagggcatgtcgccgttgtgtgcctcctcctccactgcggtgcgtgggagggagaagaggtgctccagtcaaaacgacaactgtgcaggtttcaccatgaccccatttga

SEQ ID NO: 3484 - DNA, 705 bp, Zea mays
  Peptide Sequence Number=SeqID_45263
atggcgcgcaccgagaagctcaccagcgatggctgctccggcggcgaagtccaagtggaggtggagctcggcatgggggtggacgggaaggggatcatagagtgccggatatgccaggaggagggggaggaggccgctatggactcaccttgcgcttgcgctggcacactcaagtttgcccacaggaaatgcatacagagatggtgcaacaagaagggaaatattacatgcgaaatctgcaaccaggtttactccccgaattatgtcatccctccaccgaaatgttgttcagatgaaatggacatgaatcttaggcaaaactgggtcggacgaatcgatccccatgattcccatttcctagccatcgccatcgcagagcagcagcttctgcaagctgaatttgatgactgtgtatctgcaaattctagcggtgccacatgctgccgatccattgctttaattgtgatgttccttttgctcgtacgccatgtaattgtcattgtgagggatgttagcatgctacaagatgcaacggtgctgttcagccatcggagacggagacagtggggtattctagccccttcaatcctctccattactcttcctcccaaacaagccctaaagaacacaaagacgcaccaattgaagcgccgtctcggcggtaccaccgaagataggaggactacatggaagcttgcgaagtga

SEQ ID NO: 3485 - DNA, 771 bp, Zea mays
  Peptide Sequence Number=SeqID_45264
atggcctcggctgctactgcaaccctccccaaggttcagttgaggccaagatgcaacagctacttccaggtccgccccgtccttgcactccctctcccctcccgaaagttcagctcatcagttgccctgttgattcgttccaacatgccctcaaccctaaggttgcttgtttcagctggaggaaggaggacattcctgccggtgtctgcagttggatcaggtcagggctcatcggtcactgaggccgacaggaagagcgatttgtcgctggagaacgtcaagacgtccgttgtatcccgcgacggtgaaaagattaatgtacgagtgcagttgcctggaaaggcgacgcaaaaggtgtttgatgaggctctgacgttcttggcccgtgatgcgccaccggttcctggttttagaaagtccaaaggagggaaaacatcaaataaccaactgagcagagattgtgctgtttctgtccttcagatacccagcagcatcctgctgcagatgcttggcaagagccgggtcaccaaattcgttcttcaggaaatactgagcatcaccattgaagaatttgtcaagaaggaaaacctgaaggtgaaacctgagatccagacaacccagtccgaaggcgagatggagtccgcgttcgcgccgggatcagcatttgggttcaatgttgtccttcagctcgagacacctgactctgatgatccagaggagaaacctggctctgatgacgatttacaggaggaatctggttcctcggagtag

SEQ ID NO: 3486 - DNA, 1011 bp, Zea mays
  Peptide Sequence Number=SeqID_45265
atggtagcttatggcaatgaggaagcggatggaaagaagattcagatccagctgacagggttcatggaaaagaacacagtgaagttcatgaaggagctctggagccttctcctcagtgcgcagcagaatgccagtggggtgcctcaacagtttctggatgaaaaggaggctgagatacatcagaaaaaggatggggatgttggtaactcaagatcctatggtgatccagttgcctctgctttaaacagtacaaatttcaatatcgaggaagaaaaggacaatgatttcaagcgcacctcaagaccaaaaaataggttcgttatcactttcttgcataatcttgtagggttttactacaacttagatgcatgctttgcattagatgctgttactaggtgcccatatttaggttgtaaggatgccacaaaaatgatgcttgatgttaaggagatattcacatgccaaattcaggttgaacttccaaaaaccaatccagtatacctcatgctacgcacatcatttggtttctcagctaaaggaaccgggcttaaagctcttgaatttgccctctccatctgtgacagttttgatatgtatggcttcaccgtagacccaggttacaaggaatgttctgtgcttacagctgaagttatctttcaggacaaggtacttctcagagaaaatcatgtgcagctggtgaaaatccattcaccgatgcaaggagatcctggcaggacagtgaggtggctgcctaccaaggctaccatcgaggctgctagagttgcttccgagaagttgttgaagagacctggtgctggaagtgatgatcctctggggacttgcaccatgataaagaagcgcaggaaagggaaggcgccaaacagatctggtctacgagatgctgccatgaagcacctcgaggacatgaaaggtgccaccaggtatcccttggagcgaaatgcagggggtggttacctctgcatgatcaatgatagatacgaccgcggctga

SEQ ID NO: 3487 - DNA, 855 bp, Zea mays
  Peptide Sequence Number=SeqID_45266
atggcggccgggcgagagctggtggtgagtttcggcgagatgttgatagacttcgtgcccaccgtggcgggggtctcgctggcggaggcgccggccttcctcaaggcgcccgggggcgcgcccgccaacgtcgccatcgcggtctcgcgcctcggcggcggggccgcctttgtcggcaagctcggcgacgacgagttcggccgcatgctcgccgccatcctccgcgacaacggcgtcgacgacggcggcgtcgtcttcgactccggcgcgcgcaccgcgctcgccttcgtcaccctgcgcgccgacggggagcgcgagttcatgttctaccgcaaccccagcgctgacatgctcctcaccgccgacgagctcaacgtcgagctcatcaagagggctgcggtcttccactacggatcaataagcttgattgctgagccttgccggacagcacatctccgtgccatggagattgccaaagaggcaggtgcactgctctcttatgacccaaacctgagggaggcactatggccatcccgtgaggaggcccgcacccagatcttgagcatctgggaccaggcagacattgtcaaggtcagcgaagtcgagctcgagttcttgacaggcatcgactcggtggaggacgatgttgtcatgaagctgtggcggcctaccatgaagctgctcctagtgactcttggagatcaagggtgcaagtactatgccagggatgagaagaagcttgtggagtcgattaaattcgctaacgcgtgcggagcgatcaccaccacgaagaagggggcgatcccgtcgctgcccaccgaagcggaggtcttgcagctaatagagaaggcttag

SEQ ID NO: 3488 - DNA, 633 bp, Zea mays
  Peptide Sequence Number=SeqID_45267
atggcgctcgcctggctcgccgcgcgcccaagcatccgctcacccctgcgcgtgcttcttccccatggcgagctcacccatcctctgctcgttcccatggccgtcgtgtgcagccgcgagctccagtcttcttccctgccccgcaatccatggcgcccggttgaagctccttcctgctcggcgcgcgcccgcctccctgctcccctcgagctcatcctgcccaagtccggttgtctactccttctctgctcgacgccgcggcagatgatgctgcaatccggctggacgtcaagatccagtggaacctcgtggtggcggcgctggcgggttcgatcaaagattttattcggagactgtcaacgttctcgcaagcttgaagtcggacttgctttggatgagaagtccctgatgttcgagagaggcgaggcctgtacgttaaataatcgcgcgatgcggaagacaagccaagtcgaccccaagcgcgggcaaatccgcaggataatgctgatggacgaacctacccgatccagtgctaggacaaggatgatcgccaagtggacgtcgtctaacaacactaacctagtgttactcaggcaagccccggtgtatgcaaccccttccttgtgtttttaa

SEQ ID NO: 3489 - DNA, 606 bp, Zea mays
  Peptide Sequence Number=SeqID_45268
atgcacagctcccggggaaacgatgtcttcgcccgagctccgggaaacctcgacgcgaatgctgaaggttaccgggggtcgctgtctaggaatgtttcgataccccggatggatggcgaatatttttttatgtctcgattagctcgtgacctaaagattttcccttacggaaggaacattggtgttattgtatcagcagtgatgaaggtggcgcggcccagcgtgaagtccgccgcctcgtgcgccggggccgagtttggccagctggtggttgtgccggtgatgtcgtccgccggtccggtggctgtagcaacagaaacgaagggtgacacgggggccttggaggacccgtggacaaggttctgtgtcggcggcgaaatcgcctccactactgctgctacgggcgcggtcgcctcggtcgcgcagcagctgaaatacacctttatctcctacctccagaagacgccctgcggcggcgccccatgcaccagtggtgatagcacaacggagacacacgacctggcatctataccccaaatgattacccaagtggttcaacgagtagtagggaacaaggcagatcaaaatagggagggcacaccatga

SEQ ID NO: 3490 - DNA, 495 bp, Zea mays
  Peptide Sequence Number=SeqID_45269
atgggcaaaggcaacagaggtcgaggctcaccccatcgtgctggcgacaagcagaagcgtgacccaagtcctccctcggaggacttcgacgattcagagcattcagaggaggaggtttcctccgggtccaagggatcgctggctctcgcttctcccctgatgtcatccgatgactcggacgactcccaagggttagccgttgaggtctggacgtacatccgttccgtcgagtgctccaggcttgaggggtcggatgagtcggaggtttcctcagacgaggaggactcctctggctcgtccgaggagcggagcggtgacgacaacgacaacgagggcggcggcagcggcaacgacaatggtgacggtgacggcggcgaagacgacgacgatggtggcaagggcagtggtgaaggcgacgacggcggcgacaacgacggtggcggcgagggcggcagtggcagcggcagggccagtgggaaagcgccactggtctaa

SEQ ID NO: 3491 - DNA, 310 bp, Zea mays
  Peptide Sequence Number=SeqID_45270
atggcgtggagggcgcgacagcgggcttgcgagggcgtggagggcgcgacggcggcgaaccggacggcgaggggcgcggcgaggggcgcgacggcggcgaggggcgcgggcgcggcgggcggttccggcgcggtgagggtgagggcaaggggcgcggccccggagcagcgcgcgcgcggtggcgcggcgcggccgggcgggacgcgtcgagggagaggggcgcggtggcggtctaccggacggggagggcacagaggtggcgtcggtgtgaacgagagagagatactgaggagagaaagagttagtgtcg

SEQ ID NO: 3492 - DNA, 483 bp, Zea mays
  Peptide Sequence Number=SeqID_45271
atgacagtcggggtcagtgatgcactggacgccaaggcggcgtctctccctaccatcttttgggcagaggccctaaagaccaccacacatctcctcaaccgcatcccctcgaaggcgaagtatttccccttgctggctcctccccacccactgatctcgattctctccttgagtcagatccagttccccctcacctccggtggctcgccttgcgccgttgcccgctgcacacgcggctccaacgcctccggtagtgtctctacccttgccacgcgcggcctcgacgccttcactcatgtctctactcgcgccacacacgacctctatgccttcgttcgtgcctcttcctacaccacatgtggccctgttgaccccgcctctgccacgtgtgactcgttgacccctctcgtgccatgtgcggccccatcaacgagtgcagcccgcttcgccgaccctgcccttgtctaccaccgctgcgggtga

SEQ ID NO: 3493 - DNA, 996 bp, Zea mays
  Peptide Sequence Number=SeqID_45272
atgacgattcatcagacaatgcctgaagacttccttttgttactgcctaatgaagatgctgcatctaaggaccccctgccgcttcgcgtttcgggagatgatagagatgacaagacggctgaggggcacgaggcgctaccgcttcgcgtttcaggaaaagacggagacgaggagacagctgaggggcacgagacgcagtcattgcgttggatgggaaacgaggaaggcatggcggcggacaggcgagagatgcctattcccgatgttgtcgaccagaggtcggtggagaagctaaagagtccctccaatgttcgccctgaaggaaaccgttttgagctcgcctcaggcctggacctggctcgcccctgcctggtgcaatggttctgtcggctgcaattccttctctccccccagctccgaggagccccccaccccccgtcttctatcatggctcaggtatctgctcctttgaaagtctacttcaggaagagttcgaagcatcaacagcagcacgatcaggaagcagatcagttttttgaagaagaaaattgtgaggaagacggtgatgtaactggggtacctgctctgttggcgccctctagattggctcagaatgttgaagatgaagggctcgcagggagatcacgcagggaggattttgtcaacaacatttgcagaaggcctttaggtatcttgccggttccagacaacatcacacaacgacatcagccacctccctccccatttgtttctgctccgagaagaagtcgtcgggtggctggtattggggtggaatttcagatgcaggacctggggggcagatcaacaaagagagctatgaggactttacaaatcatcacagaatctaaaggaattagccaagaagcaatcgaagggtataaaaaactcttcactcatcctctgtctcaatgtcatattgaagccctttcagccttgtttggctggagcactccacctgatctggtgttctgttaa

SEQ ID NO: 3494 - DNA, 675 bp, Zea mays
  Peptide Sequence Number=SeqID_45273
atggtcggtgtggtgggactccgaacgaaggcacagacattgcacgtctattccaaaggacaccaaggcgatgtggatgcgagacagtgcagctccgagcgtggcgagcttagtgcggtggtaggacaacagatgcctcggaaagagggaggtgcaatgaaccatggggctaggcagggtgcgagggtgtacggggtggaaaatgaggcgagtagtggggtgtccacgtgcaatggggagttgaaggctagctccacaatcgtggtcgggagacctggacgaggagttaagtggttgggccctgatgatgctacagtagctatggccaaagtgcatgaaggggcatcgacttgtgtagtcaccacaaactattttactaagtggtcagaagctattgctctagaaaatatgacacacagagagatttggcattccctagactttgactacagattaggggactttgactatagattaggggacttcttttatgtcaaaataggtgccaaaggttcacacttagccaataaaaagaccaagaattgggttcaacaaaagagcaaagggataaccgaagtgtgccctggtctggcgcaccggacagtgtccggtgcaccaggggacttcacgctgaactccttacattcgggaaaatccagaggcgctccgctataa

SEQ ID NO: 3495 - DNA, 252 bp, Zea mays
  Peptide Sequence Number=SeqID_45274
atggcgctactcaagataagcatcaagagtacactggttgttttcaccgtcacatggctgctgatgacactccttgctacggccgtgccatcagctggcaaccaggaagcggagaaccaagcggtctgcgcccaagtgaaaggcacctgtacacagaaggaatgttacatcattgtcaagatgccacataactgtatgcagtacaactttcaagggacttttgtcaaaatacaacatgatcttaaattttaa

SEQ ID NO: 3496 - DNA, 726 bp, Zea mays
  Peptide Sequence Number=SeqID_45275
atgccgggcacctcgtgcggcgacccgcgcttcacgggcgccgacggcaacaccttctacttccacggcaagaaggacgagagcttctgcgtcgtgtcggacgaccgcctccacatcaacgcgcgcttcatggggaaccacaacgccgactccggccgcgacttcacctgggtgcaggcgctcggcgtcaccttcggcggcgctcacagtcacaggctctacgtgggcgcccgcagggccgccgagtgggacgaggacgaggaccacgtcgtgatcgcgctcgacggcgaacccgtcgacgtcgaggccgccaaggacgcgcgctgggtgtcgacggccgtgcccgggctgtccgtcacccgctcccacgccgtcaacgccgtcgtcgtggagctcaacggcgagttcagcatctccgccaacgccgtgcccatcaccgacgaggactcccgcgtccacggctacggcaagacggggaaggactccctcgtgcacctcgacgtttcctacaagttccacggcctcaccaaggacgtcgacggcgtgctcggccagacctaccgtccggactacgttaacaagctcgatatcagcgccaagatgcccgtcatgggcggcgccgacaagtaccgctcgtcgggcctcttcgccacggactgcgccgtctcccggttccaccgcgtcggcggtggcgctgacgccggcttcagctccttcgcctcgtaa

SEQ ID NO: 3497 - DNA, 381 bp, Zea mays
  Peptide Sequence Number=SeqID_45276
atgccaccatcctccaggctgcggagccacgaccccaaggcctacctccgccatctccgcgacaccgcatgccgccatcctccaggctacgtagccatgaacacacggcatgtctccgccatctccatgacgtcgttcatcccgccggtgtacgccatccccaaggtcgtgacggagcagatccagcggaagctggaggaggtcaacgctaccgtccaacagcacctcgcgggtgtccaggaccacatcaacttcaccatgcagatcgccgagccgccgcagcaggttccaggaaccagagaaggggagtggagggagaagaacagtagtattagggttcacaattctcgacccctctctctcagtggacatgctgtttaa

SEQ ID NO: 3498 - DNA, 462 bp, Zea mays
  Peptide Sequence Number=SeqID_45277
atggcaaccgatagtgaagcctcgaaggcagctgaggttgtggttgactggcataaacaggacaaaaagaggatgctccatgcagtttaccgtgttggggatctggaccgcacaatcaagtactacacagaatgctttgggatgaaactgctgaggaaaagggatgttcctgatgagaagtacaccaacgccttccttggctttgggccagagaacaccaactttgcagttgaattgaccaactttgcggaggtctcgcgtcctacgaaattatcagggtttttttgtcgatgccgacccttaagcaaaaatgaggtgtcatcaagcctgaatgcaaatggtggaacaactaaaaagacatttaagtttgatagagtattcacgccgaaggatgatcaaggttactcagaccttataattttagagaaggaagctggtgatgagctgatcaaatttctctag

SEQ ID NO: 3499 - DNA, 834 bp, Zea mays
  Peptide Sequence Number=SeqID_45278
atggaggagggggcgcccgatctgcgagagctcgtgcgcctgccggatgttctcgtggtatgctcatctactggatggacagatgaaaagcacatgctttatcttcgattattggaagaaacatttgtgcaccaattacatggaagtggttgcatttttaagggactgtttaattgctctccaagatattgtaggcaaatgaaatcatctaagcaaattgttaaatacactacgcctggtcagcaggggtgtgccatagttgagggtggcaaagtcaagtcctgcataaaggctgagcatgttgagtcaccttcctgttgtggaaatcagcaagatgaaaaagttcgttccctggaagataatgcatcaaccactaagcccatggaaaaagccacttcccatgcaagggcagcaagcccaggacaagcttccacgtgctatgttggcaaacacagacattctccttccagaagtgcagattatgaacaccagatatttataggtattaagttcatttacttgagtgacgtggccagatttttaaaagagaactactcgtgcatttactcagaggggtcggatcagaactttgatgaggaaacccaagggactggagaatcaaaacatgaatacaacccgaagcgactgaaatctgctgatggcacaagggatcatcaggttgtgaatgcagaagctcatcaggtgggctgccttgatgtgagtgacaaaaatagcgagaacttcagtgcatcgtcaaaagtgcttgctgcatcacttgatgttgaagctgggtctccctccggcgactgcaaggatcatggaccaaaaggataa

SEQ ID NO: 3500 - DNA, 2022 bp, Zea mays
  Peptide Sequence Number=SeqID_45279
atgccggtaacgcgtaggcgcgccgccgtggcggcggtggcgcaggaggaggggcgcgatgcggcgatctacatatcctctgattccgatgcggggtcagacccggaggattcagaatccgaggaagaggaggatactagcgatgaggacttcatcgacgtcagcgacagcgaggccgatgatggggaaagcagcgacgaggaaggcgaggaggattcggagtcggaggctgaggctgaggctgagcaattgggcgcggatcggagcgaggttgcctgcaacaaaattgctggtcttctaagcagtaatatcctggaacccctctacctctccccctgtaattttaggaccgatccccagtcttttaaacatagccaaaataaggaatttcctgtaggtgggaggagtctggagggtttaaagttggcggagtacaaggtgtatttaaagaagaatggtcttagccaaactgggggcatggacacttgtgtagacagaatagtactccattggaggttcaaagatgcggatccaaggagaatttatcctcggtcatccttttgtatcaactgtaaaggtgatgtttgtaggggcgatgccgttctattcaaacagaaggtgtacgagaagagtggaaaaaggcatgcaaaatgtataggtaatcgtatagtagccggcaaagtcatcaaggaaagttatggtaaacaaaaacagcaacacactttcacgattcaagtgttttggagcaaaggacctgggaaattaccacctttgcatctgttgcttgtcaaagggcgcaacctatacagaatgatgacttttcgtcaggtgcataagaagagctgtctatctacaaaagccagaacgccttacaatttggaatggatggagtatatcataagaaatactcatattagtcttcaggagttcaagccatgtgatgatacaattgtcaggtgtaataggataatggaactgtctggcatcagaactggccatatatttgatgtgcatattacaattctttttttaccagcatgtgtgctctgtccttgggcaaatgaagcagaaaggctgaagattctagaagagaagcacaacagaggggatgatgcaaggcgtgttcgtgcattgaatagacctaattctgctggaaacagttcgtatctaatcatgttcatcaaatgtgacaggttcatggaacaattcatgcatggtattgtctcagcgaagcatcttttgttcttgtggacctatggtgtagttagcagaacatctcttaaaggcaagaaaaaattgcacaaggaaaagcacaagtctcgatctgaaagacctcaccgccaatctaatatcaccgaactggataaaggcaaaaaacgacctgcacaatcctccaagtccgatctgcctaataaaagatctaagaaagaagggtcccaagttccttctaggaaaaaggatactggtggtaggatggcaaagaaaaatggtccctgccaagataagagcatttgtactggccagaacagctctctatgcaaagacaatagggagaagcacagtcatgctacctttcagaaaaagtgtcacgctgaacctctcaacaacggtccatctggttctgggtggaacagaactgctggcggacacagccaattcgaaggaagacacataactccagcttctcacgtcgaggcaaatcatggaaattttgtttctgtacagcatccttgcgtcgagaggcttcaacggcctactcaatcgcgtgaagttgctctggctcaccccggcggcggccatccatacgtactgtccagcgctgcaatgggcctccgacatcaaaatggagcaacggccggtgtgcacgcaccggcatatttcaggggacttccactcagtcaacagagggcagcatttccttcggccagcacgccgcaaactgggtaccatcctcatccagaagaattatttgttgcgccacacttcagatatcctagagggagtgctggtttccgccgataa

SEQ ID NO: 3501 - DNA, 1797 bp, Zea mays
  Peptide Sequence Number=SeqID_45280
atgggagggtgccacgcgaagccgctcacgcaggacgcggacggctcgccgccgcacgcggcgccggcgaccccgcccccgggcaacgctacccccggccccgggaagaagcactgggcggtgtccccgttcttcgcgttctccacgccgagcccgagccccgcgcaccacctcttcggcggctccgcggcgtcgccgcgcaagtcccccgcccccccgggctcggcgcccaccaccccggccaggcggatcctgaggctgcccttcccgccgccgtcgcccgccaagcacatccgggcggctctcgcgaggcggcacggcccgccgcggccgtccatccccgaggagggcggcggcgaaggggagggcggcggcggtgccaggggcctcgacaaggggtttgggttcaacaaggggttcgcggccaagtatgacttgggggatgaggtcggacggggccactttggctacacctgcgccgccacggttaagaagggcgcacgcaagggggagtccgtcgccgtcaaagtcatccccaaagcaaagatgactacatccattgctatagaggatgtccgaagggaggttaaaatcttgaaggctttgtcaggaaacaaaaacttggtgcaattttatgatgcctacgaggacaacgacaatgtatatatagtaatggagttgtgtgaaggtggagagctacttgacagaatactttccagaggtgggaagtactctgaggatgatgcaaaagctgtcctggtgcaaatattaaatgtcgtcgctttttgccacattcaaggagtggttcatcgagatctcaaaccagagaattttcttttcacatcaaaagatgagaattcccatcttaaggccattgactttggcttatcagactttgtaaaaccagatgagaggctgaatgacattgttggaagtgcttattatgttgctccagaagttctgcatagatgctatagcacagaagctgatgtctggagtataggtgtaattgcatatatccttctttgcggcagccgtccattttgggcacgcactgaatctggcatattccgttcggttctcaaagctgaccccagctacaatgaggcaccatggccttcgctgactccagaagcaatggattttgttaagcgattgctgtgcaaggatccacgtagaaggatgactgcagctcaggctttaagtcatccgtggatcagaaattataatgccattaggctgccgttggacattcttatattccgacttatcaaagcttatattcgttcctcatctttacggaaagccgctttgagggctctatcaaagaccttaacagttgacgagcttttctatctgaaagcacagttttctttattggaaccagacagaaatggatgcatcactcttgacaatatcagaatggccttaacgagagaagctactgatgcaatgaaggaatcccgagttcaagacattcttgtttcgttgagcgcccttcagtacagaagaatggacttccaagagttctgtgcagcagcagttagtgtgcatcagcttgaagcattggatagatgggagcaacatgcgcgatctgcttatgaatattttgagaaggaaggcaaccgagctattgtaatagatgaattagcttctgaattgggcctcagtccttcagtgccactgcatgtcgttctgcaagattggatcaggcatacggatgggaaattaagttttcttggatttgtcaagttgttgcatggcatgtccagcaggtccctgtcaaagatgagatag

SEQ ID NO: 3502 - DNA, 519 bp, Zea mays
  Peptide Sequence Number=SeqID_45281
atggcgcctttggcagggcctgactgcctgtcagtctcactctgtcaagtggcactgcagtcggagtggcgcaggcggcgctgtccttctgtcagaccgctttatgctgatgggggttaccagctgagaattaggcgtcttgagggtacccctaattatggtccccgacagtactgcaaagcatttcataaaggcaactggtcggagccgtcagcgtcgtcgtcggaccagtcgaaggcaaccggtgagttggtgttggggctccgatggggaggcggcgaggtggtggaggagaggagacggctggtgttggatacggaggtggacgaggccccacgcagtaggcggcgaacgacggcggccatgggaaaggagaggtggggtgttgccacctcagaagatggtacaagcagaaaatggttcacacctaaaagcaacaggataattgattttggacacattgacaagtttttcgggcacgacctgaatcaaattgaattttacaaggtggaatattga

SEQ ID NO: 3503 - DNA, 855 bp, Zea mays
  Peptide Sequence Number=SeqID_45282
atggaggccgccgcggccgtcctccccacgctggtgccctccgggagcgcggtggtggtggtgctcctcgcctacctcgggtatctcgccgccgctggagccatcctcccagggaagctcgtcgacggagccctactcccggactcctctcgcctccactatcgctgcaacggtttgctctcgctcctgctgctgctgggactctcggcgttcggtgtctacatggggtggatgtctcccacggttgtagctgacatgggactcgaacttctgtcagtgacctttatttttagtgtcatttggtatatcattgattacttcgtccatgaagaattcatgacctcaacgtgggacattattgctgaaagactgggtttcatgctggtgtttggtgatctagttttcatccctttcaccttcactattcaggggtggtggcttttgaagaacaaagtagagctgtcccttttgtctggtctagctaacttatgcatctttcttattggctacctagtgttccgaggagctaacaagcaaaaacatgtgttcaagaaggaccccaaagctcctatatggggaaaacctcccaaagttgtcgggggaaagctactagcatctggttactggggcatcgcaaggcactgcaattatctcggagacctgctgctagcactttcgttcagcttgccctgtggagtgagttccgtggtcccatacttctaccccacgtacctgctcattctactggtcttgagggaaaggcgcgatgaggcgaggtgctcgcagaagtacagggagatctgggcagagtactgcaagctcgtgccgtggaggatcctgccttatgtgtactga

SEQ ID NO: 3504 - DNA, 210 bp, Zea mays
  Peptide Sequence Number=SeqID_45283
atggttagaaagaaatgggaaaaggtctcgcgagagttaaagcttatgctcgagacgcactacaggttgactgtgcttgtcctaagagtattgtctacaccaaaaggtgagataattctcccccggtgctcccatatctcagtcgaccgtagtacttgcgggtatggattgcctctacccttgctcacaaacgacgcagtcagtgcataa

SEQ ID NO: 3505 - DNA, 2142 bp, Zea mays
  Peptide Sequence Number=SeqID_45284
atggccggagcgccgtcgtcgctagcgcgcctcctcctcctcctcctgctagctgccggatgcctcctcccgctggtcgctgacgccgcgcggctcacgctgtccctcgcgcccgccgccgacgcgctcctcaggctcaaggccggcattaaggacgacggcggcgcgctcggcagctggtcccccgacacgagcccctgcgccgacggcgggcccagctggaagggcgtcctgtgcaacaaggacggcgtgcacggcctgcagctcgaggggatgggcctctccggcacgctcgacctgcgcgccctcaccagcctgcccggccccggcctccgcacgctgagcttcatgaacaacgagttcgccggcccgttgcccaacgtcaaagagctcagcggcctccgcgctgtctttctgtccgagaacaagttctccggtgtcatccccgccgacgcgttcgccgggatgggctcgctcaagaaggtggtcctgtccaataacgacttcactggccccatcccggcgtcgctcgccgacgcgcccaggctcctggagctgcgcctcaacgacaacaagtttcagggcaagatcccggacctgaaacaggaggagttgacggaagtcaacctcgcaaacaatgagctcgagggggagatcccggcgagcctcaaatccatgacatcggacatgcaacaagaagctttgcggcccgccgctcggtgccaaatgcgaggccccccccgacgccgtcaccaaaggcgcatccgcaggcctccgtcaaagaaggcaccacgccgtcacaagcagcagcagactcccgtggcatccacgggcgcgtcgtcagcagacgacccgaagcaagacgaaggccaggagcccgtcgagggctccatttcgttcggcgtctccgccgcgttgcttggcacgcttttgatcgccggcgtggcgttcatcgcgctgcggaggcggagggggtacaaaaccaagaacttcggcccgaccgcgtcgtcgtctcgcccctcggggccgccaagggtcgagccgcacccgccggcggcaaaggcgcccgccgccgccgggggcgtggcgcacggcggcggcgcggcgcggaaggcggagcaggggcgactgacgttcgtgcgcgacgaccgcggccggttcttcgagctgcaggacctgctcaaggcgacggcggaggtgcttggcgccgccaacctcggcgtgtgctaccgcgccacgctcacgacgggccagtccgtcgtcgtgaagcggttcaaggagatgaaccgggtgggcagggaggacttcgaggagcacatgcggcggctgggccgtctcagccaccccaacctcctcccgctcgtcgcctactactaccgcaaggaggagaagctgctcatccacgactacgtccccaaccggagcttggcgaacctcctccatggcggcggcgagagcggcgggatgaagaaggcggcggtgcactgggcagcgcggctgaagatcgtgaagggcgtggcgcgggcgctcagctacctgtacgacgagctgtgcatgctcacggtgccgcacggccacctcaagtcgtccaacatcctgctcgacgcccaccacgggccgctgctgacggactacgcgctggtgccggtgatgaaccagtcgcacgccgcgcagctcatggtggccttcaagtccccggagcggaagcagttcggccgctcgtccaagaagagcgacgtctggtgcctcggcctgctcatcctcgagatactcactggaaggccgccgacctacgacccgcccaaggcggcggcgccctcaggcgagctgtcgtcgtcccagcagaagccggggccggcggcgggcaacaccgacctggtgaccgtcgtggggtcgacgccggagggcgagtggctgaacaccgtggtggaccgggacctgcggggcgaggaggaggaggacaaggaggagatggtgaagctgatcagggtcggcatggcgtgctgcgagagcaacgtggacaaccggtgggagctcaagaccgccatcgagaggatcgaggagctcaaggcgaaggagcgccccgacgaggagcaagcgacggtgatcgacgaggactacagcgatgttgccctcaactga

SEQ ID NO: 3506 - DNA, 1044 bp, Zea mays
  Peptide Sequence Number=SeqID_45285
atggttgaatgtttactggtcatgaatatcgaggctgtctgggataaatcgaccacagagtcgaagagtcggtgcctcctggagaaggtcgacagtctcgagaaagaaaatgaggacctcggtcgccaggtggtggggctgaaggacatgatggccaagacgtgggtgaaggcacagggcacgcaggagcgtgccactatgttggagtcagaattgttggccgtgaaggcttatcatgagaagttggaagttgatacgcgagctggcgtggaccgagtgcattccctatttgttgaggcctatcacgacctaggcgctgtaacgatgcccaacgatatgtccgggggggagatggacacccgcttccttgcgctgagggacgaagatgtcgaagacttggactctcttggtacgctagggactcgtactgctgacgttgaatctagagatgcgaggacttcacactggttgattgcggaagaacagacactaacacttggtttggtacctgcgcaagttccgatgactgtgcctatgcaggggaattttgattcctcgggcaaggggaaggatattcttgatgtcgccgcatgtgttacgctgctatcttgttggagtccatcgttttccaatgacggtggcggtttttccgattttgattcattgtgtagcgaaaagggtttggaattctttgagggtatggacaacgagtcctctaaggaagacttaaatttttttgttgcactatacattgcgtctatgtccaaggctgcgactggcgaggggtcttcaggtggtgctccgcctgctaagggtaaacaaaaaaagacacgtgctaggattccgaagcgaagggttcctagctccggagtatttgcttgtgatcgtggtggcggctgtaggcgaaggtgtatgggtatgcaaggtcctacctcgaggattttgctctcggaggtactagggatggtcccttcacatattaatgaaggtgagtcggtcgaactgagcatgggtccttgtcatgctgtcttgacaaggagttga

SEQ ID NO: 3507 - DNA, 1071 bp, Zea mays
  Peptide Sequence Number=SeqID_45286
atgaagtggcaaaagcgcaacgcagagggacgctgcatctgcgtggaatttcttcgttccgttccaactccaagactgggggagatcagtggagacggacgcgcctgggtcaacaagtctccgcccgtcgacggcgacgtcccatcccatttcccacgccaccgcgaacccgcgcggaagacgccggctccacccgctcccccacgaccgacgctccggccccgcgcgcttctactcctccaccacaacggcctcgtctccttccgcgaagctgccagcgcgtcgcgaaccgtctcgctctctcccgggccccggccgctttcgcgtttccgtcagtcagcgcacgacaaggccgcctatatatatacacgccgcgcccacggatcatcatcaagccatcaaacgcccaaacccagcggaaggaggcaaagcgaaggaaggagctcgccgtcgccgaactgcaactgcaactgctacaggacccgattcccagagacagacaccgctgcaattgcaactgcagctgcgatggagatggcctcttcctccgcgccgaccgcgtcctacaacgtgtccgtggcacaggcggtgctgacgctctccatcaacgccatcctcctctggctcaccaccgtcatcaagtcctactcctcctcatcctcctccgcccgccgccgcgacgccgcccctgccaccgccccggcaccgccgtctccgtccccggctaagcccgctgccgccgctgccgccgccgtcgacttggacgcggtgctcgggctgatgggcgccggcgccgagtccgtcgggttcgaggaggcggccgcgctgttcgaggaggaagaggcgacagtggaggaggccaggcaggcgttcgccgtcttcgaccgcgacggcgacgggttcatcgacgccgcggagctccgggccgtgctcacgtcgctcgggttcgagtccggcgtctccgccgccgccgaggcggagtgccagcgcatgatcgacgcgtatgacgaggacaaggacggcaggatcgacttccgcgagttcgtcaagctcatggaaaccagccactga

SEQ ID NO: 3508 - DNA, 1266 bp, Zea mays
  Peptide Sequence Number=SeqID_45287
atgtcgtcggcggcggcggctccccgtgtgcccggggccgcacggaggctgtctcagtctccgaagccgcctggagccagggacaaggagccgcctccgccggcgtcggccaggagaaagaatctgctgccgtcgccggcgtcggccaggggcgccgcggcgtccatgctactgcgccgtgccgcagtcgccggtggtgggcgggggagcagctacgtgcacccgtcgtcctcgctcagcgtctcgtgcgcgtcggaggcgtccaccgagtcattctgcagccgggcgtccacgggccggatcggccgccgccccgcgggcccgcccgcgggggctccccggcggagggcggcgggctctgccggacctccctccgcgcggccggcggcggcggcgtcggcgtccaggaaggtcgctagtagcggcgtcgtgccaggcggcggtgcagcggccactactgttcaccatcaggcggtgccgccggtggtagcaggcggcttgttgaacggagaacccaccgcggcggcgtcagcggggccgccgaggtgcccctggattacccctaacagtgatccctgctacgctgccttccatgaccaagagtggggagctccagtacatgacgacatgaaactgttcgaaatgctgactctgtctggtgcactggctgagatggcatggcctgcgattctcagcaagagggacaccttcagggaagtgttcatgaactttgaccctcagttggtggcaaagctgaacgagaagaagttcttggcgccaagcagccccgctagctccctgctgtcgcaacacaggctgcgcataatcattgaaaacgcacgtgagttgctgaaggtcatcgacgagttcggatcgttcgacagctactgctggagcttcctgagcaacaagccaacggtcggcagataccggcacacgcgggaggtgccgctgcggacggccaaggccgacgccatcagccaggacctgatgcggcgggggttcctcggcgtcgggccgacggtggtctacgccttcatgcaggccgtcggcatggccaatgaccacctcgttacctgctaccgcttcgaggagtgctgcgacctcgaatcttgcgcggcgcctgagggctacggcggtgacaattgcaagaagccgccggcggcggcgagcgaccaggagttgagcatgctctgtgggctggtgcagtgcgtcgccttggagccatcgagagccgccaccgccactgtgatcagcatctcgtag

SEQ ID NO: 3509 - DNA, 135 bp, Zea mays
  Peptide Sequence Number=SeqID_45288
atgtctctcgactcgtggatacatatatacgctatatttagggtagaggacattttaccggctctgttggagacagccttagatgacacaaagggacgcatggaaattgaaaacgggcatcaggagcagcactag

SEQ ID NO: 3510 - DNA, 372 bp, Zea mays
  Peptide Sequence Number=SeqID_45289
atggcggtggcaggcgggcggaagcggcaggcgggcggaagcggcagtcgagtcgtcagcaagctcacgccccctcctgggatagcgaaaggaccttctcccatggcggaagacgacacgtccgcgttccgttcctcgacgccccgggttgggaaaggggatactccgaaagggatccttctccgcgaaggaagcgggccccgagcccccctactgatcaggggttcaaaggctggcccctcgaaagggtttcaacagccgcctcagagcactcgggctccgcgcccactactggtcagaggttcgaaggccgacccctcgaaagggttcaacggccgcctcaggccactcgggctccgcgcccactactga

SEQ ID NO: 3511 - DNA, 306 bp, Zea mays
  Peptide Sequence Number=SeqID_45290
atggaacaccggcgtggatgggttcacctacggcgtgacttctctgtcagctcgacctcccttgaatggtggtggatgcacgtggttcgggatgcaaaagggggggtacacccggggcgcccaggccatctatttacagtgcgcggaaccgaagacggccagctgttccacaacttccgcgtggtggcggacttctcggccatggccgttgcggaggtgaggggacctgacattggagcccacgtgaccatgtcaaacgagagcaacgtcgcgagcgtcgcgacactgccaccacgggcccactag

SEQ ID NO: 3512 - DNA, 150 bp, Zea mays
  Peptide Sequence Number=SeqID_45291
atggagagccacacaaagaagctcgtcggcgatgttttcctcaagatcagattactggaaggccagaccagctgctcgcattcactggtgcacgagctacttgaggatgtcaatgaggtatggctccgctggttcatcagtattcagtaa

SEQ ID NO: 3513 - DNA, 327 bp, Zea mays
  Peptide Sequence Number=SeqID_45292
atggcgcattggccaagcgacaccccggcgaggctcgcccttggcatccgagcggccatgcaagcctactcgtcagctgcctgcacaacgcctgtgattactgtctgcatcggcatcttgtcgtacgtcattgactcgcctcgtcgtctgcccacccggcacgcctcgtcgtccgccgtcgtcgcaagattgcgatatattcttgagcttcgaggagtcgacggggactcaagctgttttcctgagtacctctccgtaaggacctattcgttaagtgaccacacgagaaagcagtgcaaccatgtgggtgaaatgagacgcccttag

SEQ ID NO: 3514 - DNA, 756 bp, Zea mays
  Peptide Sequence Number=SeqID_45293
atgagacgacctcgtcataggtcttcgtccgatggcgtatgggacgaaggcgaggacggcgaaggcatcgagcgaagggtggcgtcttcgccttctccccaacacttctactggccgaccgcggtggccgacgccactaggattgtacgctcctgccaagggtgtcaattctacgcgagacagatgcacctactcgctcaggccctgcagacaatacccatcacctggtcgtttgctgtgtggggtctggacctcgtcggtcccttgcagaaggcacccgggggcttcttgcacctgctggtcgccatcgacaaattctccaagtggatcgaggtccgacccctaatcagcatcaggtccgagcaggcggtggcgttcttcaccaacatcatccatcgctttggggtcccgaactccatcatcaccgacaatggcacccagttcactgggaagaagttcctggacttctgcgaggaccaccacatccgtgtggactgggccgccgtagctcaccccatgatgaatggccaggtggagcgtgccaacggtatgattctacaaggacttaaaccgaggatctacaacgacctcaacaaattcggcaagtgcagtctctgcgacgctaccacgcccgaggggttcggccctgaggcttccaggtgggagacttggtacttcggctgcggcaagacgcccgagggcgccacaagattactcctccctaggaagggccgttcatcatcgccaagattttga

SEQ ID NO: 3515 - DNA, 378 bp, Zea mays
  Peptide Sequence Number=SeqID_45294
atgcaggtggcgtgcaaccacaccacaggggcgcacccctccgactttgtcgcatccagcatggaggcccaggcccacacgtcatgtaaccggcgcgccggttactacgtgcaagaactgcaccgccacttgcgccaataccgcgcctcctcgactgcgggaccggtgccgcgactcgaggcaaccctccgcatggcccaacagtgccgatcaagcacattgatcacggggacctggaaaggggatatttcgaaagggatccttctccgcgaaggaagcgagccccgagccctcctactgatcaggggttcgaaggctggcccctcggaagggttcgacagccgccccagagcactcaggcttcaggctcattactga

SEQ ID NO: 3516 - DNA, 387 bp, Zea mays
  Peptide Sequence Number=SeqID_45295
atggcaggggcaagcgacacctccggtaggagaagcgggcgccgatttgcctccgtcatgatgaccgcgtcaaaaaagggatcgggaaagggggtattccgaaaaaggacccttcccagcgaaggaaacgggccccgagccctcctactgatcaggggttcgaaggttgcgccctccggggttcggcaaccgccccagagcactcgggctccgtgccctttactgatcaggggtttgaaggctggcccctcgaaagggttcgacagccgccccagagcacgcagagtcagggatggccctgggtacgtcccttacatggccgaggctcgggctacgttcccgaggtaccctagtacatttccgagaccagcgggaacaattttgtaa

SEQ ID NO: 3517 - DNA, 486 bp, Zea mays
  Peptide Sequence Number=SeqID_45296
atggaacaagatgaagctcttgggtatccttccagggctacaatttctggtgaagggaaagatgtcttagtttgcggtctcgatgcttgggaggccgctgtggttaaaaatgtggttcaaagcattgggtttctacaaatcgaagaagcattgagcaaattgaagaagcgaaaacttttccaattgtcacacccggttttgaagtgcgtggagcaccggactgtccggtggcacaccggactattcggtgcccacacgccggactgtccggtgcaccaggaacctcagccccaattgctagttccaggtggcacccggagggaagaccaccggactgtccggtgtgaagtccggactgtccggtgtaaaaggtctacggcgccaacgatcacttgctctgacagaccaacggctaggcgcaccggacaagaaacaatgcgctatctggtgcaccaccagactgtccggtgtgaccgcagaaagtag

SEQ ID NO: 3518 - DNA, 381 bp, Zea mays
  Peptide Sequence Number=SeqID_45297
atgaggttggagttcgcaggagtccttggcagggcctgggcgagcacgtcgccgcgcagggacgtggggactcagtcgatggcgaggcagaactggagcgaaggccgccgcggcctggggagggaagtgtggagggttgggagcggcgtccggcgtggtgagcacagggaggcaaggagacaggcgagcagagagatgaggctgacggccggtgtggcgcccaaggcatggctacgacggcataggggggcgctgggcaacaggaaggggcggtggcttggcgtgctcactggtggagggcgaagaaattggcacaagcgtggagagagggcgttcttgagggatagccggatagggctaatggaggcggtggggaaataa

SEQ ID NO: 3519 - DNA, 441 bp, Zea mays
  Peptide Sequence Number=SeqID_45298
atggcggcggagcagtggctccgagtccaagggcggtggctcctaattttggaatggcgtcctggcggccggagagaaggaaggttactggcaggtgatatcgtggctttcaccgtggcaaggccaccggcgatgaacggacacacttcagtggtttactgcgacatgttaaacctcacaggctcgtggcacccgagtgacgggtggcaaaactccggcgaggttatctggaccggcgataaggcaagcgggtatggcggccagctcccgatctcatctacggtgaagatcttttcaccccgaggcgttatccgtgcgccaacgggcatgaatcgcatcgacgacgtgaatccaggcgcgagggtcgccgacagcaaggtgcactgcaccaacgatcttcttcagttactgtacaatcaaaacttcattcagtctgtctga

SEQ ID NO: 3520 - DNA, 111 bp, Zea mays
  Peptide Sequence Number=SeqID_45299
atggagcctttgcaggcacttcctatatttcttgataggatgtttcatcatgttcttgctgtaatattgtcagtgacatttgttcttgcctttggagaggtattcatctga

SEQ ID NO: 3521 - DNA, 267 bp, Zea mays
  Peptide Sequence Number=SeqID_45300
atggggagaggaaagagctccttttttgcgtccctgttcggctgcaagaagcatggctccggcgggaggcaggatcaggtggaagcggcagcggcgacgagaccgccgccgcaggggtactaccacgggacaagggtgcgtcccagcgatgacgacgaatactacggcaagaactggtacgccgaccgcgacatcaaccagaaggcctctgagtacatcgaaaggatgcaccgcgtaatgctgatcagccaacatgacgacgagtag

SEQ ID NO: 3522 - DNA, 258 bp, Zea mays
  Peptide Sequence Number=SeqID_45301
atggcgtggatgaagtctcacgtcggcggccatccttccgcttcctcacggtggtgctccagctcacggtatctcggcgagcatgccagggggcggaggcaagagcgtgcgcgcacgttttggagcgggcagccgaccatcgggtcccacaagtcggccacagggcgggtgacagcgtggagaagccgagtgggaatgggccggcatcgcgacccacagagtgagtggctggctgatgtggacaatgggccgaggtga

SEQ ID NO: 3523 - DNA, 381 bp, Zea mays
  Peptide Sequence Number=SeqID_45302
atgcatgcatgctgccaccttctctcgctcccggcaaggccaacggcgaggcagcacgtgcagccactgcgcggcgctcaacggcttcacctcacctgtgctgttgtgtgcgtgcgtgcttatatgggttcttgggtgcgcaccatcacaacgcccttcaggaaagcatgcaccatcttcggcccgcagaaggacggcggcggcggcggcaagaggtcgcagcaaccaaacccagcgacgatggtacggcacgtcgacgacgccgccgagagggccaagctgcacggggaggtgatggcgtgcgcctacgaagacgtgcaggtcatgtggtccatgctcgaccagacaacaaggattggggatctcagtggcagctcgtga

SEQ ID NO: 3524 - DNA, 375 bp, Zea mays
  Peptide Sequence Number=SeqID_45303
atgggcaagagcaagaaaggtgggagttcctcacaccattccggcgataaggggaaacgtgagctgactcctccctcagaggacttcggcgactcagagtactcggaggaggagttctcctccgagtcagaggaggtatggacctacatccgggccgtcgagcgtgccaggctcgagggctcggatgagtcggaggtcttctcagacgaggagaactcctcagactcgtccgaggagggcggcagtgatggagacagcgagggcgacggcgacgacggaggcggcggcgatggcgatggcgacgatggcgaaggtggtggcagcggtgacggcggggacgacaacaagggcagcagcaacaaggccagtggctag

SEQ ID NO: 3525 - DNA, 306 bp, Zea mays
  Peptide Sequence Number=SeqID_45304
atgcggctggcggggcacgtgggacgcgaggcaagcgacgagtgcaaggcaaaacggtttcctggccgcgtgggacaaggccgagaggagaggacacgaagggagctacgcgaggaagaaggggtccgaggcgaggaggaagaaggctcacctgtgcacgtagagctcggctacgacggcgactggacggactggatgcgcgcgcggagggggctcgacccgccatggccgcagcagcagttcggctgcaactgcgccgatccggatcgagatgaggggaagaaaactgaggcacgtcgtgggtga

SEQ ID NO: 3526 - DNA, 639 bp, Zea mays
  Peptide Sequence Number=SeqID_45305
atgacccgcccaattgtctccttccccatgccaaacccaaacctcaacaccaacccgaacgctaaccccaatgccgtcgccccgggccccaaccccggcgcgcgcctcatgcagctgctcgggaactccgggccgacacagttcgagaccgccgactccatgccgccgcccacatcagagttcgcacaactgcagtcgctcccagcgatgccatccgcgccgccggccaggatgctgagcagcaccagcagcaagatagatcgctgtgaaccggtcgtatatgggcttaggctcgataacatctgtgtgctgaacatcaactctgcactccgttcactcctccgtggtcacacacagggaggctcgattcatttaacaggaaggtctgcgcattcacctccttccgcgccgtcaatggaagccagatctccaaacatgcggtcctcacaacgtcgatcgaatccaatccaatccacagcaaacaatggcatccaatggcagcgacattgtgatgatgtacggaacacggcgctgctggagccatccaagcagcccaagtcagtgactttctctgtcaaggtgagcctagcgcagatgctccgtggcatgatcatcatggacgtggtcaccctggagtag

SEQ ID NO: 3527 - DNA, 144 bp, Zea mays
  Peptide Sequence Number=SeqID_45306
atggggagagggaaaaagagctccttttttgcgtccctgttcggctgcaagaagcagagctccggcgggaggcagcaggaggtggaagcggcagcctcgacgccgccgcagaggattggttttgttgttttgttgtttctatga

SEQ ID NO: 3528 - DNA, 673 bp, Zea mays
  Peptide Sequence Number=SeqID_45307
atgcggttccgcgggaaaggtccgactacggcgagaaattcccgcccagtcgacgccgcgcgcacccggtctccgccctgtgtgtgtcccgagctacctcccgcacgcccaggacgaggcaatcagagcggatgggcgttgatggcgtggttcaacggcagcggcggcggctttgagctccctccacgcgatatccttagctggcccgataacgcaccaggggtgcgcaggtggtctataggcacggaaccaggggaggctggtgcaatactcgccttgagtcgttgcaatggccccagcgaaaaccccgggtcaacatccatggcggtagatgcggatttggttacggccccgagcggatcgacgaggggcgcaggagttcgttccaacggaggtgaagctgacatcggggcccacctggccagcgagacgcgcaaggacaaagcggcgtccatgggatgtgaggcttggagattccgaccagcacgcggatggcggaattctgttggggaagaagaagaagtccctgaccagggggacccacagagcagtcaccaggcacacgcgcaggacatagctgagatgctggccccattgtgtcggcgcgcgcgtgacaaaagtgggccgtgcagagggttttctctggtgggccgaattcgtagccgaagcccag

SEQ ID NO: 3529 - DNA, 735 bp, Zea mays
  Peptide Sequence Number=SeqID_45308
atgcggttccgcgggaaaggtccgactacggcgagaaattcccgcccagtcgacgccgcgcgcacccggtctccgccctgtgtgtgtcccgagctacctcccgcacgcccaggacgaggcaatcagagcggatgggcgttgatggcgtggttcaacggcagcggcggcggctttgagctccctccacgcgatatccttagctggcccgataacgcaccaggggtgcgcaggtggtctataggcacggaaccaggggaggctggtgcaatactcgccttgagtcgttgcaacggccccagcgaaaaccccgggtcaacatccatggcggtagatgcggatttggttacggccccgagcggatcgacgaggggcgcaggagttcgttccaacggaggtgaagctgacatcggggcccacctggccagcgagacgcgcaaggacaaagcggcgtccatgggatgtgaggcttggagattccgaccagcacgcggatggcggaattctgttggggaagaagaagaagtccctgaccagggggacccacagagcagtcaccaggcacacgcgcaggacatagctgagatgctggccccattgtgtcggcgcgcgcgtgacaaaagtgggccgtgcagagggttttctctggtgggccgaattcgtagccgaagcccaggttacaaactgggtgttacaaatcctaccacccttaaaaataatctcgtcctcgagatttaa

SEQ ID NO: 3530 - DNA, 585 bp, Zea mays
  Peptide Sequence Number=SeqID_45309
atggaaatcactgtccgcaatgcgacgatcctctgcagttacttctggcgaagtagctccagcagtagcattaagtttagtgctctcgattttagagaatttgacacctcttctacaaatcttgtaggtccacctggctctggaaagggaactcagtctcctattatcaaggatgaatattgcttgtgccatttagccactggtgacatgctgagggctgctgtggcggccaagacacctctaggtatcaaagctaaagaagctatgaataagggagagcttgtttcagatgatttggttgtgggcactattgatgaagctatgaagaaaccctcatgccagaaaggtttcattcttgatggctttcctagaactgtgactcaagcacagaagcttgatgagatgttggcaaagcaaggtgccaatgttgacaaagtcctgaactttgcaattgatgatgctgtattggaagaacggattactggtcgttggatccactcagccagtggtaggacttaccactcaaaatttgcacctccaaagtctccaggagttgatgatcaataccgacacagatgtgattag

SEQ ID NO: 3531 - DNA, 1839 bp, Zea mays
  Peptide Sequence Number=SeqID_45310
atggcgaccggggccgatctgacctccccaaccggcgccgctgcggcagcggccgccgccaggaaggaccgccacatcgtcagttggagctccgaggaggatggcgtgcttcgtgctcaaatcgctcttcatggcactgataactggacaattatagcggcacaattcaaggacaagacggccagacagtgcaggagaagatggtacaattatttgaactcagagtgcaagaaaggtgggtggtccagggaagaggatatgcttttgtgtgaggctcaaaaagttcttggaaacaagtggactgaaattgcaaaagttgtttcaggaagaacagacaatgcagtgaagaaccggttttctactctatgcaaaaggagggctaaggatgacgagctataccaagaaaatggtgtgccatgttccaacacaaatgcaaagaaggttctcactgaaacaggacgcctcacaccaggcggagctggctctttggtacatattaagcagacgaggtcttccagttataatttgaaggagaaccttgtaccaaatatgaaattatttgaactagagaagagcacacaagatgccaggcaacctcttgctaccatttcttcgaacaaccaagataaccaatctgactttctttgctcccttgcaacaaaaatcaaaagtgacaatacaagtaaaagcatggatgaagcatggcagcaactgcaagatcatttagtgaaaaaagagcacaacaaagtgccagaaaacagtgggtctgaaatagcttcacttttagaggagcttgatgatttaattgtagacccctatgagaggaaagatgaagatgaacagaagctaagcgagcacaatggacggaccgatgtggacaatgatcactgtaacggttcttcacaaactagcatagtagtaacgacaaatatggtcccagaggaaatgatgggagattgtccagtcgataactgcaatgaggatagtagtctttgtagaaaagtgctttctggaagtacagaaccttgcccaggtgcaaaaatgacaggatgtgggaatttgagcgaagaccaggttgctgaaggtagtgtgcttcaacgtgtagaatctatatctcctgttataacagatattgatgatttactcgtagacccgtatgagagtgaagcggaagatgaagaaaagtcaggggagcagaatggacagattgatgtgcatgctgagcagtgttttggttcttctcaaactatcatagaagtgatatcagacatggcccctgatgaagtcatggaaacttgttcagcagataaccgcgaagaacatagtagcatttgccgaaatgtgctttctggaagtatggcaccttgcccaggtgcagaaataccaacatctgaaaaaatgagtgaacttgctgaagatagcagacttcaatgtatggagtttgcatctcccgttctggcaaattttgcgagcaaggaatgtggagaaacaccagaaccacaagttcttaatgagattgttgaagatagcaggcttcaatgtattgaattcaactccccggctcacacaattctcccagataaaacaggcgccgaaaactttgcatccccaagttttgatgtggttgcaaaagatagtaagcctccgtctttggaattcacatcccctgctcatacagttgcaacattccaaccgtatgcagacggcatccctaccccaaaattcactgctagtgagaggagttttctgctgtcagttttagagctgacctcaccagggtcaaggcctgaaacttctcagcagccatcttgcaaaagggctcttcttaatagcctttga

SEQ ID NO: 3532 - DNA, 909 bp, Zea mays
  Peptide Sequence Number=SeqID_45311
atggagtgctgtgtaatgggcatctgcgtccgctcgatccaagttcgccaactccgtcgtggggctccgctcaatccaagttccccaactccggcgagccccaacggcgtttcctctccgattttaggtgcgcagaacctccttcctcctctcgctccgccgccgccttgccctagatccgccgtcgcgtcggcgtcgagggtgcgcagaacttccttcctcctctcgcttcgccgccgccttcccctagatccgctgtcgcgtctgcgtcgagctgcgccgttggggacgccatacaccggcgccctctgttacggccgcgcggtgcgccagctgcggctcgcgcgtgcccagacgggccgcgggggtgcaggcagacgcgagcgcctctccgacgagcagtgcgcggggatcaaccacttcgtggcgctgtacgccgtgccggtgctcatcttccacatggtgtccaccaacgacccgtaccacatgaacgagcgcctcatcgccgccgacacgctgcagaaggccgtcatgctgctggcgctcacggcctgggcgttctggtcccacctcagcaggcgccgcgacggaggccgagggaagcggcaggtcgttcagggagcggagtcgccgatcaagtgggtggtgaccaacttctcggtggcgtcgctgcccagggtgccaggcgggccccgcatcggccactgctccaccgcagatgcgaccgcctccggatgccgggcgggcctcgcatcgcccgctgctacacggtgtacgacgctggagttcgcctacctcccatccgcggtcgtcagcgcctcatcgtcggatgacgctgcttatgtggtccgtgacgccgtgcgggtccacgtgcagcctgtaataaggaaagagcgggtgggcgcgtag

SEQ ID NO: 3533 - DNA, 321 bp, Zea mays
  Peptide Sequence Number=SeqID_45312
atgcatggggccactcctgctgctggtggtggaagaacacaccagggagaggcgttggctccatggggaaaggctcccgctgctggtgtccatggggagaagatggagaggggaggtggcgtgagacgggagagaggggagttggcggctccgcaggtgcacgacgtgggcgccgaagggagcgggctggcggttttaccgaaggaaacgcgacgtgcgcgatctggacgggaggaagaacgaatggcaggaggaaccgtcaagaagatgaatagtcaacaggggtggagcccacctgctggacagcacataagaagataa

SEQ ID NO: 3534 - DNA, 159 bp, Zea mays
  Peptide Sequence Number=SeqID_45313
atggcgaacggcgaggaaatgagctccggtatgggtgctgagacaagagggcagggagcacgaacagacctggagtacgctgaccacggtgagccaacacacagcagcgcggagaaccaaattgggggaagagagaaattgggaggctctggtggataa

SEQ ID NO: 3535 - DNA, 360 bp, Zea mays
  Peptide Sequence Number=SeqID_45314
atggcatcaaaggacaagggccttcgtcccgcaaagggctggccgaccgtcaccctggctgggaaaggactgcaaagtgttattttggcgaaggatccccaaggcgaaggcttcaaggtgccggatgctcctcccggcgcggctgctgcctttgccgccgccggtccggacgctgagcggctgacgccacggcgcgtcggcgtgtgcgcgtgctgccgctgcggctggagcggaactgcggagtgtggaaggcagcggcggaaggcacagcggcataggcgtgggcgcgtggtcactcggcgtcttggtctcggcctcgacggctcggcgaacggcgggcggaagcagaagggcggctga

SEQ ID NO: 3536 - DNA, 321 bp, Zea mays
  Peptide Sequence Number=SeqID_45315
atgcaggcggcatgcaaccgcgccaagtgggtgcacctctccgacttccagcgcgcccagcatggaagcccaggcccacgcgtcatgcaaccgggaccaggaaagggggataccccgaaaaggatccttctctgtgaaggaaccaggctccgagcctccctactgatcagaggttcgaaggctggcccctcgaagggttcaacagccgcctcagagcgcgcgtgggctccacacccactactggtcagaggttcgaaggccggcccctcggaagggttcaacgactgcctcaggctactcgggctccacgcccactactga

SEQ ID NO: 3537 - DNA, 480 bp, Zea mays
  Peptide Sequence Number=SeqID_45316
atgggtgtgggcaaggaacggtttgtaaacaagcgcaagcgcgaaccgactcctccatcggaggatttcggtgattcagaatactcggaggaggagttctcctccgagtccgagggatctccggctcccgtctctcccccggcgtcatccgatgactcggatgactcccaggggatagccgcggaagtctggacatacatccgggccgtcgagcactccgggctcgagggctcggatgagtcggagtactcctcggatgaggaggactcggacggcggcggcgaggacgaggacgacgacgacgacgacggcgacgacgacgacggtggcgacggcgacggcagcggcaacggcaggggcagtggcgacagcggcagggacggtgacggcggcagcagcaggggcagcaccaagggcggcagcagcaagggcagcaccaagggcggcggtggcggcagcaggggcagggccagtggctag

SEQ ID NO: 3538 - DNA, 411 bp, Zea mays
  Peptide Sequence Number=SeqID_45317
atgaactgccagtgtcatcgtggtgttgttctctatgcaattgagcgacacacagatcccttgctacggccatcgtggccgcgccagcagtcgtgcgtcacgctgggactacaacacgccgtgctagaagcgccagcgtcggagccttatcaggcccacgtctgggccaaagctgtgacgcgtcagaggccgtgcccgcgcgaacgctctagaggcacgtcgcgcgttggcagccgcacgcgtgccgaggagcccctcacgaccattggtgcccatgacccctactccaacacatggataaaggaggagctcggtcaaagtgctaccgagaaaagtggatctcgtgggttaaaacttgagaggataaagggaaaaattatctcatgcatgctcccgcgtaaacatgattaa

SEQ ID NO: 3539 - DNA, 1647 bp, Zea mays
  Peptide Sequence Number=SeqID_45318
atgaccagctccaccagctcccacgacgacgtggtgcacacgggcgggtgccactgccgccgcgtgcgctggcacgtcgaggcccccgcgagcgttgtcgcgtgggtctgcaactgctccgactgctccatgcgtgggaacatgcacttcgtcgtcctcgccgccaagttcgggctgcgggccagcgccgacgagtccatcaccacctacaccatcggcacgcacacggccaggcacaccttctgcaaggtctgcggcatcacctccttctacaccccgaggtccaacctggacggcgtggccgtcaccgtcgcctgcgtggatccgggtacgctgggccacgtcgagtaccagaaggccgacgggaggaactgggaggagtggttcgagcgcagcggcatcgctggcttctccgagggaaaggcggatgcaacggcagagtaccgcaatctccgacgcccaccggtcccggtccatgttctgcctctgcgcccccggtctgccgccatcagcgccctccacctcgcccaccgcgcactgattcccccgaccccgccgcattcaattcccccaaccccgcctcgcccacaatcatcgacgccacgcccacggccgcgccatccaccaccccgacctcgcccccagcccgtggaaatctcgcccgcgagatcccgcctcgcccgccatcaactcacactggcccttgcccgtgatccatccttgcccgatgcccgtgatccatcctctccccccatggcaatctcgggccctcggcaggtaccctctcccctgcgacaatcttcctcgcgccctcggcaagcgatccgcggcaagcgccctctcaccggtgaggagcacgtggcggcgccggcggtcgaggagacgtcggagaagaagcaggccagcacaaccgagctgcccgcaccctcaggcttgacgaagaagggttgcgggggcctgctagcgttcggatccggggggccagatagtgaaggcatggatgaaggcacggatgatgaaggcacggacgtggcggtggaggcaagcctattccctcacccttgcctagatggtgaaggcacggatgatgacgacggacgtggcgaagagaatcctccaagaaccggcaccgcaggaggcattagtcgacaaagcagggcctgcactgagatggtcgtccgcaaggagacgacgttgcacgaagccgtgcgcggtggccacgaggccacgccacgtgcggtgaacgggaaagcgcccgtaatctgcgccgcgccgggacccgccaccgtcgtcgcgcgccgcaccaccgcccaaggcctaaatggcgtgtcagtggcgatcgccgaaccactggggagccatgcgcgccctcgatttggggaaacaaccgttgatgtcaccggaatccctcaccggcgatctattcgtgtcgcggacccgccccgaaccgtggacgagctcgctactccttcaatcgtgggtgagaatcttcttttcatgctcgccatcacccctctaggtttatcaccaaccaacgtccgggcatcggattgcgcgtccgccggcgaagctccgccgtgggtgggcggcgctgctatccagaccaccgtggggagggagaagatctctggatcgtccatctgctga

SEQ ID NO: 3540 - DNA, 288 bp, Zea mays
  Peptide Sequence Number=SeqID_45319
atggccgctgagagggaagaaagaaagggagatgacacgtcggtggtcgccaccgtcgctatggccacccctgcctacgtcgtcgatccgacctcgggtatcggcttggaaggtccattgcatccgtgtacacgcagggagaagaagcaagtcgccgggggactgagcgaggtcttcgtggagggcttagatgagggtgcggttggcacttgttgtaccaaatctgggcccttcgactttgatccaatggtctccatagctcaccagtttatattagggcagatttaa

SEQ ID NO: 3541 - DNA, 270 bp, Zea mays
  Peptide Sequence Number=SeqID_45320
atgtcagctgagacccacggcttccaaggcttccaccatgttgataatctatacaaggaaggcctcaggctgaagttgggtctccaggagcacctgttccagaaaataccccttgttcagaagattcaggaatcaagtgaggggatgcttcgctatgatacacctagaatgttttccaattcaagtgccttcatgttcagacaatgctcatacttcgattatgcagaggacaagtttgcatggctccatgacgatgagtttgctcgatag

SEQ ID NO: 3542 - DNA, 228 bp, Zea mays
  Peptide Sequence Number=SeqID_45321
atggcgctgccgccaccgccaagatccgcccgttcctccaagcttcagtgtagaccctcttatggtcccaaatccgcccctgacttactgctcaacattggccttgcaggggctgcactcgcaacagcacttgatgattacttctggtacaaaaaaccaatatatatgatatcccccgggtccactggaaggataaaagacctcatgaaaggcccaagggcccaatag

SEQ ID NO: 3543 - DNA, 315 bp, Zea mays
  Peptide Sequence Number=SeqID_45322
atggcggggaagggccatgaatccacggacagagaggggagaacggcgggcgcaatatggggaattgggcatggggacaggtgtctcacctcggggcagagctcgaggaggcttggagcggtcttcggtgagctggatggccgggaacgcaggcgcgggtctccgacggcggctggcggcgtgggcagagcgcgagagagggtgaagctgtgcgaaatgaggcgaggggcgtgcgcggggcactggcggggctctaagaagggagctaggcgcatgggcgggcgtcgtggccgagaaagccggcgacgtgcgtga

SEQ ID NO: 3544 - DNA, 443 bp, Zea mays
  Peptide Sequence Number=SeqID_45323
atgaccagctccgccggctcccacgacgacgtggtgcacacgggcgggtgccactgccgccgcgtgcgctggcgcgtcgaggcccccgcgagcgtcgtagcgtgggtctgcaactgctccgactgctccatgcgcgggaacacgcacttcgtcgtccccgccgccaagttcaggctgcaggccggcgccgacgagtccgtcaccacctacaccttcggcacgcacacggccaggcacaccttctgcaaggtctgcggcatcacctccttctacaccccgaggtccaacccggacggcgtggccgtcaccgtcgcctgcgtggatccgggtacgctaggccacgtcgagtaccggaaggccgacgggaggaactgggaggagtggttcgagcgcagcggcatcgctggcttctccgagggaaaggcggatgcagcggcagagta

SEQ ID NO: 3545 - DNA, 285 bp, Zea mays
  Peptide Sequence Number=SeqID_45324
atggcggcggtgttccttgcgctggtgctcgtggcagcatcggtgcatgcggacgccacggccgcaccaccagcgcggcgcctcctcggagccggcggcggcgctgcgccgccgctgccaccaccaccacaaagctgtcggaaccttcggacttggaacgaagttgttcacaatatgaaaagcatgattgggacgaaggtcgaatcaattctgaagctacgcgcaaggaagcttcggctcaatagcagaaaaaggaaccgacttaaagatgaaaaggctatctag

SEQ ID NO: 3546 - DNA, 312 bp, Zea mays
  Peptide Sequence Number=SeqID_45325
atggaggcagtgaatgatggaggtaggcactattggggtggcacttgtcttgcttcacagggcgcatgtctgaacctgctcggtgtcaggggcccgaaccgtgactcacctggggcaaatgctagggacgccggggtggtgcacatcctcgggaacacggtcatcagggcccgcagagattcagggttcatcaagaaggttgctatcaattacttgtatgctttccttaggaagatctgcagggagaacaacaccatcttcaatgttccccatgagagcctactgaatgttgggcaggtgttctatgtgtaa

SEQ ID NO: 3547 - DNA, 405 bp, Zea mays
  Peptide Sequence Number=SeqID_45326
atgagcgattttgtaacggaatcccatcagagggaggcatcgagccctctgaccctatcgaatgggtccgggttcggcaaatcacctgcaggaagctccgcctcgctcgaccttaggcctcggcctcggaagggggtctccgactcagagctcggcctcaacctcggcctcggaaggaggtctccacctcgcccgaccctagggctcagcctcaaccacaacctcgggaggaatcgcgtcctcgcccgaccccggcctcagcctcaggagaaacctccgcctcgcccgaccttgggctcggaccagccgcgccacaggggatacatcattaccctacccctagctagctcaggctacgagggaacaagaccagcgtcccatctggctcacccaggaaacaagtaa

SEQ ID NO: 3548 - DNA, 654 bp, Zea mays
  Peptide Sequence Number=SeqID_45327
atgcggatcgaagtaaccagcttcgtcagaggagaaatctcggacgaagtgccctacataaggcacctcttggagggccatagcttcgtgtcggttagccttcgaagaaacttcgtatcaccttctgtcaagggtctgaagacttggagcactggtgaatggagatgcttggctttgctgttggctaattggaaagttgcaaggaaaattgaaaaacggcaatattgcaagaaggggcacgcctggtactggtacagcaccacgttctgcggcaacagatccggttgcggtcgctccttggccttggcctccgccgccgctacagtagcgaaggtaagggagaaggatactgcgccggcaaccccggcaggcatcaccctcgaggatggaagcggcgaacggggcggtggcgccggcgctgcacaccaccgcgcgcccgcggcggcggccgtggcgggggaggctgcgccgcttagatggcgcgctgagaaaagggaacgggagactagggtctgcgccgctcgcaacgacctcatcttggcaaggctcgtcgtcagacttcagctgtttggttggttcgcggcctgccagcaaaggttctgggcttctggccgccgggcgaccagaatcaaccgtggaaagatggacccataa

SEQ ID NO: 3549 - DNA, 1071 bp, Zea mays
  Peptide Sequence Number=SeqID_45328
atgtttagtcaaccatcaacaaaatctaagagggttaggataagatgttccctctgccatgacgataactttttatccattgttttcatctcagcctttttagattatcatgatataccatataaagttgtggaagttaatccattgagcaaaaaggaactcaagtggtctgattacaagaaagttccaatattgacagtagatggtgaacagcttgttgattcatcagatataatcaatatactacagagcaggatcaaccccaatgaagaactcactagtgacgaggaagcaaaatggcgaaggtgggttgatgagcaccttgtgcatgtcttatctcctaacatatatcggacaacttcagaagctctagaatcttttgactacattgcaaaacatggctgcaggactccaggagaaggggcagggacgcagggtgctgtagccgtcggcaatcaaagtccaggactgcaggggcggtgcaagagaggaggggagacatgcagagagccagagactgttggcggccttccccagaccccgcacagtgcaggaaccctacggcactggatcggtgttggaggtgctatagattctggttctgatactgttgttggcacaaggaatgactctggaggtaatttcagttttacagagaggtttgccgtgaagtatgctggtgctgcggccatgtacatggtatctaagaaactaaagaagaaatacaacataactgacgagcgtgcttcattgtatgatgctgccaatacatggatcgacgcactgaacggaagagatttcctgggtaccctatttattcgtttgctaactatggacagggagagagtagagataatttcatttcttgaagcaatgctaactatggctgttcgtccaggtggctccaagcctaacttggcagatcttgccgtcttcggtgttctgagacctatccgatacttgagagcaggaaaagatatggttgagaacactgaaatcggcgattggtaccgacgcatggaagacgcagttggagaaccatcaagaatacaggatgcagaaggaaactag

SEQ ID NO: 3550 - DNA, 255 bp, Zea mays
  Peptide Sequence Number=SeqID_45329
atggaggaagaaagcaacgacaacgcgaggctgcctgcagtcgtccgcggcctaggcgatgtcgccctcccgtcaccactcctcgcttcttcccagggcagaactttccagaggactcaggataggcatactaggagtgggagcagccagatcaaatccaacggtaggttcgcgagaagtcaagaacaaaagaagttcctgttctatggaaaagccaaaagagaggaccatactgcatactgcgccgttggatga

SEQ ID NO: 3551 - DNA, 1845 bp, Zea mays
  Peptide Sequence Number=SeqID_45330
atgcagctttttgggttcaaaaatgcatctattcagagattgcttcgtgagcttatagtagattcaactggagcagttgaacttaacgagccttgtgaagtcacttctgaggctggtgcacatttagtttgtaaagatgcatctgatgtttctgaggctgaagatccatccgtttgcttaggcatggaaagtggaactcctaaaagaagtatagagcccagccaggtggaaaataccttggcagtccactacccggacatgttaacagcagttgataagtgcaatgtatccacacataaaaatacaaatgaaggagatactgtaggtagagcactgttgcaagatgtctctgattcaagatgcacacttccattgctggaagaagtccctaagaatgcacaatccacttctcttgatgataatttgggagagtcttctctagtttcatctcaacaagttggtttatcttctggttcttatttgaactctgaaaagtctgatatagaattggctgagaaggaagtagcaaagtctatgatgtctattttgcttccccaagctattccccttctcatgaaaagttacaaaaggaagaaattcaagcataaaaatagagaaaactctactgtttcagtgaaaacagtttcagcttacaatccatctgatagttgctgccgaggtgtgactgtaccaacaattgtgggtgaaggtacaaatggaaatagttctgaaatgtgtgaccatgggggatctcatcatgacaaggttaaaaatggctttgccaatgaggactgcagaaatgacgacttagtggttaaattagatgagatgaatgattatgttgcagatagttttgaggatgatgcacaaattttgggcgacaacacaacaaaatcaatgggtaaccatcatcattattctgagtatgtgctctctagggggcctaatgagaagtcaaagctgctaaatggtaaaagtgaagtttttgagtatcaggctagtgtgcataatggcaaaagggcacctgatgtggtatacaatcatgaaaatggacaatatatgttgtctgattcgcttgttgcttgtctagaggatgagttcggtggggaagatagttcccaccctgcaaactacaaccagtttaatggcgatgttaaacaattcgagcagcaatttaaggagcttacagctgttataaaaaatggctcatcagttccggtggatgtttcataccacaagaacactgataatggatcaattaatgtttgtgcacaagcttttgctagaaatggtccaggagtttcgaggaatgaggagtgtttagcaaatatcttgcctgctccagttcattctaatgcacataatgatgctgtaacgagtggtaagcatgatgtgagttcaactttgaatttgccacctgcatgtgaggcaaaatctactttgttggtcatgcgagatggacaacatcatactgaagtgccagcaattgatcagaaggaaaataggttccacagtgtaagctacaaatgcacaaaatctgatgataatactagttttcattctgagaatgttgagtttgttgacaaacatgttgcttttgagtcaccagacaatggcatgtattctagtgatggttcacaaagagcaatcaccactgaaggttggcctgctggtgatggagttaaagcagatgaagaaaatctgcttggcaaagtggaagaatgtcaaattagatataaaaatggtaataagaacacaatactatctgtctatggggaaggatgcaaaacattgattgcttgtgcccagtctgcaacttgtgtcaatgtgaagataattctttaa

SEQ ID NO: 3552 - DNA, 153 bp, Zea mays
  Peptide Sequence Number=SeqID_45331
atggagttaatgacaatgatagggagcctcaaggtgcacatgatattggtggggagagctgagatagtggagttcactaaggaagccgagatgaacaagcattcaaatgatggcctgatgctccactatgtcaaaagccttctcaaagtctag

SEQ ID NO: 3553 - DNA, 408 bp, Zea mays
  Peptide Sequence Number=SeqID_45332
atggccccctgtgatgtggtcagtctgagccctaggtcgggcgaggcggaggctcctctgaggtcgaggtcgagtccgtcttccgaggtcgaggctgagtccgagccctggggtcgggcgaggcggagtccgtcttccgagaccgaggctgtgtccgagccctggggtcgggcgaggcggagtctgtcgtccagcgtcgaggttaagcccgagccctggggtcgggcgaggcggagcttcctatggcgcccgaggctggacttagctgctgtcagcctcactctgtcgagtggcacagcagtcggagcgacgcaggcggcgctgttttcttgtcaggtcggtcagcggagcgacgaagtgactgtggtcacttcggctctgtcgactaaagagcgcgcgtcaggataa

SEQ ID NO: 3554 - DNA, 402 bp, Zea mays
  Peptide Sequence Number=SeqID_45333
atggccagttccaaaaatcgtaccaacgtcaccccagataacatcgttaggccgactatggaaagtttgtcggtcgaggagcagcagttcgaagatctcatgaagcaatgtgacgatgatgcgctgcgacgacgtgcccagacgacctcactagatgcatcgacaacaaacaggcctgcgcagacccaaccattatatgtcggaccatccaagtataatcttgaaccgttcggccctatgccaaaccatccgataacccaccgtggaccatccgacaatcagcataacaatggccacccatccaagcttcatgtttcagaatccgatcctataccaccaactactatggataagagggtgtttgggatggctccaggttccagttccagtgtggagttataa

SEQ ID NO: 3555 - DNA, 114 bp, Zea mays
  Peptide Sequence Number=SeqID_45334
atgtcgataggggggcaactgggcaatgggcgggcggcggattcgtacctgctgaggcacgcgggcatcggcccgggcgtcgtcctgctgcagttcggctacctctcggagtag

SEQ ID NO: 3556 - DNA, 2040 bp, Zea mays
  Peptide Sequence Number=SeqID_45335
atggcgcggtgctctacgtgcgatcgtttctcgaggttcatggagacgacggacgagttcgcggtgccgccacgtcccgcgctcgtgcacccggacgccgacggcgttcgaaccccgtcggccctcggcccgctctcccccgaggacccgccacccgcgttcatggagcgagattggcgacacggcggcgataacacggccgcgtatccagggtgctcgccgttccagccgtccgcggccgggcgcccggtctcgatcagcctgccggcgtcgccgacaggcgggttcgacatctccagcaggacggaggcggagctgcagcgggatgccgccgccgtcacggacgcgccgccgccgaggatgatgatgctgccgccgttcgccccggcgccggccatggctctcgagcagcctggcaaggtggtgttccggtcccagccgatccccgctgcgccgccggtaggtgacgggggccacgacgacgagttcggccgcagcgcgccggcggccatggccctcgagcagcctggcaaggtggtgttccggtcccagccgatcatccccggtgcgcctccggagggcgacggcgccgcccggggccacgacgacttcggccggagcgcgccggcggccaagacgcgcagggacagccgggacaccagctacgactcgttcaagacgtggtcgggcaagctggagaagcagatcgccacgcacctgctcggcagcagcctgcagcagcaaccggagcacggggaggagccggaggaagacgacgcggcgagcgaccgccgcaactcctccatgcccaaagtgcagcgcttcttcgccgcgctggaaggccccgagctcgacaagctgaggtcctcggaggagctgatcctgccgtccgacaagacgtggccgttcctgctccgtttcccggtgtcggcgttcggcatgtgcctgggcatgagcagccaggcgatcctgtggaagcggatcgccatctcggcgtcgacgcggttcctgcacatcacggtgaagatcaacctggtgctgtggtgcgcctcggtggcgctgatggcggccgtgtcggcgctgtacggctgcaagctggtgttgtacttcgaggcggtgcggcgggagtactaccacccgatccgcgtgaacttcttcttcgcgccgtggatcgcgtgcctgttcctggcgatcggcgtgccggacgtggtggcggccacgctcccgcactggctgtggtacgtgctgatggcgccgatcgtgtgcctggagctgaagatctacgggcagtggatctcgggcgggcagcggcggctgtcccgcgtggcgaacccgtcgaaccacctgtccatcgtgggcaacttcgtgggcgcgctgctgggcggcatcatggggctgaaggagggtcccatgttcttcttctccgtggggctggcgcactacatggtgctgttcgtgacgctgtaccagcggctgccgacgagcgagacgctgccccgcgacctgcacccggtgttcttcctgttcgtggcggcgcccagcgtggcgtgcctggcgtgggcgcgcatcaccggcgagttcggctacggctcccgcgtcgcctacttcatcgccatgttcctgtacgcgtcgctggccgtgcgcatcaacctgttcagagggttcagcttctcgctggcgtggtgggcctacacgttccccatgaccagcgcggcgatcgcctccatccgctactcgtccgaggtgaagaacgccttcacgcagtgcatgtgcatcgggctggccgcggcggccacgctggccgtggcggcgctcttcctcgccacgctgctgcacgcggtggtgtaccgggacctcttccccaacgacatctccatcgccatcacggagcgccggcgcagcaagcccctcgtcggggaaaagatgctgctccgcctgcgcagcggcaagaaggtgcagcaggcgctctccaccgcccccgccgacgccgccgcggacctggaggccgcgcgcgccgccacgacgacgtcgtacacgtag

SEQ ID NO: 3557 - DNA, 1017 bp, Zea mays
  Peptide Sequence Number=SeqID_45336
atgaactacggcggcggcagcaggagcagcagccggctccgggaccggctggcccggatgttccgcccgagcgcgctgctccgctccacctgcaacacggccgccgccgcgtcctcctgctcctcctcccgcgcgctgctcggcgccgtcgtcgacggggactcgtcgttcctcgcctcctcgcggcgcgacctggccgtcgccggccgcgccgagtccttctccgccgccgtcgaccgccgccgccgcagccgcagcagcctggacgcggcgccgccgccctcccgcttctctgtcgacgcgccggcggctctggcggagacgggccgggacaaggaggagaagaagaagaagaagaagagcccgcgcgacgacgacgacgacgagcaccggctcggtgtcggtggcagcagcaagaacgacagcaggatgaagctgctgctgtccaacccctacggcttcagcagctccgacgacaccgacgtcttcagcagcgacggcgaggacgacgaccgcgccgccggccgcggcagcaagaggccgggcgagtcggcggcggagaccttcttctcctcgtcgcgaagcttctcgtcggactcctccgagttctacaccaataataagaagcagcacaagaagaagacggcgacgaaggcgaaggcgaaggcgaagggaatggcaaaggcaaaaccccctgcagcagcaccctccgaccgcagtagcaaggctccggcatcgtcgtcccgccgccgtccccagtaccaccggcgcgcggcgagcagctgcgacacgtgcggcgagcaggtgcgcagggggttcgcggtggtgaagcggtcgcgggacccgtacggcgacttccggtcctccatggtggagatgatcgtggggcggcagctgctgggcgcgccggacatggagcgcctgctgcggtcgtacctgtccctgaacgcgccgcgccaccaccccgtcatcctgcaggccttctccgacatctgggtagtcgtccacggcggctag

SEQ ID NO: 3558 - DNA, 690 bp, Zea mays
  Peptide Sequence Number=SeqID_45337
atggacaacacccatcatctctggcccgcagaagctcatggcgcagctggtggagaatcccatcctgatcacgcactgcagccagctccacgacaacccatccctgggcctgcccctgcaggtcggcggcagctgcgagtcctactgctgcagcgccacgcagctcgacaattgcgaagggcatttcggcttcatcaagctgccggtgcccatctaccaccccagtcacatcaccgagctgggaagatactcaacctcgtctgcctccgcctcaagaaacccaagcagaaggacaccgggaaagaatgcagattcacctcatgttcatattgccagcacattcctgatgtgaaaaaagtacaatctggatccctactttgcttgaacaatgaaatagtgctgctcttacaaaccccagcattcctcttgttccaggacctcccaccgctatgcgtcagtcaagtgaagaaattcaacggtgcccgtagcttggaactgaaagcaccattaaagcaagaggttgccgtcaggttttggagcttccttgatcaatttggcttccacacaagtggtacatctcaccgccgccccttacatccaaaagaggttcaggacataatgaagaagataactgaagaaacaagagctaggcttgctgctatgggtaccatcttcaggatggatatgtga

SEQ ID NO: 3559 - DNA, 2118 bp, Zea mays
  Peptide Sequence Number=SeqID_45338
atgaaggattggagcgagtgggagaggatcgccgggatcgcgataccaagttgtcaagggcgtcgagcccctgggtggccggaccgcggctacgcagttcgtagccgtcggccgtcttctccggatacaccaaaaggcttgttgaggaaaattctacgcacgatagaacaaatcaaaagcttaaatatcagccaaacacgtgagttaggggcagatgatcttcaggtagctgtaggagattacatggatatgggaggaccagcagaggttttccagcatgtcacctttacaagacagcctgcaccaaaacagtggcataaaaagatgaaggccctcttccttagtaagagttcaagctactcatgccgtgcagtgatcactggtgatccatacattggccttgatgtagtaggggtgcctgatgaagtagctagaagaatgacagtacaagaatgtgtcacaaactacaacattgctcggctgcaagacatgatggagaaaggactatgcctaacatacactgatctcaataccaacacatatgacttggatggaaagaaaggaaacaagaagtgcatcatgccgagggttggtgaaactgtagagcgaagagtccttgacggggatctcgtcttcctgaatagaccaccaagcactgacatgcactcagttcaagccttatatgtccatgtccatgatgaccacaccataaagatcaaccctctcatctgtggcccacttggagcagattttgatggcgattgtgttcacatcttttccccaagatcagttccaggaagggttgaagctgcagagctcttcactgtggagaaacaactgttaaactcccacaatgcgaagctgaactttcagatcaagaatgattacctactagctctgaagataatgtgtgtcaggtcgtattctagagaaaaggcaagccaaattgccatgttctcgtcagggatgattctaccgggtgattggactattcctcagattctacagactaccgatgcattaagaaccctaccaagccacccaaacaaacaatctgttggagcctcagttactgccatcatctcatcaactctttcagaaaaaggtccaaggggggccataaagctcataaatcttctgcagcccctcctaatggaatcactgcttatggatggtttcagcataagcttgaaaggtcttgatggccggtgtgcaatgcagaaggcaaatcaaagtagttcgcttgagaccgataagttcaacaagttaactgtggactccattgttaattcctctgcccttggtctgctggttgacccaaaaaaagattcaactctgaagaaattagttgaacagattggtttcttgggacaacaactgcaaaggactggtaggttatactctagcaacttagtggaggactgctacaactttctggaaaggtgcagcggaagcaccaaatgttatgatccttcaaaaggacatgattttgttacgagttcattttacaatggtttaaatccatatgaggaattactccactcaatatcagtaagggaaaagatagagcgctcatcatctaaaggactggctgaatctggcaatctttttaagaacatgatggcaatgctccgagatgtcacagtatgctatgacggaaccatgagaacttcgtgcagcaactcaattgtacaatttgactcgacaaatgtatcaagttctgtgacaccaggtgatccagttggtatcttggcagccactgcatttgtaaatgctgcatacaaggcagtgttagatccagtttttggacattccgtcgagcacccgccgggcgcacaaaatcctcgcatgattgcctcgcgtaggcaaggtcacatgaatgtggcatccttgggcgcgctccagttgcgcttggggagcgcggcgccgcctagctcggcgatggccgccttcagctccggaaactccggccggagcgggtggccggcatcggggtcgaagacgtcttcgtcgctggagccgaagaagaagtcggagttgaccggaggtcatcgcggggaggaggaacgggagcagctcctcgtcagggaaaatttccctgcagccgaatatgtatag

SEQ ID NO: 3560 - DNA, 2640 bp, Zea mays
  Peptide Sequence Number=SeqID_45339
atgccgagtgataaagcaaaagctccaaagaagaagggcgaagaggatcctggaatcccgccagctccctgtgaaggagaaattagccatgagccacatagacaacggtcactcaatgggaggaccactggtccgacccggcgttcaaccaaaggaaattggacacccgaagaggatgctatattgtcccgtgcggttcagacataccaagggaaaaactggaaaaagatagcggaaagttttccagacagaaccgatgtacaatgtttgcacaggtggcaaaaggttctaaaccctgaattggtcaaagggccatggtccaaagaagaagacgaaatcatagttcagatggtaaacaaatacgggccaaagaaatggtcggccatcgctcaagctttgcctggacgcataggaaagcaatgccgggagcggtggcacaatcatcttaacccagccataaacaaggaggcatggacgcaagaagaggagattactcttattcatgctcataggatgtatggaaataaatgggccgaacttacgaaatttttacctggaaggacggacaatgcaattaaaaatcactggaacagttcagtgaagaaaaaggtcgattcgtacatatcttctggtttactttcacaagtcccatgcctctctctgattgaatgtcctgcacaatgtgactctttatcggctatggaccaacaaaacaacggaggtactgattgcaatgaccagaacactagcgtggtcttaagctctgatttacaagtaaatgtggatgccaacaagaaagaagcacatgactctcactcgtccttgtgtcaaggggtatgctatccttccacagagactgtaggatctgttttgcctgatgacctggagatggatatggatgaaggatcaggaaactctatttttgcagacgatcaaactctttgtagcacatcaaatcaagaacaatctatggtgccatttgttgttgcacaggaaatgcctgtctctgtgctatcaagtgtttctagcgctgagcagaaacggcacttaatctctgatgccaaaagcttgaaatccgaactttggaaagatgtttgtttgcaaactcttattacaggagatacagatgaccctgatgcttcttcaagattaaataacccagattcttctaaaatggacaccaattttttgaaagaggcctacccattacacacaccaaatccatccagtgtgattgaaactgtatatgaaccgatggcgttggtgacaatctctcccccttttatatgttcagatggtttgtctttcgcacccgaaaatagatctaagccaggagaaatgtcagactgtgaagcagagatggtcacatgctcaaacaatttttttggtaatgccgagcaatctgctaaacttgccagcagtgatgacaggccagaggctttcacaatgactgagagcactacaaactgtgggggtgaacaattgacagatgccaaagaacctgtggccagtacagcaaaagaacggttatcgaaagacatcgagactatgccagataaaaagaagggtgagggggctctattctatgaacctcctcgattccctggtttggatgtcccgtttatcagttgcgatcttgtaacttctgctgatctgcaagaatttagtccccttggaattaggcagtggatgcggtcgaccatgaatgtcccaactcctttaagattatggggctctccaacacatgatgaaagcccagatgcactaaaaactgctgctgaaagcttcccatgcacaagttcaataatgaaaaaaagacagagaagtctattgtcccctactccagatgaaagaattgagaagaaatctgggattgcaaagggggtgacggacatctcctatatgataacggccacatgttccatgaatgcaaccaatgatgaagacattgttactgaatcagctgtgtgtgctaagcaaccttctttgaaacatctagacaagaagcttgagttctctgacattaacaaggaaaactctgatggagcatctgaacaggccaaagatgcacaaaacacacaactcgtggatgagcaacattcctcaccaaatgttgtgaatcctaacactgatctacaagacaatatacaacctgtacagattcttgtagagcaaagcagcaataaccttatttcctctgatcatggtgcaaagccatcctgcttcagcgtgtatgaagctaagctgtggcaggttctttttgtcaatatttcttatgaattgctgcttttgctagattggctgataccccagggttttgtcagcccagcagacagaacttatgacgcgttaggattagtgaatcgtttaagcaagcacagtgctgctgctgcagtggaggcctgtgagatgctagcaagtggcaacacgacttctgataaggaaaacaaggataatacggatggcaaggaactagtgacaagaaaatcacagattaagatcatggccgaggcgcgagtcctggatttcgacgaatctcccgcacctgcaagaacagcagataagaaacttggcagctgtcaccggagatctgttagctcacccattcttccttcccccaaccttagaagtttccgatag

SEQ ID NO: 3561 - DNA, 1863 bp, Zea mays
  Peptide Sequence Number=SeqID_45340
atgtcgacgtcgccgccgccggccacttccccgcccggcgcgccgcccaacggtacggcctcgcccactgccgcgccgccgccgccgctgccgccagcaccgtccaactcctcctccccgacgcccgcgacgccgacaggcgctccccccaccgctcccgcgccgccctccaccgactctccggcgccgccagggacgccgcccgccccagtgtccccgaacgcggccgcgctccccgcgcccggaagggcgacgccggcctcggcctcgccgccgacgccctcctcctctgggtcggggcttaccacgtccgtcgttgtggggatcgcggtcggcggcttcgccgtgctgctcctcggctgcctgttctgcctctgcctcttcaggagcaacaagaggagccggaggcggcaccgccaccacccgccaccgccgccgccgccccacctcttgcactactacggccacccgccgccgccgccgccgcctccgcacaaaggggatcagcaccaaagctggcagcataacgcccctccaccaccccctgatcatgttatcaagatcaattcacatcctacccttccgccgcctccgcataacgtacatagcagtggttccgcttcgaaccactcgggtggtgagagccgccctgcgctgtcgcctggcactgcccttagcttttcaaggagcacattcacttacgagcagctgatgacagcaacgaatgggttttctgacgctaatctgctggggcaaggaggttttgggtttgttcacaaaggagtgctaccagatggcacagaggttgccgttaagcagttaagagatggcagtggccagggagagcgcgagttccaggctgaagttgagattatcagcagagtacatcacaagcatcttgtatccttggttggctattgcatttctggagcccacaggttgctcgtctacgagtttgttccaaacaatacattggaattccacttacatggaagaggcagaccaaccttggattggccaacaagactaaaaattgctttgggttctgcgaagggattggcatatcttcatgaagattgtcatcctaagattattcatcgtgacataaaggcctcaaatattcttctcgatctaagatttgaagctaaggtggcagattttggacttgcaaaattcacttctgatgcaaacacccacgtttcaaccagagtgatgggcacatttgggtatctagcacctgagtatgctgcttctggcaagctcactgagaaatcagatgtcttctcttttggagtaatgcttcttgagctaataactgggcggcgccctgtaaattcaagacaagcggacgacaacctggttgactggatatcattgttattatcgactattgaggcaaggcctctgatgataaaagcatttgaggatggtaatcatgatgctctagtggacccccggctgggaagtgagtacaatgataatgagatggcgaggatgatagcctgcgcagctgcatgcgtccggcattcttcacggcggcggccacggatgggtcaggtcgtccgggcgctggaaggcgacgtatctctggacgacctgaacgagggcgtgcggcccgggcacagccggttcgtggggtcgtacggcagttcgacgtccgactacgacaccagccagtacaaggaggacctgaagaagttccggaagatggcgctgggcggcagcgggctccagagcagcagcgcgcagacgccgacgagcgagcacggggagaacccgtcggtgtcggtgtcgagcagcgacggcgacggcggcggaggaaccggcgaggagcgtgaagacagacggcaggcagcgtcgtga

SEQ ID NO: 3562 - DNA, 414 bp, Zea mays
  Peptide Sequence Number=SeqID_45341
atggacaacgacgccgggctccggctcgacatggacaacatcaaggcaatcatcttggtagggggaaaacgaaataatgttcatttatgcggtgcacgagcattgagcaggacgtgtttgctgccggcaccgatactcacggtgttgggatgggccatggcggagctcatgaaccacctcgacaagatgcagaggctgcaggccgagatccgcgccgccgtcctcggcaacaacggcggcagccgcgacttgaccgagcatgtcagcaacaatacaagagacgtcacaagctcaccagcactgaagatggagaagctgaccaacgaagctgacgttgtcacaacacgaagcgatccggtctgttttgggtccggctcgccaggcacggttagaaaactggaccggactgtttaa

SEQ ID NO: 3563 - DNA, 1251 bp, Zea mays
  Peptide Sequence Number=SeqID_45342
atgtcggcggcggagtcgtcgtcgcgtgcccgtcaggaggcggagtcggaggcggaggcggagccgccgcagcgccgctgggtggccctcgtctccatcccggttatcctcgccagcggggatgagcgtgcccggtcgatgctggcccacgccacgaacgtcgagctcgacctccacgaccctccacaaccctcctacctgctgctgcaccccagtatcgtcggcctcaaacccgtcgcccagcagccgtccgtctacatcctcgcgaccgacggctcgggcagcctcgtcttccgcgtcaccaaccacggcagcaacggccctgacgaggacgacgtcatgtacttctgcgacgcgcacgcccgcagggccatatccatgcccgcgctctatccgcgcgactcggtcctcctcggcgacaagctgctctgctgctccaccgcgacgttccagtggttcgtgaagccgctgctcacctccgccacgacgcgcatgcgcaaccccagcgccgataccggagtagtcgcgcacgccgggcgcctctactggctcgccctcgcctacggcgtctttgtctgcgaccccttcgccgacaccgcgcacctgcgcttcctggcgctgcccgcggactgcgatttgggggagaagccctaccgaatcaaccgcgcgtacgtcgcgcagtgccgccgcgtcgcgcccagcgagggccagctccgctacgtcgagatccggggcctctcctacgaggcgtacgtggcccccgctgtggcgcctccgccggtgcaccccaccgtctggatgtggacgctcgtcgacccggaggcgacggagccctggaggttcgagtatgaggcgcccttcgccgaggtctgggcgcacgagtcctacgccgcggccgggctgccgcacggggaggtgccccacgtcgctctcgtcgaccccgacgaccacggcatcgtctacttcttccagggctccaagtccaagctcttcggcctggacgtgcgcgccagacgagtcgtctcctgcgaggaatgctcggtgcgcgacgacctgaagatgaaggactggaactcccgccccattgtcgatgcctgggaggtgccgccaccctcgcctccctgcagcgagctttcttcgccatctcctcaaggcagtgacgaacttgcccccgtcgccaagcgggtgatagagatattgaggctgatgagcgacacggacgacgacgatggaggatatgcgacgatatga

SEQ ID NO: 3564 - DNA, 588 bp, Zea mays
  Peptide Sequence Number=SeqID_45343
atgaaggggatggacgacgacgaggaggaggacggtgcttacgatctcctagttgcttgcgacgctgagcttgacccggcggatggaggcctctgggacggtcgggccagcagctgtcggatcgtcgccctccatttcaatggcgtcttgtctgtccaagaatcagcagacaggacggggtgtgaattcaggcgcgcgcaacccacgcaggcaacgcacgacgactaccacgacaccggccactctcatcaacacggccacgcaggccgctgctccaaggaccatcgcagcggggcggggggcgatggcggcaaggcgtgggaaaaggcacgcctcattgcagcggcgccttggccgctggccgatgttcaggcgacggccgacggctcgccaagtgctcatgaagaagctcggcttcatggaggacgaggaccgtgctgctgtgcaagcgccaagcagcggagcagtcgagcagacagcacgccggcccgacccatcggctgcccagtcgtcgacgccgacgctgccatcgctacctcaagcccttctcatgcccctgcctataaaatccccttccctgtcctgtag

SEQ ID NO: 3565 - DNA, 294 bp, Zea mays
  Peptide Sequence Number=SeqID_45344
atgggtatctggttcgctaatctgggtgcatcgctggcatggaacaattttgagaccatgacgtttgaagacccgcctaggggaacctgcagggaggcggcgtacgcctcgctgcgaccgaagggtcgcttggatgcctccaaactctcggcaagggtcgctcaggggagccacgtcaaacctccgcgctttaatggaagacttgatccttcacctggtgacaaatctaagcaaacaaaggaaggagttgaaatagacttcaagccaggttgcctaactccaacgtggatgtag

SEQ ID NO: 3566 - DNA, 399 bp, Zea mays
  Peptide Sequence Number=SeqID_45345
atggccaccaagcccggcagggcggccgccgcggtgctgctcctcaccctgctcgccgctctacatgtggccgcccacaacaacaacaacgagaaccgcaacccgagcggtggcggcggtgacccgggcgccttcttcgccgggatgccgcggttcagcggcggcggggtgccaggcagcggcaggttcttcggcgggtggggcgagggcggtctcgggtaccggcgcggcgttgtggtgccgccctccacggtgtgcccgcaggacgggccctgccgcgggaagcgcctcacctgcccgccgcgctgcttccggaccttcagctacggcggcaagaacgggggcggcggcggaggctgtagcttcgactgcaccgagcgctgcgccgccacctgctga

SEQ ID NO: 3567 - DNA, 765 bp, Zea mays
  Peptide Sequence Number=SeqID_45346
atgcccacacctcgccaccaccgcgtcgtggctccgcaactaggattgggcgccggcgtgccgcgctggcacctgtgtcctgcgtcgtctcccgggctcctggctaagccccgtgcccgcgtccacttgcccttgcctccattccggctacacagcgtcgtccgccgcagcgtttgtgtttgcgtgaactgtgaagcgtcatctaagttacataatctgttcctatcactatacccacgggtacccgatacccgacgggttggagagtgcgttgctgtgtggtggaggccgaactttgagactgtgatgtatccttactgtcctccacatatcactaagcccaaggagtgcaagaaacttttcattgttcacctatccgaaagagagtattttgctgttccaaggaatctgaaactgcttgctgttccactgtttgaactctacgacaatgttcagaggtacgggcctgtcatctctaccatcccgcagcagctttctaggttccagttcaacatgttgcatttgagctcgttattttcatcatcctcttcccatattgccatgtttccccttgagaatgaagtgcgctccgcattttccaagtactccacaagagagctaaagaacattctcaacaaagcatttttacccaaaaaacaaacaaacaaaccagattttggctacaaagggcctgtttatgggctgcgactaacaggtttaactgactttagttctatccgtaatcagtaccacactagaaattaa

SEQ ID NO: 3568 - DNA, 2574 bp, Zea mays
  Peptide Sequence Number=SeqID_45347
atggatttgtccaggctcgcctccgtcgccgggcccagccgcgcggccccgcgggcgggcctgcagatcggcgccgccgggaatggcttccgcgtctgctccctgcggcaccgcggcgccgggaacgggcgcctcacgtccgccgccgccctcctccgcggcagcagcgggctcttctacctggctcccgcgcgcgggggccctccccgtctccgcgccagagggcggccgcggtgccagggcagcgactcgttggcctacgtcgacggccccttggaggccgccaagggctccggcgaggtctacgacgacgatgccaccagctcggggcccgacgacgacgacaatgacaagggccccgccgacgtggacggtctccgggagatgctgcagaggtgcaggaacgagctcgaggtggccaggctcaacagcaccatgttcgaggagaaggctcagcggatatccgagtcggccatcgcgctcaaggaccgcgccgaaggcgcccagagggacgtgtccgcggccgtcgccaccgtgcaggaggtcatcgtcaaggaggcggacgccaaggaggccgtccagaaggctaccatggcgctgtcgatggccgaggccaggctgcagctggcgtccgaggcgctggatgccaagcgggggtcggtcgggcccatggaggttagcatcgaaggcgtggaggaggaggcccttgtgtctgctcaggaagagatcaaggattgccgggcagccttgttgcggtgtgaggaggagctggaacgcatccaggaacagaaaatgaacctgcagaaggaggttgataggctcaccgagctcgctgagaaggcccagttggatgcatccaaggccgaagaagatgtcaccaatataatggtgttggctgagcaggcggtggctcttgagatgaaagccacgcagcgtgtcaacgacgcggaggcggtgctgctgaaagcggagaaggtcatatcctcggttgacaccgtggtggagctaacatcacttgctgaagagcagaaaagcgctgaagaggatagcgtttctgaagggtatgagtatagcagcaatggcactgatgatgttcctgtgagggatgaggtgtcaagtatcgagcgtctaatggtaggtgacttgactgttgagggcattgagcagcttgaaccatcccgtgaaatatatgatgaagcaagcagcgataagatgtccgttgagcctcagaaagaagctgagcctgattcagacaagttgaagcaagggaagaagcaggaaatggaacgaaaggagttcaccaaggaaccactgagtgctcaaaaatcactgaagaagagatcatcccgcttcttcccggcatctttcttctcctccaaagctgatggagagtttacacctacatctgtctttcgggggttaatgaaatcagtgcaaaaacaggctcccaagcttgttgttgggatattgcttcttggtgcaggggccttcttcttaaatagagctgagaagagtcaactatttcagcagcaagaaattgccacaagtattggaaaggtaaatgaggaagaagcttcacttttcgacatactgtatttgcttcttgccagtgttatttttgtaccattatttcagaaaatccctggaggcagtcctgttcttggatatcttgctgctggtgtcctcattggtccatatgggctctccatcatccgtaatgtgcatgggacaaaggcaattgcggaattcggagtcgtgttcttactgtttaacattggacttgaggtgctagctactactgcagctgttggtgtgatagctcatcgttttgctgtgctaccaggaccagcagcaattgttgttgggagtggcttggctctgtcatccacggctgttgtcttgcaagttggtttccaagcaatagcagaagccatgggaatggctgcagtcaaagcagtagctgctataactgccataattgctggaggtcgtctggttggaatgtctattgacccaaagctgcttctgtcaaacttcccaatgatctctatgatattgggtctcttgataattggaaagacattgttggttacatttgtgggcagggtatttggggtttctactatagctgccattcgtgttggtctcttgcttgcgcctggtggtgagtttgcttttgttgcctttggagaagctgtcaaccaggtactgcacaaagttggagctgaaagagcttgtgctgctgcaattactttggatacccctggtgcaaactatagagctgtctgggcattgaacaaatatttcccaaatgtgaagacatttgttagagcacatgatgttgatcatggtgttaatttggagaaagctggtgcaacagcggcaaaactcccaatgtcagagattcaggaaagcatcaacgagttccggaatcgtcatctgtcagagcttacagagttgtgtgctacgtcaggaaattctcttggctatgggttttccagagttatgtccaaatcgaagtctatcagctccgatgatgaaagcgaaacagtggatggcgcactagcaatttga

SEQ ID NO: 3569 - DNA, 705 bp, Zea mays
  Peptide Sequence Number=SeqID_45348
atgaagggaacaacgcaggggccatcgggtccacggtgggacaatgtcacgaatttgtatgaggtcgggacaacgatgaacacgtcggaggcgcatgacaacgacatgtctggtgggacaaccgttggtgacgcgacggatggcaaccggagcaccgcgtgggggcgaccaacgacgaggtcgcgatggcgaagggaggcgagcatgaggagttgcacgacgagggagaccagacctgcgtgtcccgtgaggaagaacccgactagagcaccgtgcagaggtgcgcgtgaccaacggcgaggtcgcgatggtgaagggaggcaaagacatcgaggaagactagacctacgtgtcccgtgtggaagaaccccgcccagcttgcgctgctctgcccttcgcgcgtggagggtgtgcatctggtcggggcccagcggcgcgacgaccagcgctgacgcggcggccaacggcgcgagggcggcgatcgggatccagcttcgcacactcgtcggcgagcgggaggggacaggggaggaggcgctctgtcggcggcgcgagcgtgaagccctggtggcgtggagtcatgccgtcgatgcgcaggcgacgtcagggcgggaggcatgcgggcctggccaaaggggccctaggcgaccgacgagggcaggaggccagagagtggtcggaggtggggaaggtgacggtggctag

SEQ ID NO: 3570 - DNA, 762 bp, Zea mays
  Peptide Sequence Number=SeqID_45349
atgtccatcaggcaccatgatggaacggcgggcgacgagatcgtcgaggacgtggtcggcgagagcgtatcgccgaagcgtgaggacctagccccgccaatgagggtagtgggagggcgagggggcctcgggtgtgagcggaggagcctcatggtctaccggaggatgggcgaggatgagacgttgcgcggtggccatctgggcagtcaaggctacgcccatggcacgctcgtgctccagggcgagggacgcggctcgctggcgctcctgcgaggcagccacgacggcctggatggtggcgatggcggcgaccagcggggagtcggtggcgaacgccgtgtaggacgcgacgatgtcgttctaggcgggtacagcgagggcgggaaagcccggaggggagcctcggcaccattgctgcgctgcggcagacgtaggaggtgcgtcggggaggggcccgaggccgacgatgtagggggggcctccaacaacgagctcgctgcgggggacgaagccggccagggaggggccgacgctcaggggggcagccaggagtctggcaaagaggtgctggtcggggatgacgtccaggggcggtcggcgacgcccgcggtcagggccacgtcagcggccgcgcctaggccgttcatgccagtgaggggtgggaggaaggccaccatgcgccgaggagcagggctcgccgacggggagggcggcggccggagcgaagggagccagggacggctgggttggggcgatggctag

SEQ ID NO: 3571 - DNA, 637 bp, Zea mays
  Peptide Sequence Number=SeqID_45350
atggattccattagttcaaggatgaactcgatacaaggaaacaggcatgccttcagggttgaggggactcgcagagaagcacaatctggcaaatggaatgtcgatggtgcttttcttgagttctcttcggcagtaaagaagctccagttggggatgacaatgtcgagccttgcaggagctgatccatttggtctgagagagcttcgatggatccaagaagacgattacctcgaccaccctctgaccctcgtccccgtcgttccccagatctcctctcgcatctcgcatctcggcgtgccaccaccctcactgcagcccactccactccaccgctacactgaaatcaaccaccacgccacagcaccacccaaacccaaacccatccctaaatcccgagccccaaaacccctgtacgctcccgccgcgccgcaatggcacaccaccaccacgccacggcttcggttcggacgacggaggaacgggcggcgaggatgtcgcgtagtgctcggtgtcgacggcagcgcaagcgtcgggcccacaagcatgtggtcttcgtgtacctcccttcctctccaagcttcgattctagacaaagtcgttgaggctcttccctcggcgctggtgctggtggttgcaa

SEQ ID NO: 3572 - DNA, 447 bp, Zea mays
  Peptide Sequence Number=SeqID_45351
atggctagaagggggcatcggactgtccggtgtgcaccagacagtgtccggtgcgccaacggctccaaggctgccaacggtcggcttcgccaaacaaggaagggaatccgcaccggacagtgtccggtggtgcaccggactgttcgggcgagaggctccaagttgtggagattcctcgcgaacgggattaagaaaagcaaagcaaaacaccgtggtattcaggagcgtcgtcaccacttgcctgcccgcctcgggagcgtcgccatcgctcgttcctggtggagtgccatcgtcggtcacccgccttgggcgcaacatcatcgctggccccccaggatcgccgccgctcgcatggcagagggaactgccgccgctgatcgcacgcccgagggaaccaccaccaccgatcacacgcccaagggaaccgtcgccaccgctaaaacctaa

SEQ ID NO: 3573 - DNA, 456 bp, Zea mays
  Peptide Sequence Number=SeqID_45352
atgcatcttcatacaagagaaacaacagccgagtatcacatcaggatcaggggggaatgcgaggcaatagagcaggcggaacctgacccaagtgactggagggcaccgatcatcagatatatcaagaatgaggaagaaccagttgacaaggctgttgctgagtgctttgcgaggcagtcagcccactatgcagtcatagggaaagcactcggtggcgacggttcccttgggcgtgtgatcggtggtggtggttccctcgggcgtgcgatcagcggcggcagttccctctgccatgcgagcggcggcgatcctggggggccagcgatgatgttgcgcccaaggcgggtgaccgacgatggcactccaccaggaacgagcgatggcgacgctcccgaggcgggcaggcaagtggtgacgacgctcctgaagtggacgagcggcgacgatgcaccctag

SEQ ID NO: 3574 - DNA, 492 bp, Zea mays
  Peptide Sequence Number=SeqID_45353
atggcgatccaacaagtgaagtcgcgtggggagatggaaaatgagtgggagtgggagggagggagatgggtagataggcgagttacctctacgaacaatgctgcgctggcgctggcggtgaagcaatcggcgaaggagattgcgaatgccccgtcgcccgtcatgccgaggatggcagtgtcctcgttgctgttcgtggtggcaaagtcggagtcggaggagtggtcggtcgccgtgtcagaggtggagggcttcgacgggaggaagctgtcgaagggaagcatcagaggctggaggcgggggagggataccaaaggggaggtggtggacggtcgggggagggataccagagggaggcggtgggccgtcgtgtccggttcgccggttcccactgacgccaccgagaccgaggcgcgcccgggcaagctgatgatgagcctctcgcccgacagcctatcggggtcgtggtcggggtccaaccatacaccgtag

SEQ ID NO: 3575 - DNA, 153 bp, Zea mays
  Peptide Sequence Number=SeqID_45354
atggcggtaccagaacaagggattccccctaatgttgttgaggatggggaacccttccggcacaccatttcagttccacatggttctgtgcctgaggcaccacagtcggattcacatgtttattcagtggactccaacgccaatggcaatctt

SEQ ID NO: 3576 - DNA, 141 bp, Zea mays
  Peptide Sequence Number=SeqID_45355
atggcgaacggacggcacggggtctcgtcggctgcgcagcgcggctctgccgcgggcgggcagggcacagggcgcagagcggccggctcggcgagcggcgttccaggcgctgctcctgcggcgtggctcggtcaagtgtaa

SEQ ID NO: 3577 - DNA, 357 bp, Zea mays
  Peptide Sequence Number=SeqID_45356
atggaggactggcgcgtggaagttgggggttcgtggctcaatctcgggtcgccctgctcctacatccgccatgttcgccgagagcaggagagagaattgtgggcgctgtcgacgtcaaaatcgcgcttcgccatcactccaatccccgtagcagagtctggggcatcggaacagcgtttgcgtgatggccggtgtgtcctcgagcgcgggcgatggccgtccgccgtggctgggtgtagaaaggtagaaggagcgtccttggcggtcggttccttgatggacgctagtgatcagatctctcgttgctacttcaggattgtgatctgggtcatccatccggagtccaacggagtctag

SEQ ID NO: 3578 - DNA, 615 bp, Zea mays
  Peptide Sequence Number=SeqID_45357
atggaactcggttccaacatggtactgagggtgctcaaaatgatgatgaggaagagtaccaggtggcataccattggtcgggagaaggtgatggggatagaaacccccaaaaccctgttcccgagtatagttgtcgaagtggtgcccgtatgggccgtcggcgtggggtgcggcagcggggaatcgttccgtcgatgtccactggtgtccttggatgcccggcggtttttgagagtcggtgggaacgccgcgctcgagcaattgggacaccttggccaactcctcgtgcatggtggttatggaatcttgtacgccctcaaccgagcgttcgatccgaggtcgccaggactcgaagcaggaggtcacactctccagggccgccatctgtgtggaggcttgggcgacgatcgatccgatccactcccgcgcgacctccttgaacgccgccgtctgctacgcgagatgcgcgtcgaggctacgactgagatcttcacggtcgcgatccagtcggtgatggatcgaggtgatatcctcggcgttgttggcgaaggactgcttcaaggaaccccactgcagatcttgagcttcgagttgattgcagagttgttggagtag

SEQ ID NO: 3579 - DNA, 777 bp, Zea mays
  Peptide Sequence Number=SeqID_45358
atggccatgccatcgttcgccgtaacctcacctccgtcgcatggcactaccttatgggcgcctcatgctcgtcgtcctcaaagaccgcacaagagacacgtgcgcagccaagtccgggcagtggcacaagcacagctgcagtaccagaagctgggggactcagacctcctcattagtgaggtcactcttggaacggtgtgtatgattctggagcttcagagttcaaaccctcttgctgcaagtaatgtttttccatctcaaggcagccgacagatgggtcctggcggagggcgcgcgtgcgtgaagcggtatcccgagatctgggccgtgcgatcgggatcggatggtagagatcaacatcgggtgttttgcggctgcgcggtgccgctcctgcttctcggcagtgaagtcgctagagctagggcgggtgtgggctacatgggttccgaggtcgccggggttcgccgggatctgcgaggagaacctgacaaacacattggtggggttctagccatgagatcggggctagagatgggagaacgacggagggagagctctgggtgggtcgggggtaactctagcgaggaatcccggtcgcggggagaggcaatcgagtgcgatagggctcggtctagctccaatgggggtaggggagtgctatgggccaacacaggggcatgggacgaggctgagttggcagaacaccgtgtggggcgcgacgagcaagcgcggccgaactccggcgaggccaaattggctaatgtcaggcaggaataa

SEQ ID NO: 3580 - DNA, 393 bp, Zea mays
  Peptide Sequence Number=SeqID_45359
atggctcggacccgtcgtccccacccattagctccaagcgaaggcgtcgctgccctgctcccggagaccatgtcggagtaccgcgtgcgggcggtcctagtgcccgacaccacgtgctacaaggtgaaaatcgttcctaagaacatggagagtttaataaggcaggttgttactagtgctgtggcgcagacgttgctgtccatggtgagcggcaacacagtggcaaggcgtaactctgacgagaaattggagcgcggtggcactagccctgaggactgctgggagggcccaccgggcagtgatagcgacggtggcatgcgcggtaggatctccaggttcaccatgttcagcttttgcttccacatggttgacttgaccccgattgacagataa

SEQ ID NO: 3581 - DNA, 648 bp, Zea mays
  Peptide Sequence Number=SeqID_45360
atgggcccaaatcacccgacgtcgctcggcccacagcgtctcacgcgcgtcagtcctgtcattgacgcgtggtcccggcttcacagtcgctctctccacgcgtgcattgcttctgtcgttgacacgtgggcctgggcgcctggagatactaccgcgcgcgccaccatcgctatcactgcccggtgggcccttctggcagtctcgtgccctcgcgcctacactgaattgtgggaccaagccgtcatccccttcacatggacttcgcaaacaacatgcgcacgcgccggagcggacagcggacttcacgcgcagatctcggtcggttgtcccaccggcatgggggctagctcaccagcggccaagcctcggtgtgggtcttgggggatcacgatgtcatccagaggtgattacgaccttgtctaccccttggctggtgccaccgcaccggagttatgccttgccactatgccaacgctcaccgtggagagcaacgtctacgccactgcactgcacatggtgtcgggcactgggactgctggcacgcggtactctggcgtggtcgccgagagcagggcagcagcgccgtcgcttggagctaatgggtggggacgatgggtcctggccgttgggtctcagagtgatggctag

SEQ ID NO: 3582 - DNA, 531 bp, Zea mays
  Peptide Sequence Number=SeqID_45361
atggctcaccggagttactccggcccgctcgagaccttctcaccgccgttctcccctctctgcccgtggattcatggcctcttcccctccattgagttcgttgtggcgttctctccctctctgcccaactccggtgaccccggagccaccctagctcgcgccgtcctcaactctggcgatcccaccgccgcggagaggaaccgcgtcgcccgcagccgtccgcccccctggtccgatcccctctgttcgatgcagatcgcacgactcagatcacggataacgcttcgcgtacgcgcgcttgacgccctggcctgcctgtcagcgcccaggccctctggcgctgggcccactcgatcagcgtgctctccccctctgtcgctaacactccctggcccgcctgtcagcgctcgctcgctcgcgcgcgcgccctcggccacagatctaatctcagccgttggttttagatctgacggaggtgatgctggcaacatggatgacttcgaggagttccaagaatatgacgagttctag

SEQ ID NO: 3583 - DNA, 333 bp, Zea mays
  Peptide Sequence Number=SeqID_45362
atgtacattcaggtgtcaaggaaattcaatcatctcttcaatccttggagcttaaaacaaatgactcttatacaaccctacttttctattggtgttgttgctactcaagaagatgctcatgtggttgaagacgatgtagaggaaacaaaacgacatttgaatgtggttttcattggccatgttggtgttaactttaaatggtggaaatttttttgtttgtgtgaggatttgttctttggtggttttgtgttgggatgtaaatctcttgatattttgaaacttagatggggccagtttatgatatttaatgtttcagtggagactgaaagataa

SEQ ID NO: 3584 - DNA, 141 bp, Zea mays
  Peptide Sequence Number=SeqID_45363
atggaccctttatcttcctccgcacatgctggaaaatcaactaccggaggacaaatattgtttttgagtggtcaagttgatgataggaccatccagaaatatgagaaggaagcaaaggataaaagtcgggaaagttggtga

SEQ ID NO: 3585 - DNA, 780 bp, Zea mays
  Peptide Sequence Number=SeqID_45364
atgaatcggggcggcggcagccaaattggtggaggcagtggtgaatcagggatggtggttgctcaattgggggcgggggcggcggcggctgaattgtggggggagaggcaaccggcggcagaatcgtggaggagaggcaaccgagggcacccaggggaaggactatatgcgctggctgctaatcctgttggtgccgttagtgaattcattgctcagttgcagattttagagttgcttgacaatgctattttcactgccggctacaaagctgtgttgcatattcactctgttgtcgaagagtgtgagattgttgagctcatagaggaaattggcatgaagaaaaagaaagaagaagatccaaagaagaaaaagccaaagaggaagcctctttttgtgaagaacggtgcaattgttgtttgccgcattcaggtgaataacttgatatgcatagagaagttctctgatttccctcagcttggaaggtttacacttagaactgaagttaaatataagatgaccacacgtggacaggccgcattaggcctcattcgtttatgtgggattgtaccggaatcattccactccacattattcctcatttcagttgttcaaagtttatataaggttctctacgcattgagcgccctggatcagagttcgtggtacaataacgtggcaacaccatcctccggcgggacctgcgccgtgattgggggcggcgtcgccgtgcggggcggccgtgagctgggtgatggcttgatggccgtcgatcttagatga

SEQ ID NO: 3586 - DNA, 180 bp, Zea mays
  Peptide Sequence Number=SeqID_45365
atggggagcgcccgcgttgctttcgtctccttgagtgtcggtgtctgttcattgtggctgtcggggcctgaacatcgaggtggagatcatccgaccatgtcgccgtccgaggccaggtcggattccgccgaaggtggagttgacgccgagggtgctgctgctccccctactgatgtctga

SEQ ID NO: 3587 - DNA, 176 bp, Zea mays
  Peptide Sequence Number=SeqID_45366
atggagatcacagggatatttttgctgcactcaaaagaagtcctgcagagcctagcccagccgcttcgaaagacattgaacccatttgttggggaaggcgatttgttagaggtgaatcaatcttcacaaatgactaatgaggtgaacccatttgttggggaagacgatttgtgcgg

SEQ ID NO: 3588 - DNA, 658 bp, Zea mays
  Peptide Sequence Number=SeqID_45367
gacaaaatatcaaaagaatgtgagggcttcacataataagggtttgaagactgttccaaatagcattcgctcagagaactataccattacctttgaagtcgaggaagagaagtttcccttttttggaaagaagtatcaactcaaattcgcgagtgacgcggtgtttgagaatcagtgcctggtccactttcccacccttatgagattatcaagggaagctggacttgaatatgtggagatccagaatttaaccgagttttatgatgataacagaacacaattcgctccaatgcttggtggttacggtgcaagttttttggatgctcgagggaagcttgttgctcgttcctacgacattttaggtggtgtagaattctttttctttttagaagggcaggcctggtgcaacgatgagagctgtctcactgagtcactaggcttgtattcagcatttgtgttccagaagcctgatccagaggcaataccaccgattgtaactcccgacttgcctgatcctgataaaggtcacgaagagcaggagtggctccagccacagcaggcgtcagtggaagatgggagacgctcgcatgcggatgtgcttcccatagaccctgagaaaggcatcctgggtcctggacctgcagacatgaggctttag

SEQ ID NO: 3589 - DNA, 1051 bp, Zea mays
  Peptide Sequence Number=SeqID_45368
gggtggattcttccaggtagacgtaacttatctcctccgactgactagcggaccccagttgacaaagggagtactatactacggctatacaagagacgtagacgtcccgacgaccatgtaccagtacaccagaccatgcacgagggtccaggacgcagcctgcgccgctgcgctgcgtcagcaaagaccgacacaggaaggaggtgtcgtcggtccggcggtctccggcgggcggggctgcaggtcttccccccatcccccgtcggtctgtagcggtccacgcaaggacccgaaacgtactccgcgcgccgctgctctggctggctctgcggctctgcctcgtcttctcccactctgcgccaaggcaaggctgccaagtactggtactgggtggttggcgtcggcctccggagccgcgcgcgtcgcgtcggcctgcggaaggaatggatggatccgggcagatccaccccacgcggccacgcctgagcctaagcgtcctctcagtccagtccagtcccgtcccatccaccaccaccacctcgagtcctcgaccgcgacgagaggggtagcgcagcggtggcgtggcgtggcgcgtcgcgcttggcagcacgcgacgacgacggagaaagaaagagggctggctggctggctggcctgggaggctgggacggacgacggaggagtgactccgctgcccggcatcggcaggcagcgaagcatgcttgcacagatgcggcatcatggcatcgcccctcctcctcgaaaggtcggcatcctttttagcccgcccaagcccaaaggccaccaccactcgaccatcacagttcgctccgtcctgctacccagctacaacgcgccactcttcctcacactacgacgacgccttgccacggattcgatcgtcgccgcttgtctgccctatcatctcactccccccgcccgcttgcttttatatctggagcttcccaccagcaaagccttggcattgtgcttccttgctttgtgtgtggcgcgctccaggtgccagccccaggagagaagacaagccgag

SEQ ID NO: 3590 - DNA, 753 bp, Zea mays
  Peptide Sequence Number=SeqID_45369
atgggtacgaagacgacggcgggtgatggcgcgacgagggcgcgagtagagcagtatgttggcgtcgcggtggcaaactgtggcgtgagacgagctgggggcagggcgagctccaacggagaatcttggcacgacgacgacgacgagcaacgacggcaagctgtgcacggtgacaaggcgcgcaacagcagcgtggcgatggtcggcgacgttgtgcgcgagtttggtggggcgcggcaggggcagcgtggtcgggtggccggatcacgcgtccgcggggtcggggtcggctggagtcgggacagggcgcggcggccggtatgcgcgcgggtggctgcgtggctaaggcctggcgcgggtccggaagcagggcaggggctcggccgtcggttggagtttctgggcacgccattaatggaggtgagtgggcttggcggctgtgtattggggaggggaagagaagacgtcgcagcagtggggagagagagggacggccgaacgtatctacgacaggcaggcgagggggcgaggatggagggaatcgccgccgaattgatgtggattgagagaaggaagacttcaaacaccattaatggagaaaactgcttgttaatggagataaggaggggagaaaacgtcctaattagtgggacaggaggagaacagacatggggcggcgtcacggtagtgcttgcagcaattgaacggggtgttacacataccttttctgccatgtttttaaatggttcttaa

SEQ ID NO: 3591 - DNA, 795 bp, Zea mays
  Peptide Sequence Number=SeqID_45370
atggactatggcgccatcttgacgccggaggtgatgcagaggaggaccaacagcaatgatcagttcatcatcatgtcgcgcgcattcaacgactactatataatggactgtggcgtcatctcggcgccgaaggtgacgcagaggaggaccgacatcaatgatcagttcatcatcatgtcgcgcgcgttcgatgactactatatcatggactatggtgtcatctcggcgccggaggtgacgcagaggaggaccgacagcaatggtcagttcgtcatcctccgcaccgtcggcgcgtatggtggtacgtgcctgatgactgatgatgtacgagggaacttcttccggaaggagtggggcgtgctctccaatgatgagaccatggaaattgtgcaacgcccacgcgaaatcgccaccacggcgttggatcgtggcctgcgttttctcccctccttgacctcagactataagaatcatgcggctgcagctctcgaccagtcggtgcgaggaaactgtaccaagccacgaacccccccatcgtcggcgaagcttggggattgccgccgtgaagtggaatccttgggacgcccacgccagtgcttcgcgggtaggccagtgtacttcggtggaacacctaggaaccgtgtggggacctctaggacacggggatcaactggattgcccagaattcctcatcgaagacacttctccgtcgcggaccgcaccgccccgatggtggagcacatccagacaccattgaaggtaggaactatctcatccttctcaccgttcgactag

SEQ ID NO: 3592 - DNA, 453 bp, Zea mays
  Peptide Sequence Number=SeqID_45371
atgagacgacctcgtcacaggtcttcgtccggtgatgtgtgggacgaaggcgaggtcggcgaaggtatcgagcgaagggtggtgtcttcgccttcgccccaacagtactatcagcacttggttagacatcctaatgatgctcatgctttcgtgaatctaccattcgattggaagctatcatggttttcgagtttcgttaatcggtcgtaccccttcctttatataaggaggaggtctagacacgtttctagtcggttcccaaacaaatcctacaagaaatcaagaatcatagctgaatgtgttcccgtgtggatcgtccacaccaccacaccagaccgtcagtgccctagggacgaactgtccagccactttggtgttccacacatgccccgccttttggtggagcttggcgaaccaaaagcacctgcactggtagcacccttcaaaaaataa

SEQ ID NO: 3593 - DNA, 396 bp, Zea mays
  Peptide Sequence Number=SeqID_45372
atggagaaaagtaatgctgtgaagattgctgacgagatattggttggattgttggatgattccgaggataagcagtcagcacagctcacagtcttcgggcatgtagcaaacttcctacagaccaccagccccgagaggcaaaggggggagaagctttggcggacgaagtgtgacaagaatgagttaagaagctccaaagtcattctaagggagcgtagagtaaatttcgaagctcaaaagtcgttcctaaggcagcgcagagtaagttctgaagctcaaaagtcgttcctaagggagcgtagagtaagttttgaagctctaaagtcgttccttagggaatgcagagctaagataccacctaaatcaaaggtgaagaagctccaaagtcgttcctaa

SEQ ID NO: 3594 - DNA, 1011 bp, Zea mays
  Peptide Sequence Number=SeqID_45373
atgagcctacgtcagtacacgggcggacggtggacgacgaggtttgaggtagaaattcatcagttgacaccgaatgccttggtggcgctggcaaagtatgtgtgggttgtttcctcatatggtagggaaccatctgttgaagtcttcgcgaagaattactgtttgtactggcaaaagaggaagataggtggtaaaattgctcagtttgggtcctgcacctttatgccgaggactaggaagacctcggtcgaagttatcgagattgttccatgcgcaaaaaataagtgggaggaggatcaagacgaggaagcccttcgctacgcagcccgcctgagcaatgggcatgagttggtggaagagttcatcgcttgtgggcattcgccgtggaactgcgtgggcgggatgcggccactttcgtgcgggaagtggagtcggaggccgttaagattgtcagtaattaatggaaatgtgtgcggttccctgggaattgatgtctacgcccgagctccaggaaacttcttcgcgcatgctgaagtagtgatggagaaggatcgccaagacgctcagcaaaataagtgcaaggcccccatccgactggtggacccacgccgagaagcgaagctagtggccgcccaggagttgtcggtatacaactacctggtgggaggcgttaacatgtttgacatcagacagggctgccgcctgctggtgagttgtcttgatttcttcttagtcaggggcggaggctgggcagttgacggtggtgccgtcgatagtggctatcggccagatgggtgcggcaaagggcggtgcggggacttcggaggacccgtgggaggttttgcgccgccgccagagcatactgaggcggtgagggataagtcggcggctgagaataagagtcgcaacctcctggagaagctatcagcagtggagaaagagcaagaggacctcggccgccggctagctgatgagaaggaagatgcggagaaagcctgcgcggaggcttag

SEQ ID NO: 3595 - DNA, 429 bp, Zea mays
  Peptide Sequence Number=SeqID_45374
atgggcaagaacaagaagggcagaagttcgtcgccccgctccggtgacaagcggaagcgcgagccaagtcctccctcggaggacttcggtgactccgagtattcggaggaggagttttcctccgagtccgaggggtcgccggggatcgctgccgaggtgtggacttacatcggggccgtcgagtgctccgggctcgagggctcggatgagtcggagatctcctcggatgaggagaactcctccgactcgtccgaggaggagagcggcggtggcggcgacgacgagggcgacgacggcgatggaggtgacggcggcggtgatggcgatggcgacgacaagggcgacgacgatggtggtaagggcgacggcgacagcggcaagggtgatagcggcatcagcaaggccagtggcaaagtgccactggcttaa

SEQ ID NO: 3596 - DNA, 477 bp, Zea mays
  Peptide Sequence Number=SeqID_45375
atggagaggctcaccattggagctgaggggagggggcttcctgctggtttttccatggaagaaaatgggtcgtgctggatagagagagctgggcgcagggaacaacaacggggcgtccatggaggggctctgcgcagaatcgcgaccacggggaagaagagcagaggagccgagctgctgggcgccagccatggagagaaaaacagcaggggagtgaagaagggcagagggcacacagggaggtggaggcgccatgggagggggcgagcagagctgcttcttagccatgggagagagggggctctggggaaggggatgagctgggtggccctggagctcttgcgcgctgagaagatgtctcccttctgcagtcgctcgccaggaggagcagggagggcgtcgcgccatggctggctgagggtaggagctcttgcacgcttgaggaagaagaagagggagcgtgtgcacgtcggctga

SEQ ID NO: 3597 - DNA, 408 bp, Zea mays
  Peptide Sequence Number=SeqID_45376
atggggggggggtgttcaccggcgcgagctcagaccagagggggccctgcgccgaccaagggagagtggaggtcggccatggccacactcaagggggcatggccagaggcgaaagtgtgtcgagttggggaggctgggcgcttcggaagacgaagatcccatggccgacttggagctggtggttgcagagagaggggagctcgtagggtcgagctgctgggagatgggagcggctgctccctgctcttggggaagaagggcgccgtcgagggaggtgaagccaaggggggaggggtcgagcgcccatggtggccctgctcctgcgctgaaccagagaggaggaagacgctaggagatgcttctgcgctaaggaacaaagggaggaggaagaactacgctggctgctga

SEQ ID NO: 3598 - DNA, 2778 bp, Zea mays
  Peptide Sequence Number=SeqID_45377
atggagaggcttgtgctagcatgtggtggtgaagcagtcaattcagttgatgacttgactgaacgttgtcttggttgggctggtcttgtctatgatcatgttcttggagaagaaaagtacacatttgtggagaatgtgaaaaatcctcactcttgtactatactaattaaaggacctaatgaccataccattgcacaaaccaaggatgctgtccgtgatggtctaagatcagttaagaacacaattgaagatggagcagccgtgctgggggggtgggagcttgatttggtgcgcaaggtgcgtaaacctcgcacacgtgcacgcacggcgcgctctgaggttgggatcgggagtagcagtaggtgtttcaggtcaatggaggagtcagtgccaatgtcagtaatcagcagtatttcaaacttccgcacgctgtctaccagcagtgtggtagaaactgagctagttaagagatactgccggaagatcaatgaaatcctgggtcttttgaagctggtcctggatgaagttatcccccagattagtctagatgataggatgcttgagggactagctgctactatcaatgatgcgataaagctagttggaagctgggatttgatgatgagcaaaatctatttcgttatgctggtggagtcccttattaccaagatgcaaaactatgtgcttgaagtgtgccaagttgtcaattctgaagtgacaccaccagaaaccaatcgtatttcagtgtacttggagaaaataaagcaatttcaatgtgacaaaattatgggtatcatcaaggaggcttccagggatattgccggaaaatttacaccaaagtcagagacattgacaaagatccaggtctctttgagcttatccacaaatcaagagttactgatggaggctgttgcccttgccaagattagaacaagagtcgatgctgaggatagttcagaactagatggtatcaaccatatctctgaattagtcaaccatatgcttgagaaacacgtggaagaaaaacagatgcatagtattaatggagtgccaatacctgctgatttttgttgccccctttcccttgaactaatgtcagatccagtgattgtggcttctggtcaaacatatgaacgggttttcatcagaaaatggcttgacttgggttacaatgtctgccccaagacacgtcaaactttgggacacagtaatttgattcctaactacactgtcaaacagttgattgaaaattggtctgaggtacatggtgtagtgctaccagaccctgtgaaactcttgagtttgaacttttcagtttccctcaagccgattaatggtagaacaagtgataaatctcctttctctgaaaactcttcaagggaaaataagtttggctcaccagatcatatatcatcagatgacagttgtcatcctaacttgctgcatgagaattttgattcagatgatcaaatctccaaggcttcatcttctgaagacacagatgattcagaaacgggtcctccgaagttactagttgcatctactgaagcaaacaaattgatgtgcaatgcatctattgatggttctgatgccattaagcaatcgagaaaggatggtttccatgcttctgatgttgagccacgtctccaaagaaacagtatcagcggtgatattggcacaagcgcttcttccagcagcaaccatctcgaagttgttgagaaggataaggaggaacaggtctcaagtaacagcattgcatcagagactacaagaaatggccgaacggtcacctgctcaaaaccaaattttcagccaaggttgggtggtgttcgttctcgaaatcatttagtctggcagcaacgatcagataaagctgtttcattggattcaagatctgattttgctattgttgataataaagttcgtaaacttattgaggatctaaaaaatgagcgtactgatcccgagagggcagcaataggagagctgctggtcctttcaaggcataacatggagagtagaatttccattgcaaaccacggtgctatacccttcttggtgaatcttctttactctgcagaccccagcatgcaggaaaatgctgtaacagtgatcctgaatttgtcgttagatgacaacaacaagatcaccatcgcaagcgcggacgccatcaagcctctcatccacgtccttgagacgggtaacccagaggcaagagcaaactcagctgcaactctcttcagcctttcagtaaacgaagagaacaaggccaaaatcggacgatctggagcaatcaaacccctggtcgacctgctgcgagatggcagtgcacaggggaagaaggatgcagcaacggctctcttcaacctatcgatatttcacgagaacaaggcccgggttgttgaggccggggctgtaaagcccctggtggagctgatggacccagcagctgggatggttgacaaggccgtcgccgttttggcaatccttgccacggtgcaggagggaaggaacggtattgctcaggcaggtggcatcccggtgctggtcgaggtcgttgagctgggctcggcacgggcgaaggagaacgctgctgctgctctgctgcagctctgcacgaacaacagcaggttctgcagcctggtgctccaggaaggcgccatgcctcctttggtggctctgtcgcaatcgggcacggcgcgtgcacgagagaaggcacaggtccttctgagctattttcgcaaccagcgtcaagtcggcaaggtcaccaggcgctaa

SEQ ID NO: 3599 - DNA, 210 bp, Zea mays
  Peptide Sequence Number=SeqID_45378
atgtggggccaccggacagtcactgttcactgtccggttgctcgactgcgagttggtcggcgggagttgattagcggagagttggtcatcggagttggtcattggagagttggtcaatcgatccgcctcgcagagttggtcgatgaagtggttgaaacagtgcttggcatggtcttcagcaagattcacgggagagtaggtggcatttaa

SEQ ID NO: 3600 - DNA, 294 bp, Zea mays
  Peptide Sequence Number=SeqID_45379
atggccatttcgggcgtggagatgtgcgagtcaagccctggcacaggttttggcggcgcggcctcgcagttcctgggagccggggcccaagtaggttggtcgcagggtcaaggaagccagtgcctgaggaggttggctgccgggagggagaacctgggatgtcgagaggtgtgcggtctgaatgacagcgcgggagttggtgtgtcaggtcaaaggcgtcatttgccacgacgtggaccttgtcaacagaccaaccaccctgtcataggaaagttaactaatgacgatgagtaa

SEQ ID NO: 3601 - DNA, 459 bp, Zea mays
  Peptide Sequence Number=SeqID_45380
atgaacattgaccaagatgaatgtgaccactcccggcaagttgccatgacaaggattaatgaagcagaagtcatcgatctaaccagtgatgacgaggaggatcctcgcacagtgcagcataagccagaaggcaaggtcatgcatgatccaactccatgggccatggatgggattcttcagccggagcagcgacagccagctcatgcagccatgaatggaattgtgcccccagagcagcacaagccagcacgtgcagcaacgaacggcgtgtcaccttggacgctccaatggcactacatagaccctcaaggagacacccgagggccattctcgctggtgcacctgttgcattggaaacgggggggcttcttcgacgagggcttccgagtgtggaggacggggcagacttctgagcaggctatcttgcttagagatgccttgttgcatctgcatctgtag

SEQ ID NO: 3602 - DNA, 636 bp, Zea mays
  Peptide Sequence Number=SeqID_45381
atggcgacagaccccgccgtggatctcaagcaacaattgcctcccttgtttggttgggacacattgttggagcattttggtcaagctccgtgtacggtgttctacaatcatcctagggggtgctactattgggtcaacgctgacctccaggcgatagagtactcatttgcgacttcaatcgcatatatcttgattgatttcattgagggccttcacaaggtccacaggaagtttgtcatcctcatcgtcgtcgactgtttcttcaaatatattcctaagacctgcccacaacaccatatcgacgcccattgccaccaccaccgcggctccccttatggtggcagcgcacattgtcatcacatctgttgtgccttcccccgcggcgggcattgcctgatgaagtgcccacgttcgaggtcgaggcccggtggcaccggtggggcgcagtgccgaagtgcccatcgtgcgcaatggacagctgcaaggctaacctcagcaagtgtcgtgactaccaccgtcgccgccagccacaaggtctgtgaggcacactccaagacgcccgtcgtcgtcgtcgtcttcactgaccacaaggtctacgaggcccactccaggactaccaatcaacaaagtgactaa

SEQ ID NO: 3603 - DNA, 474 bp, Zea mays
  Peptide Sequence Number=SeqID_45382
atgagctggaagaggcagaagcaggataaggacgagatgaccgaggaatgctgcttcatttgcaaggacagcggccacgacctccgccgattctgcgtggcgaatccacctgcttatacctctactggcttgggaaacgtcgcctggaactgccccaaggcttaccatccacgctgtttccaaaacaaagatgagctcatcatcgagttgaacatctgggtaacggtccttgaagtcgtgcaatggctcccaagtagtgtcatctttggtcagaccctgccactgtacgagaacttgttggacaccatgaacggcttcagcagtccaatgtggaacacatcatggagacgggtgccggtcgggaggtgggaggtggtggagtatgacgtcgaccatcttgaagaagtcatgctacatatgactgatgaagatcggatcccggttgctgatgatggaggtcgggaagctatgtag

SEQ ID NO: 3604 - DNA, 576 bp, Zea mays
  Peptide Sequence Number=SeqID_45383
atgggtagagacaggagggatagtggctggcctcgccacgctgatggcaagcgcaagcgcgatccgagccctccctcggaggacttcggcgactccgagtactcagaggagacctcctccgaggctgactgttcccctactctggcttctaccctggcgtcatctgaggactcgaatgactccatggggctgtccatcgtagctcagccgtattggcgcttcatcaagcacgctaggctcggtgggtcggatgagtcggaggtctcctcggacgaggcggactcatccgactcatccaagaagtggagcggcggtgatagtgacgacgagggcgacgacagcagcggcggcgacgacgacgggagcgacaacagcaagggcgtcgaaggcaagggcggcagtgacggcagcgacgacgatggcagcagtggcgatggcgagggcgacggtgacggcgataggggcggcagcatcaagggcgatggcgacaacagcggcggcgacggtgacggcgacagcagtggcaagggcgacggtggcaggagcaagaccagtcgcataatgccactggtttaa

SEQ ID NO: 3605 - DNA, 294 bp, Zea mays
  Peptide Sequence Number=SeqID_45384
atggggagagttgcccaaaccctaatgcaaacccctttggacaattggagcactagaaattgcaacctcgctgtcggagaatacatcctcgtgtcggagcaaggagttgctcaggaggtagccccggatccagcaccagagcctgccaagaggatctgcctgccccagctttggaaggcaagccccggttctctggagaacatggttgctggagtgacttggccatccatcttgccaccgggctggacagtcgagtgggaccctacctcggctgaggaggagcatgaggagtga

SEQ ID NO: 3606 - DNA, 201 bp, Zea mays
  Peptide Sequence Number=SeqID_45385
atgaagaaagatgaagaagctatagacaccaaagtcatgcaagggtctgcaagtattcccatttcagaagttatgaaaggaatgacaactaagttgaagaaggggaaggctgaggaagcaactaaagaaggggttgactcagaggagaatgtctctgatggcgaggatgatgttgttgtggaagaagaaggtgatctatag

SEQ ID NO: 3607 - DNA, 378 bp, Zea mays
  Peptide Sequence Number=SeqID_45386
atggttgacaaagccatccaggcaaactctagcgataatgatgatgaaaaggatttgaggctaatggctgttggaggtgcggatggcgacagggtagatgaagctattgtggaatcgacaggacgcgtaggtgtgccagatgtgccgcgacatcgtcgccctcagctgcaaccactaggacaccaccgcatcagggacaatctgaatcgaataaccaacagaaatgtcctgtatccagttgatcaacaccaccttgatgatccacatgttaaagccaacttactctttcaggcacatttctccaaagcagaactgccaataagcgactatgtcactaacttgaaattagttcttgatcagagcatacatatcatatag

SEQ ID NO: 3608 - DNA, 2793 bp, Zea mays
  Peptide Sequence Number=SeqID_45387
atggctgccggcggagagctctccccctcccccgtgccccccgcatcccccatcaagcattctcgctcacccgacgatgcccagcccgacgcatccccgaagcgtcgcaagcgccaccatcaccgccgccaccaccaccaccgtcggcaccgtcacgccgattccccggtacccgtggcagccgacgaagaggtagaggagggggagatactcgaagatgccaccgccgcctctgccatggaggtcgatgctgagtccgccgccccagaggctttccttgctccggagcactttggtaatggtgctgatacagactcaaacacagatgcaaccaagatgcaagctcctgctctgcctacccttccatcctcagaagatggaaggaggtcacttcatgatgcccctgagtctgaaagaggagatattctttcaagtgatgttgaggacaacaaaggacatgaacgaaggcaaagacaaaaccgttctaaatctccaaagtctagaagggagaaggaaaggaggcacaaagatgaccatcacacttcatcttcaaaagattatcattccagaaatcactctagaacatctccttactcaaggcatcaaagtgaagctcattcgagagatctgtacttgagatatagagagaaaggtgattacactaatggttctcgtgcaaatcttagggatggttctgatcatgagagcaatgatcggaatgggaagtctggcagacatacgactaggacccacgggagtgaaagagaaaggagcagcagccatggtattcatgatagacatggtgacaggtacagtgacagacgtgccagccaggaaaggcatagagacgataggatatatagagacaaaatcgattcattagaagctgctcctaggcacagagaaagaagcaggagtcatagtagatcggatccaagggaaaatacacgtcttcgtgatcaaagcagggagagggaaagacggagtggtagttcaaggcatagggatcatgacagcaagagggatacaagtaaagatcggcatagagaatctgacagggttaacagtgcacatgaaagggatagagggagagaggctagggacagggaatggcatagggtcaagggaagtgaaactcatagagctaaggaaggacgggacaaagttagcgataatgataggcacagggattcaacacgctcaaaatatagcgtgtctgatggttacaaagagaggacaagatctggggagaaaggtagagatgctgaccataaaaaccggaagtttgaagaaatgaaggaaaattctctcaaggaggaagatgaagaggagtaccaagagaaaatagaacagcagttagcaatgcaggaggaagacgaccctgaaaaaatcaaagaggaagcaaggaggaggaaagaagctatcatggcaaagtacaggcagcagcaatcgcagaaagaggatatggaatctaaaccaagtggcaatgatgaagaagtaagagcaatggatggaaacgaagctatacatcagaaagatgatatcgatagcagctttatgggcaatgtcgaagctgaaaataagcatgattcttcagaggtatttgatggcaagacaggctttaatgtgggaaggtctcctgctcacaattatgcttcaactagcacgggagcattcactgatgagaggacaataggtgtttcaggtcttggagagggttctcccaagggaaaggatgatggtttgcatattgagagaaatgctcttcatgacaactgggatgatgcagatgggtactacacttatcggttcggagaattgctggatggccgttatgaaatcatagcagcacatgggaagggtgtgttctcaacagttgtgcgggcaaaagatcttaaagcgagtaaggatgatcctgaagaagttgccatcaaaattattcgcaacaatgagacaatgtacaaggctggtaagcaagaggtttcaatattggaaaaacttgcaagtgcggaccgtgaggacaaacgccactgcgtgcggtttatttctagtttcatgtaccggaaccatctttgcttagtttttgaatctctcaatatgaatcttcgtgaggttttaaagaaatttggtcgtaatattgggcttaaactgactgcggtgagggcatattcaaagcagcttttcatcgccctgaagcacctgaagaactgcaaagttttgcactgtgatataaaaccagataatatgctggtgaatgaggctaagaatgtgctcaaggtatgtgattttggcaacgctatgcttgctggtatgaatgaagttacgccttatcttgtcagccgtttctatcgggcacctgagatcgttcttgggttagcctatgatcaccctttagacatgtggtcagttggttgctgtctatatgagctttataccgggaaagtcttatttcctggtccatcaaacaatgccatgcttcggcttcatatggaattgaagggtccattccctaagaagatgcttcgaaagggtgcctttactatgcaacacttcgatcaagatctcaattttcatgctaccgaggaggatcctgtgacaaaaacggctgtgagaaggttaattttgaacattaaaccaaaggatgttggttctttgtttccgaactttcctggcgaggatccaaaaatgctatccagttttaaggatcttcttgataaaatatttacattagatccagaaaagaggataactgtatcgcaagcacttagccatccatttatcactggcaagtga

SEQ ID NO: 3609 - DNA, 984 bp, Zea mays
  Peptide Sequence Number=SeqID_45388
atgtccggcagcacggcgccgccgcacgtcgtggaggacttcttaggcgtcatccagatcttcagcgatggttccatcgtccgcggcgacgagtcgaccatcatgccggcagggccgtgcccggacgtccccggcgtccagtggaaggacgccgtgtacgaggcgactcgcggcctcaaggtccgcgtgtacaagccgccgccgacccccggcggcggcaaccagggcaagctcccggtgctggtgtacttctacggagggggctactgcggcggcgcctacgaccaccccttgttccactcctgctgccagcgcttcgccgccgagctccccgccgtcgtgctctcagtccagtaccgcctcgccccggagcaccgcctccccgcggcggtagaggacggcgcggcgttcttctcctggctgcgcgcgcaggcgcaggcgcagcctgctgcaccgggcgccgccgacccgtggctcgccgaatcggccgacttctcccggacgttcgtgtccggcgggtcggccggcgccaacctggcccaccacatcgtggtccggatcgcctctgggcagatcgcgctcggcgccgcggtgcgcgtcgccggcgtcgagcgcgtggcgacggagtccgatcccccggccggcgtgtacctgacggtggaaacgattgaccagctctggcgcatggcgctgccggtgggggccatccgggaccacccgctggcgaacccgttcggcccgggcagcccgagcctggaaccgctgccgctgccgccggcgctcgtcgtggcgcccgagcgcgacgtgctgcacggccacgtgtggcgctacgccgccaggctcagggagatggggaagcccgtggagctcgccgagttcgcgggagaagggcatggcttctctgtcggaccgtggagcgaggcgagggatgagctgatgcgaatcttgaagcgcttcgtgaaccagggcgctgctctcggctga

SEQ ID NO: 3610 - DNA, 1353 bp, Zea mays
  Peptide Sequence Number=SeqID_45389
atggcggatgtgtgtagactatactggtctaaacaaagcatgtccgaaggttacctaccctctgcctcgcatcgatcaaatcgtggattccactgctgggtgcgaaaccctgtctttcctcgatgcctactcagggtatcaccaaatcaggatgaaagagtccgaccagctcgcgacttctttcatcatgccctttggcatgtactgctacgttactatgccattcggtttgaggaatgcgggtgcgacataccaaaggtgcatgaaccacgtgttcggagaacacattggtcgaacggtcgagcttacatcgatgacattgtagtcaagacgaggaaagcctccgacctcctctccgaccttgaaacaacattctggtgtcttaaggcgaaaggcgtaaaactcaatcccgagaagtgtgtcttcggagtcccccaaggcatgctcccggggttcatcatctccgagcggggcatcaaggccaacccagagaaaatcgcggccatcaccaacatgggccccatcaaggacttaaaaggggtacagagggtcatgggatgccttgcggctctgagccgtttcatctcgcgccttggcaaaagaggcctacctctgtaccgcctcttgaggaagaccgagcgcttcactaggacccccgaggccgaggaagccctcgggaacctaaaggcgctcctcacaagcgcgcccatcttggtgccccccgctaccgaagaatccctcttgatctacgtcgccgctaccactcaggtggtcagagccgcgatcgtggtcgagagacgagaagaggggcacgcattgcccatccagaggccggtctacttcatcagtgaattgcgacactacttcgagtctcatccgatgactgtggtaccatccttccccctgggagagatcatccagtgccgagaggcctcgggtaggatcacaaagtgggcggtggagatcatgggcgagacaatctcgttcgcccctcggaaggccgtcaaatctcaagtcttggtggactttgtggctgaatgggtcgacacccagcttccagcagcttcgatccaaccggaactctggaccatgtttttcgacgggtcattgatgaaaacaggagcgggcgcgggcctgctcttcatctcacccctcgtgaagcacctctgctacatgctgcgcctccatttcccgacgtccaacaacgtggccgagtacgaggctctagttaacgggttgcacattgccatcgagctaggggtccgatgcctcgacgctcgtggcgactcgcagcttgtcatcgaccaagtcatgaagaactcccattgccgcgacccgaagatggaagcctaa

SEQ ID NO: 3611 - DNA, 348 bp, Zea mays
  Peptide Sequence Number=SeqID_45390
atgcatggcgacgacaacgacacgtgggcaaggcacatgagagcatgggagtgggcaccgaggcagggaattagtggcggggctcgggtggtacttatagaccagaagaggggaagggaagggaggggattggccaggattaatccgattgaatcttcttggccttggcgatgcggtgacgctcacgcggaaggaaggagagcaagaaggaaagtgagcgtggtgaaaaggaatgtgagcttcgctcgagcggggaaggcgatctcgcgaccgatcgttcacgcgcacatggtagcgaggcacggcggcgacgtcggagcgaggaaggaaaggggagaagaagattag

SEQ ID NO: 3612 - DNA, 720 bp, Zea mays
  Peptide Sequence Number=SeqID_45391
atgaagctcctcatcgacaggaaggcgcagcgggtgctgttcgctgaggcgacgaaggacgtcgtcgacttcatcttctccctcctcaggctgcccgtcgccacggcggcgaagctggtcgggaagacggccatggtcggctgcatcggcaacctctacgccggcgtcgataagcttgactccatctacctgcaggacggcgtcgccaaggacgcgctcctctgcccgactgttgtctcgcaggcggcaaaaaacgccaacagctccctcctccctctgccgaagccgtcggtgcagccaaagatgtatagatgcgccaacaactacagcgaatgccccaactacatcacggacgagcacggcaaggcgtgcccgcgttgtcgctgttccatgacgacggaagtgcaatacctgccgtccgcgagtcacagaagcggctccggccaggtggtggcgtcggcgtcgcagcagcgcaaggcgggagggttcgtgcagggcatcgtgacatacacggtgatggatgatctgacggtgacgcccgtgtccgccatcgtctccagcgttgccctgctcaagaccttcgccatgaggaacaccggcgacctccagcagaagaccgttcagctgggctacaacgaggtcgttcggtccatcgctggtctggcgattctcaaggcgtcgctgaaatccaagtccgtcctcactgacgtcttcctctaa

SEQ ID NO: 3613 - DNA, 198 bp, Zea mays
  Peptide Sequence Number=SeqID_45392
atggccctcagctcctccttctcaatcaacgggcaaccagatgcagatggtaatgagatacagcagaaagacggttctttgccaagtctgcgtgactcccagctgggacccataagctatccagaaagtctcgacttctcgggggtgggtgtgatggggagtctggttgcagaggacaacataggaagagacaaataa

SEQ ID NO: 3614 - DNA, 168 bp, Zea mays
  Peptide Sequence Number=SeqID_45393
atggcgcaggcgcgcagcttgggcctcggggacggcgcgggcgcagctcgggcctcggggacggcggacggcgcagctagtggatatccatggataaaatatactatccgtaccctacccgacgtatttcgggtactcgacccgataggatccacggaaaaatattaa

SEQ ID NO: 3615 - DNA, 141 bp, Zea mays
  Peptide Sequence Number=SeqID_45394
atggaggtgaagctcgtagctttctctttgtgtgttggttgtgtgtcgttcccaaatgaaggaagtggcacaacaaacgagcatccagatgctcgccttagggacgccgcctccaacttttgcatcaccgcctccagatag

SEQ ID NO: 3616 - DNA, 537 bp, Zea mays
  Peptide Sequence Number=SeqID_45395
atggcggtggagtgtcgtggcagccgttcgagacgcttgtcgacatgggaaggtaaagacggcacaacaggatggcctgctcgatgtccatcctctatggtcgtacagaagaatctgagtgggggaggcggagacgaggaaatagatgggagtgaacatttacatctccaggttatggtgaactctacagagaaagtaaggcttgctgggaatccaaatgtgatggtctatgatctatttgttgacccaaggaaccttgagtggctgagggaaagcaactgcccagttgtagctgatgtaacacatgctctacagcaaccagctggaagaaagcttgatggtggaggtgttgcaagcggtgggctacgagaactaataccgtgcattgcaaggacttctgttgctgttggtgttgatggtattttcatggagccgttgcgcaatctggaagagctgttggaggaattaattgcaattgctcgagttaccaagggaaagaagccattcaagatcgacctcactccgttccaggagtga

SEQ ID NO: 3617 - DNA, 153 bp, Zea mays
  Peptide Sequence Number=SeqID_45396
tgctcgcccacgtccggccagcccacgctgcacatcgcgaacaggccacaaggcggcattgcctgccggctcccgaaatggtatcgtgccacccaggcacagctcgtcatcaccaggggcattgaagaggctgccaatccatacaccccatga

SEQ ID NO: 3618 - DNA, 503 bp, Zea mays
  Peptide Sequence Number=SeqID_45397
gtgtggattacgagtacaagtcggtaaaccctaggacagatccagattatggaaaaatcaatccaattaaatatattccagcattagtagatgggggcatagtcgtttctgattctcttgccatctcactgtatttggaagataagtatcctgagcatccactcctgcctaaagatctcaagaggaaagctcttaatcttcagggtctgcatgagggtaggatgagcccagatgagggccttcatattgttcaaagttatattgacaagggattcagagcgatcgaaaagctgttggaaggatgtgagagtaaatatgctactggagatgatgtccaattggcagatgtgttccttgaaccacagatacatgccggcataaatcgcttccaaatcgatatgtcgatgtacccaatcttggagaggctccatgatgcatacatgcaaattcccgcattccaagccgcgcttcctaaaaatcaaccagacgcaccttcatcataa

SEQ ID NO: 3619 - DNA, 399 bp, Zea mays
  Peptide Sequence Number=SeqID_45398
atgggacacgaagcagttggtgagctcctcaggatgccgtcctcacactcggccattgtcactgtgctcgtcattgtcaacgacctgcaggagggttttgccagctcaatattcgccaccaccaccatctttgtcaatgcgctctgctttgcctaccacaccatcattgtgctcgccttcgtcggcctccttatcgcagaggacaatgggtccagcatcgcaggcctgcctgccttcctcctagagagcttcgacattaagtaccttcagaacaggatgaggacaaggacgaagatgtttagcttcgtcacaacatcatatggaaacgaaggtgaacaatgccaggagaaggtgtttatgattctatacgcaagacgatatgggcagaagtcgatatag

SEQ ID NO: 3620 - DNA, 393 bp, Zea mays
  Peptide Sequence Number=SeqID_45399
atgtgcgcgcacgccggggccaaggccgccgcacccatgcttgggttgcgcgtggtcggcgcatggctgcccgctccagagtgctcctcgcatgtggcccccgcgcccgtacgccgccggggccgggcagatgcgcctgcgtcgtggccaggccgccgcatcacgcgtcgggtcgggatggccgcgtccgcgccgctgtgccgccggtgggtccgcgcgctgggacgccgcgccgtctgggcccccccacgccaccgaggccgggggctgcacccaccatcggggccgccggctattgagggaagggggacgggcatgggggagccacctccgagagggaaggatgagcctcctgggcggcgccgtgaaagcatgtggctgatgttggcctag

SEQ ID NO: 3621 - DNA, 2613 bp, Zea mays
  Peptide Sequence Number=SeqID_45400
atggagctttctccatggcttgtgttctccttgggtttccttgcgcaggctctcgtcatcttggctgacacgaatgcacaagacgcttctgggctgaatgggattcaagattcctggaacaagaagccatcaaactggagggtgggcactgacccatgtggagataaatggaacgggataagctgcaccacaagccgggtcacggctatggatttctcctacaacaaggacttgggcggtcctcttcctgcgtccatcggaagcctgagtaacctcgaaaacctgattcttgtcggttgcagcttttctggagaaataccgaaagaactcggacagctcaccaagcttagatttttatctttgaactcaaacaagttcagcggttccattccggcatcactcggaaggctctcgaatctatactggtttgatctggctgacaataagctctccggaggactcccggtgttcgacggcacgaatcccgggctggataacctgacaaatacaaagcacttccacttcggggtcaatcagctctcaggaacaataccgagccagattttcaactcaaatatgacgctgatacatgtgcttcttgacaacaacaacttcaccggacgcattcctcctactctgggccttctcaatacactagaagtcatgcgttttgataacaactaccagctgactgggccggttcctagcaacatcaacaacctcacaaaacttgcagagctccatctggaaaacaaccagctgactggtccactgccagacctcacagggatgatcgcgctcagttttgtgtaccttgaaaacctgcgtgtcacagggcagctgccccaagccctgttcagccttcctgcagttcagacactactagtcgggaaccccatctgcagcccggggacggggagcagcgagaaatactgcgcgtcgccggggcagtccaaccaggcggcgccgccgccgtacagcaccccgatgaactgctcggggctgccgccgccgtgcctctcggaccagctcgtgagcccaggctgcgtctgcgccgtgccctacaggggcaccctgttcttcaggtcgccgtccttctctgacctcagcaacggctcgtactggggccagctggagaccggcatcagagccaagttccggagtctcagcgtccccgtcgactcggttgcgctccacgatccgtccgtcaactcggtcaacaacctgcagctcgcgctggaggtgttccccagcggcaagacccagtttagtgagcaggacatctctgacatcgggttcatactcagcaaccagacgtataagccaccctcagtattcggtccgtactattttcttggccagccgtacagctttgccaatgtggtgctaataccttccaaatcgaaggcgaacaaccgcttacctctgatcgtcggagcctcggtgggtggagcggttcttgttgcaatagttcttgctcttgttaccatcgtcgcaaggaggaagaagagaccaaagcagaacgaagagaggagccagtcttttgtttcttgggacatgaagagcacgagcggcagcagcgtcccccagctgcgcggcgcgcgcacgttcaacttcgacgagctgaggaagatcaccagcaacttctcggaggcgaacgacatcggcaacggcggctacgggaaggtgtacagagggaccctgcctagcgggcagctggtggccgtgaagaggtgccagcaggggtccctgcaggggagcctcgaattcaggacggagatcgagctgctctcccgggtgcaccacaagaacgtggtcagcctagtgggcttctgcctggaccaggcggagcagatcctcgtctacgagtacgtccccaacggcacgctcaaggagagcctcacgggcaagtccggcgtgcgtctggactggcggcggcgcctccgggtgctgctcggcgccgccaagggcatcgcctacctccacgagctagccgacccgcctatcgtgcaccgcgacatcaagtccagcaacgtcctccttgacgagcgcctcaacgccaaggtctccgacttcggcctctccaagcccctcggagaggacggcaggggacaagtcaccacgcaagtcaagggcacgatgggctaccttgatcctgagtactacatgacgcagcagcttacggacaagagcgacgtgtacagcttcggcgtgctgatgctggagatggccacggcgaggaagccgctggagcgcggccggtacattgtcagggagatgaaggtggcgctggaccgtaccaaggacctgtacggcctgcacgacctgctggacccggtgctgggctcgtcgccgtccgcgctggccgggctggagcagtacgtggatctggcgctgcgctgcgtcgaggaggccggcgccgaccggccatcgatgggcgaggtggtcggcgagatcgagcgggtgctcaagatggccggcggcccggggcccgagtccgcgtccaactccatgagctacgccagccggacgccgcgtcacccctacggcggcgacagccccttcgaccacagcaacagcgggttgccgtccgcgagggttgagcccaagtga

SEQ ID NO: 3622 - DNA, 291 bp, Zea mays
  Peptide Sequence Number=SeqID_45401
atggattctcaggcgccaacgaacatagatggtgaccaaggaagttatcccttaattggggatggagatctattggggacccgaaacccgaatgggtatgggtatgaggatgggtatggggacagctcaaacatgatggggatgcgtataagatgctataacccggtgggaaattccccattgacatctctagtgtggggcgccaaatcatgtggtccgacttccgaggccctggagccatgcggtactattccagaagtcggtcgacctcccagctcccaaattaagtag

SEQ ID NO: 3623 - DNA, 183 bp, Zea mays
  Peptide Sequence Number=SeqID_45402
atgactggatctagacgagggcgtggtgcgtcgcaggtgaacgaggataaggacgaggcccacgggtggacgagtctgaaggttgtgcggctgtcgggctatggccctggggacgccggactggccgactggggcctaggtgccgagccgccgatggccgacaggcgaggcgacagcggctga

SEQ ID NO: 3624 - DNA, 639 bp, Zea mays
  Peptide Sequence Number=SeqID_45403
atggccaggccgtgctggccgagccgcgtcgacagggaatctgcgggcacgacaaggaaggagaggggcgcgggggagaagaaagaaagggtggggcttaccatggcgatgaacgacagcgacagcggcgctcctgcggtttggtcgaggggcgaagcagggagggagtgggagaaaatggggagagagagcggggaggtttcattcttctttgggatcggcgcctacgcgcacgcctcgtgggccacgcgggagggcgtggagccggggagaggaagtgggccggcgcgcaccgtggagtgggccgaggacgatttagaatccaaaattcaaagatggcatgacacatcacacactacgccactagcccgacgagctcactctagtcgtgctcctgtatctctcgatgaaagtctaaagttgccaactgctaatcttatacaacaagcaatggatcaagctgtcaagcgcacaaacacgatggatcaagtcgttgcgtcgtcatacaagctgctaaccatacttgccaacacccaccacacagaaacgatgcagcaacacactgcacacagaccatggacgaagatgaggttggccggtggcaatgggcgtggttggtcggtgtcggactgccggtga

SEQ ID NO: 3625 - DNA, 243 bp, Zea mays
  Peptide Sequence Number=SeqID_45404
atggcgcaccagacagtccggggcctagatgctttcagacaccacctctgccccttcctttcttgtgtatggtcaccttacacccttccacctcatcatcgcggcatcgctgcgcaccctgttgcctcctcaaaagagtttctaagtatgtgcgacagtggtggcatgatgaggaggggcatgagtggcatagacaggaggataacatcattatggacgatggagaagagtaaagcaagataa

SEQ ID NO: 3626 - DNA, 177 bp, Zea mays
  Peptide Sequence Number=SeqID_45405
atgggcaaatgcaatgcaaacgaatgccggccggcgaagggcgacaggatcaaggaccgcctgcgctaccaatcaaataagttgatctatcattgtttctttcctcatatgctaataactagtcataatatgaaaaatgagttcattccaccaaatttatggaatgattctcagtga

SEQ ID NO: 3627 - DNA, 471 bp, Zea mays
  Peptide Sequence Number=SeqID_45406
atggaggacgtgtgtcacagcaagagcgaggagctcaacagggcagggttctgcagggggcgttgcagagtgggcgggtggccagagtcaggtggtgggctgtggggcacgggtggcactgcacgtgccgcactgaagcccacaggcaaaatagagcacgagacagccgagtgggggagctgttggaagccagccgtggtggcgacgtcgagctggcctagagaaggtcgtccacggcggcagtgcccgcaccctcgttggtgtttgcggtgggcgcaggggcagggccgtcgattgcgtgggcgcaacgacgcacagcccggcgaggcgaggaggaggcacggcggccagagaccgcggccgaggatggtggcggcgagcaagacgaggcgcagatccaaggagtccggcgaccaggcacggctaggggtcgacggcgtggtagaggagggcgtggccggcgaaggataa

SEQ ID NO: 3628 - DNA, 492 bp, Zea mays
  Peptide Sequence Number=SeqID_45407
atggtctccttgttgatccgcacgatcagaatgccattgcggatgcactatataaacttctttctgataaacatctttggtcaagcttcctcctttaaaggagttgaggaagttgatgagaatcccaatcttttccgttgcaatgcattatataaccacagcgctaccagattatctgtagtccctatccacgcatcacgctctcaggccctaaggtacctgtgtatacgattggggatagaagtgccaaatgttgcagtcctcgtgggtgaaagcggcgattcagattacgaggaactgctggggggtctccataggaccgttatcctaaagggcgagttcaacatcgccgcaaacaggatccacacggtgaggagataccccctgcaggatgtcgtcgccctcgatagctcaaacatcatcggtgtcgacggctacaccacggatgatctgaggtctgccctgcagcagatgggtatactggcacggtaa

SEQ ID NO: 3629 - DNA, 189 bp, Zea mays
  Peptide Sequence Number=SeqID_45408
atgccgtttccccttttggttccagagaacgcgccggtgacgcgggcggtcgtcgtcgcgagcggcctcctgtccgtcgtcttcagcgcgcagcggcgcgcccgcgccctcggcatctcataccagggccgatgggatctaatcttcggggctgtaggtaaaggtgtacccgttgtggtcttcaactga

SEQ ID NO: 3630 - DNA, 840 bp, Zea mays
  Peptide Sequence Number=SeqID_45409
atggcgagccagcggcggatcgcacccgtcggtgcccgatcgatcggatgggaggacggcgacgtgggcagggcagctaaccgccgggctcctctctccatcagatcacgcatcagtccgcgacaagcaaatttaccaaatcggccccgttcacaccactatagtacagccgtgcacccgacgggacgggtccgtggatggagggcgcctagccgccgatcgagagcacccataaatagccgtgccaggacatcagccgagcagcagcagcagctccaacaagacacaccaaaacacctagctagcttaccgcacctgctgcttggggctgccaagattatgtctctggtaaggctcctggacacgctggccctggactcgtgggtgcggaaccccttcaccatcttcggcacggcggtggccgccgacgcgtggctggccagcgacacgtcggcgttcgccaacacgcacatcgagagccgggacacggcggccgcctacgtgttcagcgccgcgctcccgccgggcgtcaagaaggaggaggtcacggtggagctggacgagggcaacgtgctggtcatcgccggcgagcgcagcgtgtgccgccaggagcgcagcgacggctgccaccacatcgagcgcagccgcgccaccttcctcgccaggttccacctgcccgaggacgccgccgtcgacggcgtcagggccgccttggacgccggcaggctcaccgtcaccgtgcccaaggtcggggccgccgccgccgccatcgtgcccgagaagcccgccgccgacgcgccggcgctggcgcccgtgcccgtcgaggccggcccctgctga

SEQ ID NO: 3631 - DNA, 1269 bp, Zea mays
  Peptide Sequence Number=SeqID_45410
atgaagctgtggaaggagacttccaggagttccaagactacgacgagttctaggtgcgggttagcggcaacccccagtcggctgcctgtgaaggccgcggttatctacgtttcttttccgcactttgatttattatatggggcagacaaaggcaatacttcaaacaaaagatggcaacaacagcagcaagaactgcagtatcaggatgacgaagtaggagatactaagggtgctattccacaagtggattgcacactttcagatgcttctcctaaagaggcgattaagaagaccacttctttgtgcaatatcaacattaaggaaacagcttcagcaaaacttgccctaattgactgctcttctatgctgacagaaatattgcggaggacgcggtcaatattacataaactgaaggaacagatcagtgacggtactccagttattagagctggtgctagcacaggcatatctgcaaagttcgaagaagctggtggggttgattttatagtgatgggctcactagctgggctcttgccctttggtgatgcaaatgacattgtacttcagatggccaacgaagtgttgcctgtggttaaaggagttcctgttcttgctggggtatgtgctacagatccatttcgtcgaatggaatactttctcagacaactagaaaccattggattttgcggtgtgcaaaacttcccaaccgtaggtctgtttgatgggaattttagacataatttggaggaaactggaatgggcatggaagtggagatgatttcaatggctcatcgcatgggtttccttactactccatatgctttcaatccggatgaagctgctgccatggccaaggcaggagctcatatcatagttgcacatatgggtctgacaactgcagggtctatcagggcaatgacagctgccactttagatgatagtgttttatgtgttcaggccattgcggatgcggcatttggggttaaactgatatcattgttctctatcacggagcctgctgttattttgttacacttcgcaaattctgtcatctctgccaatctattcactaacacttggacaggtaacttggtgaaaattgtaattccacgatctaaccccaacgatgctcatgtcgccggtgttggaaagttcctgatgtttcctagagagttgcaactcttaggggagtcagtcaagctaatgaagcttgtggaagcagttgcaaagggaactattaataacgagacacttggttacttcacctga

SEQ ID NO: 3632 - DNA, 114 bp, Zea mays
  Peptide Sequence Number=SeqID_45411
atgggttgcatcatcaccacgagtaagattgggcctgtcgagcaggccacctggcatgctgatgacgatgagcagggcgagggcactgggaaagggtggtttatgaaactatga

SEQ ID NO: 3633 - DNA, 402 bp, Zea mays
  Peptide Sequence Number=SeqID_45412
atgcaggaacctgttgccgctgctggtcccatccgcgtgcgcccgatctcgcggttccgcggggcgccatggggctacgacggctgcaacggttgcgtgacggcggaaccaacgcgtgtgggcggaccacgacggcgatgcccgacatgcgagcgcgtagatctggcgggatccggtgcggatagggcgcggctctggccgacgcgcggcctagcggttccgacgtggatagaaggggtccacggcgggcggatgatgagttcgctgctggcggacggatgcggtgccgtcacaggcaacgcaactgagatgagattggtggcggcggacttccctaagggcgagctgcgacggtgttctcccctaagcgcgagcagcgtcggatcccagagacgcgtgtag

SEQ ID NO: 3634 - DNA, 384 bp, Zea mays
  Peptide Sequence Number=SeqID_45413
atggagcccaagctatcttcggtcggcgttcgcgacctccgtcgtgtcgtcatccccaccctcgtcctcgccgtcccgctcgacgcccgccacgacctccaccgcgtcatcatccccacccctgtgcccatcgacccatgtcgtcatcccctctcctgcgataggatctggaagcagcaaggcaccagtggagacggcctcgaccacctacgtgctctcctccaagccgacctcgaagtcggaggtgacggcgttgttcacgatgtctccccgaagctggcgcggaggaggcggctcggcgtcgcaaggtccaagggaaggcgttgtcgttggggaaggcatcgcaaggcccagccgagcaattccatggcaccgaccaagtga

SEQ ID NO: 3635 - DNA, 180 bp, Zea mays
  Peptide Sequence Number=SeqID_45414
atggccttggtaacacctggggtgttacacctgtataaaccctcgtgtgatccaacatcaagaaggcatcctgcaccacatcgcggatccatccaagagaagatcttctctgatggcgccaacggtgggggcgggttcgtcccgcctgactacagcgagaactacgctgacgaactctaa

SEQ ID NO: 3636 - DNA, 348 bp, Zea mays
  Peptide Sequence Number=SeqID_45415
atggccatgatgggttcaacatcggaaaagatgtacctctgtcagctcagatattaccctcgtcgttcgaccagcagtgcggggagtgtgattgtctcacctattggtgaaggcaatcaaaggttgagcagcatagtcaacctagttgatgtgctcaacactgatctagaccacgctcttgacgagttgagtagggctcgtgctgagattgcagagctgtgtgctaatcacgtggagcatcgtcaccataaggatggttctcccgccctcgctgggactcagcacccgtaccgctcgccgccatgtggacaccatgcttatggcacctcgattgtaggaccaagatag

SEQ ID NO: 3637 - DNA, 282 bp, Zea mays
  Peptide Sequence Number=SeqID_45416
atggcccattacgacgctcctgagcatcccctttctgcccctgctccctcgacgcccctacttcgctccacggtgattcacgtgcctccctacacctccaacaatgcagcagagtatgaagccttgatacatgggctcaacattgttgtgtcactcgacatcaagagaccgatggaaatacaacagccaagcatcatgacgagccagcagaggaatgcaaggcagtggagcaggcagagccagacccgagtgactagagggagccaatcatcagacacataa

SEQ ID NO: 3638 - DNA, 138 bp, Zea mays
  Peptide Sequence Number=SeqID_45417
atggcgaactcagccatgggcgcaatgccggcgtgggggcaccagagggtgcagaacgcgacgaggtggcctaacggcggcgtggatcaactccgggttttcaattcaaattcaaaccaagtttcaaattcaaactaa

SEQ ID NO: 3639 - DNA, 564 bp, Zea mays
  Peptide Sequence Number=SeqID_45418
atgaacgcagactttggagaacaggcgtcggacctgggcgaaaccctagccgactctctcggtcgtacgacgagaggaggtcttacacttaggcgcactcagggtgacacggcggactcaaccgtgggcacaacaccggcgcgagggcaccatagggcgcagaacgcggcagagcagcccaatgatgggatagctcgggtcgacagcggcgggcttcggctgcacggggagaacgccggtgagcgtggaccgggcgaattagagaggctgggggcaaactggaagggtgttacaatgggccaccccaagcctcagcgccctcctccgcctccaacttttgcctaccccaagactctcaatgaatggcaccagcaggagtatggtgtgtcatttataactcctaaggatgaagctgaagggtttgatgactcctttttccagtctgctcctgccgccgctccaggacctatccctggtgaccctaggccttcaggctcagagcaccccccctcctccccctccttttcagggtccttccccttcctctggttttccttcatctaa

SEQ ID NO: 3640 - DNA, 222 bp, Zea mays
  Peptide Sequence Number=SeqID_45419
atgaggtcttgccagaggcgagggcacaaccacggcaaggctctagggggttggggaaggactcagtgtcacacccggattttagggacccaggcgcgaacatatcaccagagcatgaaaacccaattaaagcctgctacacgatgcctaggggatggtgagtttgataaaggggcgtaccaaggttcggaggcaatggaggagtcgatccacgacgggtag

SEQ ID NO: 3641 - DNA, 444 bp, Zea mays
  Peptide Sequence Number=SeqID_45420
atggagcggatgaagaaggaacatgaatttgaaatgacgaagcttatgcagtcgtctgccgaagtggctatcaaccttagcagtgctcaagtgaagatagaggacttgaaggccgaaataaaccatacaagaaacctgaatgaaaattattggatcctagtggccaactgtcatactctaagcaacaggggtggaaaagagctaagcatcgaagaattcataaagaacaagaaaaaggcaaggcaagcagctgaaatgatgtggatattagaaaaaagctttagggaaagaaaaccgaaggttgtgattgaggtgaagcataccgaagctgaagctaaggatgctgctgccgaagttgaagccatttctgccatagccataaagaaagtcgcagatgttgaaatcttgaagatatgtgaacaaatttacgaagaagccatgtga

SEQ ID NO: 3642 - DNA, 498 bp, Zea mays
  Peptide Sequence Number=SeqID_45421
atggcgcctcctgttgtcgtggctggtctgcgccctaggttgggcgacgtggaagctcctccgaagccgaggtcgagtctgtcttccgtggccaaggtcgagtccgagcccctggttcgggcgaggcggagaccgtcggctaaggccagggcggagtccgagccctggggtcgggcgaagcggggttcgtcgtcttccggggctaagcccgagtccgagccctgggtagggcggagcggagttcgtcgtcttctggggctgagcccgagtccgagccctgggtcgggcggagcggatgggagcggcgcgggcggcgctgtctttctgctaggccggtcagtggagcggcgaagtgacgacggtcacttcggctctgtcggctgggggacgcgcgtcaggataaagctttatgctgatgggggttaccagctgagaattaggagccttgagggtacccctaattatggtccccgacaccatgaacatacaaagagctag

SEQ ID NO: 3643 - DNA, 168 bp, Zea mays
  Peptide Sequence Number=SeqID_45422
atggccgaagatagcggcttcggccataagccgaaaggaagaagcaactgcgggacaaaggttggaactcgtgaagtcaaggacaaagaaaagtacaatactgccccgatatcggatggtgtcaccagatgcgagctcggaccacgctgcaagccactcgccaactga

SEQ ID NO: 3644 - DNA, 294 bp, Zea mays
  Peptide Sequence Number=SeqID_45423
atggcgagctcgtcggcgtctcccgtccctcctcccttctcccctccccgggcacctataaaagggaccgcccgagctccgccttctccacaccagcctcggctacctccccctctccttcccgagcccgatcgagctagcgccaccgcgtcctcccttcgctccgcacacgcctgctcatcgcctattgcgcccggtggcctcgccggtgacttcaccgccgcgagcgcccgccacccgccgtggaccggccaccccaagcctccaccggtcaaattgaccccacctccatga

SEQ ID NO: 3645 - DNA, 537 bp, Zea mays
  Peptide Sequence Number=SeqID_45424
atggttgctcctggtggtgaagctttaggtggggtcattggtgttgcccgccacatgatccaaactgaaggattcttctcgctgtataagggattggtgccttctcttatcagcatggcaccctctggcgctgtattctatggagtgtatgacatactgaagatggcttatctgcattctcctgaaggaaagaaaagggtatcgatgatgaagcaacaaaaacaagagacaaatgcattggatcaacttgaactgggtactgtgaggactttactctatggggccattgcaggttgctgtgctgaagctgctacatacccatttgaagtggtccgtaggcagctacagatgcaagtaaaagcaaccagaatgaatgcgcttgcaacatgccttaagattgtcgaccaaggtggggtaccagcactgtatgtcggtctaatccccagtttgttacagggggaagattgcttccgaagttgtcaggtcaggccagaggagcaggctgtgttggggaggcgcgatggcgggttgctttag

SEQ ID NO: 3646 - DNA, 906 bp, Zea mays
  Peptide Sequence Number=SeqID_45425
atggccaccgccgccgccgcgtctaccgcgctcactggcgccactaccgctgcgcccaaggcgaggcgccgggcgcacctcctggccacccgccgcgccctcgccgcgcccatcaggtgctcagcggcgtcacccgccatgccgatggctcccccggccaccccgctccggccgtggggccccaccgatccccgcaagggcgccgacatcctcgtcgagtccctcgagcgctgcggcgtccgcgacgtcttcgcctaccccggcggcgcgtccatggagatccaccaggcactcacccgctcccccgtcatcgccaaccacctcttccgccacgagcaaggggaggcctttgcggcctccggctacgcgcgctcctcgggccgcgtcggcgaggctttcttcctcgcctcctctggtcgaccgaggccggtgcttgtcgacatccccaaggacatccagcagcagatggcagtgcctgtctgggacaagcccatgagtctgcctgggtacattgcgcgccttcccaagccccctgcgactgagttgcttgagcaggtgctgcgtcttgttggtgaatcccggcgccctgttctttatgttggcggtggctgcgcagcatctggtgaggagttgcgacgctttgtggagctgactggaatcccggtcacaactactcttatgggcctcggcaacttccccagcgacgacccactgtctctgcgcatgctaggtatgcatggcacggtgtatgcaaattatgcagtggataaggccgatctgttgcttgcacttggtgtgcggtttgatgatcgtgtgacagggaagattgaggcttttgcaagcagggctaagattgtgcacgttgatattgatccggctgagattggcaagaacaagcagccacat

SEQ ID NO: 3647 - DNA, 1083 bp, Zea mays
  Peptide Sequence Number=SeqID_45426
atggcggccacctccctcgcgcgcctctcccgacgcgccaccatttccgctaccgccgcggcgccctccctccggcgcctcctctcagtaacctccacagcctctgtcgcggcatccgccccgccgccgccgcccagcgcggccggcgccgcggccgtgggcgcggatcgggtgcggtgggactaccgcgggcagaggaagcttgttccgctgggacaatggatgcccaaggtggccgtggacgcttacgtagcccccgaggccgtgcttgccggccaggtcaccgtccacgacggcgcctccgtctggagcggcgccgtcctgcggggggacctcaacaagatcacgctcggcttctgcgccaacgtacaggagcgatgcgtcctccatgccgcatggacggctcccacagggcttccagctgagacactcgtggaccggtacgtgacagtgggcgcctactgtctgttgcgctcttgcaccatcgagcctgagtgcatcattggccagcactctgtcctcatggaaggttcgctggtggagaccaactcgatcctcgaagctggctctgtattgcccccaggaaggcggattccgaccggcgagctctgggctggaagcccggccaggttcgttcggaagctgaccaatgaggagatcatggagattccgaagctggcaactgccatcaacgatctgatgcagagccatttctcggagttcctgccttactctaacgcttatctggaggtagagaagctgaagaagtcgttctccatccccctcgccactcgccccgctccggctgctgtgccaaccaccccggtgaaaccaacaacagccaagttcagcctcgggcgcaataggaagctccgcctcgcccgacctcaggcctcggcctcgggaggagatctctacctcgcccgacccaaggctcggcctcagcctcggcctcgggaagagtcacgtcctcgcccgaccctgggcctcggcctcggcctcggaggagccgccgcctcgcccaacctcgggctcagagcgaccgcgccacaagggatacatcattaccctactcctagctag

SEQ ID NO: 3648 - DNA, 645 bp, Zea mays
  Peptide Sequence Number=SeqID_45427
atggcgctccgcatgccctgtgacgacggtggctctcagcccccttacggaagaaagaggacggccctcttacagagggttggccgcgcggggaaggacggaacggcgctcgcgcaaggccgctcgctccctcccgcgtggacgcttgtaaccccctactgcaagcgcacccgacctgggcgcggggctaacacgaaggccgcgggttccacgctcccacgcctgtctccctccggctgcttctccccccttcgcgttccgcctcgcgccgacccatctgggctggggcacgcggtgacgatttactcgtcggtccagggaccccccggcgccaatggtcacctatggtgtcaaatccaacagctaggcgcaccggataggggcatcggactgtccggtgaccccaccggactatccgctagctcgtcgccccccatggctgactggggccccgtggtgatcgcgacggtgctgttcgtgctgctcacgccgggcctgctgttccagctgccggcgcacggccgcatcgtcggattcggcaccatgcacaccagcggcgtcgccatcctcgtccacgccgtcctctacttcgcgctcatcaccatcttcctcatcgccatcggcgtccacatctacgccggctag

SEQ ID NO: 3649 - DNA, 1053 bp, Zea mays
  Peptide Sequence Number=SeqID_45428
atgtttttcgatgggtcgttgatgaagacgggggccggcacgggcctgctcttcatctcgcccctcgggaagcacctacgctacgtgctacgcctccacttcccggcgtccaacaacgtggctgagtacgaggctctggtaaacgggttgcgaatcgccatcgagctaggggtccgacgcctcgacgctctcggtgactcgcagctcgtcatcgaccaagtcatgaagaactcccactgccacgacccgaagatggaagcctactgcgatgaggttcggcgcctggaagacaagttctacgggctcgagctcaaccacatcgcccgacgctacaacgagactgcaaacgagctggctaaaatagcctcggggcgaacaacagttcccccggacgtattctcccgagacctgcatcaaccctccatcaagaccgacgacacgcccgagcccgaggcaccctcggctcagtccgagaaggcacccgggggctacacgcacctgctggtcgccatcgacaaattctccaagtggatcgaggtccgacccctaaacagcatcaggtccgaacaggcggtggcattcttcaccaacatcatccatcgctttggggtcccgaactccatcatcaccgacaatggcacccagttcaccggtagaaagttcctggacttctacgaggatcaccacatccgggtggactgggccgccgtggctcaccccatgacgaatgggcaggtagaacgtgccaacggcatgattctacaaggactcaagcctcggatctacaacgacctcaacaagttcggcaagcaatgggtgaaggagctcccctcggtggtctggagtctaaggacgacgccgagccgagccacgggcttcacaccgttctttctagtctatggggccgaggccatcttgcccacagacttagaatacggttccccgaggacgagggcctacgccgaccaaagcaatcaagccaatcgagaagactcactggacctgcttgaagaggctcgggacatggctttactacactcagcgcggtactag

SEQ ID NO: 3650 - DNA, 1437 bp, Zea mays
  Peptide Sequence Number=SeqID_45429
atggtgacgaaccaggacgcggatgcggcagcgccaggggcaggggcaacggtagatccgatgcggctagcatcgcggtggcgatcccggccagagtggaactgcgcgtcggcggagctggaggctgagccgtccgagctcaacaccgtcaacagctcgggactcttctccgtcgtctctaccgacaagttatcggtaaaatacctcggcagccatcaccacggccacgacgtcggtgtcgtgcaggccgaccgtcccgcgccgacgcgccgagccgtgtactacttcgagatgggcgtcaggaatgctggatacaaggggcagacatccattgggttcacgagcgagagcttcaagatgaggcgacaaccggggttaactataagacccatttttttcctttgcattttaagatgtcctggaagctgggagacaaacagttgtggataccatggtgacgacggccatctttatcggggtcaagggaaaggtgaatcatttgggccaaaattcacatctggtgacataattggtgctggcatcaactacttgtcacaagaatttttcttcacgaaaaatggtactctggttggagccattccaaaagaaattaaaggcccactatatcctaccattgcagttcatagttacggtgaagagttgactgtaaactttggaaaagaaccattctgttttgacgttgagggttatattcttgaggacaaaatgaggcagcaatcagtgtctgataaattgaacttggagccagacatcagccattggattgtccgttcatatctcctacattatggataccaagatacattaaatgcttttgatatggcaaatgcaaccgatcgccccaccagtcgccaaaatggtaatgcagaacctcccgaaatgtatggtcttagccatagaaaacttttgcgtcagcttatcatgagtggagatattgactctacattcaaaagacttcgggagtggtatccgcaagtgataaaggatgagcaatcggttatttgcttcctacttcgttctcaaagattcatagaatatatcagggctgaacaactggaggttgccgtgaaatatggtcgtgctaacctggcaagcttcttcacccacaaagcttttgaggggctgctgaaagatagtgtggccctacttgcgtatgagaagcctacagaatcatgcttgggatacctgatggactcttcccagcgtgaatttgtggcggacgcggtgaacgcggctgtcctgtcgacgaaccccactgtgaaggaccctgagagctgcctttactcgtgtctcgagaggctactaaagcagctcacagtatgtagctttgagcgacgtgcattcaacaactaccaaggagatgcattcttactccacaaagaagtgcagaattatgaaaggtctaggcgctcatag

SEQ ID NO: 3651 - DNA, 156 bp, Zea mays
  Peptide Sequence Number=SeqID_45430
atgacatggccaagtaatgccctagagaaacgatcaaaagatatcgcaaacaggatgttacttgaagagggtgtactgcggcgttccacacgtgtccgggctcagccaaaggacatggcattcctcaagtacgtcaacaagtggaaggataactga

SEQ ID NO: 3652 - DNA, 1194 bp, Zea mays
  Peptide Sequence Number=SeqID_45431
atgagcttctactcgtcgattccgagaaaccccgtcaacccaccaattatgaggatcctcctacgcttgagcggcatcaaggttgagttggtaaaagactttcaaatgggggtttccaacaaaacaccagagttcctcaagatgaaccctattgggaaggttcctgtcctggagacacctgatggtcctgtctttgagagcaatgcaatagcaagatatgatgtttctgtccgtttgaacctgtgcttgtttcaggcccatattgagcagtggatggactttgctgcgacagaggttgatgccagcattggaaagtggttgtacccacaagaatcagccattgctgctttgaagagagcattcggttccctgaacacccatcttgcatcaaacacattccttgttgggcattcagtgacacttgcggatattgtgctgacatgcaatctttatatgggctttagccgtatcttgactaagagttttacctcagagttccctcatattgagaggtacttctggaccatggttaaccagccaaacttcaaaaaggtcattggtgacgtgaagcaggcagaagctgtgccacttcttccaaagaagattgctccggccaaagagcagaagcctaaggaagccaaaaaggaggccccgaagcctaaggaagctgagaaaccagcagaggaagaggaggctccaaagcctaagccaaagaatccccttgatttgcttcctccgagcaagttgattcttgacgattggaagaggctgtattctaacacgaaaaccaacttccgtgaggttgctattaaaggtttctgggacatgtatgacccagagggctactccctgtggttctgtgactacaagtacaatgacgagaacacagtgtcgtttgtgactatgaacaaggttggtggcttcctgcagcggatggatctgtgccgcaaatacgcctttggcaagatgcttgtggttggctctgagccccctttcaaggtcaaggggctctggctcttccgtggccccgaaatccccaagtttgtcatggatgaggtctatgacatggagctctatgagtggaccaaggtcgacctctctgatgaggcccagaaggagcgggtcaatgccatgatcgaggaccaggagccttttgagggcgaggccttgctagatgcaaaatgcttcaagtga

SEQ ID NO: 3653 - DNA, 240 bp, Zea mays
  Peptide Sequence Number=SeqID_45432
atgggcaggggcagcaggttggggaggaagaacagggcgaaggccgggaagacgaatgggatgtccgacgacggcaaaaacgatgccactgcgcgggtcgatgttggggctggtgtcagacaaatatggggaggaggcgcctgctcccactccctctgtcgagaatgggtggcgtggagttggaggcatgaggggagagagaaaagaagtaggatgacaaacgaggtggcgacaacttag

SEQ ID NO: 3654 - DNA, 342 bp, Zea mays
  Peptide Sequence Number=SeqID_45433
atggcccactctctcgccagtgcgttgcctacaccggccctcagtggccctctgtcagctcctagtggccctgtgccggccactaatggcccttcctcctcacccatgagccctgcctcgctcgctgcttccgtggctcttggcttccctggccccgtctttgcactggccgctagcgcaacctccttcctggctccacccagttccatggggatcgttgtgcgtgtcctccttcacaacgtcaaggttgtctggggcaccttcatggcctttgatcgggctatgaaccctgttctccgtgactgcatcaagatcgaccctcaggttctattgcagagatag

SEQ ID NO: 3655 - DNA, 375 bp, Zea mays
  Peptide Sequence Number=SeqID_45434
atgacgaggtcatcccatcgtgcggcctcgtccagcatggaggcccacggaggtgaacggcacaggcttgcggtaggagttgcgagcgtgggagccctgcgccccatacgtggtggacgacagctaggagcacgctgccgcgccgggaagagagtcgtgggcgtcggtggtgacttggcggaggaaaggacgcggagcaggtgcggctttagaagcccgacgtgggtgagcgaatgccgggaagaagcccagcgcgacgtccagctggacagggcgaagctctggccatggctggcatgtccagcagctgggcggacaggccgcggcgtttacagggccgtcgatggcgaggttagagccgtgggagggtcctag

SEQ ID NO: 3656 - DNA, 1488 bp, Zea mays
  Peptide Sequence Number=SeqID_45435
atggaagtctacaaggatgccggtggggctgtcgtcccatatgtctttccgatcctaggctgccctccaatgtgttccaagttgggctttgtggaatttgacatcgttctcctgtcgaagagcgcggtggagaaagagacagctcaaaggcgtatggagcaacaacagaaggataagaaagatagggtcgagaagaaatggaggagggtcgagcatcagatgcgctgggaccatggcatcaagactgactcgaccgacgaggacgaggatgacgatgcaagtgcaggcgaggcgacgattgacttcccagttgtggaggaagctgactttatggaactcctcgccctattctctgggtcgatggctttggtggcattcgtttccctaaccaccgaacctccagttggccgtctgtccagggctatcggcacaagaagcttctccaccttaggcccatttgtgactcctttaggcgctcctctagagatgtccactcctaccaccaaagcaggtggtgaggccggcgctccactcagatgcctccgaggcatggtgccttctgtgggacataggtctgtcgttcctcccaacctgtggcctcgatgtcatgcgcgaaaggtgatttccaagagggggaggataacacccaccatcaacgagggcagtggtgccgtcgagtttgccaacgcttccgtaaggccactccagggtcgagaccccaggttcgcttatcatgacacctccgagctatttgggactatagaaggcttggaagtcgacctcactggcgcgacagagacaacattcgaagggagactttctctccccactcacggggaggctcagtccatgccactagggctcgatggtcgagccggcttccaaactgctctagaccgctttgctaagggcgacgaccccctagcgctgtgcaagaagttgagtgaggagggtgatgcgtccgagagggcattacgggatggcctcgatcaattttcagtcacgcaccaaaaacttgtgtcgctcacagggacaccagcaagcaggctccgcctcctactcgaacaaaaggaggcatgggagcattccgctagtgatattctcgtggcgagaagcgagatccagaatgcttacaaaaacctggtcagtgtagcgaggagggatacggagtcggcaacccttgcccgtctcgagagtgcaaaggcaaactctcatcttcacatcttggagcgagggaaagcggtagctaaggcccatgtcgtggctttggaagaagagttgaatggtcaaaccaagaaagaggagaagctcctggcctctctgtcggacatgcaagggaattttgacaccgccgaaggggatttcctcgtggtgcagcgccgctcggaggagctagagagttttgacactgccgaagaggcttctcctgtcggaggtggtgaatgtgatgcaagggcgcttcagggcacttccctcgcgcgagtctga

SEQ ID NO: 3657 - DNA, 1299 bp, Zea mays
  Peptide Sequence Number=SeqID_45436
atggggtcaaagccatttgctttaaggagcccgcaggcaaacccggatcccgcgatcagttttcggtcagctcatgctacacgtggttgtggacttctgatacacatggcaatgcagtcctgcgagggggaagcagtcacagcggcggcgcccgagcagattgatcaagtcggcgaagtggtggcagccgcagcggcggcgtcggaacccgacgccacgagcgaagcgcgtgtggtggagacgccacaagaagaagcagaagaccccgagccggcgcaccgcggtagcaagagccggaccccggccccagcaccagcgtcgccatccacggtcaaggagcggcagatcccggtggacccggcgtcgctgcgccgtctgggcatggtggccgatgaggactggccactttccgcgccttccgtgctcacggaggtggtggtgcagttcccgatcctgcctcctctccgtcgtcccacgttcgttggcgccagcctgccgtgctcagcggcctcctcccccgtgcacggcgctcgtccaggtgctggcgccaagttggaggagcagcctgctgcccacagtccgacgtctgcgctacgctccctcgcccgccagcactccgccgcgctcgcccggctcgtcgccgcgccgtccacgctgtcaaggtccgcgtcccgcgccgagggcaggaccatggcgccgcacgacgacgaggagccggtccagctccagcccaagacgatcgccgcggaggacggcttcacgtgcggcgcgctgtgcatgctcttccccggcttctccaagaggaggcccgccttctccggcacaaccgctggcacggccgtgtcgtccagcatgcagaggcagcagtcgggcttgaggcctcgtcgtcgctgcagcgcgtcgcgggtggcgtcgctggagaggttcgagtgcgggtcgtggagccctcctcttccgccgccgcatgtggccgcgcagcacgacgccgtcgactgccacgcgacggaggtggccaagaccagctgcgcggatgacgacgcggaggcgccggtcaagatggcgttcgtgttcgacggcgaaccacccgcggcgaagaaggggatactgaagaactcggcatcgtcgcggctcgactcggccagggcgtcgacgtcttcgcagaggcacgtgaggttctcgacggtggcggcggcggatgcgtcgtcgtcgtcgtcgtgcccatcatcgccgtgcatcacgccgcgtctggcgagggccagggcggagttccacgcgtttttggaggcgcagagcgcttag

SEQ ID NO: 3658 - DNA, 354 bp, Zea mays
  Peptide Sequence Number=SeqID_45437
atggatcctaaaggcaaggggatgatgatcaacgacaaggagaaggaaaccctctatgttgatgagccaaaaggtgagaagcccaccgactcaggctcaaacaacaagaaagatggaaagaataagaggcacatcaagaagatcatctactacgacaacgacgcctcctcttcttcaccaagggacgatgacgatgaagactcctcgtcaaaaaagaaaatggaggaagtaccagtagggattgtcgaggagctgccaggaattctcgtggaagagggtgaacccgaagcggaagctcaggagtgtcctgaccaccgcccagttccttcgagaaaggtgagccccggcatctaa

SEQ ID NO: 3659 - DNA, 1626 bp, Zea mays
  Peptide Sequence Number=SeqID_45438
atggatcctaagggaaagggggtggtggtcaacgacaatgagaaggaatccatcttcaacgagccaagggacgacaaagtcaatgactccggctcgagtcaaaagaagaaggatggaaagaagaagaggcgcatcaggaaggttgtctactacgacagcgacgaatcttcctcttctcaaaaggatgacgaatacgaggagaaaaagaaaacggttaacttgaacttttcttttgattattctcgtattccgcataattccaatactcatttgctttccattccacttgcgtccttgtgcagggaagaatacaataaggtgagcggcttggataatgccaagcaaatctgggacaccctcaagatctcgcacgaggggaacgacgccaccatgctcaccaagatggagttggtggaaggcgaactaggaaggtacatcaagatgacgcccgaggaaatactcggaaagtttgtgagcgggcggatgatgatcaaggaggcaagatatgttgatgatgcactgaatggcccaatccacgagcctcaaaccattgctctaaaagcaacaagtagcagggaggcgctacctagcaaggtggcgcaagttgaggcggccgggctaaatgaagatgaaatggccctcatcatcaagtgcttcaagacggcgctcaaaggtcgcaaggagcatcccaacaagagcaagacgaaggggaagcgctcctgcttcaagtgtggtaaggttggtcactttattcctaactgtcctaataatgatagtgaccaggatcaagaaaagaaaagggaaaagaagaagacttacaagaaagcgaagggcgaggcacaccttagcaaagagtgggactcggattgctcttcatccgacgacgaaggacttgccgcctcggccttcaacaaatcatccctcttccccaacgagtatcacacctgcctcatggcaaaggaaaagaagcaagaatgtaatgaccacatcaagacctctggagttacttcatatggacctcttcggacccgtcgcctacctaagcataggaggaagagagctcaaaatgagtttgagctcaaggtgaagaagataaggagcgacaacgggtccgagttcaagaaccttcaagtggaggagtaccttgaggaggaaggaatcaagcacgagttctccgctccctacacacctcagcaaaatggtgtggtacaaaggaagaacaggacgctcattgacatggcaaggacgatgcttggagagttcaagacccccgagcggttttggttggaagctgtgaacacggcttgccacgccataaaccgggtctaccttcatcgcctcctcaagaagacgtcgtacgaactcctaaccggtaacaaacccaatgtgtcatactttcatgtttttgggagcaaatgttatattctagtgaagaaaggtagaaattctaagtttgctcccaaaactgtagaagggtttttgttaggttatgactcaaatacaaaagcgtatagagtcttcaacaaatcatcgggtttggttgaagtctctagcgatgttgtatttgatgagactaatggctctccaaaagagcaagttattgatcttgatgatgtagatgaataa

SEQ ID NO: 3660 - DNA, 387 bp, Zea mays
  Peptide Sequence Number=SeqID_45439
atggctgagacactggtggcatcggccgccatagatgacatcgtgggctcagcgccgctagggctgacccttcattctccatccggaaaggtcaagggggaggacgagagtgatatgacctctcctccaacgcttgagcctagtgccctacgtagaaagcctgtcaccaagatgataaaggagcaagaaatgaatgagttccggaaactacccaactttatcacaacgcgcgactattggaccgaccttggtgaggacactttggagcgacacgcttgccatgatccatggtcaactgggagaatcatgaaaggttttagacaacgttaccgtcccgatagaataccgtttttgggaagcaaggaagtgacagctgtagtcagttga

SEQ ID NO: 3661 - DNA, 525 bp, Zea mays
  Peptide Sequence Number=SeqID_45440
atggctagccagtgtgaccaccactctagtcggtgcaagggcaagcacgagtacctctctagcaagcacaaattcatgtggagctacgacaaggaggcactcaagaagaagtaccaccagaaggcaaagatcaagtatgacaaggagctcgagaggtcggttgagaataagatcaacgaattgtgcttcctcaccaactacacaggaagcctctgcatcatagagcttggtaaggatgcggtgggcagcgacgataaggacttcggtgatgactccacctcggaggtattacattctatcgatgatctcgtcactaagtcctgtagagatgacaacactaggatcaaagagaaaaacaaataccttcgatcagtcttgagctgggtgtctagcattgagccccagttgggcatgatgaggcgtcctactaggcctagaggtgttgttcctcatgctactaagcctaaggcagtgagaccacgaggtggtcatgcccagcggggtgttggtcatgtgccatattga

SEQ ID NO: 3662 - DNA, 447 bp, Zea mays
  Peptide Sequence Number=SeqID_45441
atggcgtccataggacagattggtgtcggtccccaacacggtcgcatcatcctatgcaagagggtcgtcgcggctccctcccctcctgccatgtgtttcccagtggcacaaaacctcggtctttcccctgttggcaatggccaagctgcaaggcaggttggaggcgtcccgctcggctgtgaggacatccgatgttggcatcgcgggtcttcaagcgcggttagccatcgtggaggcccgtgcatcaagtatgatactcactccacccttcatatctctccgctctctagggatgctcaaaccttcataccttctttgctcccaagcagcgcaggaggtcgagctggtggagcttcaccaagggattgttacgttgactcggagcagccatgctcatggggtgacttgtctgtggtgcttgctcgacatcccgagccatgtctataa

SEQ ID NO: 3663 - DNA, 687 bp, Zea mays
  Peptide Sequence Number=SeqID_45442
atgaagcagctcgccggagtgggcagcatagcctctctcctcctcctcctggccgccacggccggcgccgtcacgttcgaggcgataaacaacgcgtcgacgacccccggcgggcagcgcttcgaccggagctacggcgtgggctacgcggcgcaggtcctctccgacgcctcctgcttcgcctgggcggtgttcaaccagacgagccccgcggaccgccgccccgtcgaccgcgtcaccctcgtggtgaatgccatggacggcatcgcctacaccgagggcagcaccatcgtgctcaacgccggctacgtcaacaactacaccggcgacgtcaagacagaggtgaccggggtgctgtaccacgagacggtgcacgtgtggcagtgggggctgcaggactacgacgcgcactggtgggtcttcgaagggatcgccgacttcgtccggctgcgggcgggctacgcgccggcgcattgggtgcagcccggccaggggagcagctgggacaaaggctacgacgtcacggccaggttcctggactactgcgactcgctccgcccggggttcgtcgcgctgctcaacaccaagctcaagaacggctacagcgacgattacttcgtgcagatcacggggaagtgcgtgcaagagctgtggctggagtacaaggccaaatacggccatcactga

SEQ ID NO: 3664 - DNA, 414 bp, Zea mays
  Peptide Sequence Number=SeqID_45443
atggtatcaaagccagaggtctcgagtttgaatcctgacagaggctttatgtcgggtacctgggaactaggaaccagatacctccctccggtccatattgccgagcaagcctgcgaggcggagcagccgaccaggtccctgtcgagcaagcccacgaggcggagcggccgaccaggtcgttgccgaggaacttggcgaggcggagatccaagtccaatactactgacccacgccaaccacgacaggatccgtcgtcaccagactagactggacatacgcacaacacgcagaataggcgacgggaggtcgctgtcagcacaaccgtacattcccaaaggacgactccaggcatgcctcggctaccctatggggtcaatctccgccgtaggagggcctcagcaccggagtctctag

SEQ ID NO: 3665 - DNA, 2457 bp, Zea mays
  Peptide Sequence Number=SeqID_45444
atggcccaacctttagcagtcaccgaaggcgagactttctctgttggaagccgcatcatgttgagctccctcgacttcctcgtcaccgtcgtcagcgaactccgcctctccaacctcgaccgctcgtggttgtcgtcagccatcgacgaacattcgtcaacaatcgccgccacgaatcggtcgaccgagaagtacatgctacaaagcccgacaacccacgataccccctttgagccacgagaggaccacactgtccatctaaacccacgatggagacaacggggcgacgaggtcgtcgaggatgtggtcggtgagggcgaatcgccgaagggtgaggaccacctgagcgcgccaacgagggtagtgagaggacaccgagtccaacacaacggacataagggaccgaatgttgtgaaccctggcggcctgagcgtgaagggcggagacggtgtcggcatcgagccggaggtgtggggagtctcaggggccaccaggggattggtcatgctcccgctcctgggaagtagcgacaacagcctggatggtggcgatggccgcaaccaacgcggggaagcttggcagggagcgacgagtgtgttgcacagtgagggcattggggtgaacgcatgggaggggttcaaggttggcgatgaaaggggcctcgtcccacccagcgggggcagcaacccggcgcccgaaggggccagtaggccggcgttggagagttggcccgctgccacagtggcgtcagcgtccgcggcggcttcgagagcagcagaggcagcgctcggggaaggcatgctggtgggctccatggcggcgaaagaactcggctggcggtgtagctggcctgggatgacagtgggggacgagacccgtggccaggcggccaccctaggtgggggaaggagagggcggtcagagttagccagggaaggcgagcacaggttggggccgcgctggcgagtcgacggcgggggcgcgccggggaagtggagatctgcatgggctgaggggcgtcggcgtcgggggagatccgacctaggtcggacggtcgcgaggtggcgccagtcgctggggccgaacgccgggaggggagactggtgtggggggcaccggcgtcgaaagagatccgacctggggcgcctgcggagaggagggccagcctgggggcgtcggcggcggagagggccggcctggctgggagccggcggcggcagctggtggtggggaggggagagaaaagtgaaaaagaaacctagctctataccatgtgggacctacccctcgttgtcgagccaatcgtgggctcaaagcgcctccaaggtactcatggatgggggaagcatgctcaacatcatgtatgttgagaccttcgacggcttagggatcgcacgctctgcgctgcgcccgagccctacgcctttccacagtgtcacccccggccaccaggcctacccgctcagacgaatctctctgcccgtcacgttcagcgacccctccaactttcgtattgagcggctgcaattcgaggtggtgcatttcccgggggcctacaatgtcattctctggaggccacactgcattaagttcatggctgtccccaattacacataccccaagctgaaggtgcccggtcctcctgggaccattacaactctcaaggccagccccgacaccttcatgtccgctgaggacacaaaggatatccagattgatgccattgatacatccaagcacatacgcatcggggcggcgctctccgacagacaggggagcacactcgtcgacttcctccgggctaaccgtgacgtctttgtctggaagcccgtggacatgtcgggggtcccaagggaagtcgctgagccttccctgaacatcttgccgatggccaggccagtcgcccaacggctccgccgttttgatgaagaaaagcgcaaagccatcgatgaagaggagctagaggatgtgcgtcggctagtcggatgtgtcgccgcgctcagccggttcgtctccaggctcggagaaaggggcatgcccctttacaaactcctcaggaagagcgaccatttctcttggattacagaagcacaggaggccctcgacaggataaaagctttcttgaccacgactccaatcttggttgcgcctaacctaggcaaagccctcctctatgtcgcggccactacccaggtggtcagcgtcgcgctggtagtggaaagggagaacgaagtcctcattgccaagcggaagttgatccactacttcgattggcactccgtgtctgtggtatccacgacactccttggcgaaatcgtccgcaatcgggatgcgtttgcacgcatcgcaaagtggtccctcgagctcaatgggctcgacatcggctatgtccccaaaattgcgatcaaatcccaggctcttgtcaactttgtcacagaatggacggaggcgcagtaa

SEQ ID NO: 3666 - DNA, 936 bp, Zea mays
  Peptide Sequence Number=SeqID_45445
atggagaagttgaaggaatcagaagagctattggaacgcaatggtggtgccagtggcggaggcccttcccgacggccggtgcaccagcgccttggccccctggcttcgtcgggaggacatgtggcacacgttcctttggaggaggccaattatagctgcattgtttcagaccttgtgcctgtaatgcgttcagtttctcctttcctcggggctggcacacagcgtgttgaggttgagcagcccttggaaaatgtggtgctggattcaactgttcgtgtgacaaaggaagaagagatcaacctaaatcccaggatttccgtcagctctgtgcttgaaggctacggggacattaatgcccctgtcgggcgggtggaggatcgttcacttattgaagctgttgctgcgacggttgcttttggctcaattttccaagctcagcagcagccaaaccctcttgagtcgggccaggtcgggcctattgtgagggtctactctagacgacaaaggtctgcttcatcggcccaggagaatgaggccgcgcttgacacctcggcacaagctttgatttcttctatcatgaggcctatccaatacctactgcctctgcctaccatccataaacgtagatccaaggagttgcagcctgactttgttcctgtgcgcagcagcagacttgcaaaacggcatggtaggtcggtgacagcggcgatgaggcaggttcgagttagtctgattaaacacttgagtctgaatgaagatagagaagtgctgggagattttgagctggacaagcatggtcagctgttcaccaagcctctgtcacaggttcaccttgctgttctcgcggctttgtttggatggaatgctcctaacaatggcgaggctccctgggacttggaggggcttgtggtaggctctgcacctgtcgacttgtga

SEQ ID NO: 3667 - DNA, 693 bp, Zea mays
  Peptide Sequence Number=SeqID_45446
atgatgagacgtgccgccgtcgtcgtagggctcgcttctctcctggccggcgtggcagccacggccggcggcgcggtcaggttccgcgcgacgaatgccgcgtcgagcacggcgggcggcaagcggttcggccgggatgtcggcgtcgcatactcgaggcgagtgctctcggacgcctcctccttctgctggaagaccttcaaccagcccagccccggccccggcagccgcaagcccgtcagctccgtcaccctcgtcgtcgaggacattggcggcgtggccttcaccagcggcaacggcatccacctcagtgcccagtacgtcggcggctactctggcgacgtcaagacagaggttgctggggtgctgtaccacgaggtaacgcacgtgtggcagtgggacgggcagggccaggcgaacggcggcctcgtcgagggcatcgccgactacgtgcgactgaaggcgggctacgcgccggggcactgggtgaagccggggcagggggaccggtgggatcaggggtacgacgtcacggcgaggttcttggactactgcgactcgctcaagcccggcttcgtcgcgcagctcaacgccaagctgaaaggtggatactccgacgatttcttcgcgcagattctggggaagaacgtgcagcagctgtggcaggaatacaaggccaattacggagcctga

SEQ ID NO: 3668 - DNA, 1188 bp, Zea mays
  Peptide Sequence Number=SeqID_45447
atgaagacggatgatcaccatcaacaagtatctccggttcctgttgttgaagcagtagtcccggagccatccctgttgagtgtcaacaattctaaggtttttgattccacactcaactccagctgtgttttggactactcggatgatttggcgagggaggaaattgctctccgacgagctctgtttgtctctgtggctggaacacgtccagtggtccttggttcagaaattgtggacgaagttgcacgccagtttgatattgcagtgaagaacatgtcaattcatcagactttgccagaagacttccttctgttaatgcctgatgaagatgctgcttctaaggttttcaatgatgggaaggcactgcgggggcctcgtttcaccttgctattcaaaaaatggtcgagatttgctcatgcttctgcctcttctttggtcaatttagtggatattgaaattagaggcatcccagagcatgcatggtctcgttctacgacggagcatattctgagaaactcatgttggataacagatgttcatcacaattcagggtgtgggagagattctgcatccttttgggtgcgtgcttggtgtttaaacacggaaagggtgtgcagaaaattggatttgcatatccttgagcctggagatgctatccatgagaagagatgcttaacatataagattgatatctcatgtcgcccagttgatctccattcggtggcctcagctactccacctccacctctggcgcccttccgggaatcggaggatgatcaggatcgccatgagcaggatccacatcttcgtcgtcgcggtgatgctggggttgatggggattcacggagacctatccaattccgcctgggaccgcgactccccttgggcaggaggaggaccctctgccgcttcgtgttctgggaattaattgtgataccggcacaactgggaggcatgaggcgctgccgcttcgcaatccggaaattggtggagatgaagagacggatggagggcacgatgggcttgaggctgctgcatcaacaaaacaaggccagcttgctgctgaaattagatcttacaaaagcttttgattctgtctcttggcctttcctaatcgaggccgtcatattaagcaccgcaggggacttcgtcagggagatcctctctcccccatgctattcattttag

SEQ ID NO: 3669 - DNA, 819 bp, Zea mays
  Peptide Sequence Number=SeqID_45448
atgacgccgcatctgcccgccgtctcctcctcctccacgacgaccacatcccgcgccgccgccgccgctgccgcgcctccgtcctcgccgcatcagtaccggaggcggaggcggcgccgggtgccgggctgcctccgcccgcgcgccgcgtccgtccgctgctgcgccgcggcggcgcccgcgccgcaggcagcggtgcccgcggccgcgcgggccgaggcaaccacgcgggtcttcgtcgtgtccaacctgcacacggactacccggagaacatggagtgggtgcgccgcctgcccgccgaggtcggggcgggcaagggggaaggcgtcgacgcgctcgtcgtcgcgggcgacgtggccgagacaagggacaacttcgcgcgcaccatggagatgctcagggatggattcgccgccgtcttctacgtgccggggaaccacgacctctggctgcgccgcgagggcggccgctacatggattcgctggagaaactgactgcattgcttgatgcgtgtagtgagctgggtgtggatacaggcccaagaacgataggtgacttgggaatcataccattgttctcatggtatcacaagagctttgacaaggagaaggatgttagcagtgtgcgtgttccgtcgctagaaatggcttgtaaagactttcatgcttgccaatggccttcagacctgacaaatgatgatgaggctcttgctctttactttgacaagttgaatgacaagaatcatgatgctactgaagaagtgaaaagtagcagcaaacagatattaacattttcacacttcgtaccaagggcctaa

SEQ ID NO: 3670 - DNA, 435 bp, Zea mays
  Peptide Sequence Number=SeqID_45449
atggcgaaaggaattacaaattgtgttacaaggggttgtttttccagcaagcaaaatgggggaagaggaatacatggggattgcggggagattatacacagaaggaattgcaccatgcctccatctgctggggcaggcgagcttgtggagactagagcaatgcatattggtggggatagcgatgccagcggcggcctagagggatctggcaaaatcacagtggaagagaatatgggaggaagattctggcgtaatggaacatatttcacagatatcatcatcgaggattctcttcttgcacaaactcacacgggggacgagacatcgagctccaggggcaacatctttgctgaaccagaggaagccgcgacgacgttgattgagtttatggcctgcacctttggggagttggacaacgctcatgatgtagtttag

SEQ ID NO: 3671 - DNA, 729 bp, Zea mays
  Peptide Sequence Number=SeqID_45450
atgtacatccagctactcacgtcttggccaaattcggaccagcagcacctaggccacacacccttctctagtaattccacgcctttcggagatctagagctcgtgcgggatgtcaaggtggtggttgacctcgatgacgacccagataggcctaaagtagttggggttcaggtcattggcatggatttccctgacttcacagccagccgcaaaggcgtggtgctcgaaggagtgggacataccttcaaaggccagggggttgagggcgcggatgagcttgcgatgggcttgggagttgaacaagaggattgccacacacctagaggagggatgcgatttttgagggcatggtcgcagggggcatccatgtctcaaggtactgttgtggttgcctcccacgtcaccctgtccaatgctttcattggagccagaggactcaccaccctaggactggatggcgtcaagcgacgaggagccgaaggtggaggcaacgccgctgtctcgctcaaagctaggagcagtgggggccgactggcgcgaaacggtggcaccgtcgaagcgaagctcaacatgttgctaacgaagtcattggtgaagtgggatgaggagaaggttgggacgaacaagatgaacgcaacattgaggggctgcatcggccgggcaacgttcgacatggttgtaggggttggggacacgccggtgaggtgggttgcaggggtcaggggctag

SEQ ID NO: 3672 - DNA, 279 bp, Zea mays
  Peptide Sequence Number=SeqID_45451
atggggatacgcctgagaccttttgtggggacatatagtcatgttgatggtgacctcttgggccccttcggtttgctcgacggggacttagtcagccgctccgcctcgcatgcttgcttggtggggacttggttggtcgctctgcctcgcaggtttgctcgacggggacttggtcagtcgctccgtctcataggcttgctcgataaatgggccggtgggaggttatgggcctattttgggtaccttgttcctaggttcccgacagaatcattagattaa

SEQ ID NO: 3673 - DNA, 249 bp, Zea mays
  Peptide Sequence Number=SeqID_45452
atgggacaaagaaaagacttcgggatgtctttttgccaaggtgggatcttgatcctcttgtctcagtccccttcagatccaagatacagtctggccaccaccaacacggcgctcgaggctgccgacaaagaggtggttggtctccatgaccgtctagagcaggcaaataactatgtcacgagttggtactgcttccctgtaaggaaaatggaccccgggccatttggctcaatagattttggtgtttga

SEQ ID NO: 3674 - DNA, 1506 bp, Zea mays
  Peptide Sequence Number=SeqID_45453
atgccgatcgagaggcttcgcggcggtcgggcttttgctcggcgcctgtccgcccggtcgtcattgcctgccgctgccggcgaggctggtgcagcggctattgctcgtgagtgggacaggcaatatcgtaagagccgggtcaggccgcctgaacgtggacggcacccatacccaggtgagctcacgataggaagagagaaagaggggatgtggagatatgggcacgtcgtcttcgatgtgtgccaagataaactctgcacgactgtaaatggttcagcgatgatggacctattagcgctggcactctcgagatctgcgctaggctatcagctagcactagcagcgccgtcactgttcgaagagatcagcgcagcgaactcgcagccgagagatcgatcgaggccggccggggccgagatgggcagcgtcggcgtcggttgcggctcgccggacgaggagcagcagaccgagggcagtggccctctgccgccgccggctgtctgcgtcacggggtccaccggctacgtcggctcctggctcgtccgcacgctgctgcggcgaggctaccgcgtccacgccaccgccagggacacaggcaaggccttgcaggtgctcgccgtcgtggaagaagggagggaccggctcagggtgttcagggccgacatgggcgaggaagggagcttcgacgccgccgtcacgggatgcgtggcgctcttccacgtcgcggcctccatggacctccacgtatcacccgcccatcaggacaacctcgaggagcacgtgaggtcaagcatgctggagccggccacgaggggaaccatcaacgtgctgcggtcctgcgtccgcgccgggaccgtgcgccgggtcgtcttcacgtcctccgtcagcacgttgacggcggtggacgcggtggggcggcggaaggccgtgctcgacgagtcttgcctcagagccctcgacgacgtgtggcgcaccaagcccgtcggctgggtctacatcctgtccaagcggctgactgaggaggcggcgttcaggttcgcacgggagaacggcgtccacctcgtgtccctcgttctgccaaccgtcgccgggccgttcctcacgacaagcgtccctacgagcatccagctcctgctgtcacccatcacaggtgacccgaagctctactcggtgctggcctcagtgcacgccaggttcgggtgcgtcccgctggcgcacgtccaggacgtgtgtgacgcgcacgtcttactgatggaggcgccgcgcgccgaggggcggtacctgtgcgccgcgggcgggtacgcggcggcgcagctcgcgcggctcctcgcttcgcgctaccttccggccggtgacaggcacgtcgtctctgccatggctacgagtggtctcttcaggaggctgttggatctggggttcaggttccggcacgacgtcgaggacgtggtgaaagacagtgttgcgcagtgtcttgcccatgggttcctggagcatcctgagacctga

SEQ ID NO: 3675 - DNA, 357 bp, Zea mays
  Peptide Sequence Number=SeqID_45454
atggacggctcggacctgggcctctgcgacacggcctcccacgacgacgcgccggcgtccgcgcctgaggacggccgtcgtgcctgcgggagaggagctggcttcgtccacgcctgccccgggagtcgtgtcgcgacctggacggctccgaccgggtcttccacgaacgacgcggcgaccggatctgcgacagagcggcacgggccaaggacggcgggggcttgtggccggcgcttcgccgttagccagatctgctacgtaccagcagggcagacacgctcaggtcctcaggctctcctctcggtctcttctgcagctattcgagctactttctcttctatttgcatgcgtggatag

SEQ ID NO: 3676 - DNA, 273 bp, Zea mays
  Peptide Sequence Number=SeqID_45455
atggcctctgtttgtggaggttgtttagcacttcaagatgttggggttcctataaagtttcctgttgctggaattgcaatgggcctggtccttgatacacaagaatttggtggagatggtagcccacttatactttctgatattactggagctgaagatgcctctggtgacatggatttgaaggtagttgggataactctacctgtgatggagaaagcactccttcaagctagggaagggagacaacatattctaagtaagtctgtactatga

SEQ ID NO: 3677 - DNA, 1518 bp, Zea mays
  Peptide Sequence Number=SeqID_45456
atgaacgtttgtgagctcactcttgccataacccccactggtgaagagcagttttacccttccagtgctatagagcagaagggcaaaactgagcaaaaaaaaactaagggtaaaaataaggaagcaatggctggaagcaacccggctatccaccaagagcaaaggagagcctggaagcgtacgctgaggagatccaagaagatggccattctgtggtggacggcgctcaagaagtccctgagctgcaagtcgcaggactcctgcgacgtgatcaagcgggacgacgcctcgcgcggcgccagcgccagcgccaggggcctcggtctcaagaggtcgttcctgctgcagccgtcgttgtcgctgccgaggtcggggtgctcgcgctccatctccaatctgcgggacgtgatccacagcgccaggttccaggcgccaccggccgtgcgcagcaagtgcgacagcccgatgtcggtcgagagcagcgacgtccttaacgcggtgacgcacgacgtgctgctcgccgccggggggccagcatccgcgctcgccgcctcggacgtaggcgcggtgccgccgtacgcgcacagcccgctcctgatgcggtgcgccaccggcgcccgtctctcccagaggaagtcaccgctccgcctcggcggcggcgacctggggtcgcccattcccgcctgggccccctgcgtcgaggtcggggtccgatgcaaccgctgtggcgcccgcttccccaacgacaacgccctggagtcgcatcacctcgtcttccacgctggtaagcgccaccatttatacttctgtggtcaggaattcagagtcgtcgtgcttcatttcatgtctgatgatggctccggactacggttctcgcgtgcagtcaccgaggtggtgggcggcgagacggcgagcaaggtggtggaactcatatacagtgtcgggtggccgaatcccgaggccgcgctggaccgcgtcgagcgagtcgtcaaggtccacagcatggagaggcgggtggaccggttcaaggagtacatggaggaggtgaagggcagggcggcgaggctgcccaacaagcacccccgctgcgtcgccgacggcaacgagctgctccagttccacggcaccaccgtctcctgctccctcggcagcggcggctcgcacagcgtctgcacgtcgagcctgtgcaacgtctgccgcatcatccggcacggcttctcggcgaccaggaagtccaggaacagcggcggcggcgtgttcaccacctccacgagcaggcacgcgctggagtgcctgcaggaaacctccggcgtcggcgcgaagcacgcgctgctcgtgtgcagggttatcgcggggaggatccaccgcccgctggagaagctgagccaggacttcgccgtgcagccgggattcgactcggtcgccggccaggtcggtgacgattcaagcatcgaggagctgtacctgctcaacccgagtgctcttctcccgtgcttcgtggtcatatgtaaagattag

SEQ ID NO: 3678 - DNA, 564 bp, Zea mays
  Peptide Sequence Number=SeqID_45457
atgaaggctattgcccaagagtacaattttgaatgggattcatctaatactgaagcagaattcagcaagaaatttgaagatctactgaatggctcaggatcttcggtccaccaggtccagccacctaccattgagggttcagtgagctcaccagttgcttctgctccaagagatatgccgccaacattaaattcacctcaccttggaaacggcaggactatccatggcgcccagatagaggtcgaccaccgggaaccgagaagggatgctcacagggcaagggagcgccatcaatggcagggatgctcggccgcatcatttccattgacggcgacggcgcgagagcgtgaaatccggctctggctgggcacggctcatggtgtggagtccatggaaggcgcgcccttccatcgacgatattggaggatgcaacggatgtggtattgtgaaatggaggaagcagctgagagcagaaatccgactctggctgagagcagggaagccacttggagagattgcaccaccgcctgcacgaggagcaggagcgtcggcgccaggagctag

SEQ ID NO: 3679 - DNA, 711 bp, Zea mays
  Peptide Sequence Number=SeqID_45458
atgaatcaaacagctgatcccacagtggaccaggagatagtaaaatttcttatattttggaacacgaaaaatataggcgaggaccagccggtcaatttcatcagcccaaccacttgtgggtgcagtgcaacatgggtttggattgacgaatttttctcaaccgtcgcatggatccgtgaaccacctccaacaaatcctcaacaaatcactgctcatccgatcgagagcttcctgctcacgccgcagagcagagttcgagctgagtatgggaaaagtgacccaaatacaaggagggatgtcaagagcaaagcactggataacaaagagcttgctgaccagctggatcttgggcagaagttacatgtctcgtgggtcttgatgggaggatactcaatttggagacgcctccggcaggccttcaagaaattaattgtgccagagcagaggaccctctgccccctggattgcaaacaatacaccttcccctctgctgcaagagccatgcgccaccctgaaatattctgtgggcatgatatggaggttcttcagaagatgatgaataaatcaaggcaacaaggtctttgtgaatcaacccaccgtgatttatttgtcttctggaagttgggaatttgtcccataaatactaccgatagatgggccaaacgaaatctcaaggcactcttgggtaggagaagagacctcagctgttga

SEQ ID NO: 3680 - DNA, 591 bp, Zea mays
  Peptide Sequence Number=SeqID_45459
atggttggttcgtactggtgcagtctgatcgatccatgtctgctggcattattggcacctgacagctcagatcagctggagctggtcattctcgtgcatggcagatggatactcctacaccaggccgccgccggcaccaccaccaccaccaaggctgcacggttaaaccaagtggatgacaaatgggagaaatttctttaccagagtgctttctgcttgagagctaacgaaactcagtgtggtgttctttgtggacctatcgggaaatgttctatccacctgttgaccttggggaacttgggccaggagtgctgtggagggagtggagcagttcagagggagatcgtgggggattgcagggagagctggtgcagttgtggaggtcgtggcgcgcgggggtggggagccctagcgatgacggcgcgcggggatgggcctcgtggcgcgcgggggtggggcgccctagcgatgacggcgcgccagggtggagcggaggaggacggcgcgcggggtgggcctgtggaggaggacggcgcgcgggggtgggcttctctgggccacaagcagatgggcctcccagaaaaagtgtaa

SEQ ID NO: 3681 - DNA, 240 bp, Zea mays
  Peptide Sequence Number=SeqID_45460
atggtttcctacatcaacgtcggatgctactacttcatcgacatacccctcggcgtgctcctcagattcaggttcggttttgggatcaagatcacgctgaggactgactggaacaaggagtttatatgttcttttttcttggcatctgaatgtaagttgagggagcgcggaaaagattggataagtgggacgatacaaggtggcctcttctcgcagtcaacaagtgatggatggtattag

SEQ ID NO: 3682 - DNA, 318 bp, Zea mays
  Peptide Sequence Number=SeqID_45461
atggcacccacccagttcactggcaagaagttcctcgacttctgcgaggaccaccatatctgggtggactgggctgccgtggctcaccccatgacaaatgggcaggtggagcgtgccaacgacatgattctgcagggacttaaaccgaggatctacaacgacctcaacaagttcgagaagcggtggatgaaggaactaccctcggtgaatcccgcaaaacgaataagatcgcacgtaagcggcaaggccgaccgagccgagggactcctacgcctccgggatacggatacctcactcgtcgccttccacaaaaagtaa

SEQ ID NO: 3683 - DNA, 852 bp, Zea mays
  Peptide Sequence Number=SeqID_45462
atggccgcctctgccgccgccgcggggcctgctacctttctcccgcgcctcccctcgccacggtctccgtctcctatgctccctcctctcggacggagagcccatcccgtcgccgctccgctctgtctctccgccaagcgccgcgcctgcgccgccatgggctccagctcctcctccaactcaggaaatcaaacgtcactgatgctgccgttcagctttacattcgatgaagattcttctagttccagaaggctatatagatggaaaagggtattgctcaaagtaagtggggaagctcttgccgggaatcacacagaaaacatcgacccaaagattacaatggctattgcaagagaagttgcttctgtcaccaaactaggtgtagaggttgctattgttgttggcggtggcaatatcttccgtggggcctcttgggctggatgtagtgggcttgaccgctcatctgcggattacatcggcatgctggccactgtgatgaatgctatatttcttcaagcgacgatggagagcatcggaataccgacccgtgtccagactgccttccgtatgtcagaagttgcagaaccatacatacgccgaagagctgtcagacatttagagaaaggaagagttgtcatatttgctgctggaacagggaacccattcttcacgactgatacagctgctgctctccgttgtgccgaaattgtcgtgtttaacttgcaagagcctggaaacattgcaaaggctattgtcggtgagaaggttggtaccttcatcggatgcacaagagatcaggagctaaatggaaacacactggttcaagaaagaagattggttaatgaggcgtga

SEQ ID NO: 3684 - DNA, 522 bp, Zea mays
  Peptide Sequence Number=SeqID_45463
atggccgtcaggtggggccctctactcggcgatccgcgcgagcgtgtgggcgcgtcactgtcgaccaagtccggcttcgggcgccataggaagctctgcctcgcccgaccccagggctcggactcggcctcggctccggaagacgacgaactccgcctcgcccgaccccagggctcggcccccgtctcggccccggacgacaaactctgcctcgcccgaccccagggctcgaactcggcctcggctccggaagacgacgaactccgcctcgcccgacccgagggctcggacttagcctcggctccggaagacgacgaactccgcctcgcccgacccccggggctcggactcagccttgtcctcagacgatggtctccgcctcgcccgacccggggctcgaactcgacctcgacctcggaagacagactcgacctcgacctcggaggagccaccgcctcacccgacccagggctcggaccgaccacgtcacaggggggccttcattaccctacccctagctag

SEQ ID NO: 3685 - DNA, 1248 bp, Zea mays
  Peptide Sequence Number=SeqID_45464
atggtaagtacatttgaccttgtggacagatgcatagaggagattggggaggcaaatgttgtccaagtgatgactgataatgctagtgtcaatacagcagcagcaagcctattgacagcaaagaggccctcaatattttggaatggatgtgctgctcattgcctagatctcatgctagaggatcttgggaagcttgagccagtggagcaaactatcacaagtgcaaggcaggtcactaatgtcttgtatgctcacacaagggtgttagagttgggttacttgaaaaaggacaagagaaagaaagccaataaagttgtgagatctgcaaccttttggaaaaatgttgatatagctgtaaatttttttgaaccattggcaaatgtgttgaggagactggacagtgatgtaccagcaatgggattctttcatggattaatgcttgaggcaaagaaagaaatttctgagaggtttgacaatgatgagagccgctacaaagttgcttgggatattattgataagcggtgggatagcaagctcaaaactccacttcacttagttgggtactacttgaatccttacttttattatccaaagatgtctaaaattgagcatgatggatcctttagagctggagtgattaattgcattacaaagatgattggtgatgaagaaacacaagacaaaataattgaagaactctacatgtaccaagatcaacaagggacatttggacatgaaattgccataaggcaaaggagaaacaagaactttaatccagttcctcagcttgtgagagaaattggtccgtatttgaataggtccatacaaaaaaggagaaacaagctacttgatgataggatgagaggccttgtgtttgttaaatttaactccaagctaaggggaaagaaggagagaacagacagagatcctttacagagggaagtagatgatgttgttggtgatgatgaaaatgaattcattactggtattgtacctcttccgaatgatgttgttgaaccagcgcaagatggaagatcacatgaagaacaaacatcacaagcacaagttcaagtacaagcaaaaagaaagaggtctatgaagcctaggaagaagttaagaagcctgcagtctctgatgcgtgatgttcaagttcaagtgcagcagtcctcatcggattcagaagatggtgacattgcaatggaatcctctgaatctgataagtctccacatgcctttgattctgattga

SEQ ID NO: 3686 - DNA, 270 bp, Zea mays
  Peptide Sequence Number=SeqID_45465
atggagaaggggagccagtgcgtggggatgaaggagtgcagcagcgacaccgtggcgatgcctccgatcgtcgacgcctcttccgcggtccaccgcaggccgcccagcccgccgccgccgtccatccgctgctcgatccgattatggtataaagcaaagagacttattttcttacaaccctctattttgatagatacatggtacatggcgagaaaagaagtagcgaaaataaagttgatccagagatttattctcggacacgtcttgtaa

SEQ ID NO: 3687 - DNA, 738 bp, Zea mays
  Peptide Sequence Number=SeqID_45466
atgggcaaccactaccagacgctgggtgtccggcaggacgccaccaaggctgaggtcaaggctgccttccgtcgcagcgcgctacgcgaccaccctgaccgccacgccggctccaccgacgcggccgcccgtgccgacgccgccagccggtttcgccaggcgtccgacgcgtactacgtcctctccgacgacagacgccgcgccgagtacgacctccgtcttcgcggttccacgtcttcctacgcgcgcacctcctcctctggttgggcctcctcgtcggcttcctacgggtacggccatggcggcggttcgtggcgacggactcctccgggtgcaggtgccggcgccggcgcctcggtggggtcaattgattgggaattcttactgaaggcggtcactcggcgagggttccttatcaatctgggattagccagtgtattgctatctggggcaacttttcttgattggactattttagaaatttggaagatgaataacaccgggttttacactctgcagcggttgcgccttttacccacaagtcgtgtatctcgtctagccagggtttgcaaggcccttagacactttcaaggtagatcaatagcaaaactactcaagagtttagtggtaaacaaggtaaagaagagtgatcaagggcacaacttgcctgtaactcgaatttccaggtactttaccaagttggtcttcggtgactcgcaacctcgctgctactcgtag

SEQ ID NO: 3688 - DNA, 678 bp, Zea mays
  Peptide Sequence Number=SeqID_45467
atgtcctggccactcagtcgttcgccgcgtcgatcgcccaggaagatctgcgatgctctcatcgttgccgaggttagtggccgggtgaggctccctcttcttctccctttatccctctccttctctggctgctccctccctccccacgtgttcttcccctcccctcggtgcctggccatgcgcgcggccgagctcccctgcgcgcggctgggctcccctgcagcgcggccaagcctggcagcccggcacggtgtcgcgattttgcccgtggccaggcaccttctcccagcgagaacccgcgtggagcccctgtcctgttgccccaacaagcggcgtcgtctgcccattctagccatggtcgaccagcccgcccagtccctgctccctccccaatcccgcgcggtggcgtgctcggcgcccagctggtggcttgccttgcgcctcgcgcctcccctggccgagcggcctgcttgccgcagaagagagatctcagagcacaggaactgggatgtagttcgcttcgccgtcgtgccgttaatggggctcggtgtatgcggctcgctctgccaaggtggtcatgaggaggatggttatgattatgactatggtaatggtaaagaagaaggcgtcgaggtggatctccaggagttccaggacttcgacgagttcgaggattag

SEQ ID NO: 3689 - DNA, 690 bp, Zea mays
  Peptide Sequence Number=SeqID_45468
atgtgttgcggggtccgaccggctgggtttggcgaaatttggcagagtttggggggttcaggcgcgagctcgagcggcggttccgcgggtgtgccgcggctggtggtggaggaaggcacggtggccggtggaatcggcgaaaggcagcggtggccacagatcagtaccactaccgggtgcgcgtgcgtcacgcgggattctcgtcggtatgcggtgcgttatgcttgtggagttgtggccttgtgggccagtgagaagtggacgtggactgaaggacagcgccgcctgcgccactccgactgcagtgccactcgacagagtgagtctgacaggcaattaggccttgccaaaggcgccacggcgaactccgctccgcccgaccccagggctcggactcgggctaagacccggaagacggcgaactccgctccgcctgaccccagggctcggactcgggctaagacccggaagacggcgaactccgctccgcccgaccccagggctcggactcgggctaagacccggaagacgacgaaactccgcctcgcccgaccccagggctcggactccgccctggcctcggccggacgacttccgcctcgcccgaccccctggctcgggctcggccacgacaactggaggcaagactcaacctcggcttcagaggaaaccccacgtcgccctgcctag

SEQ ID NO: 3690 - DNA, 513 bp, Zea mays
  Peptide Sequence Number=SeqID_45469
atgcgggcggcatgcaaccgtgccaagtgggccgcttttccgactcccaacacgcccagcatggaggcccagacccacgcgtcatgcaaccggcgcgccgaatgcttcgcgtctgcaactgcaccgccacctgcgccaccaccgcgcctcctcgactgcggaaccaataccgcgactcgaggcgacccagcgcacaacctagcgactccagcctggcgcgacgggaccgggaaaggggataccccggaagggatccttccctatgaaggaaccaggctccgagcctccctactgatcagaggttcgaaggctggcccctcggaagggttcaacagccgccttagagcacgtgggctccacacccactactggtcaggggttcgaaggccggcccctcggaagggttcaacggccgcctcaggctactcgggctccgcgcccactactgatcaggggttcgaaggctggcccccgaagggttcacagccgcctcagacacagagcaagggatga

SEQ ID NO: 3691 - DNA, 1404 bp, Zea mays
  Peptide Sequence Number=SeqID_45470
atggacgtggttgccgtcgccaacgccaagtgcccccgtccggcgtttactggatggaaacccagcgaaagaggacagagaacagtgcctcggaaaacgaccggtgcagtagctagcggtaggagtatggcttctgccattcctgtaggatacctacagatgcttcctcggcccgaccgcgaccgcgaccacgaccacgacggcccgacccccgctcgtgaaccactagaggacaccggcctgctgtcatgtcacgtcggtacagcgtacgcgtacgcgcttgtccgtcagcccgtagcatggcacatgtacatccacatcctgaggcagcagcaagatagagttgagtcagtcatgtgcaactccaacgtcaagtccgcgggcgtcgcccagatcgacggccgcccggtgctgcagccggcgggcaaccgcgtggcggcgccggacgccgcccgcccgctcaagaagtccctgcacaagtccttctccatgccgccttcctacgacaacaatgccaccgtgcccgcccgtcccgcccctgccgagaacacccgtgcggcgccggcgccgccttctctgctgcctcctacgacgccggccccggccccggccgccgcgagggcgaccaaggcggcgggcgccgtgcccgcggagaagcccaggtccaaggccaggaagcccggcgccgtgctgccggtggcgacgttcgcggcgccagaggcgttcgagccggcggggagcatcgccgcggcgcggcgggagcatgccgcgcaggcgcaggcgcagcgcaagtcgcggatcgcgcactacggccgcaccgcgtccttctcccgggtggagggccgagtcggcgccaccgccacggccgagccggccgtcccagcctcccccaccaccgggctcgacgagaagcgctgtagcttcatcacgccctactctgaccccttgtatgtggcgtaccacgacgaggagtggggagtgcccgtgcacgacgacgaggaggcgttctccggcttcgacgtggatgcggtcgccaagtacaccgagaagcagatggcgtcgctgagcgccgactacgggctggatttgggcaccgtcagaggaaccgtcaacaacgcctgccggattcttgaggtgcggagggacttttgctcgctggacaagtacgtgtgggcgttcgtgaacaacaagccgctgtcgccgagctacaagtacagccggaagatcccggtgaagacgtccaagtcggagtccatcagcaaggacatggtccggcgcggcttccgcttcgtcggccccactgtcatccactccttcatggaggcggtcgggctcaccaacgaccacctcgtctcgtgcccgcgccaccgcgtctgctccgccgccgcccgcgtaaataactga

SEQ ID NO: 3692 - DNA, 228 bp, Zea mays
  Peptide Sequence Number=SeqID_45471
atggccgctcggtcaacacgctacgaatccatggggtggtttcggctccgggttctgggcgtcgtgggcgagctggagagagtgggcagcagggcggttgcgtcgcgggtgctgcatgcgcgctgctggtgggacgcgagcggcgcgacggctgggatagggcgcgcacacgcgtgcaaggcgctgggctggcgctgctgctggcgcgcgaggggagtgcgcggctag

SEQ ID NO: 3693 - DNA, 1143 bp, Zea mays
  Peptide Sequence Number=SeqID_45472
atggcaatggcaccacgcgcaggagtgttggaggaggctaaccctagccgcccatccgcccgccgtgaaggcgtcgatcaagttccgggacgacgaccgaccgctgctgcgcgccaaggtgtcgatggcgtgctagggctgcccttcctctcaggcctcgcggcggggggagacgccaaggacctccgttttgacctctccaccgccttcccctctgtcccggcgctccgcctctcataccgccccaacgaacccctccagccttttgccctctccgtccgcacggggtcccctatccgcgccccattcgccctcgccgccgaattcaacctcacctcctccaacccgcccgccttctcgctcctcttcaagccccggatcggggacttcgccgtcgcaagctccgtccactccccgccgacaccgccgcccacatccactccgcccccgctagcgatcaagatggtcgacctcaccaccaacagcgacgaccacgactgcgaagcacacggtaacgacctctccttcgccgagaatgtattcggggcgaacgtggcggccgccaccgggacgaacggcggcggcgtaggcgcgctgctgtccgggatgcggctcacgaccaggagcgtgctgccactgtggagtaaagcgagcctgtggttccagtgggggctgcgcgtgccgccggagatcaaggccacgcttgcagacaacgggtacgggcgcaaggctgggagcctcgccatcagcaagctgccgctgctggtgatgaacaagatcactatcgagcacacgcccaaggtgccttcacagtctgaagcggacaagaagaggaagaaagacacaccaccggcagctgaggatgaagagttctcactcatgaagaggcaactggataagctgaatgcggagagcacaatgctgcgtcgtgcagtcgaggacttgagtgcagagattggagccggcaaaggcaatgatcgtaagctgccaacagcagtgccacctcaacaacatactttagtgtcgaaaccagatcgtcatttccacataaatgcgaaggaattggtagacagtgggacgaaaccggcctcaaatgaagcaagtgaggagttgaagaaggtgcttgagggccgacggaagtaa

SEQ ID NO: 3694 - DNA, 2100 bp, Zea mays
  Peptide Sequence Number=SeqID_45473
atggacgcggagagagacatcaagcccttcgtctcccctatcatggccaccaccatccagcataggcggagcctccatggccccaacgcttctcagccaactgcattggcatcggagcacgatggcactccagtgttaccgcaaactcagcctcaagcagcatgcgtcttgaacaaggccgcttcagaggtgtcaggtgacgtcagcgaccagtccattagtgcctacgagacactcgagggtacctcgactcgtcggccttgctctgcaccacgattgagcaggaaattctggggcgccggcgattatgacgcggcggcggggaggtccacgccacaacctctaagtctacagaatcgcatgtgcgtccaccccgaatttctccactctaatgcgacttcacataagtggccgtttggagccttggcagagttgttggacaatgcagtcgatgagatagaaactggtggtgctacaacaatattgttggacaaagtcaccgacaaacggaatggatcaccagctatactaattcaagatgatggtggaggcatggatcctgattctttgaggcggtgtatgagctttggattttcagagaaacaatcaggatcttcgattggacaatatggaaatggttttaagactagcacaatgcggcttggggcagatgttattgttttcagtcgctgcactaagagcagtgggcctacacaatccattggtctcctctcttacactttcttggtggaaactggacatacagatgttgtagttcctgtggtggattataaatgcaatctaatgaaaggacaaactcaacgactggagcgtcatggttcggaacaattcttctcaaatttgtcagcattgttgaaatggtccccttttgcaacagaagaagagctgatgcagaatttctgtgacattggtccacatggcaccaagattatagtgttcaatctgtggtccaacgacgatggtaatttggagctcgactttgacacagatccggaggatattatgattagtggagcgccaaatccagaagaaattagaaattctgtaaaaagggctaatgagaaccatttggcaaatcgactacgctattctcttaggctaccagattactttaggatcatacttcgagggcaagaagttaagcgtcatcgcattgccgctgacctaatatatcctgaatgcatcagttataaaccacatagttgtggaataaaagagccatttcatagagttctgaatacttcaagcagcaaaggtagaagcgtctctggggtgttggaggtagacttcatcaagcccactcatgacaaacaggactttgagaagtcacagctgttccagaagctgatcaaccgcctgaaggagatgactaacgagtactgggaactttacagtgacaagattggatacatgaaaaagccacgcgtgagtgcagctcctcttcctcctccagtaatgctgccgatagcaaatggcactgctgaaccatcagataggagcgcacctgctccgacgcaacccttgaggtcgcacagcaactacttgaatgcagttccaatcgcctcagcgccccctggttttcactcagcacctgtcaaagcagagagcgttgcaccaggagcgcatatgggctactccccgtcctcgctaaacgcgcagaccatgcaagtcaacgggataaaatcgccttccatggtgcctgccaccgattcggtagacacaagaaaaaggaggaacgacgacactactactatgacggtcgcgtttaaaaggaaggctacgcaggatttggctggcagcagctgtgctactgatgaggctagtacagacaacattgctgttcgtccttgctactaccttgttgcattggtgcactttgtcgccttgatccttatgcaatctttatgttgcattgatttctctagacaaaacaggtgctcggattttgttatggcagagaaggcactacgactcaaggaacagaatttacggctcgagattgagaaggcgcgggagcaattcaagagcctactgaacgaatacgtttcgttgtcagctacgccgacacagaaacggtag

SEQ ID NO: 3695 - DNA, 390 bp, Zea mays
  Peptide Sequence Number=SeqID_45474
atgggcaagagcaagaaaggtgggagttcctcacaccatttcggcgataagcggaggcgcgagccgactcctccctcggaggacttcggcgattccgagtactcggaggagttctcctccgagtcagaggaggtgtggacctacatccgagccatcgagcgcgccgggctcgagagctcggatgagtcggaggtctcctcagacgaggagaactcctcggactcgtccgaggagggcggcggtgacggcgatggcaagggcgacgacgacgacggaggcgacagcgatggcgacagcgatggcggcaaaggtggcggcaagggctgcagtggtgacggcgagggcggcagcaagggcggcagcaagggcagcaacagggctagtggctag

SEQ ID NO: 3696 - DNA, 375 bp, Zea mays
  Peptide Sequence Number=SeqID_45475
atggttgtctcgatttatccgcattatgattcaagggaagaaaagaacaaggatgaagcttcttcagatttgcagttgatgctgagcaagattgcgacctggtctccccagagcaatgctgacgaatcagatgtagatgagctggagaagctggaaaatcttctgagaaatgctttgaaggatacgagatccaggaaggtacgattcagatgttggcgaaacaaaacagcggagctagtacaagcggccagaaaagtccggagcaaggaacggctatatacagcatactactgtgttttagttcctacagacacttgctcagatgaaacaactgggctaggaaaatctatcgagcaaaatgatggtattgcataa

SEQ ID NO: 3697 - DNA, 429 bp, Zea mays
  Peptide Sequence Number=SeqID_45476
atggacggctacgggcagagccgtgcagtcgtctgcgacgcgaccgtaccgcacggcgagtcacaggccgaggcggccccacgtcacgagggcacccgcggcgcgtggacggcccaggaccccagtttcttctgtgagtggaatcgcgaggaagaaggatgtcgtgctgcggaggcaactgcgggtgcggcgccggctgcaagtgcggcagcggctgcggaggggagtatgcatgcaatgcaattgcatgcacataggtgggtatggtgcaagatgtacccggacatggcagagcaggtgaccaccacccagactgtcatcatgggtgttgcaccatccaagggcgggttcgaggcggccgccggagctgagaatggcgggtgcaagtgcggcgccaactgcacctgcgacccctgcacctgcaagtga

SEQ ID NO: 3698 - DNA, 498 bp, Zea mays
  Peptide Sequence Number=SeqID_45477
atgcctgttaatgtggttatcttctttttggacaggaatttgagctataattcactgactggaagcttaccacctggtttaggtcaaccttcacttgtgtcactggatatttcatcaaatgagtttactggaagcattcctggaaccataggttcatccaagttacagactgccctctcaggtaataaaggtttgtgtggcgtgcctaccttacctgcttgtgcattattctgggagaaaggagggttgaacaaaactggcaaaattgcacttggagcatcgtttgggtttgttctgctcgtcatacttatagtggtctacatactgtgcatcagaagggggccatatgactatgattttgacttccctcaagatttgacctccatatcagcaatatcagcgaaaaggaataggtaccagagggcaaaatccgtgatgcttgctgagatggaggcacataacccggatggtttctacacaaacgggagccctcactaa

SEQ ID NO: 3699 - DNA, 216 bp, Zea mays
  Peptide Sequence Number=SeqID_45478
atgaaggtgagaagtagaaggtctaggtcgaggcctctaaggttgcctcagagaagcctgctggcattgcaaagacccctaccactgaagaacatgtacgagctgttgttgaagagtcttgttctgaacgctcagaaaattgaggatagtgtgggcgcgttgccagcaacggacgacgaggttgcgcagatggggaggatgcgctcacggaggtag

SEQ ID NO: 3700 - DNA, 2196 bp, Zea mays
  Peptide Sequence Number=SeqID_45479
atggcgtctcctcgccgccgctccctcccactccgcttcctcatcttcatccctgcccccctcttcctagtcctcctcttccaccgctcctctcattctaccgccccgcttctccacaccgcaggctctggctccggccccagctctgatccccgccgcttctccctcctcatcaagctcctcgcctacgaccggccggccgcgtttcgccgctgcctccgctctctcgccgcagctgactacgatggggaccgcgtcgcgctccacgtcctcctcgaccaccgcccgcccaactcctcgttgccccccctcgccacgtcgcacgagatccttgacttcgtcgatgcgttcccgtggccgcacggagagaagcgcgtgcactaccgcgcctccaacgcggggctccaggcgcagtggatagaggcatggtggcctggctccgacgacgagttcgccttcgtcgtcgaggacgacctccaggtctcgccgctctactacaagttcctgaagcggctggtcctgaggtactactacgaccgcgagaactacagcccctacctgttcggcgcgtcgctccagcgccctcggttcgtcgcagttggttcagctaattcagtttttggtaaatcaattgacatcgcctcagcagggcggcacaaacacaacactgcaacatctactgacctcatgaacttttcaattttattcaaggaaaccgtaaaggtcaatgaattaccaccagacgcgcagggcagcggaagccgtctcgatgtagacatacgcgttgagcactgtcgtgcagttgctggtgtccttcacgtcctcgcgcggttcgtcctagtgctccagatgcagcacctccgaggtaaacatggaaacaagatacagctggatagcgagactcggcttttcttgtatcagatggtaggcacgtggggtcaacttctctttccaaaaccatggaaagaatttcgattatggtatgatgaccacaaagccaaaggactcaaacctattctccaaggcatgaaaactacagggtggtataagaagatgggtgagagaatatggactccttggttcgttaaattcgtccactcacgtggatacttcaatatatacacaaacttcctgaaggaaagggccctgagcgtctcccatagggatgcaggtgtgaactacgagaaaagtgttgggccagattctactttgttggatgggaagaatcttgatttcaatttatgggaactgcagcctttaaagaagctaaagtggtatgatttctgcttcaatgaagctcttccagggagaattgttagaaaaaatagtgaactcggttctatgctcaaatccctgcaattaaaaagtactgttgttctcgtaactctgtactcaatagaagagagatttgcaagaaacttgatttgccatcttgacaaggcaggcatgaagaatactattttccttggtgacaattcagagtttctggatgaccttgctcatagaggatatcctgtcattgatggcgtcaattttcttcagagtatcagattgagtagtttgcagggctctgacggttttgttcaggaaacattggttatatcttatgtgataaaagcttgcctggacctgggatataatctatggctactaaatggaaatatgatttcacttggcaataagttgatcgagccatcagatcagtctgttgacttctttactgcagatgaagggttgatgtttataaggagctcgctagacatgaaaaacaaatggaatgaacttgccatgtcgagagtgaaagcgatgtgtacatctagtgatctgtctgtttccatcaaacagaagagttttgtccatatgctaactgaagtgatggcgagcagtgctggtgttaggctgggaaagctggatgaggctatgagagttattgagttagggcctaacacctcaaacagatcaatattagaagacaaaaatcgatcagagaacccggagatgattgtgcagcagcaactagaaagtagcaagtgtgtgctgccgaagttgccagaagcgatttcccaaccagagttggcgctcaatgttttcttagcagcgccgatttcctccccacctgaacaaggactggggaggacatgtgcttcgcccaacgcattcggatccgaggtctccattggcgcgttgctcggatag

SEQ ID NO: 3701 - DNA, 357 bp, Zea mays
  Peptide Sequence Number=SeqID_45480
atgtcgaatgagttgtgtctctacgccgccacgttccttgctcatatcggtcgttttgacagcttgtcatgcacaacaacctccctgaacaccacgagcagccagaggcaaggccacgaggcgtgcgtacgacacaggcattggagaggtcaccgcgtctgcaagggacatgtgttcaagatgctgctactgtgtgggcgaccctgcgtcgctgagcgtcgggagcaggggcgggcagtaggcgtagtcacacatctggactgggtcctccactacggcgacgacgaccagaaggttggaggtggcgcgaagaatggcgtgcaacgtttcttggcatggaaaatcgaaaagacatag

SEQ ID NO: 3702 - DNA, 498 bp, Zea mays
  Peptide Sequence Number=SeqID_45481
atgacgcttggagcagcaatagttcttgtgaaggaagaggaaccaactattgggaattctaaagaagaggataatcttgacatcaacattgaagaaaacaataggaactatgagaagttttacataaatagtaatggtaatttctatgcttgtgttgagatgattgcagagtttgacttagtaataaagataaacattgatgagtacttttgggggttcctgaaggtgaacgacacatctgattcaggaatttttaatatattgattgatgatatggagtcatttggcctaaatgttaatgatataagggttcaaggctatgacaatgtgagtaaaaagttgcaaaagccaaccacgtgcattgactctactttggatctaatacaagtacagggacggtggtcggtgaagattatgcgggttcgtgctgatgggccaggagcggtgaaggacgagcgtgtggggaacagatatcccccgggtccaccaaaaggataa

SEQ ID NO: 3703 - DNA, 1017 bp, Zea mays
  Peptide Sequence Number=SeqID_45482
atgcggcttaagccatacatacagcaagattgttcgcatattgttagttggctgaaattgcttcgacgttactttggagaccttcttcatcagcctatctcacaacatattgctaaaccagaaaattgtttagaagattctccgtttttattggacatggtagatttagtcgagagtcaggataagtcaactcggcacttgcaaaggcaagctatctatttgttccttagttgttccatatgtttgtcttacaacagaaatgatggtgcacttcagtgttcatgcaagcgtgatgagtgtttgttgggtgacaaagtacaaggctgtagtaatcattgcaactgttttggcttatccgaaatttcagactggtttcagaagtgttatctaaatgggagtatcgactcaaaatcatcaagtttcgcgttatcctttctggaattgtatatggaggaggatgacatgctattcagcatcctcttacaacttttagatgctccactcgttttcctaaaaatagctaacttcgaaactaaggaacttgttggtgtaaaactgttctcaagcatttttgacccagttcaccttttccatctgctgctttttctgctgcactatgatcacatggtactcgttgattatctcatatctagggatgttggtgtgctttgtgctcagtatctattaaggtgtttgcgcttggtttcccagtcttggcatgcttttgttgatgattcagtttactcaacaaaaatagaaaagcttaactgtaaaaggcagaggatttctggggataaagatagcgacagagccagttcaagtaaccagtataagaatggttctggttgtgataaagaagtcgaggattcacggaagcttttcctcgatgctaaaaaatgtctttatttattaaagagaacgttggaagatctgcaaaagaaggatttgttcccttacaaccccaagcctcttcttagaagcttggcccggttccaggagctgggtgagcaggggtga

SEQ ID NO: 3704 - DNA, 621 bp, Zea mays
  Peptide Sequence Number=SeqID_45483
atgggctccgtgttccggcaggccaaggagatgcttggttcggtcaactcgtcggtgtctgatctgcagtcggagaatgagctgcagctggaagtgttcggtgccatcataggagagtgcgtcaatggcctgcaggaggagctagagaggaagctgtacgcgcagatgagcatcacaaacaccatgagcaggaactggaaggaagccataactcagtttgccaccatgttgattgctgcatctccacgtctacttaatgtgggggatccttcctttggcaagtccttggtggcaagcaagaaaaggctggttggagatgtggaagaacaacttgagccagataaaaacgatgatggggaggcaagcgtcgcacccgccccgattttgattccaaggacgaatacaacattcccgccggactggcgatcaccgtacctcctgtgcctcgaggtggagccgcccgtctgcgactcgcgcagaccacatctaacgcgtgcggcgctcgtccggctcacgggcaagcaccccttcaacttagaaccttcggtgtcgtggctgatggcgcacgacttcatcaccccggcaccgcaccactaccactactggaaaaatatcggctag

SEQ ID NO: 3705 - DNA, 312 bp, Zea mays
  Peptide Sequence Number=SeqID_45484
atggggatgaggcgggcgcagtggcgggcttcgcggggacatggcggcgtgaagcgcggcggggtttgccgctggtggttagagcaaggcgacgggagctgggacgcgagcaagaggtgggggaggaagaaaggccgaaaggggtgcggcgataaggatggaggccgaaaggcggacgcgataaggtttgaggcgggggcattggtagtggtctacactatcatcttaatagatagtagagatttaggaggtgaattgactctttccgcaaaagtagcatacagttgccaggagatttatctcacttcgtga

SEQ ID NO: 3706 - DNA, 204 bp, Zea mays
  Peptide Sequence Number=SeqID_45485
atgcagaagcggaagctcgcccatatctgcgacctcgtctcctcctccctgcttctccacctcgtgaacaagacgatacggcgatgggaccaggaggaggatgagtgggcttgtgaattgtttcaggaaactctttctgattctggagaagttcatagttgctgcttactacctgaagcgcgtccatatgatggattggtttaa

SEQ ID NO: 3707 - DNA, 408 bp, Zea mays
  Peptide Sequence Number=SeqID_45486
atgtccggtgcaccagaggactccaactcaaactcgccaccttcgggaatttccagaggcactcgcgctataattcaccggactgtccggtgtacaccggacagtgtccggtgcgccaaggaggagcggcctcaggaactcgccagctttgggaaactccaacggctagtccgctataattcaccggactgtccggtgtgcaccggactgtccggtgtgcaccggactgtccggtgcgactccggagcaacggctatctccgcgccaacggctctctgccgcgcatttaatgcgcgctctgcgcgcgcagaaggcaggcgcgcccatactggcacaccggacagcaaacagtacctgtccggtgtgcaccggacacccaggcgggcccacgagacagaagttccaacg

SEQ ID NO: 3708 - DNA, 282 bp, Zea mays
  Peptide Sequence Number=SeqID_45487
atggcagcagctcttcgtccttcggttcgactcggtcccaactgctggcctgcttcttgtgccgactacactgactcggactttactccagtttgcactaattcgcgattgcagggtgtttatgctcttccatctactgcaaaatccaattggaaggatatctactgcatctacttccaaaacaggttcaaaatggacctctacgtattaaagaaaggtcggacacaagatcttccaacaactgaagattttctcagattatcagcagcttttaggttgtag

SEQ ID NO: 3709 - DNA, 402 bp, Zea mays
  Peptide Sequence Number=SeqID_45488
atgggaggttgtgtgggaaaggtacgtcgtgatgatgaagaaaagcttgattttaaaggtggaaatgttcatattataacaagcaaagagggctgggaccagaagattgcaggagcaaatagagataagaaaactgtggtcgccattctgcaacaaccccatgtcggcgatctcctactcgttgtcgtggtcggtgaaattgtgcccatgccttttacatcgcctcacatgagtatacaaacaaatggaataaatgaaaaatgtgagcttaaaaaattagccaaaggcataaatgcatttcattggtccataccacaaccattctgtgataaaaagtacatcatacatgctaagacattgctttcgatgacatatttcttgaacaattccaagttaacatag

SEQ ID NO: 3710 - DNA, 192 bp, Zea mays
  Peptide Sequence Number=SeqID_45489
atggaaacaagtcctataatatctgttgaggcacaagtatgtactaggctgaagatgaagtatactacatttttcaagctccaacaagatcctgagctgtccacccaagctgtttgtttgatgccacccttccatggactttgggctgcccctccaatccttctgaaacttttctttgaatgcttctggtag

SEQ ID NO: 3711 - DNA, 1527 bp, Zea mays
  Peptide Sequence Number=SeqID_45490
atgcagaagcggaagctcgcccgtatctgcgacctcgtctcctcctccctgcttctccacctcgaacccgcgccgtcgccgccgcggcagctgacgcgggagggcgagcggcagctcctcctcgcgctctccacggtgaacaagacgatacggcgatgggaccaggaggaggatgagtgggcttgtgaattgtttcaggaaactctttctgattctggagaagttcatagttgctgcttactacctgaagcgcgtccatatgatggatttggttgcctggcaaatattgtctctatgctggttggtttccttgatttctgcagcgactatgtcaaacactcagctggcaacatcctcatttccgtatctagtaccctaattaagtttgaatccatttggattcagttcattgagcttgcctggggggctatacatgcagcatcaaaatgtgttcataacacttcacattctacaaccgactccaacagtgatgacagcactagttcaggcacaagaatcacaagcttcatgacagcacttagtgagcatcgtcttaataccagtcggcaaaccatgtccagtctctttcgagtattgcatgctatcctgaagttccttaaacagagtgacagtgacttgaaagacgacttcatttgtctatccattcatcaaattcataagatgccttggaatttgttccatcaattacatgctggaggacttgccagctgtgccaaggatagcagatttagcaccagtaatgattcagcacagtctagaattctgactggcagtcttctccagctgttgggctctttacttgaccaaagctacctgagagacacagacggacaagatatgtttgtgaaacttgtggatgtagttcccaagatagcatcgttgtccttaggaggacagcatgatggatccaaaagtctttatcagtacttaaagcacaaaattctggatgacatgctattcagcatcctcttacaacttttagatgctccactcgttttcctaaaaatagctaacttcgaaactaaggaacttgttggtgtaaaactgttctcaagcatttttgacccagttcaccttttccatctgctgctttttctgctgcactatgatcacatggtactcgttgattatctcatatctagggatgttggtgtgctttgtgctcagtatctattaaggtgtttgcgcttggtttcccagtcttggcatgcttttgttgatgattcagtttactcaacaaaaatagaaaagcttaactgtaaaaggcagaggatttctggggataaagatagcgacagagccagttcaagtaaccagtataagaatggttctggttgtgataaagaagtcgaggattcacggaagcttttcctcgatgctaaaaaatgtctttatttattaaagagaacattggaagatctgcaaaagaaggatttgttcccttacaaccccaagcctcttcttagaagcttggcccggttccaggagctgggtgagcaggggtga

SEQ ID NO: 3712 - DNA, 2352 bp, Zea mays
  Peptide Sequence Number=SeqID_45491
atggtactgatgatgctaccgtcattcggtggcgcggcggcagccagagccaccggcaccggggaagcgagcaactgcacgaggagctgcggcaacatcagcatcccatacccattcggcatcgagcccggctgctacctcgccgcctggttcaacctgacctgcgaccactcgtacgagccggcgaagctgttcctcggcgacggcacggtgcaggtgctggagatctccgtcgccaacggcacggtacgcatcaacagcacccgcttgctgtacacggtgggcggggtgagcaccacgagcgggacgtggggccggggcctcccgcccggcgggcccttcttcctgtcggagtcgaggagcagcgtcgcgttggtcggctgcggcgcgcaggtggaggtgcgagggggagtggacaacagcctggtcgcgtcctgcgccgccgtctgcccgctggacggcgacgggaggatagtggtcgatagcagcggtgcctgcgctggcgtcggctgctgccaggcgaacatcgtcctgggctacgatttctacagcatccggatcaacaagctcaacggctcggtctatgcgctgacggcctctgtgtacttcgtcgatcagggtttccgcaatgcccaggacatgatcagtgcagtttatggctacttccctgagtcgctcccggccacgctggagtgggtgaccagtaactacacatgccccacaccctatgagtactcacacgaccctcctcccgtcaatggcgaatgctccatggaacacagtgtttgcctagaaggaccttacaatgttgctgatcgtgggagtcggtgcggcggcggggttggttaccgaggcaacccttacgtcggggatggatgccaagatatcgacgaatgtacttctccaagcacctactcatgttatggcgactgcaagaatatcccaggagatttcatctgccagtgccctcatgggtactatggaaatgcttcgcttccaaatggatgccaagacataaacgagtgtgagtacccggaagcccactcctgctacggcgtctgcttgaacttccctggaactttccagtgccaatgccctagtggaacctatgggaactcttcccaaaaatggggatgtcttacaatcaagaacacaaccgcagtttctggtttaggcatcgggctaggagtctctggtggcacaattcttttgctcctaacattcggtagtcctttgataatccgaaaagccaaggagagaaaggcgaagaagacgagggagaaatatttcaggcagaaccatggtttactactgcagcagctgatatcgcacaaggcagacattggtgagaggatgatagtcacactgagggagctagagaaggccacggacaacttcgacagatcccgcatagtcggcggcggggggcacggcgtcgtgttcaaggggatcctaggcctccatgtcgtggctgtgaagaggtccaagatcgtggtgcagagagagatcgacgagttcgtgaacgaggtcgcggttctctcccaggtcaaccacaggaacgtagtgaggctcttgggatgctgtctcgagacagaggttccgcttcttgtctacgagttcatctccaacggaacgctctaccaccatctccatgtccaagggccggtgtcgctgagatggaacgaccgggcaaggatcgcgctacaggttgctaaggcactgtcctacctacattcagctacctccaagcccatatttcacagagatatcaagtcctccaatgtacttcttgacgacactctgaccgcaaaggtgtcggacttcggggcctccagatacatcccgatcgaccagactggggtgactacggcgattcagggcaccatcgggtatctggatcccatgtactactacacgggcagactgacagacaagagcgacgtcttcagctatggcgtgctcctcattgaactgcttaccaggaagaaaccgttcgcctaccgctccgatgccggcgacggtatcgtttcgtattttgtctcgctgctcgcacaaggcagactgttggagataatggatcctcaggtcatcgacgaagaggacggagagatccaggaagtggcagcgctcgcggcgatgtgtactaagctcaagggagaagaccggccgacgatgagggaagtagagatgacgcttgagaatctgctagttaagaagaaacatgttccatgcgatacatcgttaagagatgaagagattgtggctcgttggatgtcaaatgagcaagtctctactgaaacaagcagcagacagtacaccatggaagaggacacactcttgtccgggaggtag

SEQ ID NO: 3713 - DNA, 2142 bp, Zea mays
  Peptide Sequence Number=SeqID_45492
atggagacggagcacgcgcgcgcatgcaagcccccccggctcaccgcaagcacctgcacacttgacacagtcctgtgtgtccatcgctacttgcagcagcagctgcagctgcagcagcaggtaacgggtgatcctatcatgggcgacgacgtgcgtggcctgcgcgccgccgccgtgacgaccgccgccggcgtcgtgccggcgaagacgccggagcgcgcgcggctgcacgtggcgatgctggcgctgcagttcgggtacgccggcttccacgtggtgtcccggctggcgctcaacatgggcgtcagcaagctcgtcttccccgtctaccgcaacctcatcgcgctctgcctcctcgcgcccttcgcctacttcctagagaagaaggacaggcccgccatgacgcccgccttcctgctccagttcttcctgctggcgctgtgcgggatcaccgcgaaccagggcttctacctgctgggcctggacaacacgtcgccgacgttcgcgtcggcgatccagaactcggtcccggccatcaccttcgcgatggcggcggcgctgggcatcgagcgggtccgcctccgccgccgggacggcctcgccaaggcggccggcaccgtgctctgcgtcgcgggcgccaccgtcatcacgctcttcaagggccccgccgtcttcggcccggcgccctccgtggccgcagccgtgcccgtgcccatgcccgcgccgggcggcggcaacaacaacaacaacaacaagagctgggcgctggggtgcgtctacctcatgggccactgcctgtcgtggtccggctggctcgtgctgcaggcgcccgtgctcaagcgctacccggcgcgcctgtccgtcacctcctacacctgcttcttcggcctcctccagttcctcgccgtcgccgccgtcttcgagcgcgacgccgccgcctgggcgctcggctccggctccgagctcctcaccatcctctacgcggggctggtggcgtccggcgtggcgttcgcggtgcagacgtggtgcatcgaccgcggcggcccggtgttcgtggctgtctaccagcccgtgcagacgctcctcgtcgccgtcatggcgtcgctgctcctcggcgagcaattctacctcggcgggatcatgggggcagtgttcatcatcgctggactctacctggtgctgtggggcaagagccaggagagggcgctcgctgcaaagcaaaccgccgccgccgccgccggaagcgtctgcgacgacgacgcggctgcctcctgcctgaagcagccgctgctaccgccgccgccggcgacctcggaggccgtggagattgaagatgaagatgttgaagaatctgatgaagattctgaggagaggaatactgcatccctacctgaagaaggggaaatagggaaattcgaagatgaagaggacaatgatgaatcagaggaagaagagccaacgaatgatgatgtatatgaatttactgaaggaccaagaagcagaaaagctaataggatggaagaagctggtccaacaggctcttttttctggaagccggagattaccaccacctcggacatgcagcagatgttgaaaagtgtggttcagcacttcagctgtaggcatgaggtccggatagaggctgagaccctccataacttgtttttcaacataatgaagatcgccttcccagattcagacttcagcgaagctaagaacgcaatgtcattttcgagtcccggaggatctgcgagtggtggcgctgctgctcctgcagccccatcgtcgaagcacaccgcatcaggccataacttgtttatcatccgagcagtctgggattccactgtcctgttgacgggcatggcgtcaatctgtagtgccggcacatggccgatgggttccattctcgtcagagcacctgcaaacagttccagaatcccttcctactcatctatatcgactggagaagagaagcacaaacgccttcaacgacaggaaaggccaagctactcagtcaaacgccttcttttgcaacacaatgcacggttgccggtaggtgagctgaatcgtgtcgcagaccgtcgtgtaaccgttcgatccactgatggtatcgcgacttgttttctctgctgtattatatag

SEQ ID NO: 3714 - DNA, 567 bp, Zea mays
  Peptide Sequence Number=SeqID_45493
atggcagggtttggccgactttgtgtgactgcagtgactcgctacttcggtctccaagcctgtgaagaaactatgcgcttggtagatctggcacagactgacatcctctcgtcgcgggcggaccccatctcttcacgattaagaagaagagcgaaggagacggcgacattggagccggacattgaaaccggccaagataaacaagatagaaaaccccacctaatagtatgcgctgctggggaaggaaaggctatggagacgaacagagcagtatgcgagggagagtatgcgatgttggacgaacctgcacaagctgtggagatggacggagcagacgaggagacaggacgcacggtggtcgccggctctgcggtcgccagcgctgcagacggcgggcctttgagtgaccttttcagaagacggcggacgattcgtagtctcactggaactctccagattaagacaactgagaaggaactgtgtccgttgatgagcaatcgtacgcacatatttttttacgccaacgtggatgaacgaggacgcgcgtttgcgtcgcgctctgtatag

SEQ ID NO: 3715 - DNA, 672 bp, Zea mays
  Peptide Sequence Number=SeqID_45494
atgccaggaggaaacaccggatccgtcgctgctctcacagcgaccttccccacggaggcagcactgacgggaggagtcaatagcggcccgataagtgctaggccttccctcccctccagccgccgccgtccactgccgcgcgcgccaagactgaagccgccagggagagcaacagacggccgcccgccgacgacgtgcgcccgcgtcgcctctcccggcggctccattcgcggccgccaacgccacgcttgccgcgcccgcgcctccgaccgccaggaagcccgacggccgagagcgtctgcttgctcgccgccgcacgcgcgccgcgaggccgacgcgaccctcaccgccgccgtgccctccatggccggcgagcacgaccctcctcctcccctctcctattcccaggtatttcctcccttcacctcttcctccttggcacgcgccgcacctcttggtgctcgcggcgcagctgctccgctccgcgccggcgtcgcgcacactcccccggccgccccattccctccccaccccctcccagcagccgccgccgcataccctgcgggcgcggactcacgccaccggtggggggataccctcaccgccgcgagcgtcgtcgctgcccttgctgctgtggcggacggcgttccttgcccatgtaacgctttctag

SEQ ID NO: 3716 - DNA, 405 bp, Zea mays
  Peptide Sequence Number=SeqID_45495
atgtccgccgagacaactgcagacgcgcatcatacgaggggcgggagctctcacctgagacgggagggcgaggcagaggaggagcgaatcaggcgggccacggacgacctcatcgccaccgctcccgtctacccagtggtagttgaggaagtccctatggatctccatcaccttcatgtggagaacatagttgttctggaggacagctcagaggagtttctaccgaagcccaccccattggcagaatcactagcctttggagctagagcgtcatcttcagcaccaccagcactagtagtccaaacccgtgctcctagaggcgatgatccagatgactcgggtgacgataatgaagacgaagaagaagaagaggagaacgtcaacgaggaagccaatgataaatag

SEQ ID NO: 3717 - DNA, 243 bp, Zea mays
  Peptide Sequence Number=SeqID_45496
atggagctcgacacaatcacaaacaacatggttcatggcccgatcgatggccacgaaaacaagctggtcgtcatgaagaaggatgtgcacatgcatgggacctgggacgggaggcacgacggaggtaggagtcccctgaggcgaaaccagaggggcagaggatggtgggaccccgtagaaggatgtcaggggctgggaaggagagcgcaaccagctggggaaggccgacgcgcacgccagtag

SEQ ID NO: 3718 - DNA, 330 bp, Zea mays
  Peptide Sequence Number=SeqID_45497
atgggaaggagtccggcttggaggtggtggtcgaggagggtgctggagctcacatgttatggctgtggaggtgggaggccgcccacgggagggaagagactcaaccctaaccctaatggaccggcaacccaacagtggtgccggcccacatacactcacacacacagtctaacaatttggatgagcattgtctctcttaatgaacctttcaaagaagatgaggaggtgatattatgcaatagagccgtgtctcggacttgcaccttcgaagactatcattatgatatttctatatttgccaagctacaagattgcaagaatgataagtga

SEQ ID NO: 3719 - DNA, 390 bp, Zea mays
  Peptide Sequence Number=SeqID_45498
atggcggattcggccgggaaggccacgatagcgacagatctagccatgaagacggcgatccggccaaataatgacggatctggctgggaaggccacaccaatggtggatctggctgggaaggccacactaatgaggagagcacgacgaccaaggcatcgtcggtcagagcaggtgcaaacaggcatgacccggtggtgggggcgccggatctggggaggggtaaagaggtcatgagggccatggctggtggcgcgatggctggggatagagagcctagccgcggcgaccatggccgaggtcgcacccgcggtcgtgatgcccagggcgtcggagaagacagcgacactcgagttggagagttgtccgtcttgcagagagttctcgcttaa

SEQ ID NO: 3720 - DNA, 564 bp, Zea mays
  Peptide Sequence Number=SeqID_45499
atggctgtgatgcctctcttccaccacccagcgcgcaagcacggtggcgcagggccatccgcaacggaccatcgccggaggaaaccaatccgagtcaacgttgcaccaagcaccctaacccgaggttctacacataactggatcgatagcgaatcggaggacgacaatcttactagcggggacaactcacccaggtacggtggcgatgaggtcgtccgtggcccgcctgattcgctcctcctctgcctcgccctcccgtctcagacatttttgtatggtatgcttaccctttataattctcttgtgtattggcgtgctgacaactcgtcgtcaatcttgctgaaaagtggaaatgcattcttcggcaatgccacacccagtgatcagaggcacattgagaagccttttaaagtgaaggaggcagaacctgtgaatgtgacaaaaccttcaccacacaagctgctggttctaggaggaagtggtttcgttggatcacacgtttgcaaagaggctttggacaaaggtttagttgtctctagtcttaataggagaactgcgcattag

SEQ ID NO: 3721 - DNA, 201 bp, Zea mays
  Peptide Sequence Number=SeqID_45500
atggccattggaagtgtgctgtcgcatggtgcaccggacagtccgtatcagagatgcgactatgaggtatcaccattttttgaagctaaggctgcctccaacggagcagccaaaaggagtagccaaacagagcagccaaattccatggcaggtgagagaaaagctattatggctgggcaggaactgagcaggcatctctga

(The sequence listing continues in the following parts.)

1. A recombinant DNA construct comprising a polynucleotide encoding a protein that has an amino acid sequence having at least 95% identity over at least 95% of the length of a reference sequence selected from the group consisting of SEQ ID NO: 41780-83558 when said amino acid sequence is aligned with said reference sequence.

2. (canceled)

3. A recombinant DNA construct comprising a promoter that is functional in a plant cell and that is operably linked to a polynucleotide that:
(a) encodes a protein having an amino acid sequence having at least 95% identity over at least 95% of the length of a reference sequence selected from the group consisting of SEQ ID NO: 41780-83558, when said amino acid sequence is aligned to said reference sequence; or
(b) is transcribed into an RNA molecule that suppresses the level of an endogenous protein that has an amino acid sequence that is at least 95% identical over at least 95% of the length of a reference sequence of SEQ ID NO: 41780-83558, when said amino acid sequence is aligned to said reference sequence; and
wherein said construct is stably integrated into a chromosome in a plant cell nucleus.

4. A transgenic plant comprising the recombinant DNA construct of claim 3 wherein said DNA construct provides for an enhanced trait as compared to control plants; and wherein said enhanced trait is enhanced water use efficiency, enhanced cold tolerance, increased yield, enhanced nitrogen use efficiency, enhanced seed protein or enhanced seed oil.

5. The plant of claim 4 further comprising DNA expressing a protein that provides tolerance from exposure to an herbicide comprising an agent applied at levels that are lethal to a wild type of said plant cell nucleus.

6. The plant of claim 5 wherein the agent of said herbicide is a glyphosate, dicamba, or glufosinate compound.

7. (canceled)

8. (canceled)

9. A transgenic seed comprising the recombinant DNA construct of claim 3.

10. The transgenic seed of claim 9 from a corn, soybean, cotton, canola, alfalfa, wheat, rice, sugarcane, or sugar beet plant.

11. A transgenic pollen grain comprising a haploid derivative of a plant cell nucleus having a chromosome comprising the recombinant DNA construct of claim 3.

12. A method for manufacturing non-natural, transgenic seed that can be used to produce a crop of transgenic plants with an enhanced trait resulting from expression of a stably-integrated, recombinant DNA construct of claim 3, said method comprising:
(a) screening a population of plants for said enhanced trait and said recombinant DNA, wherein individual plants in said population exhibit said trait at a level less than, essentially the same as or greater than the level that said trait is exhibited in control plants which do not contain said recombinant DNA, wherein said enhanced trait is selected from the group of enhanced traits consisting of enhanced water use efficiency, enhanced cold tolerance, increased yield, enhanced nitrogen use efficiency, enhanced seed protein and enhanced seed oil;
(b) selecting from said population one or more plants that exhibit said trait at a level greater than the level that said trait is exhibited in control plants, and
(c) collecting seed from selected plant from step b.

13. The method of claim 12 wherein said method for manufacturing said transgenic seed further comprises:
(a) verifying that said recombinant DNA is stably integrated in said selected plants, and
(b) analyzing tissue of said selected plant to determine the expression or suppression of a protein having the function of a protein having an amino acid sequence selected from the group consisting of one of SEQ ID NOs:41780-83558.

14. The method of claim 13 wherein said seed is corn, soybean, cotton, canola, alfalfa, wheat, rice, sugarcane, or sugar beet seed.

15. (canceled)

16. (canceled)
